United States Patent Application Publication US 2017/0114356 A1 - sequence listing, part 26

SEQ ID NO: 33983 - DNA, 3403 bp, Zea Mays
atttttcaccagcgccaccacggtaaagtgcacgctgttcctgcgggacattactacaaaaccaatcccccgtcttgcgaggtcgcgagtctctccaactccgtccctctggcctcagcacaacgccagaccgcctgcctgtgcttgcagccaggccggccagctgcctgcctgcctgttgtcgtctgcggcgcgacggcggccgcccggtcgaccgcccgcattgggatccccagagcagcgcttggcataggggaatgtcccgggtcagccaccgtcgcctctgcgctgcgaaagccccgcatttacttgccacctagaagggggcacccctcgcgagacccagcgccagacagagccagcaatggctgctgctgctgctcctcctcctcctatatagcggggcccgtgccgagcgctcgatccagttcttctgatctctgacttctgagcgaggagtggacgagtggtgtgccgtcgtccggttcccgttggtttggcgatgaggcgcgctcgcggtcgccgcgggctgctgcttctcctcggcgtggcgctctcggcggctgcgctgctccgtggctgcgcggggcagcaaggggaggacggctcggacgcccctgcggcggcggcggcggagacggcccccatggaggagaaggagcgcagggcgctgtacgccgccatcgagagcttcgtcggcaaggggtggaacggctccgggctctacccagacccctgcggctggtctcccatccaggcgcgtccctgcccttcctgcgctttccctttcgcatcgatctatgttaccgtgctgttcgattttctggcccgcgtatgttcgttcatcatgttcgttcttcagacgcgcgaagctttcctctttggttttttcggctttgcccgtcctcgtcacacgccctttctcggtgctcccctgctgcctgctttgagctccaatccaaaaaccgtttgcgagcgaaaggaggagcaagtcggtagcctccgaaatgaaattggtgccctgtttggggatgcaggacgcacgccaagtcgccaccaaatctcctgctgtaatttcccgtgttaaaaccttcctcgtctcgcttccagaatttctggccttccggtagcctctgctgtttttgtcttgtgttcgtccttcgtcgcactcgtgccctgctcctcaactgttgcttcgagattgtggcactgttttgctgtgcgccgctgcacattcagttcactgttggacgagacctctgcttgatccccttgtgtcttcgcatctcagccttttgctcgatatggtaggaggatctgatctcttgggcaggaactttccactcacatgaaaagaacctcccatgatttgaaatggcatgctccgcccaagatttttctcatacagtactactactctctagtatagattttagtagtaccttgacatcttcttccttttgctcgcgcccgagaaggaatcagtcctactactccataggagtttttgctctaacaattactggaatttaccgcatatttatcttccttcacacggtacactggaatttcattctggttgttacagtaccagtaaagttaagaaggggccaaatttgtactaggtgcacctttaagaaatgtcgccatcttggatcatcctcatccatgtctgttattactgctagtagttactgttgagcttgtgtttactttccgagtaggacactctcagattgcagcgtgcttgcctgcctgttaaaattaaggggattcaatttcagtggattgagcagatgtggttcttggatgccaaaaacctgtgcagggggtgtcatgtgatctcttcaatggcctgtggtacccaacagtgatgagcattggcccagtccttgacaactcgctgcagtgcggccccgacgccaagttcagcgcccagctgttcgacctgaggcgcctccggacgctgtctttctacagctgcttcccggcgagcaaccccacggccatcccgaccggcagctgggagaagctggcggggacgctggagacgctggagttccgcaccaacccgggcctgaacggcgccatcccggcgtccctcggccgcctggccagcctgcagtcgctggtgctcgtggagaacaacctgacggggcccgtgcccgcggagctgggcgcgctgtcgaggctgagacggctggtgctgtccgggaacgggctgtcggggccgatcccggtgacactcggtggcctcacggggctcctgaagatggacctgagcagcaacctgctgcagggcagcatcccgccggagctcgcggggctcaggagcctcacgctgctggacctcaggaacaacagcctcaccggcgggctgccccagttcgtgcagggcatggcgtcgctgcaggacctgctgctctcgaacaacccgctgggcggcggcctgccgcagtccggctggggggcgctggcgggcctggccacgctggacctgtccaacgtcggcctcgtgggcgccataccggggtccatggcggccctgacggggctccggttcctggcgctggaccacaaccgcctgacgggggccgtgccgcccgagctcgcccggctgcccagcatcggcgcgctgtacctgaacggcaacaacctgacggggacgctggagttctcggccgggttctaccagcgcatggggcggcggttcgcgtcgtgggacaaccccgggctgtgctacaacgtcgcggccgtggacgcggcccacgcgccgtcgggcgtggtggtgtgcaaggacctgcaggagcccagcgtgggcggcggcgcgcgggacggggacggggacggggacgcggaggaggacgggacgaagcccgaggcgggctccagcctcgtggcctcctcgtcgtccggcatgccggttggcagtgtcggtgggctccggtacctggtggtggttcggggaatggcggctgcggttcttgggttggtgtccctcctacaatagcaagcaagcaggttcagaagaagaacacggagaaacttgaagtaatgctaggtaggttagcacgaagtagtttctgcgcgttctctgtgatcttttggcatttgtttttggctgctggtggcttaccatcgtcagatggtgacggaggaaggagggaacatggatctggatggtgtgagccacagattacattacagtagtagagtaaactatgagagttcttgtggactgaaggtgtgtagtggtggatagggtagcttctccggggttcttttgtgtgtaattagcctgtgtcgccctgtggtgtcatgttacaacagcaagtggaaatctaagctggttcgtccgttgttggagaatcagaaaaaaaaaaattgtcgtgcttcattcaca

SEQ ID NO: 33984 - DNA, 1997 bp, Zea Mays
caaagtcgcaacgcgccccacgaggccacgacgcacgagcgcgcgctccgggcgttcgggaactcgaacgcgccggtgggagaggagaaccgcaccgcggcgcagacatgggcgagtactgcccctccccgcagggggactccgcgctggcggcgccgcccttgacgctcccctcctcgtccccagcgacggcggttaggccaagctacgggagctgcgaccgcagctacgtgaagcaggtcttcgacaacctccacggcagcatctccgtagacccgttggccctgcaatttgttgatacagaggagtttcagaggttgcgggatttgaaacagcttggtcttacatacctcgtctatcctggagcggttcacacacgctttgaacactcattaggtgtctattcgttggctggaaaggcaataaataatcttaaaacatatcagggagtagagcttggaattgatcctgtcgacatgcagactgtaaaacttgcaggtctcttgcatgatattggacatggacccttcagtcatttgtttgagcatgagtttcttcctcgagttgatcctggctcatcctggtcccatgaaaagatgtcagtgctccttttggacagtattgttgacaaacatgcaatagatattgaaaatgattacctcaaaatggtcaaggacatgataactgccagctctgatcctgccagcacaacaagtgcaaaggagaaacattttctttatgacattgtcgctaatggtcgcaatggtatagatgttgacaagtttgactacattggccgtgactgcagagcatgtggtcttggatgtaattttcagtattggaggttgatggaaggcatgcgagtgatgggtgatgaaatttgctaccctgccaaagattacttgagcatccataaattgttttcaacacgtgctgatctgcaccgaacagtctacacccatgccaaagtgaaggctgttgaactcatgctcgtggatgcccttgttgaggctaatgattacttggggatatcattgcatgcacatgatccagaagatttttggaagttggatgacacaatcattaaaacaattgagactgctcctaacaatgaactgaagaaagcaaaagaaatcattcaacgtattcgccgaagagaactctacaagttttgcaaccagtattctgttccaaaggacaagctggagcatttcaaaaatattactgcacaggacatagtttgttcacagaaatcttctgaggtgctgctgaaggaagaggatgttgcagtatgcaatgttaagatagatcttactcgtggaaaatataaccccctcgaaaggtttttgatattgaatgctactttatctcacttattgatttgtctgaaatatcaaaattctaattgatcacattccttttgtgtatgtaacaaccaatcaccagcatcaagttctttatggattttggttgcgatgagaagttcccgatcatagatgatagagtcagccacttgctacctgcgtacaatgaggatagaattgtgagggtctatgccaagaaccctgagttggttgatgtggtgtcagaagccttcgagaatctccaaatgagaatgtatggtgagaagactcaagtgcacgagacgcccaagaaaaagaagattaggtccaactagccggttgtatgttgtcaaatcagtctttaaatagcaatacaattacgtcacatgaaaatagcttgacaaacaagaagctgtatagataaagcatcccagaataaacaggttttagatggtagtctccactggtaaggtatagatatttagtgtacatctgaagtacaaacaacactgcatgaagtataaaaactcacgttgacgtacgtggtgcgatgttgcatgtgcgtatagattggatagtttgccaaatacattttttatggcgaggctggacttttaaacacttaatacacatgtatcgcctttttaagcgatc

SEQ ID NO: 33985 - DNA, 2113 bp, Zea Mays
cctccgaaaagcacaacgccacaacccgctcactcgcaaagtcgcaacgcgccccacgaggccacgacgcacgagcgcgcgctccgggcgttcgggaactcgaacgcgccggtgggagaggagaaccgcaccgcggcgcagacatgggcgagtactgcccctccccgcagggggactccgcgctggcggcgccgcccttgacgctcccctcctcgtccccagcgacggcggttaggccaagctacgggagctgcgaccgcagctacgtgaagcaggtcttcgacaacctccacggcagcatctccgtagacccgttggccctgcaatttgttgatacagaggagtttcagaggttgcgggatttgaaacagcttggtcttacatacctcgtctatcctggagcggttcacacacgctttgaacactcattaggtgtctattcgttggctggaaaggcaataaataatcttaaaacatatcagggagtagagcttggaattgatcctgtcgacatgcagactgtaaaacttgcaggtcccatgaaaagatgtcagtgctccttttggacagtattgttgacaaacatgcaatagatattgaaaatgattacctcaaaatggtcaaggacatgataactgccagctctgatcctgccagcacaacaagtgcaaaggagaaacattttctttatgacattgtcgctaatggtcgcaatggtatagatgttgacaagtttgactacattggccgtgactgcagagcatgtggtcttggatgtaattttcagtattggaggttgatggaaggcatgcgagtgatgggtgatgaaatttgctaccctgccaaagattacttgagcatccataaattgttttcaacacgtgctgatctgcaccgaacagtctacacccatgccaaagtgaaggctgttgaactcatgctcgtggatgcccttgttgaggctaatgattacttggggatatcattgcatgcacatgatccagaagatttttggaaggtttggtgtctgttaatgtctttatattcatagtttttcagagtatcttacattccctgaaattacagttggatgacacaatcattaaaacaattgagactgctcctaacaatgaactgaagaaagcaaaagaaatcattcaacgtattcgccgaagagaactctacaagttttgcaaccagtattctgttccaaaggacaagctggagcatttcaaaaatattactgcacaggacatagtttgttcacaggtttgcagtttttccccattttattcagtgtggccgaaataatctggcctctctgaaggattcacaccttttttaatgttgactcaactgtcctcagaaatcttctgaggtgctgctgaaggaagaggatgttgcagtatgcaatgttaagatagatcttactcgtggaaaatataaccccctcgaaaggtttttgatattgaatgctactttatctcacttattgatttgtctgaaatatcaaaattctaattgatcacattccttttgtgtatgtaacaaccaatcaccagcatcaagttctttatggattttggttgcgatgagaagttcccgatcatagatgatagagtcagccacttgctacctgcgtacaatgaggatagaattgtgagggtctatgccaagaaccctgagttggttgatgtggtgtcagaagccttcgagaatctccaaatgagaatgtatggtgagaagactcaagtgcacgagacgcccaagaaaaagaagattaggtccaactagccggttgtatgttgtcaaatcagtctttaaatagcaatacaattacgtcacatgaaaatagcttgacaaacaagaagctgtatagataaagcatcccagaataaacaggttttagatggtagtctccactggtaaggtatagatatttagtgtacatctgaagtacaaacaacactgcatgaagtataaaaactcacgttgacgtacgtggtgcgatgttgcatgtgcgtatagattggatagtttgccaaatacattttttatggcgaggctggacttttaaacacttaatacacatgtatcgcctttttaagcgatc

SEQ ID NO: 33986 - DNA, 1195 bp, Zea Mays
cgctccgggcgttcgggaactcgaacgcgccggtgggagaggagaaccgcaccgcggcgcagacatgggcgagtactgcccctccccgcagggggactccgcgctggcggcgccgcccttgacgctcccctcctcgtccccagcgacggcggttaggccaagctacgggagctgcgaccgcagctacgtgaagcaggtcttcgacaacctccacggcagcatctccgtagacccgttggccctgcaatttgttgatacagaggagtttcagaggttgcgggatttgaaacagcttggtcttacatacctcgtctatcctggagcggttcacacacgctttgaacactcattaggtgtctattcgttggctggaaaggcaataaataatcttaaaacatatcagggagtagagcttggaattgatcctgtcgacatgcagactgtaaaacttgcaggtctcttgcatgatattggacatggacccttcagtcatttgtttgagcatgagtttcttcctcgagttgatcctggctcatcctggtcccatgaaaagatgtcagtgctccttttggacagtattgttgacaaacatgcaatagatattgaaaatgattacctcaaaatggtcaaggacatgataactgccagctctgatcctgccagcacaacaagtgcaaaggagaaacattttctttatgacattgtcgctaatggtcgcaatggtatagatgttgacaagtttgactacattggccgtgactgcagagcatgtggtcttggatgtaattttcagtattggaggttgatggaaggcatgcgagtgatgggtgatgaaatttgctaccctgccaaagattacttgagcatccataaattgttttcaacacgtgctgatctgcaccgaacagtctacacccatgccaaagtgaaggctgttgaactcatgctcgtggatgcccttgttgaggctaatgattacttggggatatcattgcatgcacatgatccagaagatttttggaagttggatgacacaatcattaaaacaattgagactgctcctaacaatgaactgaagaaagcaaaagaaatcattcaacgtattcgccgaagagaactctacaagtattctgttccaaaggacaagctggagcatttcaaaaatattactgcacaggacatagtttgttcacag

SEQ ID NO: 33987 - DNA, 2263 bp, Zea Mays
actgtttcatcttcttgttctttttttgggattcggtggcgagaagaaacccccgggttcgatttcgccaagaacagcgtttgcaagaggaattctttcttcgatcgcctgaactagatgtttactactaaattgtctctttggcgaatcgcctgggcttgaatatgctgtgactgactgcccctgaactaatcgcctgaactagttgtgactgcctgccggttgcgaatcgaagcgtaaacatgacgacgctgtcgtccggcgtcctcctgaagctcctggacggcatgaagagcggcgccgccaagcccgtgggcgagcaccggacggcggtcctgcaggtgacggacatcgtgccagcggagctggacgagaaggacctcttccccaagcacggcaagttctacgtcaaggtctccgatgcgtcgcactccatctacgccacgctcccgctggcgcaggcagacctcgtgctctccaacaagctccacctcggccagttcgtccacgtggaccgccttgacccggcctcccccgtccccgtcatcgttggcgccaggccgctccctggccgccacccgctcgtcgtcggcacgcccgacccggcagctagggccaagcccgccgcgccgcgcagggggtcctggggccccgagcagaatgccgccatcaagcctaccacgctcaacttcgacgccgagaggatgacgccagtcaaggagcggccggccttgtcgactccggtcaaggaccgcgctggtggcgcgacgcctgccagggagcgcggggctgcggcgacgcctggtagggagcggaccgccgtggcgtcgccggcgctgagctctgcgtcgttgaggaagagcagcagcgtgctgcccaggctgaccaggagcaagagctttgtcgcggacagggatcagcagcatcctaggatccccaagagcccattccccactgagaagagctcggtgagctgcacagcctcgagggcgacgaggagggtggccaaggaggaagagccctcctcgcctccttctgatgatgagctcggaagctcggccacatccaccaagaagcgatcggcgacagctgctcgcgtgccggtgccggggaagctcagtctactcgggaaggacgcaatggagcagagagagcaggcgcagaaggttgccctggaggcactgcgcaacgcatcagccacggacaacgtggctaggatctacaagttgttctcggaagtgagcaagacggcgaggccggaagcgccggccacctgttttgacagcttcctcagctttcaccaagaggccgtgcaggccgtcaccgacattgaggcgatccaggcggccacctcgatggccgcggccgtggcgagtgacgagcagcagctcgaagatgcgccgccggtcctgcaggagatagcacagaacaggacggtggtgcgtcggagaggcatcggcttggggagcgtgtccaagtcagtgtcgttcgcgcccggcacgttggacccgaagcaggacgatggaggcggcaaggccatccggagctcgagtgccagcaggaagtgcctcgccacggacaagatcggcgaagacggtggcgacgagaagagatcatcttcttctggtccttcctctgccaccaccaccactgcgcactctgctctgggctcctcgctgaagctggctaagaagatacaggccgaagcagggagctggttcatggacttcttggaggccgcgctggagaccgggctgaagaagagcaaggcgtcttccatgggggacgggcggaagcaaagcagctgctgttgcccgcagtcgttgatgctgcgggtgatcaactgggtggagatggagcagagcagcggcgacagcagcggcaggaagactgcccacccaagagctgcggccgttgcgcggaagctcagaatcaaggccaaaaacccctcctgatgcgctgctgccctctgattcttgtgagaagctagtttgtctctgattcttgtgagaatgtacccagatagaatccgtagaataagaaagtgattgcctccattgttcttgtcacggcatagcagattgtttcaagtgttcttgaagtaggatgacctgttcccttatcactaatcttaaacagcactacagcagcagaacaatggaggtgttgtaccgtagttactgttgaataattagacaaattccagtttaaattccgaatataaataatcatgacaaaatcagaagaactgaaataacaagcc

SEQ ID NO: 33988 - DNA, 2243 bp, Zea Mays
ctcttctttcttctcgcctcgcgctcctcccttcctcgtaggttaccgttggtgcgagtgcaacgcaaccccaccccagctgctaaacccgagaccgaacctcgtatcgtccagcttaaccgcacccacctttcgcgactgggatttttctcgagatcgatcgatcgctttccatcagagagcagcatcaccttcttgccttgcccacgccccagcgtaaacatgacgacgctgtcgtccggcgtcctcctgaagctcctggacggcatgaagagcggcgccgccaagcccgtgggcgagcaccggacggcggtcctgcaggtgacggacatcgtgccagcggagctggacgagaaggacctcttccccaagcacggcaagttctacgtcaaggtctccgatgcgtcgcactccatctacgccacgctcccgctggcgcaggcagacctcgtgctctccaacaagctccacctcggccagttcgtccacgtggaccgccttgacccggcctcccccgtccccgtcatcgttggcgccaggccgctccctggccgccacccgctcgtcgtcggcacgcccgacccggcagctagggccaagcccgccgcgccgcgcagggggtcctggggccccgagcagaatgccgccatcaagcctaccacgctcaacttcgacgccgagaggatgacgccagtcaaggagcggccggccttgtcgactccggtcaaggaccgcgctggtggcgcgacgcctgccagggagcgcggggctgcggcgacgcctggtagggagcggaccgccgtggcgtcgccggcgctgagctctgcgtcgttgaggaagagcagcagcgtgctgcccaggctgaccaggagcaagagctttgtcgcggacagggatcagcagcatcctaggatccccaagagcccattccccactgagaagagctcggtgagctgcacagcctcgagggcgacgaggagggtggccaaggaggaagagccctcctcgcctccttctgatgatgagctcggaagctcggccacatccaccaagaagcgatcggcgacagctgctcgcgtgccggtgccggggaagctcagtctactcgggaaggacgcaatggagcagagagagcaggcgcagaaggttgccctggaggcactgcgcaacgcatcagccacggacaacgtggctaggatctacaagttgttctcggaagtgagcaagacggcgaggccggaagcgccggccacctgttttgacagcttcctcagctttcaccaagaggccgtgcaggccgtcaccgacattgaggcgatccaggcggccacctcgatggccgcggccgtggcgagtgacgagcagcagctcgaagatgcgccgccggtcctgcaggagatagcacagaacaggacggtggtgcgtcggagaggcatcggcttggggagcgtgtccaagtcagtgtcgttcgcgcccggcacgttggacccgaagcaggacgatggaggcggcaaggccatccggagctcgagtgccagcaggaagtgcctcgccacggacaagatcggcgaagacggtggcgacgagaagagatcatcttcttctggtccttcctctgccaccaccaccactgcgcactctgctctgggctcctcgctgaagctggctaagaagatacaggccgaagcagggagctggttcatggacttcttggaggccgcgctggagaccgggctgaagaagagcaaggcgtcttccatgggggacgggcggaagcaaagcagctgctgttgcccgcagtcgttgatgctgcgggtgatcaactgggtggagatggagcagagcagcggcgacagcagcggcaggaagactgcccacccaagagctgcggccgttgcgcggaagctcagaatcaaggccaaaaacccctcctgatgcgctgctgccctctgattcttgtgagaagctagtttgtctctgattcttgtgagaatgtacccagatagaatccgtagaataagaaagtgattgcctccattgttcttgtcacggcatagcagattgtttcaagtgttcttgaagtaggatgacctgttcccttatcactaatcttaaacagcactacagcagcagaacaatggaggtgttgtaccgtagttactgttgaataattagacaaattccagtttaaattccgaatataaataatcatgacaaaatcagaagaactgaaataacaagcc

SEQ ID NO: 33989 - DNA, 1574 bp, Zea Mays
caacgttccaaatgtcacgtgatcttcttttccccctttcccatcccgcctcctcttctttcttctcgcctcgcgctcctcccttcctcgtaggttaccgttggtgcgagtgcaacgcaaccccaccccagctgctaaacccgagaccgaacctcgtatcgtccagcttaaccgcacccacctttcgcgactgggatttttctcgagatcgatcgatcgctttccatcagagagcagcatcaccttcttgccttgcccacgccccaggagaagagctcggtgagctgcacagcctcgagggcgacgaggagggtggccaaggaggaagagccctcctcgcctccttctgatgatgagctcggaagctcggccacatccaccaagaagcgatcggcgacagctgctcgcgtgccggtgccggggaagctcagtctactcgggaaggacgcaatggagcagagagagcaggcgcagaaggttgccctggaggcactgcgcaacgcatcagccacggacaacgtggctaggatctacaagttgttctcggaagtgagcaagacggcgaggccggaagcgccggccacctgttttgacagcttcctcagctttcaccaagaggccgtgcaggccgtcaccgacattgaggcgatccaggcggccacctcgatggccgcggccgtggcgagtgacgagcagcagctcgaagatgcgccgccggtcctgcaggagatagcacagaacaggacggtggtgcgtcggagaggcatcggcttggggagcgtgtccaagtcagtgtcgttcgcgcccggcacgttggacccgaagcaggacgatggaggcggcaaggccatccggagctcgagtgccagcaggaagtgcctcgccacggacaagatcggcgaagacggtggcgacgagaagagatcatcttcttctggtccttcctctgccaccaccaccactgcgcactctgctctgggctcctcgctgaagctggctaagaagatacaggccgaagcagggagctggttcatggacttcttggaggccgcgctggagaccgggctgaagaagagcaaggcgtcttccatgggggacgggcggaagcaaagcagctgctgttgcccgcagtcgttgatgctgcgggtgatcaactgggtggagatggagcagagcagcggcgacagcagcggcaggaagactgcccacccaagagctgcggccgttgcgcggaagctcagaatcaaggccaaaaacccctcctgatgcgctgctgccctctgattcttgtgagaagctagtttgtctctgattcttgtgagaatgtacccagatagaatccgtagaataagaaagtgattgcctccattgttcttgtcacggcatagcagattgtttcaagtgttcttgaagtaggatgacctgttcccttatcactaatcttaaacagcactacagcagcagaacaatggaggtgttgtaccgtagttactgttgaataattagacaaattccagtttaaattccgaatataaataatcatgacaaaatcagaagaactgaaataacaagcc

SEQ ID NO: 33990 - DNA, 1226 bp, Zea Mays
caaagcacagcagtgccacggagccatctcccccggcctctatctctatctctctcgtcttgtcttggcctccttgccttctcccccctccgtgccgtggccagtgggtgctgttgcaagttgcaacttgtccctcccaacccaaggcagcaagcaaagcacagcagtgctgttgcttcacgcccggcaggagcagcgacgagccgacgagaacagccaaggagagatctgcagaccggtcggtcgatcgagatgaagagccggaggctgcacatgaagggcctctgcctcaagctctcctccctcatccctcccgccgccgccaccacgcacgcctccctcctctccgacgccgcgtcggcggcggtgtcctccaatcccggcaacaagcaggacgcggtgacgcagctggaccagctggacagcgcggcggcgtacatcaagcagctcaaggagcggatcgaggcgctgaagcagcggaaggcgggctgctgcaacggcggcggcgcggccacggaggctgcaacggcggcggccgggtccaccggcggcggcggaggcgtgcgcatgccggtcatcgaggtgcggtgccaggacgggacgctggacgtggtgctcatcagcgaggccgccaggcccttcaagctgcacgaggtcatcaccgtgctggagcaggagggcgccgaggtggtcagcgccagcttctccgtcatcggggacaagatattctacaccgtccactcgcaggcgctcagccccaggatcggcgtcgacgccgccagggtctcccagaggctgcacgcgctgctgcttgctccgacgatcctcgtctgagctgagagagacctccagaccacggcctatgcaaccaccgtgctaatggcgtagtagtactctagtatagtactagtactgtatgagttggtagtcaaagctgcagcctgcagcagagagcggtgcagtagcggggaactataaaccgccggcgcattcttgctggtttctttgcagttgtgcatatttaggagcgagcaaagtaaacacaggctgcctttttgtttttgtttttgtctctcccacctcttcgaaccagtagactactactgctactacttgtgtctatcagtctatgctcggatccagtgttaattgttttaccagaaataactacagttttgcttacattggtgttaaaaagggtgtttggtttgaggaatcacttcaca

SEQ ID NO: 33991 - DNA, 1264 bp, Zea Mays
gtgggttcttgccactgttactggcttcttatatctagaccagtagccgccacttctgcctctttttataccagtcccggtgctgcggaacacacagagcgaggtatctagagacagagagggctgtgtggagagagagagagagagagatcgatggagatgagagcgaagaagagcagcagaagcagcacgagcaacaccagcggcagcacgacgaccacggcggtggagaggaaggagatcgagaggaggaggaggcagcagatgaagagcctctgcgccaagctcgcctccctcatcccgaaagaacactactcctccaaggatgctatgacccagctgggtagcctagacgaggcagccacgtacataaagagactcaaggagagggtggaggagctgcggcacaagagcgcctctgcacggctcttggccgctggcagtggcacgagacgaggcggaggaggaggaggcgcctccacatcgtcggcagcgacgaccacggcgagcggtggcgcaggatcatctgaagaagccggccggcgggaggacgacatgccgccggcggtggtagaggttcggcagcacaatgacgggtcaagcctggacgtggtgctcatcagcagcgcggcgcgacccttcaagctgcacgaggtggtcaccgtgctggaggaagaaggcgccgagaccgtcaacgccaacctctccgtcgccggcaccaaaatcttctacaccatccactgcaaggccttttgcccaagaatcggtatagatgtttcaagagtttctgaaagattaagagcattgggatgatactagactgatatacatattgctaattatatatgaccaaggcgcatatccttttttatgctgtctcattctttactgtgcgaaaagtctccgaggtccattcgttaccaaaagttataatacatgatagaaatttttttttttgcaaacacaactgtagattgttacgttgtaagcaaggttgctacagtttgtagtatatgaatatttcgatcgataaaataggaataaaacaaaatcaacttaacctttcaaatggaaaggagagcatgcagattgcccccgtgtgatgatcatatgagcgccggaccgccggtaccaccacatgaaaacatatccggtgtatatgactctttggtgcatatatagtgtacataaactagcaaagttgacaaaaaattctgaaaaaaattatatatattgtttccatcttactccaattatatataaa

SEQ ID NO: 33992 - DNA, 3236 bp, Zea Mays
cgtcatcatctccgccgcgcctgcgccttccaacccacaccactcttcccctccccgtccctttcaccaccaaggttcctccatcctccgcggtggctgaccaattccaccattcggctccacgtttattttctaaataactgctactccggattccatacttcgaattgatcccgtcctcacgcggcagcacctatcccccgcgggtcgcatcgagtccaccaccgctggcgtcggttccttccgcgcaattccaccggcaaaagcagagtatactaccgactagagaagagtttggagtttggacccgctgcaccccgaagtcccgaaccctacgctgggggaagctctcacgtcgcgcccgcccatggaccgcctcgccgacggccttgccgcggcatccctttccgacccagcggaccagagcgccgccaccgctggtttgcctagcgccgattacctcctcagcgtcatgcgcgccgtagagggcgccgacgccaccatccgcacccagttggaagagaatagccgtctcaaggaagaattgatgaggaaaacacaacagctacagaggatgagggaagatgctacatcccaaagttctttcagtggactaggtcaagagcgcaattctgtttctaataaaatggatggctctagctcttcagtaaatcctcaaagtaccttgatccatcctcagaatggatgttgtgagagtagagagcatctgattgatgaaagctcaaaacaaaaataccttgacagtccccaggcaaatggagcatttaaaagatcattaggcgaacaaactgctgttgatagtggtggcccatcacaattctctactccctcatctcggtcccattctccaaatagacatagaaaagatggagattatgattctagattattaccagtttcagagatgaactcgaacatatcctggaagcaggaccttactgttaaggtcaaagaaggggaagaagagattgcacaattaagaaaacatcttgctgattactctgtgaaggaagctcaaatactcgatgataaatacaagttagaaaaacggattgcttatatgcgtatggcatttgaccagcagcagcatgatttaattgatgcagcttcaaaagctttgtcatacaggcaagatattattgaggaaaacattcgtctcacgtatgcgttgcaggaattctttgtgttgtctgtcctcagtactgaaggtagacttaattccaaatgatctctattgaacaaccgtggtttactatttctaaccaccaggcagcccaacaagaaagatcaattttcttatcttctttgcttcctcttctgtccgaatatgatgatctccagccttcagttcttgatgctcagtcaattgttagtaatttaaaggttttgtttaaacatttgcaggaacgacttattgttactgaggacagattaagggagtctcgataccagattactccatggcatactgaattgtcgaataataccagcaatcctgtgtctactaatcctcctgctggaaaagcattgagcaaaagcagccttgatattgtctcccagatggtgtatcctcacgtacaatccccaatgtcttcccctgttcaagctagaggtgattggggtgcatttggtaacaaaaaccatcaagatatttcaaatgaggttcctataagaaatgctggacatgatgacaagggagggacctctctttcaagcagaagccaatataggactgatgttcctcctcaagtatctcaaggtgattccagtgctgtccattttgactttgagactcagagtcaaaacccaccattcaagggtcttagcagaaatgatgtactggatggttcagatagtgctgaagcccaaaacacacaagaaccttctactcgatggggtctaggggactcatctaatttggcatctggccttgaggatgcaaacccttcatatccttatcttcctacagttcttgaggaacctggttcttctttctccgaagctgcagaggatgatccattgccaggcatagaagggcttcgaatcacaggtgaaccttttcctggacaagaacttcaagcagtgggtgcgccatttagaagacggctcagtaaatttcatagaaggagcaaagcagcctagctatgttgttactgccgatgatgtggacactttactcgccattgaagtccagcccctagatgataggaaaaggaagggagactttatcaaggtttatgctaacgggcagaggaaaatttcatgtgatcctgaaacaaaggagcttattaagagaacccttgacattgggcatgtgacctatgaagtccaagtccaactgcctcaggtcagatttttagacatatgggaaccagctgttctagcaataaagagggaaggttacagcattaaatgtaatgggcagcgtggtgttctaatcacagagaagtttcagcaaggaactgctattcatattccatatgggcgtccaacagagttctcgattacatctgctgcgtctgctgatggtgtcagttataatctgaagccagtagaaaatacactattgcgggataccattgttctagtactaaggttgttcaaaaatatggctcttgagagaagaggaagaagaaagaagggtcttttcttcaagtagtttcagctatattacacttgtttctacgctgcttctaatgtatgtatgtagcattttggttgatcggcgtggtgcacaagtgttctgtttctgtaaaatactagacgattgtgttgtaaaactaaccaaaatgccaagtacacatgttaatattttctgccccactcagaagagctagagttttgccataacgagtgcagctccgcgtttggcttccaggcacagctagatatagttcaataatgtaatcgggtgaaaaagaattgggcggccccagaagatgctctttgagattttatctttgccaggagtcgtccgccctacacctggtgggcggtgtctgcctgcctggcttgtgacttcaaaattggcagcgtggagatgatgaggtcacggttcacgcccgagaaataactagcatggccatggccatcgatccgctaggtctgcgagtaggtttcatacgtgacactgatacgccagaaacagaatggaccggccttacatatgtacaaatcacataggtatccacactgttcagaaatcttatcttttg

SEQ ID NO: 33993 - DNA, 3285 bp, Zea Mays
cgtcatcatctccgccgcgcctgcgccttccaacccacaccactcttcccctccccgtccctttcaccaccaaggttcctccatcctccgcggtggctgaccaattccaccattcggctccacgtttattttctaaataactgctactccggattccatacttcgaattgatcccgtcctcacgcggcagcacctatcccccgcgggtcgcatcgagtccaccaccgctggcgtcggttccttccgcgcaattccaccggcaaaagcagagtatactaccgactagagaagagtttggagtttggacccgctgcaccccgaagtcccgaaccctacgctgggggaagctctcacgtcgcgcccgcccatggaccgcctcgccgacggccttgccgcggcatccctttccgacccagcggaccagagcgccgccaccgctggtttgcctagcgccgattacctcctcagcgtcatgcgcgccgtagagggcgccgacgccaccatccgcacccagttggaagagaatagccgtctcaaggaagaattgatgaggaaaacacaacagctacagaggatgagggaagatgctacatcccaaagttctttcagtggactaggtcaagagcgcaattctgtttctaataaaatggatggctctagctcttcagtaaatcctcaaagtaccttgatccatcctcagaatggatgttgtgagagtagagagcatctgattgatgaaagctcaaaacaaaaataccttgacagtccccaggcaaatggagcatttaaaagatcattaggcgaacaaactgctgttgatagtggtggcccatcacaattctctactccctcatctcggtcccattctccaaatagacatagaaaagatggagattatgattctagattattaccagtttcagagatgaactcgaacatatcctggaagcaggaccttactgttaaggtcaaagaaggggaagaagagattgcacaattaagaaaacatcttgctgattactctgtgaaggaagctcaaatactcgatgataaatacaagttagaaaaacggattgcttatatgcgtatggcatttgaccagcagcagcatgatttaattgatgcagcttcaaaagctttgtcatacaggcaagatattattgaggaaaacattcgtctcacgtatgcgttgcagcccaacaagaaagatcaattttcttatcttctttgcttcctcttctgtccgaatatgatgatctccagccttcagttcttgatgctcagtcaattgttagtaatttaaaggttttgtttaaacatttgcaggaacgacttattgttactgaggacagattaagggagtctcgataccagattactccatggcatactgaattgtcgaataataccagcaatcctgtgtctactaatcctcctgctggaaaagcattggtgactacaagcaaaagcagccttgatattgtctcccagatggtgtatcctcacgtacaatccccaatgtcttcccctgttcaagctagaggtgattggggtgcatttggtaacaaaaaccatcaagatatttcaaatgaggttcctataagaaatgctggacatgatgacaagggagggacctctctttcaagcagaagccaatataggactgatgttcctcctcaagtatctcaaggtgattccagtgctgtccattttgactttgagactcagagtcaaaacccaccattcaagggtcttagcagaaatgatgtactggatggttcagatagtgctgaagcccaaaacacacaagaaccttctactcgatggggtctaggggactcatctaatttggcatctggccttgaggatgcaaacccttcatatccttatcttcctacagttcttgaggaacctggttcttctttctccgaagctgcagaggatgatccattgccaggcatagaagggcttcgaatcacaggtgaaccttttcctggacaagaacttcaagcaggtggatactccatcaatggtaccacaacttgtaattttgagtgggtgcgccatttagaagacggctcagtaaatttcatagaaggagcaaagcagcctagctatgttgttactgccgatgatgtggacactttactcgccattgaagtccagcccctagatgataggaaaaggaagggagactttatcaaggtttatgctaacgggcagaggaaaatttcatgtgatcctgaaacaaaggagcttattaagagaacccttgacattgggcatgtgacctatgaagtccaagtccaactgcctgtatgctctgtcatttgcaatcacacattcactcatcaattcttattactttcttctgatgtcacaacaccgatctgaactattgaattccccaacagcaggtcagatttttagacatatgggaaccagctgttctagcaataaagagggaaggttacagcattaaatgtaatgggcagcgtggtgttctaatcacagagaagtttcagcaaggaactgctattcatattccatatgggcgtccaacagagttctcgattacatctgctgcgtctgctgatggtgtcagttataatctgaagccagtagaaaatacactattgcgggataccattgttctagtactaaggttgttcaaaaatatggctcttgagagaagaggaagaagaaagaagggtcttttcttcaagtagtttcagctatattacacttgtttctacgctgcttctaatgtatgtatgtagcattttggttgatcggcgtggtgcacaagtgttctgtttctgtaaaatactagacgattgtgttgtaaaactaaccaaaatgccaagtacacatgttaatattttctgccccactcagaagagctagagttttgccataacgagtgcagctccgcgtttggcttccaggcacagctagatatagttcaataatgtaatcgggtgaaaaagaattgggcggccccagaagatgctctttgagattttatctttgccaggagtcgtccgccctacacctggtgggcggtgtctgcctgcctggcttgtgacttcaaaattggcagcgtggagatgatgaggtcacggttcacgcccgagaaataactagcatggccatggccatcgatccgctaggtctgcgagtaggtttcatacgtgacactgatacgccagaaacagaatggaccggccttacatatgtacaaatcacataggtatccacactgttcagaaatcttatcttttg

SEQ ID NO: 33994 - DNA, 3387 bp, Zea Mays
ggcggtcgcgtcatcatctccgccgcgcctgcgccttccaacccacaccactcttcccctccccgtccctttcaccaccaaggttcctccatcctccgcggtggctgaccaattccaccattcggctccacgtttattttctaaataactgctactccggattccatacttcgaattgatcccgtcctcacgcggcagcacctatcccccgcgggtcgcatcgagtccaccaccgctggcgtcggttccttccgcgcaattccaccggcaaaagcagagtatactaccgactagagaagagtttggagtttggacccgctgcaccccgaagtcccgaaccctacgctgggggaagctctcacgtcgcgcccgcccatggaccgcctcgccgacggccttgccgcggcatccctttccgacccagcggaccagagcgccgccaccgctggtttgcctagcgccgattacctcctcagcgtcatgcgcgccgtagagggcgccgacgccaccatccgcacccagttggaagagaatagccgtctcaaggaagaattgatgaggaaaacacaacagctacagaggatgagggaagatgctacatcccaaagttctttcagtggactaggtcaagagcgcaattctgtttctaataaaatggatggctctagctcttcagtaaatcctcaaagtaccttgatccatcctcagaatggatgttgtgagagtagagagcatctgattgatgaaagctcaaaacaaaaataccttgacagtccccaggcaaatggagcatttaaaagatcattaggcgaacaaactgctgttgatagtggtggcccatcacaattctctactccctcatctcggtcccattctccaaatagacatagaaaagatggagattatgattctagattattaccagtttcagagatgaactcgaacatatcctggaagcaggaccttactgttaaggtcaaagaaggggaagaagagattgcacaattaagaaaacatcttgctgattactctgtgaaggaagctcaaatactcgatgataaatacaagttagaaaaacggattgcttatatgcgtatggcatttgaccagcagcagcatgatttaattgatgcagcttcaaaagctttgtcatacaggcaagatattattgaggaaaacattcgtctcacgtatgcgttgcaggaattctttgtgttgtctgtcctcagtactgaaggtagacttaattccaaatgatctctattgaacaaccgtggtttactatttctaaccaccaggcagcccaacaagaaagatcaattttcttatcttctttgcttcctcttctgtccgaatatgatgatctccagccttcagttcttgatgctcagtcaattgttagtaatttaaaggttttgtttaaacatttgcaggaacgacttattgttactgagattaagggagtctcgataccagattactccatggcatactgaattgtcgaataataccagcaatcctgtgtctactaatcctcctgctggaaaagcattggtgactacaagcaaaagcagccttgatattgtctcccagatggtgtatcctcacgtacaatccccaatgtcttcccctgttcaagctagaggtgattggggtgcatttggtaacaaaaaccatcaagatatttcaaatgaggttcctataagaaatgctggacatgatgacaagggagggacctctctttcaagcagaagccaatataggactgatgttcctcctcaagtatctcaaggtgattccagtgctgtccattttgactttgagactcagagtcaaaacccaccattcaagggtcttagcagaaatgatgtactggatggttcagatagtgctgaagcccaaaacacacaagaaccttctactcgatggggtctaggggactcatctaatttggcatctggccttgaggatgcaaacccttcatatccttatcttcctacagttcttgaggaacctggttcttctttctccgaagctgcagaggatgatccattgccaggcatagaagggcttcgaatcacaggtgaaccttttcctggacaagaacttcaagcaggtggatactccatcaatggtaccacaacttgtaattttgagtgggtgcgccatttagaagacggctcagtaaatttcatagaaggagcaaagcagcctagctatgttgttactgccgatgatgtggacactttactcgccattgaagtccagcccctagatgataggaaaaggaagggagactttatcaaggtttatgctaacgggcagaggaaaatttcatgtgatcctgaaacaaaggagcttattaagagaacccttgacattgggcatgtgacctatgaagtccaagtccaactgcctgtatgctctgtcatttgcaatcacacattcactcatcaattcttattactttcttctgatgtcacaacaccgatctgaactattgaattccccaacagcaggtcagatttttagacatatgggaaccagctgttctagcaataaagagggaaggttacagcattaaatgtaatgggcagcgtggtgttctaatcacagagaagtttcagcaaggaactgctattcatattccatatgggcgtccaacagagttctcgattacatctgctgcgtctgctgatggtgtcagttataatctgaagccagtagaaaatacactattgcgggataccattgttctagtactaaggttgttcaaaaatatggctcttgagagaagaggaagaagaaagaagggtcttttcttcaagtagtttcagctatattacacttgtttctacgctgcttctaatgtatgtatgtagcattttggttgatcggcgtggtgcacaagtgttctgtttctgtaaaatactagacgattgtgttgtaaaactaaccaaaatgccaagtacacatgttaatattttctgccccactcagaagagctagagttttgccataacgagtgcagctccgcgtttggcttccaggcacagctagatatagttcaataatgtaatcgggtgaaaaagaattgggcggccccagaagatgctctttgagattttatctttgccaggagtcgtccgccctacacctggtgggcggtgtctgcctgcctggcttgtgacttcaaaattggcagcgtggagatgatgaggtcacggttcacgcccgagaaataactagcatggccatggccatcgatccgctaggtctgcgagtaggtttcatacgtgacactgatacgccagaaacagaatggaccggccttacatatgtacaaatcacataggtatccacactgttcagaaatcttatcttttg

SEQ ID NO: 33995 - DNA, 3247 bp, Zea Mays
cgcatggaatatgaaagactgtttacatattcattgcgttcgtcatcatgaatccatggcggtcgcgtcatcatctccgccgcgcctgcgccttccaacccacaccactcttcccctccccgtccctttcaccaccaaggttcctccatcctccgcggtggctgaccaattccaccattcggctccacgtttattttctaaataactgctactccggattccatacttcgaattgatcccgtcctcacgcggcagcacctatcccccgcgggtcgcatcgagtccaccaccgctggcgtcggttccttccgcgcaattccaccggcaaaagcagagtatactaccgactagagaagagtttggagtttggacccgctgcaccccgaagtcccgaaccctacgctgggggaagctctcacgtcgcgcccgcccatggaccgcctcgccgacggccttgccgcggcatccctttccgacccagcggaccagagcgccgccaccgctggtttgcctagcgccgattacctcctcagcgtcatgcgcgccgtagagggcgccgacgccaccatccgcacccagttggaagagaatagccgtctcaaggaagaattgatgaggaaaacacaacagctacagaggatgagggaagatgctacatcccaaagttctttcagtggactaggtcaagagcgcaattctgtttctaataaaatggatggctctagctcttcagtaaatcctcaaagtaccttgatccatcctcagaatggatgttgtgagagtagagagcatctgattgatgaaagctcaaaacaaaaataccttgacagtccccaggcaaatggagcatttaaaagatcattaggcgaacaaactgctgttgatagtggtggcccatcacaattctctactccctcatctcggtcccattctccaaatagacatagaaaagatggagattatgattctagattattaccagtttcagagatgaactcgaacatatcctggaagcaggaccttactgttaaggtcaaagaaggggaagaagagattgcacaattaagaaaacatcttgctgattactctgtgaaggaagctcaaatactcgatgataaatacaagttagaaaaacggattgcttatatgcgtatggcatttgaccagcagcagcatgatttaattgatgcagcttcaaaagctttgtcatacaggcaagatattattgaggaaaacattcgtctcacgtatgcgttgcaggcagcccaacaagaaagatcaattttcttatcttctttgcttcctcttctgtccgaatatgatgatctccagccttcagttcttgatgctcagtcaattgttagtaatttaaaggttttgtttaaacatttgcaggaacgacttattgttactgaggacagattaagggagtctcgataccagattactccatggcatactgaattgtcgaataataccagcaatcctgtgtctactaatcctcctgctggaaaagcattgagcaaaagcagccttgatattgtctcccagatggtgtatcctcacgtacaatccccaatgtcttcccctgttcaagctagaggtgattggggtgcatttggtaacaaaaaccatcaagatatttcaaatgaggttcctataagaaatgctggacatgatgacaagggagggacctctctttcaagcagaagccaatataggactgatgttcctcctcaagtatctcaaggtgattccagtgctgtccattttgactttgagactcagagtcaaaacccaccattcaagggtcttagcagaaatgatgtactggatggttcagatagtgctgaagcccaaaacacacaagaaccttctactcgatggggtctaggggactcatctaatttggcatctggccttgaggatgcaaacccttcatatccttatcttcctacagttcttgaggaacctggttcttctttctccgaagctgcagaggatgatccattgccaggcatagaagggcttcgaatcacaggtgaaccttttcctggacaagaacttcaagcaggtggatactccatcaatggtaccacaacttgtaattttgagtgggtgcgccatttagaagacggctcagtaaatttcatagaaggagcaaagcagcctagctatgttgttactgccgatgatgtggacactttactcgccattgaagtccagcccctagatgataggaaaaggaagggagactttatcaaggtttatgctaacgggcagaggaaaatttcatgtgatcctgaaacaaaggagcttattaagagaacccttgacattgggcatgtgacctatgaagtccaagtccaactgcctcaggtcagatttttagacatatgggaaccagctgttctagcaataaagagggaaggttacagcattaaatgtaatgggcagcgtggtgttctaatcacagagaagtttcagcaaggaactgctattcatattccatatgggcgtccaacagagttctcgattacatctgctgcgtctgctgatggtgtcagttataatctgaagccagtagaaaatacactattgcgggataccattgttctagtactaaggttgttcaaaaatatggctcttgagagaagaggaagaagaaagaagggtcttttcttcaagtagtttcagctatattacacttgtttctacgctgcttctaatgtatgtatgtagcattttggttgatcggcgtggtgcacaagtgttctgtttctgtaaaatactagacgattgtgttgtaaaactaaccaaaatgccaagtacacatgttaatattttctgccccactcagaagagctagagttttgccataacgagtgcagctccgcgtttggcttccaggcacagctagatatagttcaataatgtaatcgggtgaaaaagaattgggcggccccagaagatgctctttgagattttatctttgccaggagtcgtccgccctacacctggtgggcggtgtctgcctgcctggcttgtgacttcaaaattggcagcgtggagatgatgaggtcacggttcacgcccgagaaataactagcatggccatggccatcgatccgctaggtctgcgagtaggtttcatacgtgacactgatacgccagaaacagaatggaccggccttacatatgtacaaatcacataggtatccacactgttcagaaatcttatcttttg

SEQ ID NO: 33996 - DNA, 3385 bp, Zea Mays
attccttgtcatccctacactacacggccacgggcgcatggaatatgaaagactgtttacatattcattgcgttcgtcatcatgaatccatggcggtcgcgtcatcatctccgccgcgcctgcgccttccaacccacaccactcttcccctccccgtccctttcaccaccaaggttcctccatcctccgcggtggctgaccaattccaccattcggctccacgtttattttctaaataactgctactccggattccatacttcgaattgatcccgtcctcacgcggcagcacctatcccccgcgggtcgcatcgagtccaccaccgctggcgtcggttccttccgcgcaattccaccggcaaaagcagagtatactaccgactagagaagagtttggagtttggacccgctgcaccccgaagtcccgaaccctacgctgggggaagctctcacgtcgcgcccgcccatggaccgcctcgccgacggccttgccgcggcatccctttccgacccagcggaccagagcgccgccaccgctggtttgcctagcgccgattacctcctcagcgtcatgcgcgccgtagagggcgccgacgccaccatccgcacccagttggaagagaatagccgtctcaaggaagaattgatgaggaaaacacaacagctacagaggatgagggaagatgctacatcccaaagttctttcagtggactaggtcaagagcgcaattctgtttctaataaaatggatggctctagctcttcagtaaatcctcaaagtaccttgatccatcctcagaatggatgttgtgagagtagagagcatctgattgatgaaagctcaaaacaaaaataccttgacagtccccaggcaaatggagcatttaaaagatcattaggcgaacaaactgctgttgatagtggtggcccatcacaattctctactccctcatctcggtcccattctccaaatagacatagaaaagatggagattatgattctagattattaccagtttcagagatgaactcgaacatatcctggaagcaggaccttactgttaaggtcaaagaaggggaagaagagattgcacaattaagaaaacatcttgctgattactctgtgaaggaagctcaaatactcgatgataaatacaagttagaaaaacggattgcttatatgcgtatggcatttgaccagcagcagcatgatttaattgatgcagcttcaaaagctttgtcatacaggcaagatattattgaggaaaacattcgtctcacgtatgcgttgcaggaattctttgtgttgtctgtcctcagtactgaaggtagacttaattccaaatgatctctattgaacaaccgtggtttactatttctaaccaccaggcagcccaacaagaaagatcaattttcttatcttctttgcttcctcttctgtccgaatatgatgatctccagccttcagttcttgatgctcagtcaattgttagtaatttaaaggttttgtttaaacatttgcaggaacgacttattgttactgaggacagattaagggagtctcgataccagattactccatggcatactgaattgtcgaataataccagcaatcctgtgtctactaatcctcctgctggaaaagcattggtgactacaagcaaaagcagccttgatattgtctcccagatggtgtatcctcacgtacaatccccaatgtcttcccctgttcaagctagaggtgattggggtgcatttggtaacaaaaaccatcaagatatttcaaatgaggttcctataagaaatgctggacatgatgacaagggagggacctctctttcaagcagaagccaatataggactgatgttcctcctcaagtatctcaaggtgattccagtgctgtccattttgactttgagactcagagtcaaaacccaccattcaagggtcttagcagaaatgatgtactggatggttcagatagtgctgaagcccaaaacacacaagaaccttctactcgatggggtctaggggactcatctaatttggcatctggccttgaggatgcaaacccttcatatccttatcttcctacagttcttgaggaacctggttcttctttctccgaagctgcagaggatgatccattgccaggcatagaagggcttcgaatcacaggtgaaccttttcctggacaagaacttcaagcaggtggatactccatcaatggtaccacaacttgtaattttgagtgggtgcgccatttagaagacggctcagtaaatttcatagaaggagcaaagcagcctagctatgttgttactgccgatgatgtggacactttactcgccattgaagtccagcccctagatgataggaaaaggaagggagactttatcaaggtttatgctaacgggcagaggaaaatttcatgtgatcctgaaacaaaggagcttattaagagaacccttgacattgggcatgtgacctatgaagtccaagtccaactgcctcaggtcagatttttagacatatgggaaccagctgttctagcaataaagagggaaggttacagcattaaatgtaatgggcagcgtggtgttctaatcacagagaagtttcagcaaggaactgctattcatattccatatgggcgtccaacagagttctcgattacatctgctgcgtctgctgatggtgtcagttataatctgaagccagtagaaaatacactattgcgggataccattgttctagtactaaggttgttcaaaaatatggctcttgagagaagaggaagaagaaagaagggtcttttcttcaagtagtttcagctatattacacttgtttctacgctgcttctaatgtatgtatgtagcattttggttgatcggcgtggtgcacaagtgttctgtttctgtaaaatactagacgattgtgttgtaaaactaaccaaaatgccaagtacacatgttaatattttctgccccactcagaagagctagagttttgccataacgagtgcagctccgcgtttggcttccaggcacagctagatatagttcaataatgtaatcgggtgaaaaagaattgggcggccccagaagatgctctttgagattttatctttgccaggagtcgtccgccctacacctggtgggcggtgtctgcctgcctggcttgtgacttcaaaattggcagcgtggagatgatgaggtcacggttcacgcccgagaaataactagcatggccatggccatcgatccgctaggtctgcgagtaggtttcatacgtgacactgatacgccagaaacagaatggaccggccttacatatgtacaaatcacataggtatccacactgttcagaaatcttatcttttg

SEQ ID NO: 33997 - DNA, 3377 bp, Zea Mays
cattccttgtcatccctacactacacggccacgggcgcatggaatatgaaagactgtttacatattcattgcgttcgtcatcatgaatccatggcggtcgcgtcatcatctccgccgcgcctgcgccttccaacccacaccactcttcccctccccgtccctttcaccaccaaggttcctccatcctccgcggtggctgaccaattccaccattcggctccacgtttattttctaaataactgctactccggattccatacttcgaattgatcccgtcctcacgcggcagcacctatcccccgcgggtcgcatcgagtccaccaccgctggcgtcggttccttccgcgcaattccaccggcaaaagcagagtatactaccgactagagaagagtttggagtttggacccgctgcaccccgaagtcccgaaccctacgctgggggaagctctcacgtcgcgcccgcccatggaccgcctcgccgacggccttgccgcggcatccctttccgacccagcggaccagagcgccgccaccgctggtttgcctagcgccgattacctcctcagcgtcatgcgcgccgtagagggcgccgacgccaccatccgcacccagttggaagagaatagccgtctcaaggaagaattgatgaggaaaacacaacagctacagaggatgagggaagatgctacatcccaaagttctttcagtggactaggtcaagagcgcaattctgtttctaataaaatggatggctctagctcttcagtaaatcctcaaagtaccttgatccatcctcagaatggatgttgtgagagtagagagcatctgattgatgaaagctcaaaacaaaaataccttgacagtccccaggcaaatggagcatttaaaagatcattaggcgaacaaactgctgttgatagtggtggcccatcacaattctctactccctcatctcggtcccattctccaaatagacatagaaaagatggagattatgattctagattattaccagtttcagagatgaactcgaacatatcctggaagcaggaccttactgttaaggtcaaagaaggggaagaagagattgcacaattaagaaaacatcttgctgattactctgtgaaggaagctcaaatactcgatgataaatacaagttagaaaaacggattgcttatatgcgtatggcatttgaccagcagcagcatgatttaattgatgcagcttcaaaagctttgtcatacaggcaagatattattgaggaaaacattcgtctcacgtatgcgttgcaggaattctttgtgttgtctgtcctcagtactgaaggtagacttaattccaaatgatctctattgaacaaccgtggtttactatttctaaccaccaggcagcccaacaagaaagatcaattttcttatcttctttgcttcctcttctgtccgaatatgatgatctccagccttcagttcttgatgctcagtcaattgttagtaatttaaaggttttgtttaaacatttgcaggaacgacttattgttactgaggacagattaagggagtctcgataccagattactccatggcatactgaattgtcgaataataccagcaatcctgtgtctactaatcctcctgctggaaaagcattgagcaaaagcagccttgatattgtctcccagatggtgtatcctcacgtacaatccccaatgtcttcccctgttcaagctagaggtgattggggtgcatttggtaacaaaaaccatcaagatatttcaaatgaggttcctataagaaatgctggacatgatgacaagggagggacctctctttcaagcagaagccaatataggactgatgttcctcctcaagtatctcaaggtgattccagtgctgtccattttgactttgagactcagagtcaaaacccaccattcaagggtcttagcagaaatgatgtactggatggttcagatagtgctgaagcccaaaacacacaagaaccttctactcgatggggtctaggggactcatctaatttggcatctggccttgaggatgcaaacccttcatatccttatcttcctacagttcttgaggaacctggttcttctttctccgaagctgcagaggatgatccattgccaggcatagaagggcttcgaatcacaggtgaaccttttcctggacaagaacttcaagcaggtggatactccatcaatggtaccacaacttgtaattttgagtgggtgcgccatttagaagacggctcagtaaatttcatagaaggagcaaagcagcctagctatgttgttactgccgatgatgtggacactttactcgccattgaagtccagcccctagatgataggaaaaggaagggagactttatcaaggtttatgctaacgggcagaggaaaatttcatgtgatcctgaaacaaaggagcttattaagagaacccttgacattgggcatgtgacctatgaagtccaagtccaactgcctcaggtcagatttttagacatatgggaaccagctgttctagcaataaagagggaaggttacagcattaaatgtaatgggcagcgtggtgttctaatcacagagaagtttcagcaaggaactgctattcatattccatatgggcgtccaacagagttctcgattacatctgctgcgtctgctgatggtgtcagttataatctgaagccagtagaaaatacactattgcgggataccattgttctagtactaaggttgttcaaaaatatggctcttgagagaagaggaagaagaaagaagggtcttttcttcaagtagtttcagctatattacacttgtttctacgctgcttctaatgtatgtatgtagcattttggttgatcggcgtggtgcacaagtgttctgtttctgtaaaatactagacgattgtgttgtaaaactaaccaaaatgccaagtacacatgttaatattttctgccccactcagaagagctagagttttgccataacgagtgcagctccgcgtttggcttccaggcacagctagatatagttcaataatgtaatcgggtgaaaaagaattgggcggccccagaagatgctctttgagattttatctttgccaggagtcgtccgccctacacctggtgggcggtgtctgcctgcctggcttgtgacttcaaaattggcagcgtggagatgatgaggtcacggttcacgcccgagaaataactagcatggccatggccatcgatccgctaggtctgcgagtaggtttcatacgtgacactgatacgccagaaacagaatggaccggccttacatatgtacaaatcacataggtatccacactgttcagaaatcttatcttttg

SEQ ID NO: 33998 - DNA, 519 bp, Zea Mays
attgtactcggcttgatctatctgtgcgctggggtaccttcgtgaaatacgtcctccatgcatcatcatccataagaatttcaagtcatcaaacattttgctggactcggaatttagtccacaccttttcggatgctggacttgcaagctttattgctgatgctgattccaggtaatggtggtaccgaactggagagacaaaagcagaagcgttcccttgaaggtttaagtctactttccctgcgacctggaactggtgccctttggtcaagcgctcatgctaaatgcctccttgtttcactgtcatagtgtcaccattctttttgcaccgcatcgtgcatgatcggcatggcgcatatacagctgctggtcagggtaatatcattttctgttgattttacatgccgctgcataggcatggcatgcagataaacgtcaatcaccgcgagcatgcaacctggaaatcgaaatgatgggttctcttttttttgtcttattatcgcgttgcttccctcttat

SEQ ID NO: 33999 - DNA, 2410 bp, Zea Mays
gggcaaccaatgaacctgttgtcgtctcgtctccttcgcttcctctcgtcgtcaactaccgaaccaggaaccacgcccaacatctacggcaaaccctgaccccggccacaattctccgagtcaccccgtacctgacaaatccccaaatccgaccgcaaattcggcatgtgcgactacggaaacccttcaccctgaacctgccggagatgatcgcgtcgcagccgcgccgggttcggcccctcgccgccgtctccctggtgttattcctcctcctcctgtacagccgctccgatgggggctcaccgcgcgccgcgcggctcttaggctccggattctaccctgtgcaccgcaggttcctctccgatgccgaccctgccggccccgcatccagcgccgcgaacccttcggcttcggggaccgttccgttaaatggcgagcagccggaggacccttccgtggcgtgcgcgggcatcgcgctgcacgaggggttcgggacgcagtgcgagttcctccgggcccacccgcagtgcagctccgatgggttcgtcgactacctaggcttcttctactgcagatgcgagaggttcagggtgctgggctacgcggtgctcggggtatgcctggccgcgctgttctatatgctgggcaatactgctgccgactacttctgctgcagccttgagaagatgtcggcactgttgcggctcccgccgaccttggctggcgtgacgctgctcccctttggtaatggagcccctgacgtgtttgctagcattgcggcgtttatggggagcggtgctggtgatgttgggctgaacagcgttctgggtggagctgtatttgtgacttgtgttgtggtcggggcggtgtcgttgtgtgttgccgagaagaatgtgcagattgacaggaggtgtttcgtgagggatgttgggttctttctggtgactcttttggctttgtctatagtgttgaccattgggaaggtgactgtttggggagctatgatgtttgtgtcgatttatgtggtctatgcatttgttgttgctgcaaatgaggtattgaggaagcatgccaggaggctgaagtttgatgtgttcacaccgttgttgcctgtgagggcaagtatatttgaacaaggagcagagcaggatgagtcagcatacagttcacttcttgaggaggatgcagatggtgaggtaacccaaatgaatacatccgtgcctcagtggatgtgggcttctcatgtagccatctactcaaatcatggaaatagagatggttcgcctgacagctcaaggccattatggggttggagtgagggagaagtggataactccacattcaatatttacaagctgttctcgtttatggagcttcccttgacgataccaagaaagttgacaattcctatagtggaggaggaccgctggtccaaagaatatgctgttgcaagttcttgcttggcgcctgttcttttggcatttttatggagcagtcaggatacagtatccacaaaggttagcatagcagcatatgttatggctgtcatgttggggattgcactagctgctctggttttcctgttcaccagtaatgaacgtcctccacggaggtttttgtttccatgggtttttggaggctttgtgatgagcatcatctggttctacatcatcgctaatgaactggttgcacttttggttgctttgggtgtgatactgggaattaatccttcaatacttgggctaacagtgttagcatggggaaattcaatgggtgacttgatgtcaaatgttgctttagcgatgaatggaggtgacggcgtgcagattgccatgtctggatgttatgcaggacctatgtttaatacacttgctggtttgggtatatcaatgttgcttggagcttggtcaacggcacccaattcgtaccttcgtgaaatacgtcctccatgcatcatcatccataagaatttcaagtcatcaaacattttgctggactcggaatttagtccacaccttttcggatgctggacttgcaagctttattgctgatgctgattccaggtaatggtggtaccgaactggagagacaaaagcagaagcgttcccttgaaggtttaagtctactttccctgcgacctggaactggtgccctttggtcaagcgctcatgctaaatgcctccttgtttcactgtcatagtgtcaccattctttttgcaccgcatcgtgcatgatcggcatggcgcatatacagctgctggtcagggtaatatcattttctgttgattttacatgccgctgcataggcatggcatgcagataaacgtcaatcaccgcgagcatgcaacctggaaatcgaaatgatgggttctcttttttttgtcttattatcgcgttgcttccctcttat

SEQ ID NO: 34000 - DNA, 2988 bp, Zea Mays
caaagggcaagtgggcaaccaatgaacctgttgtcgtctcgtctccttcgcttcctctcgtcgtcaactaccgaaccaggaaccacgcccaacatctacggcaaaccctgaccccggccacaattctccgagtcaccccgtacctgacaaatccccaaatccgaccgcaaattcggcatgtgcgactacggaaacccttcaccctgaacctgccggagatgatcgcgtcgcagccgcgccgggttcggcccctcgccgccgtctccctggtgttattcctcctcctcctgtacagccgctccgatgggggctcaccgcgcgccgcgcggctcttaggctccggattctaccctgtgcaccgcaggttcctctccgatgccgaccctgccggccccgcatccagcgccgcgaacccttcggcttcggggaccgttccgttaaatggcgagcagccggaggacccttccgtggcgtgcgcgggcatcgcgctgcacgaggggttcgggacgcagtgcgagttcctccgggcccacccgcagtgcagctccgatgggttcgtcgactacctaggcttcttctactgcagatgcgagaggttcagggtgctgggctacgcggtgctcggggtatgcctggccgcgctgttctatatgctgggcaatactgctgccgactacttctgctgcagccttgagaagatgtcggcactgttgcggctcccgccgaccttggctggcgtgacgctgctcccctttggtaatggagcccctgacgtgtttgctagcattgcggcgtttatggggagcggtgctggtgatgttgggctgaacagcgttctgggtggagctgtatttgtgacttgtgttgtggtcggggcggtgtcgttgtgtgttgccgagaagaatgtgcagattgacaggaggtgtttcgtgagggatgttgggttctttctggtgactcttttggctttgtctatagtgttgaccattgggaaggtgactgtttggggagctatgatgtttgtgtcgatttatgtggtctatgcatttgttgttgctgcaaatgaggtattgaggaagcatgccaggaggctgaagtttgatgtgttcacaccgttgttgcctgtgagggcaagtatatttgaacaaggagcagagcaggatgagtcagcatacagttcacttcttgaggaggatgcagatggtgaggtaacccaaatgaatacatccgtgcctcagtggatgtgggcttctcatgtagccatctactcaaatcatggaaatagagatggttcgcctgacagctcaaggccattatggggttggagtgagggagaagtggataactccacattcaatatttacaagctgttctcgtttatggagcttcccttgacgataccaagaaagttgacaattcctatagtggaggaggaccgctggtccaaagaatatgctgttgcaagttcttgcttggcgcctgttcttttggcatttttatggagcagtcaggatacagtatccacaaaggttagcatagcagcatatgttatggctgtcatgttggggattgcactagctgctctggttttcctgttcaccagtaatgaacgtcctccacggaggtttttgtttccatgggtttttggaggctttgtgatgagcatcatctggttctacatcatcgctaatgaactggttgcacttttggttgctttgggtgtgatactgggaattaatccttcaatacttgggctaacagtgttagcatggggaaattcaatgggtgacttgatgtcaaatgttgctttagcgatgaatggaggtgacggcgtgcagattgccatgtctggatgttatgcaggacctatgtttaatacacttgctggtttgggtatatcaatgttgcttggagcttggtcaacggcacccaattcaacaatcaattatagctaatgtccccttgaactctacaattcaatggtgttttatttgcataatattcacttgagagatgttttgggagctttaaattgtgggaacacgcaccttacaaatggcgctgacatgaagcgttcatgagtgcaccacaatagacatacagcatgtctttacctgctacaattagtcagaaatcacacccggagatagaatgcctgaaaccatttacagggaatagagttcaatgatggaaaggttctggcaatcatgaaattagacaatacttcgataccactccaatcttctgatgactttgctgaactgatgttgattacttcagaactgcgccatctggatctgaatgaacttgttggcatgcatggaacatggactgcacttgcttgtgtatggtttcgacagggatgtatcccatcatgatctcctcagcatttcatgagtacagcatggcacttaatttgaagttttttgtttcaaaaaactagtttgaagtttttcttgtgtgaatattgtactcggcttgatctatctgtgcgctgggcaggtaccttcgtgaaatacgtcctccatgcatcatcatccataagaatttcaagtcatcaaacattttgctggactcggaatttagtccacaccttttcggatgctggacttgcaagctttattgctgatgctgattccaggtaatggtggtaccgaactggagagacaaaagcagaagcgttcccttgaaggtttaagtctactttccctgcgacctggaactggtgccctttggtcaagcgctcatgctaaatgcctccttgtttcactgtcatagtgtcaccattctttttgcaccgcatcgtgcatgatcggcatggcgcatatacagctgctggtcagggtaatatcattttctgttgattttacatgccgctgcataggcatggcatgcagataaacgtcaatcaccgcgagcatgcaacctggaaatcgaaatgatgggttctcttttttttgtcttattatcgcgttgcttccctcttat

SEQ ID NO: 34001 - DNA, 2165 bp, Zea Mays
gggcaaccaatgaacctgttgtcgtctcgtctccttcgcttcctctcgtcgtcaactaccgaaccaggaaccacgcccaacatctacggcaaaccctgaccccggccacaattctccgagtcaccccgtacctgacaaatccccaaatccgaccgcaaattcggcatgtgcgactacggaaacccttcaccctgaacctgccggagatgatcgcgtcgcagccgcgccgggttcctctccgatgccgaccctgccggccccgcatccagcgccgcgaacccttcggcttcggggaccgttccgttaaatggcgagcagccggaggacccttccgtggcgtgcgcgggcatcgcgctgcacgaggggttcgggacgcagtgcgagttcctccgggcccacccgcagtgcagctccgatgggttcgtcgactacctaggcttcttctactgcagatgcgagaggttcagggtgctgggctacgcggtgctcggggtatgcctggccgcgctgttctatatgctgggcaatactgctgccgactacttctgctgcagccttgagaagatgtcggcactgttgcggctcccgccgaccttggctggcgtgacgctgctcccctttggtaatggagcccctgacgtgtttgctagcattgcggcgtttatggggagcggtgctggtgatgttgggctgaacagcgttctgggtggagctgtatttgtgacttgtgttgtggtcggggcggtgtcgttgtgtgttgccgagaagaatgtgcagattgacaggaggtgtttcgtgagggatgttgggttctttctggtgactcttttggctttgtctatagtgttgaccattgggaaggtgactgtttggggagctatgatgtttgtgtcgatttatgtggtctatgcatttgttgttgctgcaaatgaggtattgaggaagcatgccaggaggctgaagtttgatgtgttcacaccgttgttgcctgtgagggcaagtatatttgaacaaggagcagagcaggatgagtcagcatacagttcacttcttgaggaggatgcagatggtgaggtaacccaaatgaatacatccgtgcctcagtggatgtgggcttctcatgtagccatctactcaaatcatggaaatagagatggttcgcctgacagctcaaggccattatggggttggagtgagggagaagtggataactccacattcaatatttacaagctgttctcgtttatggagcttcccttgacgataccaagaaagttgacaattcctatagtggaggaggaccgctggtccaaagaatatgctgttgcaagttcttgcttggcgcctgttcttttggcatttttatggagcagtcaggatacagtatccacaaaggttagcatagcagcatatgttatggctgtcatgttggggattgcactagctgctctggttttcctgttcaccagtaatgaacgtcctccacggaggtttttgtttccatgggtttttggaggctttgtgatgagcatcatctggttctacatcatcgctaatgaactggttgcacttttggttgctttgggtgtgatactgggaattaatccttcaatacttgggctaacagtgttagcatggggaaattcaatgggtgacggcgtgcagattgccatgtctggatgttatgcaggacctatgtttaatacacttgctggtttgggtatatcaatgttgcttggagcttggtcaacggcacccaattcgtatgttcttccacaggaccactctcttatttacacaatgagctttcttgttgctggattgatctgggctcttgttatgctgccgagaggtgacatgcggcctaacaagatacttggagttggcctcattgctctttactcaatttttctttttattagggtaggcagtgctgtcggcatattgccactgcctggatcgagttagataattacttgcctgtaaagttgggattaatgtcaaagtacttgctcatggctgccattttatataaatgaaatgaagttatacagtgttggtctgttctgtacttgtggtcctgcatgtcaagttgtctgcacattttttgggtttgatatttttgggagaaaacacgcttgcagttgtggcaattatttgtatgt

SEQ ID NO: 34002 - DNA, 247 bp, Zea Mays
ggacgttcttccttttatgcaccatctaaatgaattatgtacatttaattactctttgtattgtaggatatcagtgaggcgaatgggataaactgtgcaaaaaatgttcagactactgcaaagtgaaaggttcagctgcgcaaggatgcccttcccggtgatggcctctccgagcagcgatgcctgccagccgtgcatgcccaataccaccagttgcgctaaagaggactaatgtccttgggatgag

SEQ ID NO: 34003 - DNA, 316 bp, Zea Mays
cttccactgcatcagcaggtggcttaagactcgtcaagtgtgcccattagtgagtgggagttccagaaatatggccactagttcctgggcaccctcatgtgatgttggggcttacttctagtgactgctaccactcgagtgtatttttttctgccaaacagctccatcttttactgctttggatgcttgcatgtatcacaggtcaattatcactagtagtacgtccacctgggactgtatttggattgttcgttgagaggatagtagttccattttataaatgttatgtggattttcataaacataaaaaatagga

SEQ ID NO: 34004 - DNA, 925 bp, Zea Mays
ctttactttctcccttcctaaggaaacagttgatactgattcatgtttggatgactcccaagaaccttacgatggcaacaaggatgcagctcgagctatacttcgtgttaaacagaagttggatggatatgaagatggcgagatgagaagtgtgcagggccaggtccaacaactcatacaggacgcggtggatgttgatcggttgtgccaaatgtttccaggttggggaccttggttgtaagctccattgaaagggatgtaaattttgatcgaaggcaagagcaacttttttcactgcttatgaggttttattctttggtgtgtttttttccctcaccaccctgtcaacattcctacaaagtacagcaaacggcttttggtaccctgtaaattgatgggaaggcaaggacgacatttgagtgcaggtgggttgtaccactcctgttttagagcatgtccagactagaggatgggtgattgcatagtgaggccacagttttctttttttgttgagcttcattaataccccctctgtctaaaagtcctcatcgtttaagcgtcccgcaccaagaccaaggatgcccctccgcattgcagccgctgtgaagttaattatctggcgccgttttgtattttcaaaacacgcatatgtaatgtcgcaaaaattcagctgcttcgatggttggccggccataggggcggtatccatacatcacaccatcgtgcagcgtacattcagctgcttcgacggttgcataccgtagtttttgttcaggatttactttgtaaagaagtgaggctgttttgtcatgtatgtaaagggcttgtttcgatgtagcatgaaatacgaagaattatgatgcatttgaatataccgtgctcccctgagcaaaaaacaaatcaacagaagctaccacctggccgc

SEQ ID NO: 34005 - DNA, 1400 bp, Zea Mays
gtatgttgacgtgttgtagaggaaaaggacaaaaggagggcatttcttaaaatctgcagcaactttaggcctgtgatgcaccacttctttcttgaaagattcttgctgcctgctgattggttccaaagtagacttgcttacacaaggagtgtagcagcaagctcgatggatatatagtcggtcttggggatcgccattccatgaatattctcatcgaccaagacacagctgaggttgtacacattgatcttggtgttgcatttgaacagggtctcatgcttaaaacacctgaacgggttccatttcggttgacaagggatattatagatggcatgggtgttactggtgttgaaggtgtgttcagaagatgttgtgagaaaactctctgtgtcatgagggcgaataaagaagcattgctcactattattgaagtcttcgttcatgatcctctatataaatgggcactctcaccactgaaagccttacagcgtcaaaaggaaacagttgatactgattcatgtttggatgactcccaagaaccttacgatggcaacaaggatgcagctcgagctatacttcgtgttaaacagaagttggatggatatgaagatggcgagatgagaagtgtgcagggccaggtccaacaactcatacaggacgcggtggatgttgatcggttgtgccaaatgtttccaggttggggaccttggttgtaagctccattgaaagggatgtaaattttgatcgaaggcaagagcaacttttttcactgcttatgaggttttattctttggtgtgtttttttccctcaccaccctgtcaacattcctacaaagtacagcaaacggcttttggtaccctgtaaattgatgggaaggcaaggacgacatttgagtgcaggtgggttgtaccactcctgttttagagcatgtccagactagaggatgggtgattgcatagtgaggccacagttttctttttttgttgagcttcattaataccccctctgtctaaaagtcctcatcgtttaagcgtcccgcaccaagaccaaggatgcccctccgcattgcagccgctgtgaagttaattatctggcgccgttttgtattttcaaaacacgcatatgtaatgtcgcaaaaattcagctgcttcgatggttggccggccataggggcggtatccatacatcacaccatcgtgcagcgtacattcagctgcttcgacggttgcataccgtagtttttgttcaggatttactttgtaaagaagtgaggctgttttgtcatgtatgtaaagggcttgtttcgatgtagcatgaaatacgaagaattatgatgcatttgaatataccgtgctcccctgagcaaaaaacaaatcaacagaagctaccacctggccgc

SEQ ID NO: 34006 - DNA, 2227 bp, Zea Mays
atgagggggtgggggaagggggtggtgtggcggcctccagtggcggtggctaggaagggccaacgactagggtccaaacctacaagttcataccactggtttatcaaattgcttcgagacttgggagcaccaaagatgctcaggggtcatttaactttcagattgcgttagcttctcttttgaagaaaatggctgttgatcacccatatcatacaatattccagcttttggctctagcaaatggtgatcgtgtcaaagacaagcaaagaagtagaagttcttttgttgtagatatggagaagaagcttgctgctgaaaatttgttaaaggagctatcttcctgtcatggacctctgatttgtcagatgaaacaaatggttgagatctacattaagttagcagaactggagaccaagaaggaggacactaacaaaaaaattccgctgcccagggaggcccgcagcattggtcagcttgaactagttccagttgtgactgctaccgttcctattgatcctagctgtcgttatgaggaaggctcctttccacatttcactgggttggctgactccattatgatcatgaatggaattaatgctcccaaagttatagaatgttttggctcggatggtaacaaataccgtcaacttgcaaaatctggaaatgatgacctgcgacaggatgctgtgatggagcaattttttagtttggtaaatacattcttgcaaaatcaccgagatacttctaaaaggagattgaaaatccgtacatataaggttgttcctttcaccccaagtgctggtgttgttgaatgggtaaacggtactgttccactaggcgattatctaattgggagtactagaagtggtggagcacatggacgatatggaattggggactggacatatcttcaatgcagagagtacctgatgagtgaaaaggacaaaaggagggcatttcttaaaatctgcagcaactttaggcctgtgatgcaccacttctttcttgaaagattcttgctgcctgctgattggttccaaagtagacttgcttacacaaggagtgtagcagcaagctcgatggtaggatatatagtcggtcttggggatcgccattccatgaatattctcatcgaccaagacacagctgaggttgtacacattgatcttggtgttgcatttgaacagggtctcatgcttaaaacacctgaacgggttccatttcggttgacaagggatattatagatggcatgggtgttactggtgttgaaggtgtgttcagaagatgttgtgagaaaactctctgtgtcatgagggcgaataaagaagcattgctcactattattgaagtcttcgttcatgatcctctatataaatgggcactctcaccactgaaagccttacagcgtcaaaaggaaacagttgatactgattcatgtttggatgactcccaagaaccttacgatggcaacaaggatgcagctcgagctatacttcgtgttaaacagaagttggatggatatgaagatggcgagatgagaagtgtgcagggccaggtccaacaactcatacaggacgcggtggatgttgatcggttgtgccaaatgtttccaggttggggaccttggttgtaagctccattgaaagggatgtaaattttgatcgaagcaaacggcttttggtaccctgtaaattgatgggaaggcaaggacgacatttgagtgcaggtgggttgtaccactcctgttttagagcatgtccagactagaggatgggtgattgcatagtgaggccacagttttctttttttgttgagcttcattaataccccctctgtctaaaagtcctcatcgtttaagcgtcccgcaccaagaccaaggatgcccctccgcattgcagccgctgtgaagttaattatctggcgccgttttgtattttcaaaacacgcatatgtaatgtcgcaaaaattcagctgcttcgatggttggccggccataggggcggtatccatacatcacaccatcgtgcagcgtacattcagctgcttcgacggttgcataccgtagtttttgttcaggatttactttgtaaagaagtgaggctgttttgtcatgtatgtaaagggcttgtttcgatgtagcatgaaatacgaagaattatgatgcatttgaatataccgtgctcccctgagcaaaaaacaaatcaacagaagctaccacctggccgc

SEQ ID NO: 34007 - DNA, 2171 bp, Zea Mays
atgagggggtgggggaagggggtggtgtggcggcctccagtggcggtggctaggaagggccaacgactagggtccaaacctacaagttcataccactggtttatcaaattgcttcgagacttgggagcaccaaagatgctcaggggtcatttaactttcagattgcgttagcttctcttttgaagaaaatggctgttgatcacccatatcatacaatattccagcttttggctctagcaaatggtgatcgtgtcaaagacaagcaaagaagtagaagttcttttgttgtagatatggagaagaagcttgctgctgaaaatttgttaaaggagctatcttcctgtcatggacctctgatttgtcagatgaaacaaatggttgagatctacattaagttagcagaactggagaccaagaaggaggacactaacaaaaaaattccgctgcccagggaggcccgcagcattggtcagcttgaactagttccagttgtgactgctaccgttcctattgatcctagctgtcgttatgaggaaggctcctttccacatttcactgggttggctgactccattatgatcatgaatggaattaatgctcccaaagttatagaatgttttggctcggatggtaacaaataccgtcaacttgcaaaatctggaaatgatgacctgcgacaggatgctgtgatggagcaattttttagtttggtaaatacattcttgcaaaatcaccgagatacttctaaaaggagattgaaaatccgtacatataaggttgttcctttcaccccaagtgctggtgttgttgaatgggtaaacggtactgttccactaggcgattatctaattgggagtactagaagtggtggagcacatggacgatatggaattggggactggacatatcttcaatgcagagagtacctgatgagtgtaggatatatagtcggtcttggggatcgccattccatgaatattctcatcgaccaagacacagctgaggttgtacacattgatcttggtgttgcatttgaacagggtctcatgcttaaaacacctgaacgggttccatttcggttgacaagggatattatagatggcatgggtgttactggtgttgaaggtgtgttcagaagatgttgtgagaaaactctctgtgtcatgagggcgaataaagaagcattgctcactattattgaagtcttcgttcatgatcctctatataaatgggcactctcaccactgaaagccttacagcgtcaaaaggaaacagttgatactgattcatgtttggatgactcccaagaaccttacgatggcaacaaggatgcagctcgagctatacttcgtgttaaacagaagttggatggatatgaagatggcgagatgagaagtgtgcagggccaggtccaacaactcatacaggacgcggtggatgttgatcggttgtgccaaatgtttccaggttggggaccttggttgtaagctccattgaaagggatgtaaattttgatcgaaggcaagagcaacttttttcactgcttatgaggttttattctttggtgtgtttttttccctcaccaccctgtcaacattcctacaaagtacagcaaacggcttttggtaccctgtaaattgatgggaaggcaaggacgacatttgagtgcaggtgggttgtaccactcctgttttagagcatgtccagactagaggatgggtgattgcatagtgaggccacagttttctttttttgttgagcttcattaataccccctctgtctaaaagtcctcatcgtttaagcgtcccgcaccaagaccaaggatgcccctccgcattgcagccgctgtgaagttaattatctggcgccgttttgtattttcaaaacacgcatatgtaatgtcgcaaaaattcagctgcttcgatggttggccggccataggggcggtatccatacatcacaccatcgtgcagcgtacattcagctgcttcgacggttgcataccgtagtttttgttcaggatttactttgtaaagaagtgaggctgttttgtcatgtatgtaaagggcttgtttcgatgtagcatgaaatacgaagaattatgatgcatttgaatataccgtgctcccctgagcaaaaaacaaatcaacagaagctaccacctggccgc

SEQ ID NO: 34008 - DNA, 3143 bp, Zea Mays
atggagggggcggcggcggttggcggcgcgacggtgttggggcctgcaggggcacgactgagcagtcggttggagttgttggataaagagtggaacttaattatgttccaagcagaacggaatcttgatctatttgaaccttttctggcatttaggcgtgccctccttaagattttaggttgtgaagaacatcttgtaaaacatttatttcaatctgcttctgcgctccggaagggattaaggttttctttggcagcggcagctttatatgaactcaaagaactttgttttcacagagatgagagcactatgacaaatacctatttgcttgcacggcttgaagacgctaaattgctcagagctcaagggcagcatgatatggctattagtcttggaaaatacatactacagaagctttctgacaagaaaaacctgtcagatgtctatcgattagttggcaagtggctggctgaaacaagatcaagcaactcaagaactatcattgaggactatttaagaccttctatagatctctctgaatttgagaagagtacagataaaaggtacatgtccaggcagtgtcgaacacatttccatctagcacattatacatatagtttgttcagaagctatgaggaaagactctcatctaacgaatggcaagcagctctgcgattaaggaaatacaagactagggagttggagatactgattaaaagactgagaagttcatctaagggtgtgaagactgattactcagtaaaaatccaagagttacagaaacaacttgcacttgacagagaagaagcagagaaaatacaggatgatcacgataatttcttaaatctagcacttcaaggctaccaacgttccattgttgttggtggcaaatatgacctacaagtggtttttcggttggtctcgttgtggtttagtcttttctcaagggatcaagttgtgaaagcaatgttgaaaaccacaaaagaggtccaaacctacaagttcataccactggtttatcaaattgcttcgagacttgggagcaccaaagatgctcaggggtcatttaactttcagattgcgttagcttctcttttgaagaaaatggctgttgatcacccatatcatacaatattccagcttttggctctagcaaatggtgatcgtgtcaaagacaagcaaagaagtagaagttcttttgttgtagatatggagaagaagcttgctgctgaaaatttgttaaaggagctatcttcctgtcatggacctctgatttgtcagatgaaacaaatggttgagatctacattaagttagcagaactggagaccaagaaggaggacactaacaaaaaaattccgctgcccagggaggcccgcagcattggtcagcttgaactagttccagttgtgactgctaccgttcctattgatcctagctgtcgttatgaggaaggctcctttccacatttcactgggttggctgactccattatgatcatgaatggaattaatgctcccaaagttatagaatgttttggctcggatggtaacaaataccgtcaacttgcaaaatctggaaatgatgacctgcgacaggatgctgtgatggagcaattttttagtttggtaaatacattcttgcaaaatcaccgagatacttctaaaaggagattgaaaatccgtacatataaggttgttcctttcaccccaagtgctggtgttgttgaatgggtaaacggtactgttccactaggcgattatctaattgggagtactagaagtggtggagcacatggacgatatggaattggggactggacatatcttcaatgcagagagtacctgatgagtgaaaaggacaaaaggagggcatttcttaaaatctgcagcaactttaggcctgtgatgcaccacttctttcttgaaagattcttgctgcctgctgattggttccaaagtagacttgcttacacaaggagtgtagcagcaagctcgatggtaggatatatagtcggtcttggggatcgccattccatgaatattctcatcgaccaagacacagctgaggttgtacacattgatcttggtgttgcatttgaacagggtctcatgcttaaaacacctgaacgggttccatttcggttgacaagggatattatagatggcatgggtgttactggtgttgaaggtgtgttcagaagatgttgtgagaaaactctctgtgtcatgagggcgaataaagaagcattgctcactattattgaagtcttcgttcatgatcctctatataaatgggcactctcaccactgaaagccttacagcgtcaaaaggaaacagttgatactgattcatgtttggatgactcccaagaaccttacgatggcaacaaggatgcagctcgagctatacttcgtgttaaacagaagttggatggatatgaagatggcgagatgagaagtgtgcagggccaggtccaacaactcatacaggacgcggtggatgttgatcggttgtgccaaatgtttccaggttggggaccttggttgtaagctccattgaaagggatgtaaattttgatcgaagcaaacggcttttggtaccctgtaaattgatgggaaggcaaggacgacatttgagtgcaggtgggttgtaccactcctgttttagagcatgtccagactagaggatgggtgattgcatagtgaggccacagttttctttttttgttgagcttcattaataccccctctgtctaaaagtcctcatcgtttaagcgtcccgcaccaagaccaaggatgcccctccgcattgcagccgctgtgaagttaattatctggcgccgttttgtattttcaaaacacgcatatgtaatgtcgcaaaaattcagctgcttcgatggttggccggccataggggcggtatccatacatcacaccatcgtgcagcgtacattcagctgcttcgacggttgcataccgtagtttttgttcaggatttactttgtaaagaagtgaggctgttttgtcatgtatgtaaagggcttgtttcgatgtagcatgaaatacgaagaattatgatgcatttgaatataccgtgctcccctgagcaaaaaacaaatcaacagaagctaccacctggccgc

SEQ ID NO: 34009 - DNA, 3087 bp, Zea Mays
atggagggggcggcggcggttggcggcgcgacggtgttggggcctgcaggggcacgactgagcagtcggttggagttgttggataaagagtggaacttaattatgttccaagcagaacggaatcttgatctatttgaaccttttctggcatttaggcgtgccctccttaagattttaggttgtgaagaacatcttgtaaaacatttatttcaatctgcttctgcgctccggaagggattaaggttttctttggcagcggcagctttatatgaactcaaagaactttgttttcacagagatgagagcactatgacaaatacctatttgcttgcacggcttgaagacgctaaattgctcagagctcaagggcagcatgatatggctattagtcttggaaaatacatactacagaagctttctgacaagaaaaacctgtcagatgtctatcgattagttggcaagtggctggctgaaacaagatcaagcaactcaagaactatcattgaggactatttaagaccttctatagatctctctgaatttgagaagagtacagataaaaggtacatgtccaggcagtgtcgaacacatttccatctagcacattatacatatagtttgttcagaagctatgaggaaagactctcatctaacgaatggcaagcagctctgcgattaaggaaatacaagactagggagttggagatactgattaaaagactgagaagttcatctaagggtgtgaagactgattactcagtaaaaatccaagagttacagaaacaacttgcacttgacagagaagaagcagagaaaatacaggatgatcacgataatttcttaaatctagcacttcaaggctaccaacgttccattgttgttggtggcaaatatgacctacaagtggtttttcggttggtctcgttgtggtttagtcttttctcaagggatcaagttgtgaaagcaatgttgaaaaccacaaaagaggtccaaacctacaagttcataccactggtttatcaaattgcttcgagacttgggagcaccaaagatgctcaggggtcatttaactttcagattgcgttagcttctcttttgaagaaaatggctgttgatcacccatatcatacaatattccagcttttggctctagcaaatggtgatcgtgtcaaagacaagcaaagaagtagaagttcttttgttgtagatatggagaagaagcttgctgctgaaaatttgttaaaggagctatcttcctgtcatggacctctgatttgtcagatgaaacaaatggttgagatctacattaagttagcagaactggagaccaagaaggaggacactaacaaaaaaattccgctgcccagggaggcccgcagcattggtcagcttgaactagttccagttgtgactgctaccgttcctattgatcctagctgtcgttatgaggaaggctcctttccacatttcactgggttggctgactccattatgatcatgaatggaattaatgctcccaaagttatagaatgttttggctcggatggtaacaaataccgtcaacttgcaaaatctggaaatgatgacctgcgacaggatgctgtgatggagcaattttttagtttggtaaatacattcttgcaaaatcaccgagatacttctaaaaggagattgaaaatccgtacatataaggttgttcctttcaccccaagtgctggtgttgttgaatgggtaaacggtactgttccactaggcgattatctaattgggagtactagaagtggtggagcacatggacgatatggaattggggactggacatatcttcaatgcagagagtacctgatgagtgtaggatatatagtcggtcttggggatcgccattccatgaatattctcatcgaccaagacacagctgaggttgtacacattgatcttggtgttgcatttgaacagggtctcatgcttaaaacacctgaacgggttccatttcggttgacaagggatattatagatggcatgggtgttactggtgttgaaggtgtgttcagaagatgttgtgagaaaactctctgtgtcatgagggcgaataaagaagcattgctcactattattgaagtcttcgttcatgatcctctatataaatgggcactctcaccactgaaagccttacagcgtcaaaaggaaacagttgatactgattcatgtttggatgactcccaagaaccttacgatggcaacaaggatgcagctcgagctatacttcgtgttaaacagaagttggatggatatgaagatggcgagatgagaagtgtgcagggccaggtccaacaactcatacaggacgcggtggatgttgatcggttgtgccaaatgtttccaggttggggaccttggttgtaagctccattgaaagggatgtaaattttgatcgaaggcaagagcaacttttttcactgcttatgaggttttattctttggtgtgtttttttccctcaccaccctgtcaacattcctacaaagtacagcaaacggcttttggtaccctgtaaattgatgggaaggcaaggacgacatttgagtgcaggtgggttgtaccactcctgttttagagcatgtccagactagaggatgggtgattgcatagtgaggccacagttttctttttttgttgagcttcattaataccccctctgtctaaaagtcctcatcgtttaagcgtcccgcaccaagaccaaggatgcccctccgcattgcagccgctgtgaagttaattatctggcgccgttttgtattttcaaaacacgcatatgtaatgtcgcaaaaattcagctgcttcgatggttggccggccataggggcggtatccatacatcacaccatcgtgcagcgtacattcagctgcttcgacggttgcataccgtagtttttgttcaggatttactttgtaaagaagtgaggctgttttgtcatgtatgtaaagggcttgtttcgatgtagcatgaaatacgaagaattatgatgcatttgaatataccgtgctcccctgagcaaaaaacaaatcaacagaagctaccacctggccgc

SEQ ID NO: 34010 - DNA, 3200 bp, Zea Mays
atggagggggcggcggcggttggcggcgcgacggtgttggggcctgcaggggcacgactgagcagtcggttggagttgttggataaagagtggaacttaattatgttccaagcagaacggaatcttgatctatttgaaccttttctggcatttaggcgtgccctccttaagattttaggttgtgaagaacatcttgtaaaacatttatttcaatctgcttctgcgctccggaagggattaaggttttctttggcagcggcagctttatatgaactcaaagaactttgttttcacagagatgagagcactatgacaaatacctatttgcttgcacggcttgaagacgctaaattgctcagagctcaagggcagcatgatatggctattagtcttggaaaatacatactacagaagctttctgacaagaaaaacctgtcagatgtctatcgattagttggcaagtggctggctgaaacaagatcaagcaactcaagaactatcattgaggactatttaagaccttctatagatctctctgaatttgagaagagtacagataaaaggtacatgtccaggcagtgtcgaacacatttccatctagcacattatacatatagtttgttcagaagctatgaggaaagactctcatctaacgaatggcaagcagctctgcgattaaggaaatacaagactagggagttggagatactgattaaaagactgagaagttcatctaagggtgtgaagactgattactcagtaaaaatccaagagttacagaaacaacttgcacttgacagagaagaagcagagaaaatacaggatgatcacgataatttcttaaatctagcacttcaaggctaccaacgttccattgttgttggtggcaaatatgacctacaagtggtttttcggttggtctcgttgtggtttagtcttttctcaagggatcaagttgtgaaagcaatgttgaaaaccacaaaagaggtccaaacctacaagttcataccactggtttatcaaattgcttcgagacttgggagcaccaaagatgctcaggggtcatttaactttcagattgcgttagcttctcttttgaagaaaatggctgttgatcacccatatcatacaatattccagcttttggctctagcaaatggtgatcgtgtcaaagacaagcaaagaagtagaagttcttttgttgtagatatggagaagaagcttgctgctgaaaatttgttaaaggagctatcttcctgtcatggacctctgatttgtcagatgaaacaaatggttgagatctacattaagttagcagaactggagaccaagaaggaggacactaacaaaaaaattccgctgcccagggaggcccgcagcattggtcagcttgaactagttccagttgtgactgctaccgttcctattgatcctagctgtcgttatgaggaaggctcctttccacatttcactgggttggctgactccattatgatcatgaatggaattaatgctcccaaagttatagaatgttttggctcggatggtaacaaataccgtcaacttgcaaaatctggaaatgatgacctgcgacaggatgctgtgatggagcaattttttagtttggtaaatacattcttgcaaaatcaccgagatacttctaaaaggagattgaaaatccgtacatataaggttgttcctttcaccccaagtgctggtgttgttgaatgggtaaacgtactagaagtggtggagcacatggacgatatggaattggggactggacatatcttcaatgcagagagtacctgatgagtgaaaaggacaaaaggagggcatttcttaaaatctgcagcaactttaggcctgtgatgcaccacttctttcttgaaagattcttgctgcctgctgattggttccaaagtagacttgcttacacaaggagtgtagcagcaagctcgatggtaggatatatagtcggtcttggggatcgccattccatgaatattctcatcgaccaagacacagctgaggttgtacacattgatcttggtgttgcatttgaacagggtctcatgcttaaaacacctgaacgggttccatttcggttgacaagggatattatagatggcatgggtgttactggtgttgaaggtgtgttcagaagatgttgtgagaaaactctctgtgtcatgagggcgaataaagaagcattgctcactattattgaagtcttcgttcatgatcctctatataaatgggcactctcaccactgaaagccttacagcgtcaaaaggaaacagttgatactgattcatgtttggatgactcccaagaaccttacgatggcaacaaggatgcagctcgagctatacttcgtgttaaacagaagttggatggatatgaagatggcgagatgagaagtgtgcagggccaggtccaacaactcatacaggacgcggtggatgttgatcggttgtgccaaatgtttccaggttggggaccttggttgtaagctccattgaaagggatgtaaattttgatcgaaggcaagagcaacttttttcactgcttatgaggttttattctttggtgtgtttttttccctcaccaccctgtcaacattcctacaaagtacagcaaacggcttttggtaccctgtaaattgatgggaaggcaaggacgacatttgagtgcaggtgggttgtaccactcctgttttagagcatgtccagactagaggatgggtgattgcatagtgaggccacagttttctttttttgttgagcttcattaataccccctctgtctaaaagtcctcatcgtttaagcgtcccgcaccaagaccaaggatgcccctccgcattgcagccgctgtgaagttaattatctggcgccgttttgtattttcaaaacacgcatatgtaatgtcgcaaaaattcagctgcttcgatggttggccggccataggggcggtatccatacatcacaccatcgtgcagcgtacattcagctgcttcgacggttgcataccgtagtttttgttcaggatttactttgtaaagaagtgaggctgttttgtcatgtatgtaaagggcttgtttcgatgtagcatgaaatacgaagaattatgatgcatttgaatataccgtgctcccctgagcaaaaaacaaatcaacagaagctaccacctggccgc

SEQ ID NO: 34011 - DNA, 3544 bp, Zea Mays
ctgaattccattcctactcccagttgcttaagagctctgcagaacggtgattctgaggagttccatgcaaaactttgtcaaactaagatggatcttgtcttggctttgtcaaacactagcaaggagagcacgaaatacatccactctaccatccttaaattacagattctagatcatgctactatggtttgggacctgcgttggaaccttaatcccaatcaaacttcaaaatctcctgtaaccaaggaattttctcacatatctactgtccctaaagggatacagttggagttgttggataaagagtggaacttaattatgttccaagcagaacggaatcttgatctatttgaaccttttctggcatttaggcgtgccctccttaagattttaggttgtgaagaacatcttgtaaaacatttatttcaatctgcttctgcgctccggaagggattaaggttttctttggcagcggcagctttatatgaactcaaagaactttgttttcacagagatgagagcactatgacaaatacctatttgcttgcacggcttgaagacgctaaattgctcagagctcaagggcagcatgatatggctattagtcttggaaaatacatactacagaagctttctgacaagaaaaacctgtcagatgtctatcgattagttggcaagtggctggctgaaacaagatcaagcaactcaagaactatcattgaggactatttaagaccttctatagatctctctgaatttgagaagagtacagataaaaggtacatgtccaggcagtgtcgaacacatttccatctagcacattatacatatagtttgttcagaagctatgaggaaagactctcatctaacgaatggcaagcagctctgcgattaaggaaatacaagactagggagttggagatactgattaaaagactgagaagttcatctaagggtgtgaagactgattactcagtaaaaatccaagagttacagaaacaacttgcacttgacagagaagaagcagagaaaatacaggatgatcacgataatttcttaaatctagcacttcaaggctaccaacgttccattgttgttggtggcaaatatgacctacaagtggtttttcggttggtctcgttgtggtttagtcttttctcaagggatcaagttgtgaaagcaatgttgaaaaccacaaaagaggtccaaacctacaagttcataccactggtttatcaaattgcttcgagacttgggagcaccaaagatgctcaggggtcatttaactttcagattgaaagaacagtacatgtcagggaggcactgtccacccggtgaacagtgcctccgtgacagactgacagtacagctctggtatcatgggcagattgcgttagcttctcttttgaagaaaatggctgttgatcacccatatcatacaatattccagcttttggctctagcaaatggtgatcgtgtcaaagacaagcaaagaagtagaagttcttttgttgtagatatggagaagaagcttgctgctgaaaatttgttaaaggagctatcttcctgtcatggacctctgatttgtcagatgaaacaaatggttgagatctacattaagttagcagaactggagaccaagaaggaggacactaacaaaaaaattccgctgcccagggaggcccgcagcattggtcagcttgaactagttccagttgtgactgctaccgttcctattgatcctagctgtcgttatgaggaaggctcctttccacatttcactgggttggctgactccattatgatcatgaatggaattaatgctcccaaagttatagaatgttttggctcggatggtaacaaataccgtcaacttgcaaaatctggaaatgatgacctgcgacaggatgctgtgatggagcaattttttagtttggtaaatacattcttgcaaaatcaccgagatacttctaaaaggagattgaaaatccgtacatataaggttgttcctttcaccccaagtgctggtgttgttgaatgggtaaacggtactgttccactaggcgattatctaattgggagtactagaagtggtggagcacatggacgatatggaattggggactggacatatcttcaatgcagagagtacctgatgagtgaaaaggacaaaaggagggcatttcttaaaatctgcagcaactttaggcctgtgatgcaccacttctttcttgaaagattcttgctgcctgctgattggttccaaagtagacttgcttacacaaggagtgtagcagcaagctcgatggtaggatatatagtcggtcttggggatcgccattccatgaatattctcatcgaccaagacacagctgaggttgtacacattgatcttggtgttgcatttgaacagggtctcatgcttaaaacacctgaacgggttccatttcggttgacaagggatattatagatggcatgggtgttactggtgttgaaggtgtgttcagaagatgttgtgagaaaactctctgtgtcatgagggcgaataaagaagcattgctcactattattgaagtcttcgttcatgatcctctatataaatgggcactctcaccactgaaagccttacagcgtcaaaaggaaacagttgatactgattcatgtttggatgactcccaagaaccttacgatggcaacaaggatgcagctcgagctatacttcgtgttaaacagaagttggatggatatgaagatggcgagatgagaagtgtgcagggccaggtccaacaactcatacaggacgcggtggatgttgatcggttgtgccaaatgtttccaggttggggaccttggttgtaagctccattgaaagggatgtaaattttgatcgaaggcaagagcaacttttttcactgcttatgaggttttattctttggtgtgtttttttccctcaccaccctgtcaacattcctacaaagtacagcaaacggcttttggtaccctgtaaattgatgggaaggcaaggacgacatttgagtgcaggtgggttgtaccactcctgttttagagcatgtccagactagaggatgggtgattgcatagtgaggccacagttttctttttttgttgagcttcattaataccccctctgtctaaaagtcctcatcgtttaagcgtcccgcaccaagaccaaggatgcccctccgcattgcagccgctgtgaagttaattatctggcgccgttttgtattttcaaaacacgcatatgtaatgtcgcaaaaattcagctgcttcgatggttggccggccataggggcggtatccatacatcacaccatcgtgcagcgtacattcagctgcttcgacggttgcataccgtagtttttgttcaggatttactttgtaaagaagtgaggctgttttgtcatgtatgtaaagggcttgtttcgatgtagcatgaaatacgaagaattatgatgcatttgaatataccgtgctcccctgagcaaaaaacaaatcaacagaagctaccacctggccgc

SEQ ID NO: 34012 - DNA, 3823 bp, Zea Mays
aaggctcatcctactataccagacacgtacccaaaccatatatatacacatcatatatggcagtctaacaataatctttattcatctccacaagatattttgacctgcaaagctcaggctatgctagatagcgtctcagcttattaggtatgagcatgaaggtgattggagtagcgcacttgaatactatgatttacttgtaaggtcaatgccaaaggaacaccttggcactttaactgggtcggtgttgactggaccatctaccgtgtcttctagagcagaagatacaatgttgaactggaaaatgcacaaaggtcttatgagatccttgcagaaaactggatgtagtcatgtgcttgatgtctactgtgaaggtttatctcaccaaaaggggtgtcttcaacaagacgcggagtttattgatatccaatatgaagctgcttggagggcaggaaattgggatttctcctttttcgttccatattcttcttggtcttcaacccgctctcgaagtagctgtcttttcaatgaaaatttacatagttgcttaagagctctgcagaacggtgattctgaggagttccatgcaaaactttgtcaaactaagatggatcttgtcttggctttgtcaaacactagcaaggagagcacgaaatacatccactctaccatccttaaattacagattctagatcatgctactatggtttgggacctgcgttggaaccttaatcccaatcaaacttcaaaatctcctgtaaccaaggaattttctcacatatctactgtccctaaagggatacagttggagttgttggataaagagtggaacttaattatgttccaagcagaacggaatcttgatctatttgaaccttttctggcatttaggcgtgccctccttaagattttaggttgtgaagaacatcttgtaaaacatttatttcaatctgcttctgcgctccggaagggattaaggttttctttggcagcggcagctttatatgaactcaaagaactttgttttcacagagatgagagcactatgacaaatacctatttgcttgcacggcttgaagacgctaaattgctcagagctcaagggcagcatgatatggctattagtcttggaaaatacatactacagaagctttctgacaagaaaaacctgtcagatgtctatcgattagttggcaagtggctggctgaaacaagatcaagcaactcaagaactatcattgaggactatttaagaccttctatagatctctctgaatttgagaagagtacagataaaaggtacatgtccaggcagtgtcgaacacatttccatctagcacattatacatatagtttgttcagaagctatgaggaaagactctcatctaacgaatggcaagcagctctgcgattaaggaaatacaagactagggagttggagatactgattaaaagactgagaagttcatctaagggtgtgaagactgattactcagtaaaaatccaagagttacagaaacaacttgcacttgacagagaagaagcagagaaaatacaggatgatcacgataatttcttaaatctagcacttcaaggctaccaacgttccattgttgttggtggcaaatatgacctacaagtggtttttcggttggtctcgttgtggtttagtcttttctcaagggatcaagttgtgaaagcaatgttgaaaaccacaaaagaggtccaaacctacaagttcataccactggtttatcaaattgcttcgagacttgggagcaccaaagatgctcaggggtcatttaactttcagattgcgttagcttctcttttgaagaaaatggctgttgatcacccatatcatacaatattccagcttttggctctagcaaatggtgatcgtgtcaaagacaagcaaagaagtagaagttcttttgttgtagatatggagaagaagcttgctgctgaaaatttgttaaaggagctatcttcctgtcatggacctctgatttgtcagatgaaacaaatggttgagatctacattaagttagcagaactggagaccaagaaggaggacactaacaaaaaaattccgctgcccagggaggcccgcagcattggtcagcttgaactagttccagttgtgactgctaccgttcctattgatcctagctgtcgttatgaggaaggctcctttccacatttcactgggttggctgactccattatgatcatgaatggaattaatgctcccaaagttatagaatgttttggctcggatggtaacaaataccgtcaacttgcaaaatctggaaatgatgacctgcgacaggatgctgtgatggagcaattttttagtttggtaaatacattcttgcaaaatcaccgagatacttctaaaaggagattgaaaatccgtacatataaggttgttcctttcaccccaagtgctggtgttgttgaatgggtaaacggtactgttccactaggcgattatctaattgggagtactagaagtggtggagcacatggacgatatggaattggggactggacatatcttcaatgcagagagtacctgatgagtgtaggatatatagtcggtcttggggatcgccattccatgaatattctcatcgaccaagacacagctgaggttgtacacattgatcttggtgttgcatttgaacagggtctcatgcttaaaacacctgaacgggttccatttcggttgacaagggatattatagatggcatgggtgttactggtgttgaaggtgtgttcagaagatgttgtgagaaaactctctgtgtcatgagggcgaataaagaagcattgctcactattattgaagtcttcgttcatgatcctctatataaatgggcactctcaccactgaaagccttacagcgtcaaaaggaaacagttgatactgattcatgtttggatgactcccaagaaccttacgatggcaacaaggatgcagctcgagctatacttcgtgttaaacagaagttggatggatatgaagatggcgagatgagaagtgtgcagggccaggtccaacaactcatacaggacgcggtggatgttgatcggttgtgccaaatgtttccaggttggggaccttggttgtaagctccattgaaagggatgtaaattttgatcgaaggcaagagcaacttttttcactgcttatgaggttttattctttggtgtgtttttttccctcaccaccctgtcaacattcctacaaagtacagcaaacggcttttggtaccctgtaaattgatgggaaggcaaggacgacatttgagtgcaggtgggttgtaccactcctgttttagagcatgtccagactagaggatgggtgattgcatagtgaggccacagttttctttttttgttgagcttcattaataccccctctgtctaaaagtcctcatcgtttaagcgtcccgcaccaagaccaaggatgcccctccgcattgcagccgctgtgaagttaattatctggcgccgttttgtattttcaaaacacgcatatgtaatgtcgcaaaaattcagctgcttcgatggttggccggccataggggcggtatccatacatcacaccatcgtgcagcgtacattcagctgcttcgacggttgcataccgtagtttttgttcaggatttactttgtaaagaagtgaggctgttttgtcatgtatgtaaagggcttgtttcgatgtagcatgaaatacgaagaattatgatgcatttgaatataccgtgctcccctgagcaaaaaacaaatcaacagaagctaccacctggccgc

SEQ ID NO: 34013 - DNA, 5049 bp, Zea Mays
atgttcttggctccagcagaaagccacaatctcatcttgtctttaaatccgtcctctaagggtattctgtcaacagcacgggggctcaatgctctgcagtttcttgattctcccgataggtctttactcatggttcattcgagaggggtaaacattcagatagttgaacagactatatcacaaatggaacagtgtgctggtgtttcacttgatgatgcagatgtgtgggacactgatggtcgaacttgcaagcaatggctgtgcacccttgtcagctcacttatttgccactgtgaagataccatcttgagactctgtaggagtattgtttttgtcaaagttaaggctgctgagcttttgctttctagtactctagtgaacattgctggcaatgttgattctaatactgccatctgcaaattaatttcaacaaaggttgagaaaataattttttccgactccaatcattcattgaagtcaatccatctgtttctggatgcactgaatgtcattagatctttttatgttgctgaaaaagccagaactttcccttctaatactctcaaggtatgttgttactgttgttctctattgaagtgcaccacgtgttgcatatttcatgttgaagtagtaattgaaatgatctatttcttataccataaccaactgtaaaacaagtaaactcattgaatacttaatcgctgcctcccatctgtctacctatatcaactagacttgttacttatattgttaacatctttaagccaaggaggcttcatgtgaccactgttattcttcacatgaatctcatctgtcctcaagaagccctgttgatgattacctgaaactgctagcgtgcactattcagtgaccaattgagttttggctaattttgtataacctttgttgattctattttctagtgatgctctctcctagggaagggacatatgtttcctttttttgcattagccagtatccagaaagtattggtaatgttattgtcagttatcactacctttgtctaaatgtctattgtataattttgcctgaacaatgttattcatatttatctcatcattgacctaccatttgaactattaggatggtagatctgctagatcaaaaagtcgatcaccagtgacaaccccatcatcatcatggaagaaggtatactggctttctgttgattatcttgttgctgccagagctgctagtcgatgttcatgtgactttgccatactaatgtatgttgagctttggtgtgaggaacaattcaataggctggtattaggacctccagagttttccaatgaagagttgttgccacctcatgttgatctgttggttgctgcatttactcgtataaatgaaccagacagcatttatgggctcacactatctaatgagatagcgtctcagcttattaggtatgagcatgaaggtgattggagtagcgcacttgaatactatgatttacttgtaaggtcaatgccaaaggaacaccttggcactttaactgggtcggtgttgactggaccatctaccgtgtcttctagagcagaagatacaatgttgaactggaaaatgcacaaaggtcttatgagatccttgcagaaaactggatgtagtcatgtgcttgatgtctactgtgaaggtttatctcaccaaaaggggtgtcttcaacaagacgcggagtttattgatatccaattgcttaagagctctgcagaacggtgattctgaggagttccatgcaaaactttgtcaaactaagatggatcttgtcttggctttgtcaaacactagcaaggagagcacgaaatacatccactctaccatccttaaattacagattctagatcatgctactatggtttgggacctgcgttggaaccttaatcccaatcaaacttcaaaatctcctgtaaccaaggaattttctcacatatctactgtccctaaagggatacagttggagttgttggataaagagtggaacttaattatgttccaagcagaacggaatcttgatctatttgaaccttttctggcatttaggcgtgccctccttaagattttaggttgtgaagaacatcttgtaaaacatttatttcaatctgcttctgcgctccggaagggattaaggttttctttggcagcggcagctttatatgaactcaaagaactttgttttcacagagatgagagcactatgacaaatacctatttgcttgcacggcttgaagacgctaaattgctcagagctcaagggcagcatgatatggctattagtcttggaaaatacatactacagaagctttctgacaagaaaaacctgtcagatgtctatcgattagttggcaagtggctggctgaaacaagatcaagcaactcaagaactatcattgaggactatttaagaccttctatagatctctctgaatttgagaagagtacagataaaaggtacatgtccaggcagtgtcgaacacatttccatctagcacattatacatatagtttgttcagaagctatgaggaaagactctcatctaacgaatggcaagcagctctgcgattaaggaaatacaagactagggagttggagatactgattaaaagactgagaagttcatctaagggtgtgaagactgattactcagtaaaaatccaagagttacagaaacaacttgcacttgacagagaagaagcagagaaaatacaggatgatcacgataatttcttaaatctagcacttcaaggctaccaacgttccattgttgttggtggcaaatatgacctacaagtggtttttcggttggtctcgttgtggtttagtcttttctcaagggatcaagttgtgaaagcaatgttgaaaaccacaaaagaggtccaaacctacaagttcataccactggtttatcaaattgcttcgagacttgggagcaccaaagatgctcaggggtcatttaactttcagattgcgttagcttctcttttgaagaaaatggctgttgatcacccatatcatacaatattccagcttttggctctagcaaatggtgatcgtgtcaaagacaagcaaagaagtagaagttcttttgttgtagatatggagaagaagcttgctgctgaaaatttgttaaaggagctatcttcctgtcatggacctctgatttgtcagatgaaacaaatggttgagatctacattaagttagcagaactggagaccaagaaggaggacactaacaaaaaaattccgctgcccagggaggcccgcagcattggtcagcttgaactagttccagttgtgactgctaccgttcctattgatcctagctgtcgttatgaggaaggctcctttccacatttcactgggttggctgactccattatgatcatgaatggaattaatgctcccaaagttatagaatgttttggctcggatggtaacaaataccgtcaacttgcaaaatctggaaatgatgacctgcgacaggatgctgtgatggagcaattttttagtttggtaaatacattcttgcaaaatcaccgagatacttctaaaaggagattgaaaatccgtacatataaggttgttcctttcaccccaagtgctggtgttgttgaatgggtaaacggtactgttccactaggcgattatctaattgggagtactagaagtggtggagcacatggacgatatggaattggggactggacatatcttcaatgcagagagtacctgatgagtgaaaaggacaaaaggagggcatttcttaaaatctgcagcaactttaggcctgtgatgcaccacttctttcttgaaagattcttgctgcctgctgattggttccaaagtagacttgcttacacaaggagtgtagcagcaagctcgatggtaggatatatagtcggtcttggggatcgccattccatgaatattctcatcgaccaagacacagctgaggttgtacacattgatcttggtgttgcatttgaacagggtctcatgcttaaaacacctgaacgggttccatttcggttgacaagggatattatagatggcatgggtgttactggtgttgaaggtgtgttcagaagatgttgtgagaaaactctctgtgtcatgagggcgaataaagaagcattgctcactattattgaagtcttcgttcatgatcctctatataaatgggcactctcaccactgaaagccttacagcgtcaaaaggaaacagttgatactgattcatgtttggatgactcccaagaaccttacgatggcaacaaggatgcagctcgagctatacttcgtgttaaacagaagttggatggatatgaagatggcgagatgagaagtgtgcagggccaggtccaacaactcatacaggacgcggtggatgttgatcggttgtgccaaatgtttccaggttggggaccttggttgtaagctccattgaaagggatgtaaattttgatcgaagcaaacggcttttggtaccctgtaaattgatgggaaggcaaggacgacatttgagtgcaggtgggttgtaccactcctgttttagagcatgtccagactagaggatgggtgattgcatagtgaggccacagttttctttttttgttgagcttcattaataccccctctgtctaaaagtcctcatcgtttaagcgtcccgcaccaagaccaaggatgcccctccgcattgcagccgctgtgaagttaattatctggcgccgttttgtattttcaaaacacgcatatgtaatgtcgcaaaaattcagctgcttcgatggttggccggccataggggcggtatccatacatcacaccatcgtgcagcgtacattcagctgcttcgacggttgcataccgtagtttttgttcaggatttactttgtaaagaagtgaggctgttttgtcatgtatgtaaagggcttgtttcgatgtagcatgaaatacgaagaattatgatgcatttgaatataccgtgctcccctgagcaaaaaacaaatcaacagaagctaccacctggccgc

SEQ ID NO: 34014 - DNA, 4709 bp, Zea Mays
atgttcttggctccagcagaaagccacaatctcatcttgtctttaaatccgtcctctaagggtattctgtcaacagcacgggggctcaatgctctgcagtttcttgattctcccgataggtctttactcatggttcattcgagaggggtaaacattcagatagttgaacagactatatcacaaatggaacagtgtgctggtgtttcacttgatgatgcagatgtgtgggacactgatggtcgaacttgcaagcaatggctgtgcacccttgtcagctcacttatttgccactgtgaagataccatcttgagactctgtaggagtattgtttttgtcaaagttaaggctgctgagcttttgctttctagtactctagtgaacattgctggcaatgttgattctaatactgccatctgcaaattaatttcaacaaaggttgagaaaataattttttccgactccaatcattcattgaagtcaatccatctgtttctggatgcactgaatgtcattagatctttttatgttgctgaaaaagccagaactttcccttctaatactctcaaggatggtagatctgctagatcaaaaagtcgatcaccagtgacaaccccatcatcatcatggaagaaggtatactggctttctgttgattatcttgttgctgccagagctgctagtcgatgttcatgtgactttgccatactaatgtatgttgagctttggtgtgaggaacaattcaataggctggtattaggacctccagagttttccaatgaagagttgttgccacctcatgttgatctgttggttgctgcatttactcgtataaatgaaccagacagcatttatgggctcacactatctaatgagatagcgtctcagcttattaggtatgagcatgaaggtgattggagtagcgcacttgaatactatgatttacttgtaaggtcaatgccaaaggaacaccttggcactttaactgggtcggtgttgactggaccatctaccgtgtcttctagagcagaagatacaatgttgaactggaaaatgcacaaaggtcttatgagatccttgcagaaaactggatgtagtcatgtgcttgatgtctactgtgaaggtttatctcaccaaaaggggtgtcttcaacaagacgcggagtttattgatatccaatatgaagctgcttggagggcaggaaattgggatttctcctttttcgttccatattcttcttggtcttcaacccgctctcgaagtagctgtcttttcaatgaaaatttacatagttgcttaagagctctgcagaacggtgattctgaggagttccatgcaaaactttgtcaaactaagatggatcttgtcttggctttgtcaaacactagcaaggagagcacgaaatacatccactctaccatccttaaattacagattctagatcatgctactatggtttgggacctgcgttggaaccttaatcccaatcaaacttcaaaatctcctgtaaccaaggaattttctcacatatctactgtccctaaagggatacagttggagttgttggataaagagtggaacttaattatgttccaagcagaacggaatcttgatctatttgaaccttttctggcatttaggcgtgccctccttaagattttaggttgtgaagaacatcttgtaaaacatttatttcaatctgcttctgcgctccggaagggattaaggttttctttggcagcggcagctttatatgaactcaaagaactttgttttcacagagatgagagcactatgacaaatacctatttgcttgcacggcttgaagacgctaaattgctcagagctcaagggcagcatgatatggctattagtcttggaaaatacatactacagaagctttctgacaagaaaaacctgtcagatgtctatcgattagttggcaagtggctggctgaaacaagatcaagcaactcaagaactatcattgaggactatttaagaccttctatagatctctctgaatttgagaagagtacagataaaaggtacatgtccaggcagtgtcgaacacatttccatctagcacattatacatatagtttgttcagaagctatgaggaaagactctcatctaacgaatggcaagcagctctgcgattaaggaaatacaagactagggagttggagatactgattaaaagactgagaagttcatctaagggtgtgaagactgattactcagtaaaaatccaagagttacagaaacaacttgcacttgacagagaagaagcagagaaaatacaggatgatcacgataatttcttaaatctagcacttcaaggctaccaacgttccattgttgttggtggcaaatatgacctacaagtggtttttcggttggtctcgttgtggtttagtcttttctcaagggatcaagttgtgaaagcaatgttgaaaaccacaaaagaggtccaaacctacaagttcataccactggtttatcaaattgcttcgagacttgggagcaccaaagatgctcaggggtcatttaactttcagattgcgttagcttctcttttgaagaaaatggctgttgatcacccatatcatacaatattccagcttttggctctagcaaatggtgatcgtgtcaaagacaagcaaagaagtagaagttcttttgttgtagatatggagaagaagcttgctgctgaaaatttgttaaaggagctatcttcctgtcatggacctctgatttgtcagatgaaacaaatggttgagatctacattaagttagcagaactggagaccaagaaggaggacactaacaaaaaaattccgctgcccagggaggcccgcagcattggtcagcttgaactagttccagttgtgactgctaccgttcctattgatcctagctgtcgttatgaggaaggctcctttccacatttcactgggttggctgactccattatgatcatgaatggaattaatgctcccaaagttatagaatgttttggctcggatggtaacaaataccgtcaacttgcaaaatctggaaatgatgacctgcgacaggatgctgtgatggagcaattttttagtttggtaaatacattcttgcaaaatcaccgagatacttctaaaaggagattgaaaatccgtacatataaggttgttcctttcaccccaagtgctggtgttgttgaatgggtaaacggtactgttccactaggcgattatctaattgggagtactagaagtggtggagcacatggacgatatggaattggggactggacatatcttcaatgcagagagtacctgatgagtgaaaaggacaaaaggagggcatttcttaaaatctgcagcaactttaggcctgtgatgcaccacttctttcttgaaagattcttgctgcctgctgattggttccaaagtagacttgcttacacaaggagtgtagcagcaagctcgatggtaggatatatagtcggtcttggggatcgccattccatgaatattctcatcgaccaagacacagctgaggttgtacacattgatcttggtgttgcatttgaacagggtctcatgcttaaaacacctgaacgggttccatttcggttgacaagggatattatagatggcatgggtgttactggtgttgaaggtgtgttcagaagatgttgtgagaaaactctctgtgtcatgagggcgaataaagaagcattgctcactattattgaagtcttcgttcatgatcctctatataaatgggcactctcaccactgaaagccttacagcgtcaaaagttgatactgattcatgtttggatgactcccaagaaccttacgatggcaacaaggatgcagctcgagctatacttcgtgttaaacagaagttggatggatatgaagatggcgagatgagaagtgtgcagggccaggtccaacaactcatacaggacgcggtggatgttgatcggttgtgccaaatgtttccaggttggggaccttggttgtaagctccattgaaagggatgtaaattttgatcgaaggcaagagcaacttttttcactgcttatgaggttttattctttggtgtgtttttttccctcaccaccctgtcaacattcctacaaagtacagcaaacggcttttggtaccctgtaaattgatgggaaggcaaggacgacatttgagtgcaggtgggttgtaccactcctgttttagagcatgtccagactagaggatgggtgattgcatagtgaggccacagttttctttttttgttgagcttcattaataccccctctgtctaaaagtcctcatcgtttaagcgtcccgcaccaagaccaaggatgcccctccgcattgcagccgctgtgaagttaattatctggcgccgttttgtattttcaaaacacgcatatgtaatgtcgcaaaaattcagctgcttcgatggttggccggccataggggcggtatccatacatcacaccatcgtgcagcgtacattcagctgcttcgacggttgcataccgtagtttttgttcaggatttactttgtaaagaagtgaggctgttttgtcatgtatgtaaagggcttgtttcgatgtagcatgaaatacgaagaattatgatgcatttgaatataccgtgctcccctgagcaaaaaacaaatcaacagaagctaccacctggccgc

SEQ ID NO: 34015 - DNA, 5106 bp, Zea Mays
atgttcttggctccagcagaaagccacaatctcatcttgtctttaaatccgtcctctaagggtattctgtcaacagcacgggggctcaatgctctgcagtttcttgattctcccgataggtctttactcatggttcattcgagaggggtaaacattcagatagttgaacagactatatcacaaatggaacagtgtgctggtgtttcacttgatgatgcagatgtgtgggacactgatggtcgaacttgcaagcaatggctgtgcacccttgtcagctcacttatttgccactgtgaagataccatcttgagactctgtaggagtattgtttttgtcaaagttaaggctgctgagcttttgctttctagtactctagtgaacattgctggcaatgttgattctaatactgccatctgcaaattaatttcaacaaaggttgagaaaataattttttccgactccaatcattcattgaagtcaatccatctgtttctggatgcactgaatgtcattagatctttttatgttgctgaaaaagccagaactttcccttctaatactctcaaggtatgttgttactgttgttctctattgaagtgcaccacgtgttgcatatttcatgttgaagtagtaattgaaatgatctatttcttataccataaccaactgtaaaacaagtaaactcattgaatacttaatcgctgcctcccatctgtctacctatatcaactagacttgttacttatattgttaacatctttaagccaaggaggcttcatgtgaccactgttattcttcacatgaatctcatctgtcctcaagaagccctgttgatgattacctgaaactgctagcgtgcactattcagtgaccaattgagttttggctaattttgtataacctttgttgattctattttctagtgatgctctctcctagggaagggacatatgtttcctttttttgcattagccagtatccagaaagtattggtaatgttattgtcagttatcactacctttgtctaaatgtctattgtataattttgcctgaacaatgttattcatatttatctcatcattgacctaccatttgaactattaggatggtagatctgctagatcaaaaagtcgatcaccagtgacaaccccatcatcatcatggaagaaggtatactggctttctgttgattatcttgttgctgccagagctgctagtcgatgttcatgtgactttgccatactaatgtatgttgagctttggtgtgaggaacaattcaataggctggtattaggacctccagagttttccaatgaagagttgttgccacctcatgttgatctgttggttgctgcatttactcgtataaatgaaccagacagcatttatgggctcacactatctaatgagatagcgtctcagcttattaggtatgagcatgaaggtgattggagtagcgcacttgaatactatgatttacttgtaaggtcaatgccaaaggaacaccttggcactttaactgggtcggtgttgactggaccatctaccgtgtcttctagagcagaagatacaatgttgaactggaaaatgcacaaaggtcttatgagatccttgcagaaaactggatgtagtcatgtgcttgatgtctactgtgaaggtttatctcaccaaaaggggtgtcttcaacaagacgcggagtttattgatatccaatatgaagctgcttggagggcaggaaattgggatttctcctttttcgttccatattcttcttggtcttcaacccgctctcgaagtagctgtcttttcaatgaaaatttacatagttgcttaagagctctgcagaacggtgattctgaggagttccatgcaaaactttgtcaaactaagatggatcttgtcttggctttgtcaaacactagcaaggagagcacgaaatacatccactctaccatccttaaattacagattctagatcatgctactatggtttgggacctgcgttggaaccttaatcccaatcaaacttcaaaatctcctgtaaccaaggaattttctcacatatctactgtccctaaagggatacagttggagttgttggataaagagtggaacttaattatgttccaagcagaacggaatcttgatctatttgaaccttttctggcatttaggcgtgccctccttaagattttaggttgtgaagaacatcttgtaaaacatttatttcaatctgcttctgcgctccggaagggattaaggttttctttggcagcggcagctttatatgaactcaaagaactttgttttcacagagatgagagcactatgacaaatacctatttgcttgcacggcttgaagacgctaaattgctcagagctcaagggcagcatgatatggctattagtcttggaaaatacatactacagaagctttctgacaagaaaaacctgtcagatgtctatcgattagttggcaagtggctggctgaaacaagatcaagcaactcaagaactatcattgaggactatttaagaccttctatagatctctctgaatttgagaagagtacagataaaaggtacatgtccaggcagtgtcgaacacatttccatctagcacattatacatatagtttgttcagaagctatgaggaaagactctcatctaacgaatggcaagcagctctgcgattaaggaaatacaagactagggagttggagatactgattaaaagactgagaagttcatctaagggtgtgaagactgattactcagtaaaaatccaagagttacagaaacaacttgcacttgacagagaagaagcagagaaaatacaggatgatcacgataatttcttaaatctagcacttcaaggctaccaacgttccattgttgttggtggcaaatatgacctacaagtggtttttcggttggtctcgttgtggtttagtcttttctcaagggatcaagttgtgaaagcaatgttgaaaaccacaaaagaggtccaaacctacaagttcataccactggtttatcaaattgcttcgagacttgggagcaccaaagatgctcaggggtcatttaactttcagattgcgttagcttctcttttgaagaaaatggctgttgatcacccatatcatacaatattccagcttttggctctagcaaatggtgatcgtgtcaaagacaagcaaagaagtagaagttcttttgttgtagatatggagaagaagcttgctgctgaaaatttgttaaaggagctatcttcctgtcatggacctctgatttgtcagatgaaacaaatggttgagatctacattaagttagcagaactggagaccaagaaggaggacactaacaaaaaaattccgctgcccagggaggcccgcagcattggtcagcttgaactagttccagttgtgactgctaccgttcctattgatcctagctgtcgttatgaggaaggctcctttccacatttcactgggttggctgactccattatgatcatgaatggaattaatgctcccaaagttatagaatgttttggctcggatggtaacaaataccgtcaacttgcaaaatctggaaatgatgacctgcgacaggatgctgtgatggagcaattttttagtttggtaaatacattcttgcaaaatcaccgagatacttctaaaaggagattgaaaatccgtacatataaggttgttcctttcaccccaagtgctggtgttgttgaatgggtaaacggtactgttccactaggcgattatctaattgggagtactagaagtggtggagcacatggacgatatggaattggggactggacatatcttcaatgcagagagtacctgatgagtgtaggatatatagtcggtcttggggatcgccattccatgaatattctcatcgaccaagacacagctgaggttgtacacattgatcttggtgttgcatttgaacagggtctcatgcttaaaacacctgaacgggttccatttcggttgacaagggatattatagatggcatgggtgttactggtgttgaaggtgtgttcagaagatgttgtgagaaaactctctgtgtcatgagggcgaataaagaagcattgctcactattattgaagtcttcgttcatgatcctctatataaatgggcactctcaccactgaaagccttacagcgtcaaaaggaaacagttgatactgattcatgtttggatgactcccaagaaccttacgatggcaacaaggatgcagctcgagctatacttcgtgttaaacagaagttggatggatatgaagatggcgagatgagaagtgtgcagggccaggtccaacaactcatacaggacgcggtggatgttgatcggttgtgccaaatgtttccaggttggggaccttggttgtaagctccattgaaagggatgtaaattttgatcgaaggcaagagcaacttttttcactgcttatgaggttttattctttggtgtgtttttttccctcaccaccctgtcaacattcctacaaagtacagcaaacggcttttggtaccctgtaaattgatgggaaggcaaggacgacatttgagtgcaggtgggttgtaccactcctgttttagagcatgtccagactagaggatgggtgattgcatagtgaggccacagttttctttttttgttgagcttcattaataccccctctgtctaaaagtcctcatcgtttaagcgtcccgcaccaagaccaaggatgcccctccgcattgcagccgctgtgaagttaattatctggcgccgttttgtattttcaaaacacgcatatgtaatgtcgcaaaaattcagctgcttcgatggttggccggccataggggcggtatccatacatcacaccatcgtgcagcgtacattcagctgcttcgacggttgcataccgtagtttttgttcaggatttactttgtaaagaagtgaggctgttttgtcatgtatgtaaagggcttgtttcgatgtagcatgaaatacgaagaattatgatgcatttgaatataccgtgctcccctgagcaaaaaacaaatcaacagaagctaccacctggccgc

SEQ ID NO: 34016 - DNA, 4816 bp, Zea Mays
aaaacacacaccgcacagacacatacgacacacctacaccccagtcgtttaataggctataagactttcctttctctatccagggtcaaaaagagagcgcatgttcttggctccagcagaaagccacaatctcatcttgtctttaaatccgtcctctaagggtattctgtcaacagcacgggggctcaatgctctgcagtttcttgattctcccgataggtctttactcatggttcattcgagaggggtaaacattcagatagttgaacagactatatcacaaatggaacagtgtgctggtgtttcacttgatgatgcagatgtgtgggacactgatggtcgaacttgcaagcaatggctgtgcacccttgtcagctcacttatttgccactgtgaagataccatcttgagactctgtaggagtattgtttttgtcaaagttaaggctgctgagcttttgctttctagtactctagtgaacattgctggcaatgttgattctaatactgccatctgcaaattaatttcaacaaaggttgagaaaataattttttccgactccaatcattcattgaagtcaatccatctgtttctggatgcactgaatgtcattagatctttttatgttgctgaaaaagccagaactttcccttctaatactctcaaggatggtagatctgctagatcaaaaagtcgatcaccagtgacaaccccatcatcatcatggaagaaggtatactggctttctgttgattatcttgttgctgccagagctgctagtcgatgttcatgtgactttgccatactaatgtatgttgagctttggtgtgaggaacaattcaataggctggtattaggacctccagagttttccaatgaagagttgttgccacctcatgttgatctgttggttgctgcatttactcgtataaatgaaccagacagcatttatgggctcacactatctaatgagatagcgtctcagcttattaggtatgagcatgaaggtgattggagtagcgcacttgaatactatgatttacttgtaaggtcaatgccaaaggaacaccttggcactttaactgggtcggtgttgactggaccatctaccgtgtcttctagagcagaagatacaatgttgaactggaaaatgcacaaaggtcttatgagatccttgcagaaaactggatgtagtcatgtgcttgatgtctactgtgaaggtttatctcaccaaaaggggtgtcttcaacaagacgcggagtttattgatatccaatatgaagctgcttggagggcaggaaattgggatttctcctttttcgttccatattcttcttggtcttcaacccgctctcgaagtagctgtcttttcaatgaaaatttacatagttgcttaagagctctgcagaacggtgattctgaggagttccatgcaaaactttgtcaaactaagatggatcttgtcttggctttgtcaaacactagcaaggagagcacgaaatacatccactctaccatccttaaattacagattctagatcatgctactatggtttgggacctgcgttggaaccttaatcccaatcaaacttcaaaatctcctgtaaccaaggaattttctcacatatctactgtccctaaagggatacagttggagttgttggataaagagtggaacttaattatgttccaagcagaacggaatcttgatctatttgaaccttttctggcatttaggcgtgccctccttaagattttaggttgtgaagaacatcttgtaaaacatttatttcaatctgcttctgcgctccggaagggattaaggttttctttggcagcggcagctttatatgaactcaaagaactttgttttcacagagatgagagcactatgacaaatacctatttgcttgcacggcttgaagacgctaaattgctcagagctcaagggcagcatgatatggctattagtcttggaaaatacatactacagaagctttctgacaagaaaaacctgtcagatgtctatcgattagttggcaagtggctggctgaaacaagatcaagcaactcaagaactatcattgaggactatttaagaccttctatagatctctctgaatttgagaagagtacagataaaaggtacatgtccaggcagtgtcgaacacatttccatctagcacattatacatatagtttgttcagaagctatgaggaaagactctcatctaacgaatggcaagcagctctgcgattaaggaaatacaagactagggagttggagatactgattaaaagactgagaagttcatctaagggtgtgaagactgattactcagtaaaaatccaagagttacagaaacaacttgcacttgacagagaagaagcagagaaaatacaggatgatcacgataatttcttaaatctagcacttcaaggctaccaacgttccattgttgttggtggcaaatatgacctacaagtggtttttcggttggtctcgttgtggtttagtcttttctcaagggatcaagttgtgaaagcaatgttgaaaaccacaaaagaggtccaaacctacaagttcataccactggtttatcaaattgcttcgagacttgggagcaccaaagatgctcaggggtcatttaactttcagattgcgttagcttctcttttgaagaaaatggctgttgatcacccatatcatacaatattccagcttttggctctagcaaatggtgatcgtgtcaaagacaagcaaagaagtagaagttcttttgttgtagatatggagaagaagcttgctgctgaaaatttgttaaaggagctatcttcctgtcatggacctctgatttgtcagatgaaacaaatggttgagatctacattaagttagcagaactggagaccaagaaggaggacactaacaaaaaaattccgctgcccagggaggcccgcagcattggtcagcttgaactagttccagttgtgactgctaccgttcctattgatcctagctgtcgttatgaggaaggctcctttccacatttcactgggttggctgactccattatgatcatgaatggaattaatgctcccaaagttatagaatgttttggctcggatggtaacaaataccgtcaacttgcaaaatctggaaatgatgacctgcgacaggatgctgtgatggagcaattttttagtttggtaaatacattcttgcaaaatcaccgagatacttctaaaaggagattgaaaatccgtacatataaggttgttcctttcaccccaagtgctggtgttgttgaatgggtaaacggtactgttccactaggcgattatctaattgggagtactagaagtggtggagcacatggacgatatggaattggggactggacatatcttcaatgcagagagtacctgatgagtgaaaaggacaaaaggagggcatttcttaaaatctgcagcaactttaggcctgtgatgcaccacttctttcttgaaagattcttgctgcctgctgattggttccaaagtagacttgcttacacaaggagtgtagcagcaagctcgatggtaggatatatagtcggtcttggggatcgccattccatgaatattctcatcgaccaagacacagctgaggttgtacacattgatcttggtgttgcatttgaacagggtctcatgcttaaaacacctgaacgggttccatttcggttgacaagggatattatagatggcatgggtgttactggtgttgaaggtgtgttcagaagatgttgtgagaaaactctctgtgtcatgagggcgaataaagaagcattgctcactattattgaagtcttcgttcatgatcctctatataaatgggcactctcaccactgaaagccttacagcgtcaaaaggaaacagttgatactgattcatgtttggatgactcccaagaaccttacgatggcaacaaggatgcagctcgagctatacttcgtgttaaacagaagttggatggatatgaagatggcgagatgagaagtgtgcagggccaggtccaacaactcatacaggacgcggtggatgttgatcggttgtgccaaatgtttccaggttggggaccttggttgtaagctccattgaaagggatgtaaattttgatcgaaggcaagagcaacttttttcactgcttatgaggttttattctttggtgtgtttttttccctcaccaccctgtcaacattcctacaaagtacagcaaacggcttttggtaccctgtaaattgatgggaaggcaaggacgacatttgagtgcaggtgggttgtaccactcctgttttagagcatgtccagactagaggatgggtgattgcatagtgaggccacagttttctttttttgttgagcttcattaataccccctctgtctaaaagtcctcatcgtttaagcgtcccgcaccaagaccaaggatgcccctccgcattgcagccgctgtgaagttaattatctggcgccgttttgtattttcaaaacacgcatatgtaatgtcgcaaaaattcagctgcttcgatggttggccggccataggggcggtatccatacatcacaccatcgtgcagcgtacattcagctgcttcgacggttgcataccgtagtttttgttcaggatttactttgtaaagaagtgaggctgttttgtcatgtatgtaaagggcttgtttcgatgtagcatgaaatacgaagaattatgatgcatttgaatataccgtgctcccctgagcaaaaaacaaatcaacagaagctaccacctggccgc

SEQ ID NO: 34017 - DNA, 7140 bp, Zea Mays
atgtgggtcaatgtagtgctaaagaatgttcccttgtatgtatttagttttctgattattggcattcctggattggaattctctcttttgaatgaacaaaatgttgttatcattcctgaagctattttctcgctgtgtgctggcttttcatcaccagtaattaattcatcggatatattgcaactgtttggtcattgtaaaattcattccaagatgtctcttgaggatgataactgggttcttaaagatgaactaccctactctgtggaagctttgtcagaaatcactctggatacttgtaccaaggttatgtctcataaatgccaccttatacatcttccggggactatccagcaaccaatgctcctagagctcatggaattcatgaaaggatttgtggcttcaaatgagcagtttgagaaagtggacttgaataatcttgttcttgtttgttctcttctctgcaatctgattcattgtgcattgttgtcaaggaccatggaagaaaaatcttcacttttgcaagaaacagtagattatgtcaccaatattttaaaacatattgtgtcatttgttgtgaagaagaatgatgaactttctcatggtcttactaacataagttcagcattggatacaatgggctctgctttctcctcaatcaagagcttactgtcttctccaatatttaatctgtcaagagttgataatggagtttgttctgttgttatcaaaagcattactgaattacttgatgaactcttggtggcaatttctcagctgttttgtcagatctctagtttagtgagcaattttgatgcagagagtactggtaaaatgctaccaacatctagtatcaatttagaggacctaaatcctgttttggactgtaaaagtagtgttgctgatatggatcttgatgtgatggactctagtgaagtagattctgtcacagctagtgcgagtggaagtatgggtagcttcttacgacctttggaatggaagctagatctagtttgcattatttcaacttttttctcagtttcatcacttcatacatgggaaattttgtacagcttggtggataaagaaggtgacgtgaaggttcgccaggccatcttgcttaacctttgcagaaacatctccgcgtcatctaaaactgtatctttagtggtccattttatagttgatatgagggacagaggtgcaagttcattacttggacctgcagagtgcttaactcacatacatgctttattaaaagcgttgatagctatccatggtggacagaatgctgatggaaagcaaccaggacgcgaagtatttttcagtgagaaccaggatatcttatttgacttgttaaatagggctacagacataagttctgtagattggttttctcgcatcaagttcattgattgtgtctcctcctttgtttgcctgttccctgatgttgcccaggatttgatcggatgtttgcttgacatgctgcatgatgctgattaccgtgtcaggttgtatttggctaggcaaatcgtcgtgttattccaaacatgggaagggcacaatgaattatttaatgatgtttgggatgataacttggctgatacagttgttagtgataaagttaatatatttcgtgctgacagagtttttaagttcctgttgtcgatacatcagcaagttgcagatgccagccattccaggcacatgggtcatcgtctttgtgcaattgaggttttaatagatgtacttgggcacagagtggttcttgagagcacttgcttctatattatttctatagtggggaactatattcagcaaaaaccactgcaaggccagtgctgtaatattttgtctaaattgttggctgcttttgatggaaacacctctgctgaaaccctgcaagtgcttggcagacagcttcaggtagtagttccaaaattaattttttcctgcctaattaatgagaaagaagaaagaagtggtactgaagattcatcaagagttctttctttactccatcaattgacagtggagattgatcctctgctttatgattacataagagagttagaaccacttcctgatcttgattgcttgaaagatgtacaggagtttcatgcttcactttctgcctcacattcttcaaggaatcagttcttaaagtttgttaataaggctccttatttaccaccagaactatttttgttgagtcttcgtgcgtatcacaaaaagttatttttgggagaaatcattcgtagaagtgacctatctgcggctgatacaaacatggttagctgctggcatagtgacccagatgtcatttctgctgtatgggctcttgttgacatttgtagctcatcatctgtagcaaatgaagcttcttgggtgcttgctgattttatctctagggctggtatatctgatgcacatcaagtaatattccgtctgccaactaccaccgaaaattattctttacaactacatactggttctgcttccaaggaggataaattatccacaaactatggtatttctgatgatgttctggttgggcttttgaaactcttgaagacttatttatctgatgaatctgttgaaataatagatgctgcttcacaaacactgaggggtattctgtcaacagcacgggggctcaatgctctgcagtttcttgattctcccgataggtctttactcatggttcattcgagaggggtaaacattcagatagttgaacagactatatcacaaatggaacagtgtgctggtgtttcacttgatgatgcagatgtgtgggacactgatggtcgaacttgcaagcaatggctgtgcacccttgtcagctcacttatttgccactgtgaagataccatcttgagactctgtaggagtattgtttttgtcaaagttaaggctgctgagcttttgctttctagtactctagtgaacattgctggcaatgttgattctaatactgccatctgcaaattaatttcaacaaaggttgagaaaataattttttccgactccaatcattcattgaagtcaatccatctgtttctggatgcactgaatgtcattagatctttttatgttgctgaaaaagccagaactttcccttctaatactctcaaggatggtagatctgctagatcaaaaagtcgatcaccagtgacaaccccatcatcatcatggaagaaggtatactggctttctgttgattatcttgttgctgccagagctgctagtcgatgttcatgtgactttgccatactaatgtatgttgagctttggtgtgaggaacaattcaataggctggtattaggacctccagagttttccaatgaagagttgttgccacctcatgttgatctgttggttgctgcatttactcgtataaatgaaccagacagcatttatgggctcacactatctaatgagatagcgtctcagcttattaggtatgagcatgaaggtgattggagtagcgcacttgaatactatgatttacttgtaaggtcaatgccaaaggaacaccttggcactttaactgggtcggtgttgactggaccatctaccgtgtcttctagagcagaagatacaatgttgaactggaaaatgcacaaaggtcttatgagatccttgcagaaaactggatgtagtcatgtgcttgatgtctactgtgaaggtttatctcaccaaaaggggtgtcttcaacaagacgcggagtttattgatatccaatatgaagctgcttggagggcaggaaattgggatttctcctttttcgttccatattcttcttggtcttcaacccgctctcgaagtagctgtcttttcaatgaaaatttacatagttgcttaagagctctgcagaacggtgattctgaggagttccatgcaaaactttgtcaaactaagatggatcttgtcttggctttgtcaaacactagcaaggagagcacgaaatacatccactctaccatccttaaattacagattctagatcatgctactatggtttgggacctgcgttggaaccttaatcccaatcaaacttcaaaatctcctgtaaccaaggaattttctcacatatctactgtccctaaagggatacagttggagttgttggataaagagtggaacttaattatgttccaagcagaacggaatcttgatctatttgaaccttttctggcatttaggcgtgccctccttaagattttaggttgtgaagaacatcttgtaaaacatttatttcaatctgcttctgcgctccggaagggattaaggttttctttggcagcggcagctttatatgaactcaaagaactttgttttcacagagatgagagcactatgacaaatacctatttgcttgcacggcttgaagacgctaaattgctcagagctcaagggcagcatgatatggctattagtcttggaaaatacatactacagaagctttctgacaagaaaaacctgtcagatgtctatcgattagttggcaagtggctggctgaaacaagatcaagcaactcaagaactatcattgaggactatttaagaccttctatagatctctctgaatttgagaagagtacagataaaaggtacatgtccaggcagtgtcgaacacatttccatctagcacattatacatatagtttgttcagaagctatgaggaaagactctcatctaacgaatggcaagcagctctgcgattaaggaaatacaagactagggagttggagatactgattaaaagactgagaagttcatctaagggtgtgaagactgattactcagtaaaaatccaagagttacagaaacaacttgcacttgacagagaagaagcagagaaaatacaggatgatcacgataatttcttaaatctagcacttcaaggctaccaacgttccattgttgttggtggcaaatatgacctacaagtggtttttcggttggtctcgttgtggtttagtcttttctcaagggatcaagttgtgaaagcaatgttgaaaaccacaaaagaggtccaaacctacaagttcataccactggtttatcaaattgcttcgagacttgggagcaccaaagatgctcaggggtcatttaactttcagattgcgttagcttctcttttgaagaaaatggctgttgatcacccatatcatacaatattccagcttttggctctagcaaatggtgatcgtgtcaaagacaagcaaagaagtagaagttcttttgttgtagatatggagaagaagcttgctgctgaaaatttgttaaaggagctatcttcctgtcatggacctctgatttgtcagatgaaacaaatggttgagatctacattaagttagcagaactggagaccaagaaggaggacactaacaaaaaaattccgctgcccagggaggcccgcagcattggtcagcttgaactagttccagttgtgactgctaccgttcctattgatcctagctgtcgttatgaggaaggctcctttccacatttcactgggttggctgactccattatgatcatgaatggaattaatgctcccaaagttatagaatgttttggctcggatggtaacaaataccgtcaacttgcaaaatctggaaatgatgacctgcgacaggatgctgtgatggagcaattttttagtttggtaaatacattcttgcaaaatcaccgagatacttctaaaaggagattgaaaatccgtacatataaggttgttcctttcaccccaagtgctggtgttgttgaatgggtaaacggtactgttccactaggcgattatctaattgggagtactagaagtggtggagcacatggacgatatggaattggggactggacatatcttcaatgcagagagtacctgatgagtgtaggatatatagtcggtcttggggatcgccattccatgaatattctcatcgaccaagacacagctgaggttgtacacattgatcttggtgttgcatttgaacagggtctcatgcttaaaacacctgaacgggttccatttcggttgacaagggatattatagatggcatgggtgttactggtgttgaaggtgtgttcagaagatgttgtgagaaaactctctgtgtcatgagggcgaataaagaagcattgctcactattattgaagtcttcgttcatgatcctctatataaatgggcactctcaccactgaaagccttacagcgtcaaaaggaaacagttgatactgattcatgtttggatgactcccaagaaccttacgatggcaacaaggatgcagctcgagctatacttcgtgttaaacagaagttggatggatatgaagatggcgagatgagaagtgtgcagggccaggtccaacaactcatacaggacgcggtggatgttgatcggttgtgccaaatgtttccaggttggggaccttggttgtaagctccattgaaagggatgtaaattttgatcgaaggcaagagcaacttttttcactgcttatgaggttttattctttggtgtgtttttttccctcaccaccctgtcaacattcctacaaagtacagcaaacggcttttggtaccctgtaaattgatgggaaggcaaggacgacatttgagtgcaggtgggttgtaccactcctgttttagagcatgtccagactagaggatgggtgattgcatagtgaggccacagttttctttttttgttgagcttcattaataccccctctgtctaaaagtcctcatcgtttaagcgtcccgcaccaagaccaaggatgcccctccgcattgcagccgctgtgaagttaattatctggcgccgttttgtattttcaaaacacgcatatgtaatgtcgcaaaaattcagctgcttcgatggttggccggccataggggcggtatccatacatcacaccatcgtgcagcgtacattcagctgcttcgacggttgcataccgtagtttttgttcaggatttactttgtaaagaagtgaggctgttttgtcatgtatgtaaagggcttgtttcgatgtagcatgaaatacgaagaattatgatgcatttgaatataccgtgctcccctgagcaaaaaacaaatcaacagaagctaccacctggccgc

SEQ ID NO: 34018 - DNA, 8109 bp, Zea Mays
tgagtatgtttccaactaccaaatcctggtgacacccttacacacatgtgggtcaatgtagtgctaaagaatgttcccttgtatgtatttagttttctgattattggcattcctggattggaattctctcttttgaatgaacaaaatgttgttatcattcctgaagctattttctcgctgtgtgctggcttttcatcaccagtaattaattcatcggatatattgcaactgtttggtcattgtaaaattcattccaagatgtctcttgaggatgataactgggttcttaaagatgaactaccctactctgtggaagctttgtcagaaatcactctggatacttgtaccaaggttatgtctcataaatgccaccttatacatcttccggggactatccagcaaccaatgctcctagagctcatggaattcatgaaaggatttgtggcttcaaatgagcagtttgagaaagtggacttgaataatcttgttcttgtttgttctcttctctgcaatctgattcattgtgcattgttgtcaaggaccatggaagaaaaatcttcacttttgcaagaaacagtagattatgtcaccaatattttaaaacatattgtgtcatttgttgtgaagaagaatgatgaactttctcatggtcttactaacataagttcagcattggatacaatgggctctgctttctcctcaatcaagagcttactgtcttctccaatatttaatctgtcaagagttgataatggagtttgttctgttgttatcaaaagcattactgaattacttgatgaactcttggtggcaatttctcagctgttttgtcagatctctagtttagtgagcaattttgatgcagagagtactggtaaaatgctaccaacatctagtatcaatttagaggacctaaatcctgttttggactgtaaaagtagtgttgctgatatggatcttgatgtgatggactctagtgaagtagattctgtcacagctagtgcgagtggaagtatgggtagcttcttacgacctttggaatggaagctagatctagtttgcattatttcaacttttttctcagtttcatcacttcatacatgggaaattttgtacagcttggtggataaagaaggtgacgtgaaggttcgccaggccatcttgcttaacctttgcagaaacatctccgcgtcatctaaaactgtatctttagtggtccattttatagttgatatgagggacagaggtgcaagttcattacttggacctgcagagtgcttaactcacatacatgctttattaaaagcgttgatagctatccatggtggacagaatgctgatggaaagcaaccaggacgcgaagtatttttcagtgagaaccaggatatcttatttgacttgttaaatagggctacagacataagttctgtagattggttttctcgcatcaagttcattgattgtgtctcctcctttgtttgcctgttccctgatgttgcccaggatttgatcggatgtttgcttgacatgctgcatgatgctgattaccgtgtcaggttgtatttggctaggcaaatcgtcgtgttattccaaacatgggaagggcacaatgaattatttaatgatgtttgctcaagcattggtgccaagatggtgaagttctcaaatatttctccagttacagctagagaagtcttagctgttggtccacaatctgttctcgtaattgaaactgctctcattacactagctcatttggctgtgcatagcgaggatgttgaagttgagtgtttgttcatgatttctgctgcggctgctatagagccttctcagcgagaattagcttttgcgttatttgattccatttcaaggaggcttggttatgcttcaagaagcaagtatctggaccaagtgatgggcccgattctttttcgatgggttgcttgtgagatgaatctaatttcacttgttgaggtgcaagaaatgtttggttatggatctgctgagccaaacaactttgttgaacattgtagttcatggcttctccctttcctcattctcaggggtgatggtgctgatatgaattggatatcgaagattttatctcaacctttgtcaatcattatcaagagatacttcgttccaatctttggaatgtgcattgctgtcagatgtggcacagggccagagaaggacttagctgaaactgtcttatgtgaatcagttttgcagcttggtgaaatttctgaacttgagcgtgatgatctcattaaaaaacacatggttgcgatcgttgcctttttgctctctgtttcttcatctgctcatgggccacaaattccatatttttccaagaagaatgttgcactttcagtcagaatggttgttgatggatttgtggacacaatggatgataacttggctgatacagttgttagtgataaagttaatatatttcgtgctgacagagtttttaagttcctgttgtcgatacatcagcaagttgcagatgccagccattccaggcacatgggtcatcgtctttgtgcaattgaggttttaatagatgtacttgggcacagagtggttcttgagagcacttgcttctatattatttctatagtggggaactatattcagcaaaaaccactgcaaggccagtgctgtaatattttgtctaaattgttggctgcttttgatggaaacacctctgctgaaaccctgcaagtgcttggcagacagcttcaggtagtagttccaaaattaattttttcctgcctaattaatgagaaagaagaaagaagtggtactgaagattcatcaagagttctttctttactccatcaattgacagtggagattgatcctctgctttatgattacataagagagttagaaccacttcctgatcttgattgcttgaaagatgtacaggagtttcatgcttcactttctgcctcacattcttcaaggaatcagttcttaaagtttgttaataaggctccttatttaccaccagaactatttttgttgagtcttcgtgcgtatcacaaaaagttatttttgggagaaatcattcgtagaagtgacctatctgcggctgatacaaacatggttagctgctggcatagtgacccagatgtcatttctgctgtatgggctcttgttgacatttgtagctcatcatctgtagcaaatgaagcttcttgggtgcttgctgattttatctctagggctggtatatctgatgcacatcaagtaatattccgtctgccaactaccaccgaaaattattctttacaactacatactggttctgcttccaaggaggataaattatccacaaactatggtatttctgatgatgttctggttgggcttttgaaactcttgaagacttatttatctgatgaatctgttgaaataatagatgctgcttcacaaacactgaggggtattctgtcaacagcacgggggctcaatgctctgcagtttcttgattctcccgataggtctttactcatggttcattcgagaggggtaaacattcagatagttgaacagactatatcacaaatggaacagtgtgctggtgtttcacttgatgatgcagatgtgtgggacactgatggtcgaacttgcaagcaatggctgtgcacccttgtcagctcacttatttgccactgtgaagataccatcttgagactctgtaggagtattgtttttgtcaaagttaaggctgctgagcttttgctttctagtactctagtgaacattgctggcaatgttgattctaatactgccatctgcaaattaatttcaacaaaggttgagaaaataattttttccgactccaatcattcattgaagtcaatccatctgtttctggatgcactgaatgtcattagatctttttatgttgctgaaaaagccagaactttcccttctaatactctcaaggatggtagatctgctagatcaaaaagtcgatcaccagtgacaaccccatcatcatcatggaagaaggtatactggctttctgttgattatcttgttgctgccagagctgctagtcgatgttcatgtgactttgccatactaatgtatgttgagctttggtgtgaggaacaattcaataggctggtattaggacctccagagttttccaatgaagagttgttgccacctcatgttgatctgttggttgctgcatttactcgtataaatgaaccagacagcatttatgggctcacactatctaatgagatagcgtctcagcttattaggtatgagcatgaaggtgattggagtagcgcacttgaatactatgatttacttgtaaggtcaatgccaaaggaacaccttggcactttaactgggtcggtgttgactggaccatctaccgtgtcttctagagcagaagatacaatgttgaactggaaaatgcacaaaggtcttatgagatccttgcagaaaactggatgtagtcatgtgcttgatgtctactgtgaaggtttatctcaccaaaaggggtgtcttcaacaagacgcggagtttattgatatccaatatgaagctgcttggagggcaggaaattgggatttctcctttttcgttccatattcttcttggtcttcaacccgctctcgaagtagctgtcttttcaatgaaaatttacatagttgcttaagagctctgcagaacggtgattctgaggagttccatgcaaaactttgtcaaactaagatggatcttgtcttggctttgtcaaacactagcaaggagagcacgaaatacatccactctaccatccttaaattacagattctagatcatgctactatggtttgggacctgcgttggaaccttaatcccaatcaaacttcaaaatctcctgtaaccaaggaattttctcacatatctactgtccctaaagggatacagttggagttgttggataaagagtggaacttaattatgttccaagcagaacggaatcttgatctatttgaaccttttctggcatttaggcgtgccctccttaagattttaggttgtgaagaacatcttgtaaaacatttatttcaatctgcttctgcgctccggaagggattaaggttttctttggcagcggcagctttatatgaactcaaagaactttgttttcacagagatgagagcactatgacaaatacctatttgcttgcacggcttgaagacgctaaattgctcagagctcaagggcagcatgatatggctattagtcttggaaaatacatactacagaagctttctgacaagaaaaacctgtcagatgtctatcgattagttggcaagtggctggctgaaacaagatcaagcaactcaagaactatcattgaggactatttaagaccttctatagatctctctgaatttgagaagagtacagataaaaggtacatgtccaggcagtgtcgaacacatttccatctagcacattatacatatagtttgttcagaagctatgaggaaagactctcatctaacgaatggcaagcagctctgcgattaaggaaatacaagactagggagttggagatactgattaaaagactgagaagttcatctaagggtgtgaagactgattactcagtaaaaatccaagagttacagaaacaacttgcacttgacagagaagaagcagagaaaatacaggatgatcacgataatttcttaaatctagcacttcaaggctaccaacgttccattgttgttggtggcaaatatgacctacaagtggtttttcggttggtctcgttgtggtttagtcttttctcaagggatcaagttgtgaaagcaatgttgaaaaccacaaaagaggtccaaacctacaagttcataccactggtttatcaaattgcttcgagacttgggagcaccaaagatgctcaggggtcatttaactttcagattgcgttagcttctcttttgaagaaaatggctgttgatcacccatatcatacaatattccagcttttggctctagcaaatggtgatcgtgtcaaagacaagcaaagaagtagaagttcttttgttgtagatatggagaagaagcttgctgctgaaaatttgttaaaggagctatcttcctgtcatggacctctgatttgtcagatgaaacaaatggttgagatctacattaagttagcagaactggagaccaagaaggaggacactaacaaaaaaattccgctgcccagggaggcccgcagcattggtcagcttgaactagttccagttgtgactgctaccgttcctattgatcctagctgtcgttatgaggaaggctcctttccacatttcactgggttggctgactccattatgatcatgaatggaattaatgctcccaaagttatagaatgttttggctcggatggtaacaaataccgtcaacttgcaaaatctggaaatgatgacctgcgacaggatgctgtgatggagcaattttttagtttggtaaatacattcttgcaaaatcaccgagatacttctaaaaggagattgaaaatccgtacatataaggttgttcctttcaccccaagtgctggtgttgttgaatgggtaaacggtactgttccactaggcgattatctaattgggagtactagaagtggtggagcacatggacgatatggaattggggactggacatatcttcaatgcagagagtacctgatgagtgaaaaggacaaaaggagggcatttcttaaaatctgcagcaactttaggcctgtgatgcaccacttctttcttgaaagattcttgctgcctgctgattggttccaaagtagacttgcttacacaaggagtgtagcagcaagctcgatggtaggatatatagtcggtcttggggatcgccattccatgaatattctcatcgaccaagacacagctgaggttgtacacattgatcttggtgttgcatttgaacagggtctcatgcttaaaacacctgaacgggttccatttcggttgacaagggatattatagatggcatgggtgttactggtgttgaaggtgtgttcagaagatgttgtgagaaaactctctgtgtcatgagggcgaataaagaagcattgctcactattattgaagtcttcgttcatgatcctctatataaatgggcactctcaccactgaaagccttacagcgtcaaaaggaaacagttgatactgattcatgtttggatgactcccaagaaccttacgatggcaacaaggatgcagctcgagctatacttcgtgttaaacagaagttggatggatatgaagatggcgagatgagaagtgtgcagggccaggtccaacaactcatacaggacgcggtggatgttgatcggttgtgccaaatgtttccaggttggggaccttggttgtaagctccattgaaagggatgtaaattttgatcgaaggcaagagcaacttttttcactgcttatgaggttttattctttggtgtgtttttttccctcaccaccctgtcaacattcctacaaagtacagcaaacggcttttggtaccctgtaaattgatgggaaggcaaggacgacatttgagtgcaggtgggttgtaccactcctgttttagagcatgtccagactagaggatgggtgattgcatagtgaggccacagttttctttttttgttgagcttcattaataccccctctgtctaaaagtcctcatcgtttaagcgtcccgcaccaagaccaaggatgcccctccgcattgcagccgctgtgaagttaattatctggcgccgttttgtattttcaaaacacgcatatgtaatgtcgcaaaaattcagctgcttcgatggttggccggccataggggcggtatccatacatcacaccatcgtgcagcgtacattcagctgcttcgacggttgcataccgtagtttttgttcaggatttactttgtaaagaagtgaggctgttttgtcatgtatgtaaagggcttgtttcgatgtagcatgaaatacgaagaattatgatgcatttgaatataccgtgctcccctgagcaaaaaacaaatcaacagaagctaccacctggccgc

SEQ ID NO: 34019 - DNA, 8754 bp, Zea Mays
tgagtatgtttccaactaccaaatcctggtgacacccttacacacatgtgggtcaatgtagtgctaaagaatgttcccttgtatgtatttagttttctgattattggcattcctggattggaattctctcttttgaatgaacaaaatgttgttatcattcctgaagctattttctcgctgtgtgctggcttttcatcaccagtaattaattcatcggatatattgcaactgtttggtcattgtaaaattcattccaagatgtctcttgaggatgataactgggttcttaaagatgaactaccctactctgtggaagctttgtcagaaatcactctggatacttgtaccaaggttatgtctcataaatgccaccttatacatcttccggggactatccagcaaccaatgctcctagagctcatggaattcatgaaaggatttgtggcttcaaatgagcagtttgagaaagtggacttgaataatcttgttcttgtttgttctcttctctgcaatctgattcattgtgcattgttgtcaaggaccatggaagaaaaatcttcacttttgcaagaaacagtagattatgtcaccaatattttaaaacatattgtgtcatttgttgtgaagaagaatgatgaactttctcatggtcttactaacataagttcagcattggatacaatgggctctgctttctcctcaatcaagagcttactgtcttctccaatatttaatctgtcaagagttgataatggagtttgttctgttgttatcaaaagcattactgaattacttgatgaactcttggtggcaatttctcagctgttttgtcagatctctagtttagtgagcaattttgatgcagagagtactggtaaaatgctaccaacatctagtatcaatttagaggacctaaatcctgttttggactgtaaaagtagtgttgctgatatggatcttgatgtgatggactctagtgaagtagattctgtcacagctagtgcgagtggaagtatgggtagcttcttacgacctttggaatggaagctagatctagtttgcattatttcaacttttttctcagtttcatcacttcatacatgggaaattttgtacagcttggtggataaagaaggtgacgtgaaggttcgccaggccatcttgcttaacctttgcagaaacatctccgcgtcatctaaaactgtatctttagtggtccattttatagttgatatgagggacagaggtgcaagttcattacttggacctgcagagtgcttaactcacatacatgctttattaaaagcgttgatagctatccatggtggacagaatgctgatggaaagcaaccaggacgcgaagtatttttcagtgagaaccaggatatcttatttgacttgttaaatagggctacagacataagttctgtagattggttttctcgcatcaagttcattgattgtgtctcctcctttgtttgcctgttccctgatgttgcccaggatttgatcggatgtttgcttgacatgctgcatgatgctgattaccgtgtcaggttgtatttggctaggcaaatcgtcgtgttattccaaacatgggaagggcacaatgaattatttaatgatgtttgctcaagcattggtgccaagatggtgaagttctcaaatatttctccagttacagctagagaagtcttagctgttggtccacaatctgttctcgtaattgaaactgctctcattacactagctcatttggctgtgcatagcgaggatgttgaagttgagtgtttgttcatgatttctgctgcggctgctatagagccttctcagcggtatttctttacaagcaatgagcatgtctatgttggtgtacaaaaatattttttaagatcagtaaacagaaaccaatttgatgcttcatttagttttatggttacttccttttcagagaattagcttttgcgttatttgattccatttcaaggaggcttggttatgcttcaagaagcaagtatctggaccaagtgatgggcccgattctttttcgatgggttgcttgtgagatgaatctaatttcacttgttgaggtgcaagaaatgtttggttatggatctgctgagccaaacaactttgttgaacattgtagttcatggcttctccctttcctcattctcaggggtgatggtgctgatatgaattggatatcgaagattttatctcaacctttgtcaatcattatcaagagatacttcgttccaatctttggaatgtgcattgctgtcagatgtggcacagggccagagaaggacttagctgaaactgtcttatgtgaatcagttttgcagcttggtgaaatttctgaacttgagcgtgatgatctcattaaaaaacacatggttgcgatcgttgcctttttgctctctgtttcttcatctgctcatgggccacaaattccatatttttccaagaagaatgttgcactttcagtcagaatggttgttgatggatttgtggacacaatgtatatcctcttcgtttcgccctatgtgttctaatggttaaattataattcgcgaaagggcctctagctgagttggttaggtggtctgagtagtactattaggtcttgagttcgaatcccagtgggagcgaattttaggttgaggttaaaaaaaaggtcactagctggttccctggtgtgcacatgagatggactgacctatgtggggcgggtcctcgtgtaggggctcggagggctcaaagcacgggtaaagatctggcctatagggggtggaccttcatgctgcatggagatgagctttcatggcctttctcggtcggggctccgattgagcttcttaatataataccgtggtggcggtctttcccctaccggcccagttacattataattcaatcattattccagtatcaggactgacttttcacatttcagggatgataacttggctgatacagttgttagtgataaagttaatatatttcgtgctgacagagtttttaagttcctgttgtcgatacatcagcaagttgcagatgccagccattccaggcacatgggtcatcgtctttgtgcaattgaggttttaatagatgtacttgggcacagagtggttcttgagagcacttgcttctatattatttctatagtggggaactatattcagcaaaaaccactgcaaggccagtgctgtaatattttgtctaaattgttggctgcttttgatggaaacacctctgctgaaaccctgcaagtgcttggcagacagcttcaggtagtagttccaaaattaattttttcctgcctaattaatgagaaagaagaaagaagtggtactgaagattcatcaagagttctttctttactccatcaattgacagtggagattgatcctctgctttatgattacataagagagttagaaccacttcctgatcttgattgcttgaaagatgtacaggagtttcatgcttcactttctgcctcacattcttcaaggaatcagttcttaaagtttgttaataaggctccttatttaccaccagaactatttttgttgagtcttcgtgcgtatcacaaaaagttatttttgggagaaatcattcgtagaagtgacctatctgcggctgatacaaacatggttagctgctggcatagtgacccagatgtcatttctgctgtatgggctcttgttgacatttgtagctcatcatctgtagcaaatgaagcttcttgggtgcttgctgattttatctctagggctggtatatctgatgcacatcaagtaatattccgtctgccaactaccaccgaaaattattctttacaactacatactggttctgcttccaaggaggataaattatccacaaactatggtatttctgatgatgttctggttgggcttttgaaactcttgaagacttatttatctgatgaatctgttgaaataatagatgctgcttcacaaacactgaggggtattctgtcaacagcacgggggctcaatgctctgcagtttcttgattctcccgataggtctttactcatggttcattcgagaggggtaaacattcagatagttgaacagactatatcacaaatggaacagtgtgctggtgtttcacttgatgatgcagatgtgtgggacactgatggtcgaacttgcaagcaatggctgtgcacccttgtcagctcacttatttgccactgtgaagataccatcttgagactctgtaggagtattgtttttgtcaaagttaaggctgctgagcttttgctttctagtactctagtgaacattgctggcaatgttgattctaatactgccatctgcaaattaatttcaacaaaggttgagaaaataattttttccgactccaatcattcattgaagtcaatccatctgtttctggatgcactgaatgtcattagatctttttatgttgctgaaaaagccagaactttcccttctaatactctcaaggatggtagatctgctagatcaaaaagtcgatcaccagtgacaaccccatcatcatcatggaagaaggtatactggctttctgttgattatcttgttgctgccagagctgctagtcgatgttcatgtgactttgccatactaatgtatgttgagctttggtgtgaggaacaattcaataggctggtattaggacctccagagttttccaatgaagagttgttgccacctcatgttgatctgttggttgctgcatttactcgtataaatgaaccagacagcatttatgggctcacactatctaatgagatagcgtctcagcttattaggtatgagcatgaaggtgattggagtagcgcacttgaatactatgatttacttgtaaggtcaatgccaaaggaacaccttggcactttaactgggtcggtgttgactggaccatctaccgtgtcttctagagcagaagatacaatgttgaactggaaaatgcacaaaggtcttatgagatccttgcagaaaactggatgtagtcatgtgcttgatgtctactgtgaaggtttatctcaccaaaaggggtgtcttcaacaagacgcggagtttattgatatccaatatgaagctgcttggagggcaggaaattgggatttctcctttttcgttccatattcttcttggtcttcaacccgctctcgaagtagctgtcttttcaatgaaaatttacatagttgcttaagagctctgcagaacggtgattctgaggagttccatgcaaaactttgtcaaactaagatggatcttgtcttggctttgtcaaacactagcaaggagagcacgaaatacatccactctaccatccttaaattacagattctagatcatgctactatggtttgggacctgcgttggaaccttaatcccaatcaaacttcaaaatctcctgtaaccaaggaattttctcacatatctactgtccctaaagggatacagttggagttgttggataaagagtggaacttaattatgttccaagcagaacggaatcttgatctatttgaaccttttctggcatttaggcgtgccctccttaagattttaggttgtgaagaacatcttgtaaaacatttatttcaatctgcttctgcgctccggaagggattaaggttttctttggcagcggcagctttatatgaactcaaagaactttgttttcacagagatgagagcactatgacaaatacctatttgcttgcacggcttgaagacgctaaattgctcagagctcaagggcagcatgatatggctattagtcttggaaaatacatactacagaagctttctgacaagaaaaacctgtcagatgtctatcgattagttggcaagtggctggctgaaacaagatcaagcaactcaagaactatcattgaggactatttaagaccttctatagatctctctgaatttgagaagagtacagataaaaggtacatgtccaggcagtgtcgaacacatttccatctagcacattatacatatagtttgttcagaagctatgaggaaagactctcatctaacgaatggcaagcagctctgcgattaaggaaatacaagactagggagttggagatactgattaaaagactgagaagttcatctaagggtgtgaagactgattactcagtaaaaatccaagagttacagaaacaacttgcacttgacagagaagaagcagagaaaatacaggatgatcacgataatttcttaaatctagcacttcaaggctaccaacgttccattgttgttggtggcaaatatgacctacaagtggtttttcggttggtctcgttgtggtttagtcttttctcaagggatcaagttgtgaaagcaatgttgaaaaccacaaaagaggtccaaacctacaagttcataccactggtttatcaaattgcttcgagacttgggagcaccaaagatgctcaggggtcatttaactttcagattgaaagaacagtacatgtcagggaggcactgtccacccggtgaacagtgcctccgtgacagactgacagtacagctctggtatcatgggcagattgcgttagcttctcttttgaagaaaatggctgttgatcacccatatcatacaatattccagcttttggctctagcaaatggtgatcgtgtcaaagacaagcaaagaagtagaagttcttttgttgtagatatggagaagaagcttgctgctgaaaatttgttaaaggagctatcttcctgtcatggacctctgatttgtcagatgaaacaaatggttgagatctacattaagttagcagaactggagaccaagaaggaggacactaacaaaaaaattccgctgcccagggaggcccgcagcattggtcagcttgaactagttccagttgtgactgctaccgttcctattgatcctagctgtcgttatgaggaaggctcctttccacatttcactgggttggctgactccattatgatcatgaatggaattaatgctcccaaagttatagaatgttttggctcggatggtaacaaataccgtcaacttgcaaaatctggaaatgatgacctgcgacaggatgctgtgatggagcaattttttagtttggtaaatacattcttgcaaaatcaccgagatacttctaaaaggagattgaaaatccgtacatataaggttgttcctttcaccccaagtgctggtgttgttgaatgggtaaacggtactgttccactaggcgattatctaattgggagtactagaagtggtggagcacatggacgatatggaattggggactggacatatcttcaatgcagagagtacctgatgagtgaaaaggacaaaaggagggcatttcttaaaatctgcagcaactttaggcctgtgatgcaccacttctttcttgaaagattcttgctgcctgctgattggttccaaagtagacttgcttacacaaggagtgtagcagcaagctcgatggtaggatatatagtcggtcttggggatcgccattccatgaatattctcatcgaccaagacacagctgaggttgtacacattgatcttggtgttgcatttgaacagggtctcatgcttaaaacacctgaacgggttccatttcggttgacaagggatattatagatggcatgggtgttactggtgttgaaggtgtgttcagaagatgttgtgagaaaactctctgtgtcatgagggcgaataaagaagcattgctcactattattgaagtcttcgttcatgatcctctatataaatgggcactctcaccactgaaagccttacagcgtcaaaaggaaacagttgatactgattcatgtttggatgactcccaagaaccttacgatggcaacaaggatgcagctcgagctatacttcgtgttaaacagaagttggatggatatgaagatggcgagatgagaagtgtgcagggccaggtccaacaactcatacaggacgcggtggatgttgatcggttgtgccaaatgtttccaggttggggaccttggttgtaagctccattgaaagggatgtaaattttgatcgaaggcaagagcaacttttttcactgcttatgaggttttattctttggtgtgtttttttccctcaccaccctgtcaacattcctacaaagtacagcaaacggcttttggtaccctgtaaattgatgggaaggcaaggacgacatttgagtgcaggtgggttgtaccactcctgttttagagcatgtccagactagaggatgggtgattgcatagtgaggccacagttttctttttttgttgagcttcattaataccccctctgtctaaaagtcctcatcgtttaagcgtcccgcaccaagaccaaggatgcccctccgcattgcagccgctgtgaagttaattatctggcgccgttttgtattttcaaaacacgcatatgtaatgtcgcaaaaattcagctgcttcgatggttggccggccataggggcggtatccatacatcacaccatcgtgcagcgtacattcagctgcttcgacggttgcataccgtagtttttgttcaggatttactttgtaaagaagtgaggctgttttgtcatgtatgtaaagggcttgtttcgatgtagcatgaaatacgaagaattatgatgcatttgaatataccgtgctcccctgagcaaaaaacaaatcaacagaagctaccacctggccgc

SEQ ID NO: 34020 - DNA, 10208 bp, Zea Mays
ttataatgatggcaatttcatagtcttcggcatttgttgggtttgtgtgattcagcactctgggcattcactacatttgctctcagttgctaagcaactttttgttcatatttgggaggtcataaaagatggccctagccttcagttagagtacagcataatccttagacagcttctaaatgtgaaggagtaccgctatcagatgaaacctcgaacatatagcaattttgtatcactctacatgaagaaggttgctagtgcttttgatgcaaaattcagcaatcaggcgagctccaaggatgaatccttccgctgtacattgacacttcatgttctacttgaaaacccaccaagtgattaccctgatattatgcgggaggaggttcttaatggatttagtgcaatcttcttacatattagggaggagggaaagctgactcgcaaacttatggaatgcattaacacctttttactgaaggatgggccaaatctgggatacaaatctgtgaagatccataatgcagttcaagagtttatattccgttgttggatgacaactcatgatcaggccttgaagagtttgttcataacctacgtgaaagttcagctgaagattgccaggaatattccagagattttggaaaaacttattgatgtcatcattaaggaactagacaaaaatgttaacactggacctggacttctatggtgtgaggcaccaagagatgagaaagctgtgtccttaaggtgtttccaagaggaatggatggatctctctgctactgttttttatctggcctgcaaatgcacaacaaagacagcaaacagggagaaaaggatgaagaaagaacacattatgaaccttatcgttgatggcctttttagaggatctttgttttggtttgaaatcctcttccgaggtatgactgataagtacattgcccccagagtcacctgttattaatctgtgccctttttcctgtacttctccatgcctttaaatgatgcttcctagtttgtgtggtgactggtgactatagcttcttctgacaagagtatgcagtttccttacatgtatctgtataagccaaatgtgatattattccctcagaaagctcattccagtctcttccctgaaaaaaatctcctgtcttctgtaaagtcttactatttccatgtgttgctgcccaaacccccctgagttaaatcttgggcgctattatactttaatacatgttgggagcctgatattcagtatttggggcatctttcatcatcccataaacacccttgcatcaaactgctgtctcttgctccatttgttctattattttgatttgatgaccccacaattgataaccttactgttacattgatttttatctagtagaacttactatcaataacatttttggtgcagaagtagtgagagttcacaacttttccattttatgcacacgctattagcttctctttacacttcttttctcccacaggagtggttctgtttgttttctgattcacaagtatggatatcatctagagaaatctttgctaattagttggtttgaagcaagttgcaaagctttgagaagtatcttgatccatgcaaatgccatacgttttcaggattcactactctggcttctcaggacattcaaggagttctccacagtgctcatgcttgacactagggataaagtgcaattttgtttaacaaaaggcgagatgtcaattgttgaagattgttggcaagccatatggaattcccttgttcacgcatttccgttgttaagcagcatagatctagttgctgattcagctctgattttgctgggtggaatgatcatgcgggaccaagttcatacatcatttctatcagaagatacatggaacctgcaaatatttaaaaaatttccatcgccgtctgctctgtattttgttgcctgttacttctcgaggataggctttcagggtgacttatccaattctatctttgttcggaagactctgctaaggtcaactttggagttaattcattcaaaggaattctctcttttgaatgaacaaaatgttgttatcattcctgaagctattttctcgctgtgtgctggcttttcatcaccagtaattaattcatcggatatattgcaactgtttggtcattgtaaaattcattccaagatgtctcttgaggatgataactgggttcttaaagatgaactaccctactctgtggaagctttgtcagaaatcactctggatacttgtaccaaggttatgtctcataaatgccaccttatacatcttccggggactatccagcaaccaatgctcctagagctcatggaattcatgaaaggatttgtggcttcaaatgagcagtttgagaaagtggacttgaataatcttgttcttgtttgttctcttctctgcaatctgattcattgtgcattgttgtcaaggaccatggaagaaaaatcttcacttttgcaagaaacagtagattatgtcaccaatattttaaaacatattgtgtcatttgttgtgaagaagaatgatgaactttctcatggtcttactaacataagttcagcattggatacaatgggctctgctttctcctcaatcaagagcttactgtcttctccaatatttaatctgtcaagagttgataatggagtttgttctgttgttatcaaaagcattactgaattacttgatgaactcttggtggcaatttctcagctgttttgtcagatctctagtttagtgagcaattttgatgcagagagtactggtaaaatgctaccaacatctagtatcaatttagaggacctaaatcctgttttggactgtaaaagtagtgttgctgatatggatcttgatgtgatggactctagtgaagtagattctgtcacagctagtgcgagtggaagtatgggtagcttcttacgacctttggaatggaagctagatctagtttgcattatttcaacttttttctcagtttcatcacttcatacatgggaaattttgtacagcttggtggataaagaaggtgacgtgaaggttcgccaggccatcttgcttaacctttgcagaaacatctccgcgtcatctaaaactgtatctttagtggtccattttatagttgatatgagggacagaggtgcaagttcattacttggacctgcagagtgcttaactcacatacatgctttattaaaagcgttgatagctatccatggtggacagaatgctgatggaaagcaaccaggacgcgaagtatttttcagtgagaaccaggatatcttatttgacttgttaaatagggctacagacataagttctgtagattggttttctcgcatcaagttcattgattgtgtctcctcctttgtttgcctgttccctgatgttgcccaggatttgatcggatgtttgcttgacatgctgcatgatgctgattaccgtgtcaggttgtatttggctaggcaaatcgtcgtgttattccaaacatgggaagggcacaatgaattatttaatgatgtttgctcaagcattggtgccaagatggtgaagttctcaaatatttctccagttacagctagagaagtcttagctgttggtccacaatctgttctcgtaattgaaactgctctcattacactagctcatttggctgtgcatagcgaggatgttgaagttgagtgtttgttcatgatttctgctgcggctgctatagagccttctcagcgagaattagcttttgcgttatttgattccatttcaaggaggcttggttatgcttcaagaagcaagtatctggaccaagtgatgggcccgattctttttcgatgggttgcttgtgagatgaatctaatttcacttgttgaggtgcaagaaatgtttggttatggatctgctgagccaaacaactttgttgaacattgtagttcatggcttctccctttcctcattctcaggggtgatggtgctgatatgaattggatatcgaagattttatctcaacctttgtcaatcattatcaagagatacttcgttccaatctttggaatgtgcattgctgtcagatgtggcacagggccagagaaggacttagctgaaactgtcttatgtgaatcagttttgcagcttggtgaaatttctgaacttgagcgtgatgatctcattaaaaaacacatggttgcgatcgttgcctttttgctctctgtttcttcatctgctcatgggccacaaattccatatttttccaagaagaatgttgcactttcagtcagaatggttgttgatggatttgtggacacaatggatgataacttggctgatacagttgttagtgataaagttaatatatttcgtgctgacagagtttttaagttcctgttgtcgatacatcagcaagttgcagatgccagccattccaggcacatgggtcatcgtctttgtgcaattgaggttttaatagatgtacttgggcacagagtggttcttgagagcacttgcttctatattatttctatagtggggaactatattcagcaaaaaccactgcaaggccagtgctgtaatattttgtctaaattgttggctgcttttgatggaaacacctctgctgaaaccctgcaagtgcttggcagacagcttcaggtagtagttccaaaattaattttttcctgcctaattaatgagaaagaagaaagaagtggtactgaagattcatcaagagttctttctttactccatcaattgacagtggagattgatcctctgctttatgattacataagagagttagaaccacttcctgatcttgattgcttgaaagatgtacaggagtttcatgcttcactttctgcctcacattcttcaaggaatcagttcttaaagtttgttaataaggctccttatttaccaccagaactatttttgttgagtcttcgtgcgtatcacaaaaagttatttttgggagaaatcattcgtagaagtgacctatctgcggctgatacaaacatggttagctgctggcatagtgacccagatgtcatttctgctgtatgggctcttgttgacatttgtagctcatcatctgtagcaaatgaagcttcttgggtgcttgctgattttatctctagggctggtatatctgatgcacatcaagtaatattccgtctgccaactaccaccgaaaattattctttacaactacatactggttctgcttccaaggaggataaattatccacaaactatggtatttctgatgatgttctggttgggcttttgaaactcttgaagacttatttatctgatgaatctgttgaaataatagatgctgcttcacaaacactgaggggtattctgtcaacagcacgggggctcaatgctctgcagtttcttgattctcccgataggtctttactcatggttcattcgagaggggtaaacattcagatagttgaacagactatatcacaaatggaacagtgtgctggtgtttcacttgatgatgcagatgtgtgggacactgatggtcgaacttgcaagcaatggctgtgcacccttgtcagctcacttatttgccactgtgaagataccatcttgagactctgtaggagtattgtttttgtcaaagttaaggctgctgagcttttgctttctagtactctagtgaacattgctggcaatgttgattctaatactgccatctgcaaattaatttcaacaaaggttgagaaaataattttttccgactccaatcattcattgaagtcaatccatctgtttctggatgcactgaatgtcattagatctttttatgttgctgaaaaagccagaactttcccttctaatactctcaaggatggtagatctgctagatcaaaaagtcgatcaccagtgacaaccccatcatcatcatggaagaaggtatactggctttctgttgattatcttgttgctgccagagctgctagtcgatgttcatgtgactttgccatactaatgtatgttgagctttggtgtgaggaacaattcaataggctggtattaggacctccagagttttccaatgaagagttgttgccacctcatgttgatctgttggttgctgcatttactcgtataaatgaaccagacagcatttatgggctcacactatctaatgagatagcgtctcagcttattaggtatgagcatgaaggtgattggagtagcgcacttgaatactatgatttacttgtaaggtcaatgccaaaggaacaccttggcactttaactgggtcggtgttgactggaccatctaccgtgtcttctagagcagaagatacaatgttgaactggaaaatgcacaaaggtcttatgagatccttgcagaaaactggatgtagtcatgtgcttgatgtctactgtgaaggtttatctcaccaaaaggggtgtcttcaacaagacgcggagtttattgatatccaatatgaagctgcttggagggcaggaaattgggatttctcctttttcgttccatattcttcttggtcttcaacccgctctcgaagtagctgtcttttcaatgaaaatttacatagttgcttaagagctctgcagaacggtgattctgaggagttccatgcaaaactttgtcaaactaagatggatcttgtcttggctttgtcaaacactagcaaggagagcacgaaatacatccactctaccatccttaaattacagattctagatcatgctactatggtttgggacctgcgttggaaccttaatcccaatcaaacttcaaaatctcctgtaaccaaggaattttctcacatatctactgtccctaaagggatacagttggagttgttggataaagagtggaacttaattatgttccaagcagaacggaatcttgatctatttgaaccttttctggcatttaggcgtgccctccttaagattttaggttgtgaagaacatcttgtaaaacatttatttcaatctgcttctgcgctccggaagggattaaggttttctttggcagcggcagctttatatgaactcaaagaactttgttttcacagagatgagagcactatgacaaatacctatttgcttgcacggcttgaagacgctaaattgctcagagctcaagggcagcatgatatggctattagtcttggaaaatacatactacagaagctttctgacaagaaaaacctgtcagatgtctatcgattagttggcaagtggctggctgaaacaagatcaagcaactcaagaactatcattgaggactatttaagaccttctatagatctctctgaatttgagaagagtacagataaaaggtacatgtccaggcagtgtcgaacacatttccatctagcacattatacatatagtttgttcagaagctatgaggaaagactctcatctaacgaatggcaagcagctctgcgattaaggaaatacaagactagggagttggagatactgattaaaagactgagaagttcatctaaggcaagtagatgactatagcttttcatgtttctgaattcccaatccttctgttcttggtgctaatctttcaattgttcagggtgtgaagactgattactcagtaaaaatccaagagttacagaaacaacttgcacttgacagagaagaagcagagaaaatacaggatgatcacgataatttcttaaatctagcacttcaaggctaccaacgttccattgttgttggtggcaaatatgacctacaagtggtttttcggttggtctcgttgtggtttagtcttttctcaagggatcaagttgtgaaagcaatgttgaaaaccacaaaagaggtccaaacctacaagttcataccactggtttatcaaattgcttcgagacttgggagcaccaaagatgctcaggggtcatttaactttcagattgaaagaacagtacatgtcagggaggcactgtccacccggtgaacagtgcctccgtgacagactgacagtacagctctggtatcatgggcagattgcgttagcttctcttttgaagaaaatggctgttgatcacccatatcatacaatattccagcttttggctctagcaaatggtgatcgtgtcaaagacaagcaaagaagtagaagttcttttgttgtagatatggagaagaagcttgctgctgaaaatttgttaaaggagctatcttcctgtcatggacctctgatttgtcagatgaaacaaatggttgagatctacattaagttagcagaactggagaccaagaaggaggacactaacaaaaaaattccgctgcccagggaggcccgcagcattggtcagcttgaactagttccagttgtgactgctaccgttcctattgatcctagctgtcgttatgaggaaggctcctttccacatttcactgggttggctgactccattatgatcatgaatggaattaatgctcccaaagttatagaatgttttggctcggatggtaacaaataccgtcaacttgcaaaatctggaaatgatgacctgcgacaggatgctgtgatggagcaattttttagtttggtaaatacattcttgcaaaatcaccgagatacttctaaaaggagattgaaaatccgtacatataaggttgttcctttcaccccaagtgctggtgttgttgaatgggtaaacggtactgttccactaggcgattatctaattgggagtactagaagtggtggagcacatggacgatatggaattggggactggacatatcttcaatgcagagagtacctgatgagtgaaaaggacaaaaggagggcatttcttaaaatctgcagcaactttaggcctgtgatgcaccacttctttcttgaaagattcttgctgcctgctgattggttccaaagtagacttgcttacacaaggagtgtagcagcaagctcgatggtaggatatatagtcggtcttggggatcgccattccatgaatattctcatcgaccaagacacagctgaggttgtacacattgatcttggtgttgcatttgaacagggtctcatgcttaaaacacctgaacgggttccatttcggttgacaagggatattatagatggcatgggtgttactggtgttgaaggtgtgttcagaagatgttgtgagaaaactctctgtgtcatgagggcgaataaagaagcattgctcactattattgaagtcttcgttcatgatcctctatataaatgggcactctcaccactgaaagccttacagcgtcaaaaggaaacagttgatactgattcatgtttggatgactcccaagaaccttacgatggcaacaaggatgcagctcgagctatacttcgtgttaaacagaagttggatggatatgaagatggcgagatgagaagtgtgcagggccaggtccaacaactcatacaggacgcggtggatgttgatcggttgtgccaaatgtttccaggttggggaccttggttgtaagctccattgaaagggatgtaaattttgatcgaaggcaagagcaacttttttcactgcttatgaggttttattctttggtgtgtttttttccctcaccaccctgtcaacattcctacaaagtacagcaaacggcttttggtaccctgtaaattgatgggaaggcaaggacgacatttgagtgcaggtgggttgtaccactcctgttttagagcatgtccagactagaggatgggtgattgcatagtgaggccacagttttctttttttgttgagcttcattaataccccctctgtctaaaagtcctcatcgtttaagcgtcccgcaccaagaccaaggatgcccctccgcattgcagccgctgtgaagttaattatctggcgccgttttgtattttcaaaacacgcatatgtaatgtcgcaaaaattcagctgcttcgatggttggccggccataggggcggtatccatacatcacaccatcgtgcagcgtacattcagctgcttcgacggttgcataccgtagtttttgttcaggatttactttgtaaagaagtgaggctgttttgtcatgtatgtaaagggcttgtttcgatgtagcatgaaatacgaagaattatgatgcatttgaatataccgtgctcccctgagcaaaaaacaaatcaacagaagctaccacctggccgc

SEQ ID NO: 34021 - DNA, 9672 bp, Zea Mays
ctcgggcctcgtcccctccgcctctcgccgcgcggcttccctgatgcgctcgccccccgccgcggcctcccagccgaaaccctagctccgattcccataccgatggcggccgtggccactgcgcgcgacgtggaggaggtcgtccagaagcttcagtctgatcgggccagagtccgcgacgagggggtgaagctgctggggacatggctgcagggtgaccgcgctgcgtccttctgccgcctcctcggccgcaacaccgtcaggttcaagcccggccacgggaaccttaccggagggcattcactacatttgctctcagttgctaagcaactttttgttcatatttgggaggtcataaaagatggccctagccttcagttagagtacagcataatccttagacagcttctaaatgtgaaggagtaccgctatcagatgaaacctcgaacatatagcaattttgtatcactctacatgaagaaggttgctagtgcttttgatgcaaaattcagcaatcaggcgagctccaaggatgaatccttccgctgtacattgacacttcatgttctacttgaaaacccaccaagtgattaccctgatattatgcgggaggaggttcttaatggatttagtgcaatcttcttacatattagggaggagggaaagctgactcgcaaacttatggaatgcattaacacctttttactgaaggatgggccaaatctgggatacaaatctgtgaagatccataatgcagttcaagagtttatattccgttgttggatgacaactcatgatcaggccttgaagagtttgttcataacctacgtgaaagttcagctgaagattgccaggaatattccagagattttggaaaaacttattgatgtcatcattaaggaactagacaaaaatgttaacactggacctggacttctatggtgtgaggcaccaagagatgagaaagctgtgtccttaaggtgtttccaagaggaatggatggatctctctgctactgttttttatctggcctgcaaatgcacaacaaagacagcaaacagggagaaaaggatgaagaaagaacacattatgaaccttatcgttgatggcctttttagaggatctttgttttggagtggttctgtttgttttctgattcacaagtatggatatcatctagagaaatctttgctaattagttggtttgaagcaagttgcaaagctttgagaagtatcttgatccatgcaaatgccatacgttttcaggattcactactctggcttctcaggacattcaaggagttctccacagtgctcatgcttgacactagggataaagtgcaattttgtttaacaaaaggcgagatgtcaattgttgaagattgttggcaagccatatggaattcccttgttcacgcatttccgttgttaagcagcatagatctagttgctgattcagctctgattttgctgggtggaatgatcatgcgggaccaagttcatacatcatttctatcagaagatacatggaacctgcaaatatttaaaaaatttccatcgccgtctgctctgtattttgttgcctgttacttctcgaggataggctttcagggtgacttatccaattctatctttgttcggaagactctgctaaggtcaactttggagttaattcattcaaaggaattctctcttttgaatgaacaaaatgttgttatcattcctgaagctattttctcgctgtgtgctggcttttcatcaccagtaattaattcatcggatatattgcaactgtttggtcattgtaaaattcattccaagatgtctcttgaggatgataactgggttcttaaagatgaactaccctactctgtggaagctttgtcagaaatcactctggatacttgtaccaaggttatgtctcataaatgccaccttatacatcttccggggactatccagcaaccaatgctcctagagctcatggaattcatgaaaggatttgtggcttcaaatgagcagtttgagaaagtggacttgaataatcttgttcttgtttgttctcttctctgcaatctgattcattgtgcattgttgtcaaggaccatggaagaaaaatcttcacttttgcaagaaacagtagattatgtcaccaatattttaaaacatattgtgtcatttgttgtgaagaagaatgatgaactttctcatggtcttactaacataagttcagcattggatacaatgggctctgctttctcctcaatcaagagcttactgtcttctccaatatttaatctgtcaagagttgataatggagtttgttctgttgttatcaaaagcattactgaattacttgatgaactcttggtggcaatttctcagctgttttgtcagatctctagtttagtgagcaattttgatgcagagagtactggtaaaatgctaccaacatctagtatcaatttagaggacctaaatcctgttttggactgtaaaagtagtgttgctgatatggatcttgatgtgatggactctagtgaagtagattctgtcacagctagtgcgagtggaagtatgggtagcttcttacgacctttggaatggaagctagatctagtttgcattatttcaacttttttctcagtttcatcacttcatacatgggaaattttgtacagcttggtggataaagaaggtgacgtgaaggttcgccaggccatcttgcttaacctttgcagaaacatctccgcgtcatctaaaactgtatctttagtggtccattttatagttgatatgagggacagaggtgcaagttcattacttggacctgcagagtgcttaactcacatacatgctttattaaaagcgttgatagctatccatggtggacagaatgctgatggaaagcaaccaggacgcgaagtatttttcagtgagaaccaggatatcttatttgacttgttaaatagggctacagacataagttctgtagattggttttctcgcatcaagttcattgattgtgtctcctcctttgtttgcctgttccctgatgttgcccaggatttgatcggatgtttgcttgacatgctgcatgatgctgattaccgtgtcaggttgtatttggctaggcaaatcgtcgtgttattccaaacatgggaagggcacaatgaattatttaatgatgtttgctcaagcattggtgccaagatggtgaagttctcaaatatttctccagttacagctagagaagtcttagctgttggtccacaatctgttctcgtaattgaaactgctctcattacactagctcatttggctgtgcatagcgaggatgttgaagttgagtgtttgttcatgatttctgctgcggctgctatagagccttctcagcgagaattagcttttgcgttatttgattccatttcaaggaggcttggttatgcttcaagaagcaagtatctggaccaagtgatgggcccgattctttttcgatgggttgcttgtgagatgaatctaatttcacttgttgaggtgcaagaaatgtttggttatggatctgctgagccaaacaactttgttgaacattgtagttcatggcttctccctttcctcattctcaggggtgatggtgctgatatgaattggatatcgaagattttatctcaacctttgtcaatcattatcaagagatacttcgttccaatctttggaatgtgcattgctgtcagatgtggcacagggccagagaaggacttagctgaaactgtcttatgtgaatcagttttgcagcttggtgaaatttctgaacttgagcgtgatgatctcattaaaaaacacatggttgcgatcgttgcctttttgctctctgtttcttcatctgctcatgggccacaaattccatatttttccaagaagaatgttgcactttcagtcagaatggttgttgatggatttgtggacacaatggatgataacttggctgatacagttgttagtgataaagttaatatatttcgtgctgacagagtttttaagttcctgttgtcgatacatcagcaagttgcagatgccagccattccaggcacatgggtcatcgtctttgtgcaattgaggttttaatagatgtacttgggcacagagtggttcttgagagcacttgcttctatattatttctatagtggggaactatattcagcaaaaaccactgcaaggccagtgctgtaatattttgtctaaattgttggctgcttttgatggaaacacctctgctgaaaccctgcaagtgcttggcagacagcttcaggtagtagttccaaaattaattttttcctgcctaattaatgagaaagaagaaagaagtggtactgaagattcatcaagagttctttctttactccatcaattgacagtggagattgatcctctgctttatgattacataagagagttagaaccacttcctgatcttgattgcttgaaagatgtacaggagtttcatgcttcactttctgcctcacattcttcaaggaatcagttcttaaagtttgttaataaggctccttatttaccaccagaactatttttgttgagtcttcgtgcgtatcacaaaaagttatttttgggagaaatcattcgtagaagtgacctatctgcggctgatacaaacatggttagctgctggcatagtgacccagatgtcatttctgctgtatgggctcttgttgacatttgtagctcatcatctgtagcaaatgaagcttcttgggtgcttgctgattttatctctagggctggtatatctgatgcacatcaagtaatattccgtctgccaactaccaccgaaaattattctttacaactacatactggttctgcttccaaggaggataaattatccacaaactatggtatttctgatgatgttctggttgggcttttgaaactcttgaagacttatttatctgatgaatctgttgaaataatagatgctgcttcacaaacactgaggggtattctgtcaacagcacgggggctcaatgctctgcagtttcttgattctcccgataggtctttactcatggttcattcgagaggggtaaacattcagatagttgaacagactatatcacaaatggaacagtgtgctggtgtttcacttgatgatgcagatgtgtgggacactgatggtcgaacttgcaagcaatggctgtgcacccttgtcagctcacttatttgccactgtgaagataccatcttgagactctgtaggagtattgtttttgtcaaagttaaggctgctgagcttttgctttctagtactctagtgaacattgctggcaatgttgattctaatactgccatctgcaaattaatttcaacaaaggttgagaaaataattttttccgactccaatcattcattgaagtcaatccatctgtttctggatgcactgaatgtcattagatctttttatgttgctgaaaaagccagaactttcccttctaatactctcaaggatggtagatctgctagatcaaaaagtcgatcaccagtgacaaccccatcatcatcatggaagaaggtatactggctttctgttgattatcttgttgctgccagagctgctagtcgatgttcatgtgactttgccatactaatgtatgttgagctttggtgtgaggaacaattcaataggctggtattaggacctccagagttttccaatgaagagttgttgccacctcatgttgatctgttggttgctgcatttactcgtataaatgaaccagacagcatttatgggctcacactatctaatgagatagcgtctcagcttattaggtatgagcatgaaggtgattggagtagcgcacttgaatactatgatttacttgtaaggtcaatgccaaaggaacaccttggcactttaactgggtcggtgttgactggaccatctaccgtgtcttctagagcagaagatacaatgttgaactggaaaatgcacaaaggtcttatgagatccttgcagaaaactggatgtagtcatgtgcttgatgtctactgtgaaggtttatctcaccaaaaggggtgtcttcaacaagacgcggagtttattgatatccaatatgaagctgcttggagggcaggaaattgggatttctcctttttcgttccatattcttcttggtcttcaacccgctctcgaagtagctgtcttttcaatgaaaatttacatagttgcttaagagctctgcagaacggtgattctgaggagttccatgcaaaactttgtcaaactaagatggatcttgtcttggctttgtcaaacactagcaaggagagcacgaaatacatccactctaccatccttaaattacagattctagatcatgctactatggtttgggacctgcgttggaaccttaatcccaatcaaacttcaaaatctcctgtaaccaaggaattttctcacatatctactgtccctaaagggatacagttggagttgttggataaagagtggaacttaattatgttccaagcagaacggaatcttgatctatttgaaccttttctggcatttaggcgtgccctccttaagattttaggttgtgaagaacatcttgtaaaacatttatttcaatctgcttctgcgctccggaagggattaaggttttctttggcagcggcagctttatatgaactcaaagaactttgttttcacagagatgagagcactatgacaaatacctatttgcttgcacggcttgaagacgctaaattgctcagagctcaagggcagcatgatatggctattagtcttggaaaatacatactacagaagctttctgacaagaaaaacctgtcagatgtctatcgattagttggcaagtggctggctgaaacaagatcaagcaactcaagaactatcattgaggactatttaagaccttctatagatctctctgaatttgagaagagtacagataaaaggtacatgtccaggcagtgtcgaacacatttccatctagcacattatacatatagtttgttcagaagctatgaggaaagactctcatctaacgaatggcaagcagctctgcgattaaggaaatacaagactagggagttggagatactgattaaaagactgagaagttcatctaagggtgtgaagactgattactcagtaaaaatccaagagttacagaaacaacttgcacttgacagagaagaagcagagaaaatacaggatgatcacgataatttcttaaatctagcacttcaaggctaccaacgttccattgttgttggtggcaaatatgacctacaagtggtttttcggttggtctcgttgtggtttagtcttttctcaagggatcaagttgtgaaagcaatgttgaaaaccacaaaagaggtccaaacctacaagttcataccactggtttatcaaattgcttcgagacttgggagcaccaaagatgctcaggggtcatttaactttcagattgcgttagcttctcttttgaagaaaatggctgttgatcacccatatcatacaatattccagcttttggctctagcaaatggtgatcgtgtcaaagacaagcaaagaagtagaagttcttttgttgtagatatggagaagaagcttgctgctgaaaatttgttaaaggagctatcttcctgtcatggacctctgatttgtcagatgaaacaaatggttgagatctacattaagttagcagaactggagaccaagaaggaggacactaacaaaaaaattccgctgcccagggaggcccgcagcattggtcagcttgaactagttccagttgtgactgctaccgttcctattgatcctagctgtcgttatgaggaaggctcctttccacatttcactgggttggctgactccattatgatcatgaatggaattaatgctcccaaagttatagaatgttttggctcggatggtaacaaataccgtcaacttgcaaaatctggaaatgatgacctgcgacaggatgctgtgatggagcaattttttagtttggtaaatacattcttgcaaaatcaccgagatacttctaaaaggagattgaaaatccgtacatataaggttgttcctttcaccccaagtgctggtgttgttgaatgggtaaacggtactgttccactaggcgattatctaattgggagtactagaagtggtggagcacatggacgatatggaattggggactggacatatcttcaatgcagagagtacctgatgagtgaaaaggacaaaaggagggcatttcttaaaatctgcagcaactttaggcctgtgatgcaccacttctttcttgaaagattcttgctgcctgctgattggttccaaagtagacttgcttacacaaggagtgtagcagcaagctcgatggtaggatatatagtcggtcttggggatcgccattccatgaatattctcatcgaccaagacacagctgaggttgtacacattgatcttggtgttgcatttgaacagggtctcatgcttaaaacacctgaacgggttccatttcggttgacaagggatattatagatggcatgggtgttactggtgttgaaggtgtgttcagaagatgttgtgagaaaactctctgtgtcatgagggcgaataaagaagcattgctcactattattgaagtcttcgttcatgatcctctatataaatgggcactctcaccactgaaagccttacagcgtcaaaaggaaacagttgatactgattcatgtttggatgactcccaagaaccttacgatggcaacaaggatgcagctcgagctatacttcgtgttaaacagaagttggatggatatgaagatggcgagatgagaagtgtgcagggccaggtccaacaactcatacaggacgcggtggatgttgatcggttgtgccaaatgtttccaggttggggaccttggttgtaagctccattgaaagggatgtaaattttgatcgaaggcaagagcaacttttttcactgcttatgaggttttattctttggtgtgtttttttccctcaccaccctgtcaacattcctacaaagtacagcaaacggcttttggtaccctgtaaattgatgggaaggcaaggacgacatttgagtgcaggtgggttgtaccactcctgttttagagcatgtccagactagaggatgggtgattgcatagtgaggccacagttttctttttttgttgagcttcattaataccccctctgtctaaaagtcctcatcgtttaagcgtcccgcaccaagaccaaggatgcccctccgcattgcagccgctgtgaagttaattatctggcgccgttttgtattttcaaaacacgcatatgtaatgtcgcaaaaattcagctgcttcgatggttggccggccataggggcggtatccatacatcacaccatcgtgcagcgtacattcagctgcttcgacggttgcataccgtagtttttgttcaggatttactttgtaaagaagtgaggctgttttgtcatgtatgtaaagggcttgtttcgatgtagcatgaaatacgaagaattatgatgcatttgaatataccgtgctcccctgagcaaaaaacaaatcaacagaagctaccacctggccgc

SEQ ID NO: 34022 - DNA, 9532 bp, Zea Mays
caaacccctcgggcctcgtcccctccgcctctcgccgcgcggcttccctgatgcgctcgccccccgccgcggcctcccagccgaaaccctagctccgattcccataccgatggcggccgtggccactgcgcgcgacgtggaggaggtcgtccagaagcttcagtctgatcgggccagagtccgcgacgagggggtgaagctgctggggacatggctgcagggtgaccgcgctgcgtccttctgccgcctcctcggccgcaacaccgtcaggttcaagcccggccacgggaaccttaccggagggcattcactacatttgctctcagttgctaagcaactttttgttcatatttgggaggtcataaaagatggccctagccttcagttagagtacagcataatccttagacagcttctaaatgtgaaggagtaccgctatcagatgaaacctcgaacatatagcaattttgtatcactctacatgaagaaggttgctagtgcttttgatgcaaaattcagcaatcaggcgagctccaaggatgaatccttccgctgtacattgacacttcatgttctacttgaaaacccaccaagtgattaccctgatattatgcgggaggaggttcttaatggatttagtgcaatcttcttacatattagggaggagggaaagctgactcgcaaacttatggaatgcattaacacctttttactgaaggatgggccaaatctgggatacaaatctgtgaagatccataatgcagttcaagagtttatattccgttgttggatgacaactcatgatcaggccttgaagagtttgttcataacctacgtgaaagttcagctgaagattgccaggaatattccagagattttggaaaaacttattgatgtcatcattaaggaactagacaaaaatgttaacactggacctggacttctatggtgtgaggcaccaagagatgagaaagctgtgtccttaaggtgtttccaagaggaatggatggatctctctgctactgttttttatctggcctgcaaatgcacaacaaagacagcaaacagggagaaaaggatgaagaaagaacacattatgaaccttatcgttgatggcctttttagaggatctttgttttggagtggttctgtttgttttctgattcacaagtatggatatcatctagagaaatctttgctaattagttggtttgaagcaagttgcaaagctttgagaagtatcttgatccatgcaaatgccatacgttttcaggattcactactctggcttctcaggacattcaaggagttctccacagtgctcatgcttgacactagggataaagtgcaattttgtttaacaaaaggcgagatgtcaattgttgaagattgttggcaagccatatggaattcccttgttcacgcatttccgttgttaagcagcatagatctagttgctgattcagctctgattttgctgggtggaatgatcatgcgggaccaagttcatacatcatttctatcagaagatacatggaacctgcaaatatttaaaaaatttccatcgccgtctgctctgtattttgttgcctgttacttctcgaggataggctttcagggtgacttatccaattctatctttgttcggaagactctgctaaggtcaactttggagttaattcattcaaaggaattctctcttttgaatgaacaaaatgttgttatcattcctgaagctattttctcgctgtgtgctggcttttcatcaccagtaattaattcatcggatatattgcaactgtttggtcattgtaaaattcattccaagatgtctcttgaggatgataactgggttcttaaagatgaactaccctactctgtggaagctttgtcagaaatcactctggatacttgtaccaaggttatgtctcataaatgccaccttatacatcttccggggactatccagcaaccaatgctcctagagctcatggaattcatgaaaggatttgtggcttcaaatgagcagtttgagaaagtggacttgaataatcttgttcttgtttgttctcttctctgcaatctgattcattgtgcattgttgtcaaggaccatggaagaaaaatcttcacttttgcaagaaacagtagattatgtcaccaatattttaaaacatattgtgtcatttgttgtgaagaagaatgatgaactttctcatggtcttactaacataagttcagcattggatacaatgggctctgctttctcctcaatcaagagcttactgtcttctccaatatttaatctgtcaagagttgataatggagtttgttctgttgttatcaaaagcattactgaattacttgatgaactcttggtggcaatttctcagctgttttgtcagatctctagtttagtgagcaattttgatgcagagagtactggtaaaatgctaccaacatctagtatcaatttagaggacctaaatcctgttttggactgtaaaagtagtgttgctgatatggatcttgatgtgatggactctagtgaagtagattctgtcacagctagtgcgagtggaagtatgggtagcttcttacgacctttggaatggaagctagatctagtttgcattatttcaacttttttctcagtttcatcacttcatacatgggaaattttgtacagcttggtggataaagaaggtgacgtgaaggttcgccaggccatcttgcttaacctttgcagaaacatctccgcgtcatctaaaactgtatctttagtggtccattttatagttgatatgagggacagaggtgcaagttcattacttggacctgcagagtgcttaactcacatacatgctttattaaaagcgttgatagctatccatggtggacagaatgctgatggaaagcaaccaggacgcgaagtatttttcagtgagaaccaggatatcttatttgacttgttaaatagggctacagacataagttctgtagattggttttctcgcatcaagttcattgattgtgtctcctcctttgtttgcctgttccctgatgttgcccaggatttgatcggatgtttgcttgacatgctgcatgatgctgattaccgtgtcaggttgtatttggctaggcaaatcgtcgtgttattccaaacatgggaagggcacaatgaattatttaatgatgtttgctcaagcattggtgccaagatggtgaagttctcaaatatttctccagttacagctagagaagtcttagctgttggtccacaatctgttctcgtaattgaaactgctctcattacactagctcatttggctgtgcatagcgaggatgttgaagttgagtgtttgttcatgatttctgctgcggctgctatagagccttctcagcgagaattagcttttgcgttatttgattccatttcaaggaggcttggttatgcttcaagaagcaagtatctggaccaagtgatgggcccgattctttttcgatgggttgcttgtgagatgaatctaatttcacttgttgaggtgcaagaaatgtttggttatggatctgctgagccaaacaactttgttgaacattgtagttcatggcttctccctttcctcattctcaggggtgatggtgctgatatgaattggatatcgaagattttatctcaacctttgtcaatcattatcaagagatacttcgttccaatctttggaatgtgcattgctgtcagatgtggcacagggccagagaaggacttagctgaaactgtcttatgtgaatcagttttgcagcttggtgaaatttctgaacttgagcgtgatgatctcattaaaaaacacatggttgcgatcgttgcctttttgctctctgtttcttcatctgctcatgggccacaaattccatatttttccaagaagaatgttgcactttcagtcagaatggttgttgatggatttgtggacacaatggatgataacttggctgatacagttgttagtgataaagttaatatatttcgtgctgacagagtttttaagttcctgttgtcgatacatcagcaagttgcagatgccagccattccaggcacatgggtcatcgtctttgtgcaattgaggttttaatagatgtacttgggcacagagtggttcttgagagcacttgcttctatattatttctatagtggggaactatattcagcaaaaaccactgcaaggccagtgctgtaatattttgtctaaattgttggctgcttttgatggaaacacctctgctgaaaccctgcaagtgcttggcagacagcttcaggtagtagttccaaaattaattttttcctgcctaattaatgagaaagaagaaagaagtggtactgaagattcatcaagagttctttctttactccatcaattgacagtggagattgatcctctgctttatgattacataagagagttagaaccacttcctgatcttgattgcttgaaagatgtacaggagtttcatgcttcactttctgcctcacattcttcaaggaatcagttcttaaagtttgttaataaggctccttatttaccaccagaactatttttgttgagtcttcgtgcgtatcacaaaaagttatttttgggagaaatcattcgtagaagtgacctatctgcggctgatacaaacatggttagctgctggcatagtgacccagatgtcatttctgctgtatgggctcttgttgacatttgtagctcatcatctgtagcaaatgaagcttcttgggtgcttgctgattttatctctagggctggtatatctgatgcacatcaagtaatattccgtctgccaactaccaccgaaaattattctttacaactacatactggttctgcttccaaggaggataaattatccacaaactatggtatttctgatgatgttctggttgggcttttgaaactcttgaagacttatttatctgatgaatctgttgaaataatagatgctgcttcacaaacactgaggggtattctgtcaacagcacgggggctcaatgctctgcagtttcttgattctcccgataggtctttactcatggttcattcgagaggggtaaacattcagatagttgaacagactatatcacaaatggaacagtgtgctggtgtttcacttgatgatgcagatgtgtgggacactgatggtcgaacttgcaagcaatggctgtgcacccttgtcagctcacttatttgccactgtgaagataccatcttgagactctgtaggagtattgtttttgtcaaagttaaggctgctgagcttttgctttctagtactctagtgaacattgctggcaatgttgattctaatactgccatctgcaaattaatttcaacaaaggttgagaaaataattttttccgactccaatcattcattgaagtcaatccatctgtttctggatgcactgaatgtcattagatctttttatgttgctgaaaaagccagaactttcccttctaatactctcaaggatggtagatctgctagatcaaaaagtcgatcaccagtgacaaccccatcatcatcatggaagaaggtatactggctttctgttgattatcttgttgctgccagagctgctagtcgatgttcatgtgactttgccatactaatgtatgttgagctttggtgtgaggaacaattcaataggctggtattaggacctccagagttttccaatgaagagttgttgccacctcatgttgatctgttggttgctgcatttactcgtataaatgaaccagacagcatttatgggctcacactatctaatgagatagcgtctcagcttattaggtatgagcatgaaggtgattggagtagcgcacttgaatactatgatttacttgtaaggtcaatgccaaaggaacaccttggcactttaactgggtcggtgttgactggaccatctaccgtgtcttctagagcagaagatacaatgttgaactggaaaatgcacaaaggtcttatgagatccttgcagaaaactggatgtagtcatgtgcttgatgtctactgtgaaggtttatctcaccaaaaggggtgtcttcaacaagacgcggagtttattgatatccaatatgaagctgcttggagggcaggaaattgggatttctcctttttcgttccatattcttcttggtcttcaacccgctctcgaagtagctgtcttttcaatgaaaatttacatagttgcttaagagctctgcagaacggtgattctgaggagttccatgcaaaactttgtcaaactaagatggatcttgtcttggctttgtcaaacactagcaaggagagcacgaaatacatccactctaccatccttaaattacagattctagatcatgctactatggtttgggacctgcgttggaaccttaatcccaatcaaacttcaaaatctcctgtaaccaaggaattttctcacatatctactgtccctaaagggatacagttggagttgttggataaagagtggaacttaattatgttccaagcagaacggaatcttgatctatttgaaccttttctggcatttaggcgtgccctccttaagattttaggttgtgaagaacatcttgtaaaacatttatttcaatctgcttctgcgctccggaagggattaaggttttctttggcagcggcagctttatatgaactcaaagaactttgttttcacagagatgagagcactatgacaaatacctatttgcttgcacggcttgaagacgctaaattgctcagagctcaagggcagcatgatatggctattagtcttggaaaatacatactacagaagctttctgacaagaaaaacctgtcagatgtctatcgattagttggcaagtggctggctgaaacaagatcaagcaactcaagaactatcattgaggactatttaagaccttctatagatctctctgaatttgagaagagtacagataaaaggtacatgtccaggcagtgtcgaacacatttccatctagcacattatacatatagtttgttcagaagctatgaggaaagactctcatctaacgaatggcaagcagctctgcgattaaggaaatacaagactagggagttggagatactgattaaaagactgagaagttcatctaagggtgtgaagactgattactcagtaaaaatccaagagttacagaaacaacttgcacttgacagagaagaagcagagaaaatacaggatgatcacgataatttcttaaatctagcacttcaaggctaccaacgttccattgttgttggtggcaaatatgacctacaagtggtttttcggttggtctcgttgtggtttagtcttttctcaagggatcaagttgtgaaagcaatgttgaaaaccacaaaagaggtccaaacctacaagttcataccactggtttatcaaattgcttcgagacttgggagcaccaaagatgctcaggggtcatttaactttcagattgcgttagcttctcttttgaagaaaatggctgttgatcacccatatcatacaatattccagcttttggctctagcaaatggtgatcgtgtcaaagacaagcaaagaagtagaagttcttttgttgtagatatggagaagaagcttgctgctgaaaatttgttaaaggagctatcttcctgtcatggacctctgatttgtcagatgaaacaaatggttgagatctacattaagttagcagaactggagaccaagaaggaggacactaacaaaaaaattccgctgcccagggaggcccgcagcattggtcagcttgaactagttccagttgtgactgctaccgttcctattgatcctagctgtcgttatgaggaaggctcctttccacatttcactgggttggctgactccattatgatcatgaatggaattaatgctcccaaagttatagaatgttttggctcggatggtaacaaataccgtcaacttgcaaaatctggaaatgatgacctgcgacaggatgctgtgatggagcaattttttagtttggtaaatacattcttgcaaaatcaccgagatacttctaaaaggagattgaaaatccgtacatataaggttgttcctttcaccccaagtgctggtgttgttgaatgggtaaacggtactgttccactaggcgattatctaattgggagtactagaagtggtggagcacatggacgatatggaattggggactggacatatcttcaatgcagagagtacctgatgagtgtaggatatatagtcggtcttggggatcgccattccatgaatattctcatcgaccaagacacagctgaggttgtacacattgatcttggtgttgcatttgaacagggtctcatgcttaaaacacctgaacgggttccatttcggttgacaagggatattatagatggcatgggtgttactggtgttgaaggtgtgttcagaagatgttgtgagaaaactctctgtgtcatgagggcgaataaagaagcattgctcactattattgaagtcttcgttcatgatcctctatataaatgggcactctcaccactgaaagccttacagcgtcaaaaggaaacagttgatactgattcatgtttggatgactcccaagaaccttacgatggcaacaaggatgcagctcgagctatacttcgtgttaaacagaagttggatggatatgaagatggcgagatgagaagtgtgcagggccaggtccaacaactcatacaggacgcggtggatgttgatcggttgtgccaaatgtttccaggttggggaccttggttgtaagctccattgaaagggatgtaaattttgatcgaaggcaagagcaacttttttcactgcttatgaggttttattctttggtgtgtttttttccctcaccaccctgtcaacattcctacaaagtacagcaaacggcttttggtaccctgtaaattgatgggaaggcaaggacgacatttgagtgcaggtgggttgtaccactcctgttttagagcatgtccagactagaggatgggtgattgcatagtgaggccacagttttctttttttgttgagcttcattaataccccctctgtctaaaagtcctcatcgtttaagcgtcccgcaccaagaccaaggatgcccctccgcattgcagccgctgtgaagttaattatctggcgccgttttgtattttcaaaacacgcatatgtaatgtcgcaaaaattcagctgcttcgatggttggccggccataggggcggtatccatacatcacaccatcgtgcagcgtacattcagctgcttcgacggttgcataccgtagtttttgttcaggatttactttgtaaagaagtgaggctgttttgtcatgtatgtaaagggcttgtttcgatgtagcatgaaatacgaagaattatgatgcatttgaatataccgtgctcccctgagcaaaaaacaaatcaacagaagctaccacctggccgc

SEQ ID NO: 34023 - DNA, 9659 bp, Zea Mays
ccaaaagcccccacaaacccctcgggcctcgtcccctccgcctctcgccgcgcggcttccctgatgcgctcgccccccgccgcggcctcccagccgaaaccctagctccgattcccataccgatggcggccgtggccactgcgcgcgacgtggaggaggtcgtccagaagcttcagtctgatcgggccagagtccgcgacgagggggtgaagctgctggggacatggctgcagggtgaccgcgctgcgtccttctgccgcctcctcggccgcaacaccgtcaggttcaagcccggccacgggaaccttaccggagggcattcactacatttgctctcagttgctaagcaactttttgttcatatttgggaggtcataaaagatggccctagccttcagttagagtacagcataatccttagacagcttctaaatgtgaaggagtaccgctatcagatgaaacctcgaacatatagcaattttgtatcactctacatgaagaaggttgctagtgcttttgatgcaaaattcagcaatcaggcgagctccaaggatgaatccttccgctgtacattgacacttcatgttctacttgaaaacccaccaagtgattaccctgatattatgcgggaggaggttcttaatggatttagtgcaatcttcttacatattagggaggagggaaagctgactcgcaaacttatggaatgcattaacacctttttactgaaggatgggccaaatctgggatacaaatctgtgaagatccataatgcagttcaagagtttatattccgttgttggatgacaactcatgatcaggccttgaagagtttgttcataacctacgtgaaagttcagctgaagattgccaggaatattccagagattttggaaaaacttattgatgtcatcattaaggaactagacaaaaatgttaacactggacctggacttctatggtgtgaggcaccaagagatgagaaagctgtgtccttaaggtgtttccaagaggaatggatggatctctctgctactgttttttatctggcctgcaaatgcacaacaaagacagcaaacagggagaaaaggatgaagaaagaacacattatgaaccttatcgttgatggcctttttagaggatctttgttttggtttgaaatcctcttccgaggagtggttctgtttgttttctgattcacaagtatggatatcatctagagaaatctttgctaattagttggtttgaagcaagttgcaaagctttgagaagtatcttgatccatgcaaatgccatacgttttcaggattcactactctggcttctcaggacattcaaggagttctccacagtgctcatgcttgacactagggataaagtgcaattttgtttaacaaaaggcgagatgtcaattgttgaagattgttggcaagccatatggaattcccttgttcacgcatttccgttgttaagcagcatagatctagttgctgattcagctctgattttgctgggtggaatgatcatgcgggaccaagttcatacatcatttctatcagaagatacatggaacctgcaaatatttaaaaaatttccatcgccgtctgctctgtattttgttgcctgttacttctcgaggataggctttcagggtgacttatccaattctatctttgttcggaagactctgctaaggtcaactttggagttaattcattcaaaggaattctctcttttgaatgaacaaaatgttgttatcattcctgaagctattttctcgctgtgtgctggcttttcatcaccagtaattaattcatcggatatattgcaactgtttggtcattgtaaaattcattccaagatgtctcttgaggatgataactgggttcttaaagatgaactaccctactctgtggaagctttgtcagaaatcactctggatacttgtaccaaggttatgtctcataaatgccaccttatacatcttccggggactatccagcaaccaatgctcctagagctcatggaattcatgaaaggatttgtggcttcaaatgagcagtttgagaaagtggacttgaataatcttgttcttgtttgttctcttctctgcaatctgattcattgtgcattgttgtcaaggaccatggaagaaaaatcttcacttttgcaagaaacagtagattatgtcaccaatattttaaaacatattgtgtcatttgttgtgaagaagaatgatgaactttctcatggtcttactaacataagttcagcattggatacaatgggctctgctttctcctcaatcaagagcttactgtcttctccaatatttaatctgtcaagagttgataatggagtttgttctgttgttatcaaaagcattactgaattacttgatgaactcttggtggcaatttctcagctgttttgtcagatctctagtttagtgagcaattttgatgcagagagtactggtaaaatgctaccaacatctagtatcaatttagaggacctaaatcctgttttggactgtaaaagtagtgttgctgatatggatcttgatgtgatggactctagtgaagtagattctgtcacagctagtgcgagtggaagtatgggtagcttcttacgacctttggaatggaagctagatctagtttgcattatttcaacttttttctcagtttcatcacttcatacatgggaaattttgtacagcttggtggataaagaaggtgacgtgaaggttcgccaggccatcttgcttaacctttgcagaaacatctccgcgtcatctaaaactgtatctttagtggtccattttatagttgatatgagggacagaggtgcaagttcattacttggacctgcagagtgcttaactcacatacatgctttattaaaagcgttgatagctatccatggtggacagaatgctgatggaaagcaaccaggacgcgaagtatttttcagtgagaaccaggatatcttatttgacttgttaaatagggctacagacataagttctgtagattggttttctcgcatcaagttcattgattgtgtctcctcctttgtttgcctgttccctgatgttgcccaggatttgatcggatgtttgcttgacatgctgcatgatgctgattaccgtgtcaggttgtatttggctaggcaaatcgtcgtgttattccaaacatgggaagggcacaatgaattatttaatgatgtttgctcaagcattggtgccaagatggtgaagttctcaaatatttctccagttacagctagagaagtcttagctgttggtccacaatctgttctcgtaattgaaactgctctcattacactagctcatttggctgtgcatagcgaggatgttgaagttgagtgtttgttcatgatttctgctgcggctgctatagagccttctcagcgagaattagcttttgcgttatttgattccatttcaaggaggcttggttatgcttcaagaagcaagtatctggaccaagtgatgggcccgattctttttcgatgggttgcttgtgagatgaatctaatttcacttgttgaggtgcaagaaatgtttggttatggatctgctgagccaaacaactttgttgaacattgtagttcatggcttctccctttcctcattctcaggggtgatggtgctgatatgaattggatatcgaagattttatctcaacctttgtcaatcattatcaagagatacttcgttccaatctttggaatgtgcattgctgtcagatgtggcacagggccagagaaggacttagctgaaactgtcttatgtgaatcagttttgcagcttggtgaaatttctgaacttgagcgtgatgatctcattaaaaaacacatggttgcgatcgttgcctttttgctctctgtttcttcatctgctcatgggccacaaattccatatttttccaagaagaatgttgcactttcagtcagaatggttgttgatggatttgtggacacaatggatgataacttggctgatacagttgttagtgataaagttaatatatttcgtgctgacagagtttttaagttcctgttgtcgatacatcagcaagttgcagatgccagccattccaggcacatgggtcatcgtctttgtgcaattgaggttttaatagatgtacttgggcacagagtggttcttgagagcacttgcttctatattatttctatagtggggaactatattcagcaaaaaccactgcaaggccagtgctgtaatattttgtctaaattgttggctgcttttgatggaaacacctctgctgaaaccctgcaagtgcttggcagacagcttcaggtagtagttccaaaattaattttttcctgcctaattaatgagaaagaagaaagaagtggtactgaagattcatcaagagttctttctttactccatcaattgacagtggagattgatcctctgctttatgattacataagagagttagaaccacttcctgatcttgattgcttgaaagatgtacaggagtttcatgcttcactttctgcctcacattcttcaaggaatcagttcttaaagtttgttaataaggctccttatttaccaccagaactatttttgttgagtcttcgtgcgtatcacaaaaagttatttttgggagaaatcattcgtagaagtgacctatctgcggctgatacaaacatggttagctgctggcatagtgacccagatgtcatttctgctgtatgggctcttgttgacatttgtagctcatcatctgtagcaaatgaagcttcttgggtgcttgctgattttatctctagggctggtatatctgatgcacatcaagtaatattccgtctgccaactaccaccgaaaattattctttacaactacatactggttctgcttccaaggaggataaattatccacaaactatggtatttctgatgatgttctggttgggcttttgaaactcttgaagacttatttatctgatgaatctgttgaaataatagatgctgcttcacaaacactgaggggtattctgtcaacagcacgggggctcaatgctctgcagtttcttgattctcccgataggtctttactcatggttcattcgagaggggtaaacattcagatagttgaacagactatatcacaaatggaacagtgtgctggtgtttcacttgatgatgcagatgtgtgggacactgatggtcgaacttgcaagcaatggctgtgcacccttgtcagctcacttatttgccactgtgaagataccatcttgagactctgtaggagtattgtttttgtcaaagttaaggctgctgagcttttgctttctagtactctagtgaacattgctggcaatgttgattctaatactgccatctgcaaattaatttcaacaaaggttgagaaaataattttttccgactccaatcattcattgaagtcaatccatctgtttctggatgcactgaatgtcattagatctttttatgttgctgaaaaagccagaactttcccttctaatactctcaaggatggtagatctgctagatcaaaaagtcgatcaccagtgacaaccccatcatcatcatggaagaaggtatactggctttctgttgattatcttgttgctgccagagctgctagtcgatgttcatgtgactttgccatactaatgtatgttgagctttggtgtgaggaacaattcaataggctggtattaggacctccagagttttccaatgaagagttgttgccacctcatgttgatctgttggttgctgcatttactcgtataaatgaaccagacagcatttatgggctcacactatctaatgagatagcgtctcagcttattaggtatgagcatgaaggtgattggagtagcgcacttgaatactatgatttacttgtaaggtcaatgccaaaggaacaccttggcactttaactgggtcggtgttgactggaccatctaccgtgtcttctagagcagaagatacaatgttgaactggaaaatgcacaaaggtcttatgagatccttgcagaaaactggatgtagtcatgtgcttgatgtctactgtgaaggtttatctcaccaaaaggggtgtcttcaacaagacgcggagtttattgatatccaatatgaagctgcttggagggcaggaaattgggatttctcctttttcgttccatattcttcttggtcttcaacccgctctcgaagtagctgtcttttcaatgaaaatttacatagttgcttaagagctctgcagaacggtgattctgaggagttccatgcaaaactttgtcaaactaagatggatcttgtcttggctttgtcaaacactagcaaggagagcacgaaatacatccactctaccatccttaaattacagattctagatcatgctactatggtttgggacctgcgttggaaccttaatcccaatcaaacttcaaaatctcctgtaaccaaggaattttctcacatatctactgtccctaaagggatacagttggagttgttggataaagagtggaacttaattatgttccaagcagaacggaatcttgatctatttgaaccttttctggcatttaggcgtgccctccttaagattttaggttgtgaagaacatcttgtaaaacatttatttcaatctgcttctgcgctccggaagggattaaggttttctttggcagcggcagctttatatgaactcaaagaactttgttttcacagagatgagagcactatgacaaatacctatttgcttgcacggcttgaagacgctaaattgctcagagctcaagggcagcatgatatggctattagtcttggaaaatacatactacagaagctttctgacaagaaaaacctgtcagatgtctatcgattagttggcaagtggctggctgaaacaagatcaagcaactcaagaactatcattgaggactatttaagaccttctatagatctctctgaatttgagaagagtacagataaaaggtacatgtccaggcagtgtcgaacacatttccatctagcacattatacatatagtttgttcagaagctatgaggaaagactctcatctaacgaatggcaagcagctctgcgattaaggaaatacaagactagggagttggagatactgattaaaagactgagaagttcatctaagggtgtgaagactgattactcagtaaaaatccaagagttacagaaacaacttgcacttgacagagaagaagcagagaaaatacaggatgatcacgataatttcttaaatctagcacttcaaggctaccaacgttccattgttgttggtggcaaatatgacctacaagtggtttttcggttggtctcgttgtggtttagtcttttctcaagggatcaagttgtgaaagcaatgttgaaaaccacaaaagaggtccaaacctacaagttcataccactggtttatcaaattgcttcgagacttgggagcaccaaagatgctcaggggtcatttaactttcagattgaaagaacagtacatgtcagggaggcactgtccacccggtgaacagtgcctccgtgacagactgacagtacagctctggtatcatgggcagattgcgttagcttctcttttgaagaaaatggctgttgatcacccatatcatacaatattccagcttttggctctagcaaatggtgatcgtgtcaaagacaagcaaagaagtagaagttcttttgttgtagatatggagaagaagcttgctgctgaaaatttgttaaaggagctatcttcctgtcatggacctctgatttgtcagatgaaacaaatggttgagatctacattaagttagcagaactggagaccaagaaggaggacactaacaaaaaaattccgctgcccagggaggcccgcagcattggtcagcttgaactagttccagttgtgactgctaccgttcctattgatcctagctgtcgttatgaggaaggctcctttccacatttcactgggttggctgactccattatgatcatgaatggaattaatgctcccaaagttatagaatgttttggctcggatggtaacaaataccgtcaacttgcaaaatctggaaatgatgacctgcgacaggatgctgtgatggagcaattttttagtttggtaaatacattcttgcaaaatcaccgagatacttctaaaaggagattgaaaatccgtacatataaggttgttcctttcaccccaagtgctggtgttgttgaatgggtaaacggtactgttccactaggcgattatctaattgggagtactagaagtggtggagcacatggacgatatggaattggggactggacatatcttcaatgcagagagtacctgatgagtgtaggatatatagtcggtcttggggatcgccattccatgaatattctcatcgaccaagacacagctgaggttgtacacattgatcttggtgttgcatttgaacagggtctcatgcttaaaacacctgaacgggttccatttcggttgacaagggatattatagatggcatgggtgttactggtgttgaaggtgtgttcagaagatgttgtgagaaaactctctgtgtcatgagggcgaataaagaagcattgctcactattattgaagtcttcgttcatgatcctctatataaatgggcactctcaccactgaaagccttacagcgtcaaaaggaaacagttgatactgattcatgtttggatgactcccaagaaccttacgatggcaacaaggatgcagctcgagctatacttcgtgttaaacagaagttggatggatatgaagatggcgagatgagaagtgtgcagggccaggtccaacaactcatacaggacgcggtggatgttgatcggttgtgccaaatgtttccaggttggggaccttggttgtaagctccattgaaagggatgtaaattttgatcgaaggcaagagcaacttttttcactgcttatgaggttttattctttggtgtgtttttttccctcaccaccctgtcaacattcctacaaagtacagcaaacggcttttggtaccctgtaaattgatgggaaggcaaggacgacatttgagtgcaggtgggttgtaccactcctgttttagagcatgtccagactagaggatgggtgattgcatagtgaggccacagttttctttttttgttgagcttcattaataccccctctgtctaaaagtcctcatcgtttaagcgtcccgcaccaagaccaaggatgcccctccgcattgcagccgctgtgaagttaattatctggcgccgttttgtattttcaaaacacgcatatgtaatgtcgcaaaaattcagctgcttcgatggttggccggccataggggcggtatccatacatcacaccatcgtgcagcgtacattcagctgcttcgacggttgcataccgtagtttttgttcaggatttactttgtaaagaagtgaggctgttttgtcatgtatgtaaagggcttgtttcgatgtagcatgaaatacgaagaattatgatgcatttgaatataccgtgctcccctgagcaaaaaacaaatcaacagaagctaccacctggccgc

SEQ ID NO: 34024 - DNA, 787 bp, Zea Mays
ccggccgtgggcaaagccctgcggctggcctccccagcggccctaaccctagccgttgccctctaaccctcgcagctatctgccgctcataacagtacctttgcattgccttagcaaatgattggatgaatctttcagtttgcaagaaagacccatctgcggttcactgcatgaatgtgcaaatccgaagtatgcaatcacaaaagcttttgttgtagcttttgtgatgactttcttctctgtgtttgacgttcctgtcttctggcctatactcctctgctactgggttgttctctttgtccttacaatgaagcgccagattgtgcatatgatcaaatacaaatatgtgcctttcagtatcgggaaacagaaatacggtgtgaagaagagtgtcgcaagcaccagttcctcgaaagactgattatgagtctacctcagtaggaacttggcaggggaacaagatacggtggatgatgatgtgctaaatacctaagtgtaatactccattcatatctagatgtagacggatattcgctcctgtttctgactctgggctcactgtttaattcgatattgtgcttagctccctcctatgcttgtatagcgaattccgcatctcagataaattatttcgtttatttactagatatctgggccccgaaaacaataacctccatgctctcagcgagtttcttggttgtgagttggagtgaattaggcgggttttttttataaaaaaaatcaaactgaacagaatgctaaagtttagacgcataacgtttgagcc

SEQ ID NO: 34025 - DNA, 767 bp, Zea Mays
tcggatcggtctcgctagtttagttcttgccgtcatgtcgtatttatagctaggtactagtactcctaatccaggcaaaattaagtcaatttgcatctcgcaaaccggttacgagtctgcctcaactttcgaggcattgttgctcagctacttctgacccctccccgcagtatgcaatcacaaaagcttttgttgtagcttttgtgatgactttcttctctgtgtttgacgttcctgtcttctggcctatactcctctgctactgggttgttctctttgtccttacaatgaagcgccagattgtgcatatgatcaaatacaaatatgtgcctttcagtatcgggaaacagaaatacggtgtgaagaagagtgtcgcaagcaccagttcctcgaaagactgattatgagtctacctcagtaggaacttggcaggggaacaagatacggtggatgatgatgtgctaaatacctaagtgtaatactccattcatatctagatgtagacggatattcgctcctgtttctgactctgggctcactgtttaattcgatattgtgcttagctccctcctatgcttgtatagcgaattccgcatctcagataaattatttcgtttatttactagatatctgggccccgaaaacaataacctccatgctctcagcgagtttcttggttgtgagttggagtgaattaggcgggttttttttataaaaaaaatcaaactgaacagaatgctaaagtttagacgcataacgtttgagcc

SEQ ID NO: 34026 - DNA, 1745 bp, Zea Mays
ggctcactgcactaccagaacacaactcgctagctctgcatcatccgtcgttctggtgagcgagcgagcgagtgagagacctagctagactgaccggcggccgccggcaggccgagaacgaagcgtttgtgcattgaaggagcaggagccatggcggaccagcagcagccacagcagcagccgcaggagatggacgttgaccgtaccggtggcctcgaactgcctccagggttccgcttccacccgagcgactttgagattatcaacgactacctcacgaagaaggtgcacgacagggactacagctgcatcgccatcgcggacgccgacctaaacaagaccgagccatgggacctcccgattgcaaagatgggcgagaaggagtggtacttcttctaccagaaggaccgcaagtacccgacggggctgagggcgaaccgggccactgaggcgggttattggaaggcgaccggcaaggacaaggaggtctacaacccctttgcagcggaagggctgctgctggtcggcatgaagaagacgctcgtgttctacaaaggcagggctcccaggggtgacaaaaccaactgggtgatgcacgagtacaggctcgaaggcagcggtaggctccctgctagtcctgcatccgcatccggctcagccaccaacatcgctgcggccatgatgaaagcttcagcttcggcttgcaaggatgagtgggtggtctgtcgtgtgttcaacaagaccaccgggatcaagaagacggctgcgccggcataccaggtggccatggccggtcctgagatggatcagaatcagaacaacattccggccatccccatccccatgccgctgcagctgccactgcccgtgcccatgcagatgcaatttcccatcctgccagattttgccatggacccggtggccccctactaccccaacccgaatgccggcgcggggatgatgccgcctatggcattggcaggtatgggtggcgccggcgggctccagatcaacggcgctctgttcggcaatccggtgcccgcgccgctgccgatgaacttctaccaccaccagatgggcatgggggcagcagctggccaggtggacatgggggcagcggctggccagatggacatgggagcagctggcgctggcgctggcggcttcgacgttgcagcgccggagagtaggccgtcctcgatggtgtcacagaaggacgaacaggctaatgccgccgagatctcgtcgatgatgtctgtgaccggcccagggtccgcgaccaccaccatagagatggatggcatatggaagtacaagtactgaaaaagtggatatggagtttggagacaaatgcatgaatatgcatgttatatctactatatctgcattgcattttgtgaaaatttgcatggttcctatatttctgcaataactagtcggtaagatatgtgtgcatgcatgtgctagtatatacatgcattgtatcattgcatgtgtggtatatgtgtgtgtcgtttggtcttagtaatccggggcatgatggtacccatacctggatttacatctgcttggtcgtgctgatgttgtgttgtaatttgtaaaaagcagattgaagttcggtacagtatattatcgtgaacctatatatattatacttgtgtgaatgatagtatgttgttaaattttatgaacttgattgcgaaattaaactttaaattgtatgtatttaaattgtaatctttttt

SEQ ID NO: 34027 - DNA, 1743 bp, Zea Mays
ggctcactgcactaccagaacacaactcgctagctctgcatcatccgtcgttctggtgagcgagcgagcgagtgagagacctagctagactgaccggcggccgccggcaggccgagaacgaagcgtttgtgcatgagcaggagccatggcggaccagcagcagccacagcagcagccgcaggagatggacgttgaccgtaccggtggcctcgaactgcctccagggttccgcttccacccgagcgactttgagattatcaacgactacctcacgaagaaggtgcacgacagggactacagctgcatcgccatcgcggacgccgacctaaacaagaccgagccatgggacctcccgaaagttgcaaagatgggcgagaaggagtggtacttcttctaccagaaggaccgcaagtacccgacggggctgagggcgaaccgggccactgaggcgggttattggaaggcgaccggcaaggacaaggaggtctacaacccctttgcagcggaagggctgctgctggtcggcatgaagaagacgctcgtgttctacaaaggcagggctcccaggggtgacaaaaccaactgggtgatgcacgagtacaggctcgaaggcagcggtaggctccctgctagtcctgcatccgcatccggctcagccaccaacatcgctgcggccatgatgaaagcttcagcttcggcttgcaaggatgagtgggtggtctgtcgtgtgttcaacaagaccaccgggatcaagaagacggctgcgccggcataccaggtggccatggccggtcctgagatggatcagaatcagaacaacattccggccatccccatccccatgccgctgcagctgccactgcccgtgcccatgcagatgcaatttcccatcctgccagattttgccatggacccggtggccccctactaccccaacccgaatgccggcgcggggatgatgccgcctatggcattggcaggtatgggtggcgccggcgggctccagatcaacggcgctctgttcggcaatccggtgcccgcgccgctgccgatgaacttctaccaccaccagatgggcatgggggcagcagctggccaggtggacatgggggcagcggctggccagatggacatgggagcagctggcgctggcgctggcggcttcgacgttgcagcgccggagagtaggccgtcctcgatggtgtcacagaaggacgaacaggctaatgccgccgagatctcgtcgatgatgtctgtgaccggcccagggtccgcgaccaccaccatagagatggatggcatatggaagtacaagtactgaaaaagtggatatggagtttggagacaaatgcatgaatatgcatgttatatctactatatctgcattgcattttgtgaaaatttgcatggttcctatatttctgcaataactagtcggtaagatatgtgtgcatgcatgtgctagtatatacatgcattgtatcattgcatgtgtggtatatgtgtgtgtcgtttggtcttagtaatccggggcatgatggtacccatacctggatttacatctgcttggtcgtgctgatgttgtgttgtaatttgtaaaaagcagattgaagttcggtacagtatattatcgtgaacctatatatattatacttgtgtgaatgatagtatgttgttaaattttatgaacttgattgcgaaattaaactttaaattgtatgtatttaaattgtaatctttttt

SEQ ID NO: 34028 - DNA, 5001 bp, Zea Mays
cccgggttcgatccccggtgttggcattgggaagcctctctgttggccttccttgtgatccccctacttcatcctttgtggatttattgttactgtttatggatcataattcctcttctatgaagtctgtggcgttaaaatgcatgtgttttatgtttcggagaaatatctgccattttccagttattaggaatgtttttggcagattgtttccattaattgatgatgaggattttccacttgactgtaagagcgatgtgttaaggattctgcagaagatgttatgcagtaaaacgtcaagtaatcatcgtgccaatggttctgagttatctaagctacttctagctgctgaaagttctttagattcttcttgtttggaggtgcaaggtaccgctctggaaattcttgtggaaatcttttgtattctcaaggaagttgggtcagataacatatcagttctcaagggttcgtcatttgcacatgctgagtggcaaggaataacgaacaatgtaccattaactgaagataatagtatgaacggacctctgtgtaagatcattgcaatgattgtgaatcatattatatccctggccaatgaagttgctagcagagatatctgcatatcatctgcagtggataaggcatacaaaactcctttcagacttatgctaaagcttgtttcatgctacccttctgctgctgctgtaactcttcatatactgaaaagccttgtaaaagaactgtttctaattaatggaagtgattactctgaagtttctgttacatctgttgaaccattccagacaagtgttgcccttaaagaattgagtacttcagatgacaatgttcaactgttagctacatgcatcaaagcttcctgcattggaacacttattggcaatggaaaactggattttctcaaaattgattgcaagaatagaaagtccataatgcatgatctaatttgttgcatgctcaaatttgcaaatgcttgtcatgaggtgctatgtgaaacatctggtgctagatacaatcttcatgatagcatcaagggtctaatcaagtatgtgcgtcaggatgcccctcagcactggagcacatatgaatccttccatttgataatgtgtgcttgtgttacccggaatacttgtaaaatcaatcgtggtaatcaagaatctggtgattcaaaagagcatcataatacactattcactccttctgtttggataactcaggaattatgtgcacttcgaatgaccaaaatgcttataaagaagcagaaatactgggaagcttataggtcttctatgtactgttgttgtaaaggtctttggttcacagcttcttttgtcttcagaaaactggcagatgcttttgaagcaggctctttcagtttttggctcaaatcgttgctacttttttctgctggcgaaattgagatgaagctattgtttttttcctcagcaactataaagttagttggtgagctaaaaatggagggtgatttaagtgaggatctttactgtaatgaaacagatgctgatagcaccctcagtagatcatcagagttacatggtttccaagcaaagatatctgatatttgtggcagaacattattagcaaataatgctcttgcatccagtgcctcttcagatcatgacttcgtattccagaggtggttcatcagccttaggtcatcatttcttgaggtcctaacaaaagttcttgatatccttaatgcacactcttcctatgaagcaagaggagaccatttatctttgtctggagagtttgtcaaagaccaagtgcttgctttggatcattgctctctaagattaagtgacttggcaaaaagttatgaccttcttgctgcatcccatatggacctggagcgacatggctcaagtagtatagccaggcttgctttcatgtgctcacttttggcattttgtactgcatattctgtttatttctcaaaggcatgtaactacgtagagtactgcaagcttccaaagaggttttcccatgcttcaatcctacaagatttgtatggaagagtagatgggtctgactggcaggttgtttcccagctgcgacagtttatgtccacttcttttgacgaacttgacagcttacagtccagcacatggatcagtggttcatgtaatctggagaaggatttgtattctctttgtcattttgctgtggcatctttgcttggtgtatgtgatagtgctgaagctgaaaaaatacaaaatggagaggattgtttatctgctttgcaaggaggattgcaagtgttgtccagcatcttgcagaagtatttggaattgccttttgtggttcccaagtactttttcagagtaaagccttgccttggtgctgaactttacatatttgattcaaatcatttgaatgaaaaaggaatgtctatagagcctggttttctattgtctctaaccctctgcatgaagtggaagtgtgtgttagaaagaagcaccattcgcatcgtgaaattgtactgcattttggccgcaagcttagagacctgcttggatacagcaggaacaagaagcaagcagtttgatcagcacaggaccgctgaaatggtcgaattgaactccaagctgctacagtacataaagaatgatctgaggaaggctaggaatgagaagaagaattcccatagtgtcatggagatggtgactgcctttgcatgctttgaaccaacagatagtgggcaggggttctcaggatgcctgctggatgtctcctcgttccctgaaggctcttatcagataaagtggcaggcgtgctgtgtcgatgagaatgggtcctattttagtctcctgcccctgaacgatggttccatattttctgtccagaagtcctaactctaactgaatggccgctgcggttatgggaatggaagatggaacatactcttcttgctcgcagtgtctgttcctgagttcatttttatgcacacagaaggcttgtgtgtctatgatccgcctatatggtctgggtttgacatgttcactctattacttgtgttgtggcagtaaattacagaggcctggtgctgaggcttgtaggcagcatgaactgatgaatgagcagatgttgctgctgatcttcaccttgctgctattctgaacagaatcagcactagcagataacatagatcgtttgatgaattgacacagccagaggcagatgtttttcagctggttaatgtgcattctctgtctctgtgggcaacctgaccgatgacaattcacattgtacacctgtttgtagcgctgattattcttttaatgcagattgtgtataggcctggcgaaaaattgaatctacgagatttccagtatcctgtaaataacgtatctcatatctctggatgactttattgctgaccaacctggtggatctctgactactggaggatgcaacagaacagagtgttgctgtggattttataatgttggaagtagaagctgcattcatgtgcgatggtgcttctaaaatgccaattcttttgtaaacagaatttgtgatcttgaaaactttgtggtacggagatacaattctggtaatgagacccaaggtcatgggctagtgaagagatggttagaacttagaagagcttaaggatgacaaggaggatacactgtaagctgtatttgtgtttagagatcacattatcgattctgttaaacacatatattgcaacatgtatgcatcagcagaccagatagctgatggttttccaccttgccaggcatgcaagtaccgtggtcaccctattgagcttgtcaccccaaataacgcaaaatggacttgtccaataaatgaacagcttgcagcttctgatgttactgacactgctgtgagaattgaagaacaaacagtgttgtttctgcctacttcggaagacagtccaaacttgcagggagcctctgcggttgggttgatagcccagtggtgaaggcggcgttgtccctttcaccaggtcaggggttcgaccgttggttccgcacccataaaaaaaatcccctcactgtcccgcctgctcttggggatcgatgtcctgtgcgccaccttccgtttgggccgctgcagagtggacagttgtactcgggccgttagtgatgtgggccaaggttcagaggttttctcagccaggaccagtggtttgggtcctttagtattataccacaagagcggtcattcccttcccggccgttttttttgcagtgagcctctccttccatttcttttgatgtaattgatagcctcaacaaacgaagttcaaacgatgttgaagcttctctaactgatgagagctcagatgggaacactcaaattttctatggtctatatgaaacccttttcgagcttgaccagggacttgtttgctcctcatcatgcaatattggaaagatgaaaattggaactcttcagtgttactacctactatcttcttgaacaatctgaaaaaggaccagtgctccccctgtcagggacggatctagcggtgggtgggcggggctcgagtctccctaccgtttcggatcccatgaagccccactacagtctcctctaatctaaaatgtatacaatataatgtagaatgagcttttatactgcagcaatttagttcagtccctcctaaacttttttctggctctgtccctgcccctgttctattttgatttgtgatgtagtgagagacatattttttatttttgtgaaatgtatatttcaccgcttgtagtaagtagcctaaaaccatattggattggattcctaccgctgaataactatctttgtcataatgcttgtacttcagatgcttataagttgccagaatagaaagtattccctccgtcctaaaatacaatttgttttagactaaatatacattcattcaataacctatgaatatagtttataggtatgtctatatacattcattcattcggggacataaaaaag

SEQ ID NO: 34029 - DNA, 5238 bp, Zea Mays
caaggctgcaatttttgcggctagttgcatttgtcatctgtcagatgacttctcaaggataattcttgaagtgttcagaagattgatatgttctcagacatcagagccacaagtcatcatgtcagcagctaaggctttctggaagcttggttctacgttggctgttatccataaagttcatgaggttggaaaacagatggttctaggcacactggaagacgtcttcaaatctgaaatgctcttttcactctcaagactgtcatccaagtcgatcattttgttttctgaccaggtggatttattgttactgtttatggatcataattcctcttctatgaagtctgtggcgttaaaatgcatgtgttttatgtttcggagaaatatctgccattttccagttattaggaatgtttttggcagattgtttccattaattgatgatgaggattttccacttgactgtaagagcgatgtgttaaggattctgcagaagtaaaacgtcaagtaatcatcgtgccaatggttctgagttatctaagctacttctagctgctgaaagttctttagattcttcttgtttggaggtgcaaggtaccgctctggaaattcttgtggaaatcttttgtattctcaaggaagttgggtcagataacatatcagttctcaagggttcgtcatttgcacatgctgagtggcaaggaataacgaacaatgtaccattaactgaagataatagtatgaacggacctctgtgtaagatcattgcaatgattgtgaatcatattatatccctggccaatgaagttgctagcagagatatctgcatatcatctgcagtggataaggcatacaaaactcctttcagacttatgctaaagcttgtttcatgctacccttctgctgctgctgtaactcttcatatactgaaaagccttgtaaaagaactgtttctaattaatggaagtgattactctgaagtttctgttacatctgttgaaccattccagacaagtgttgcccttaaagaattgagtacttcagatgacaatgttcaactgttagctacatgcatcaaagcttcctgcattggaacacttattggcaatggaaaactggattttctcaaaattgattgcaagaatagaaagtccataatgcatgatctaatttgttgcatgctcaaatttgcaaatgcttgtcatgaggtgctatgtgaaacatctggtgctagatacaatcttcatgatagcatcaagggtctaatcaagtatgtgcgtcaggatgcccctcagcactggagcacatatgaatccttccatttgataatgtgtgcttgtgttacccggaatacttgtaaaatcaatcgtggtaatcaagaatctggtgattcaaaagagcatcataatacactattcactccttctgtttggataactcaggaattatgtgcacttcgaatgaccaaaatgcttataaagaagcagaaatactgggaagcttataggtcttctatgtactgttgttgtaaaggtctttggttcacagcttcttttgtcttcagaaaactggcagatgcttttgaagcaggctctttcagtttttggctcaaatcgttgctacttttttctgctggcgaaattgagatgaagctattgtttttttcctcagcaactataaagttagttggtgagctaaaaatggagggtgatttaagtgaggatctttactgtaatgaaacagatgctgatagcaccctcagtagatcatcagagttacatggtttccaagcaaagatatctgatatttgtggcagaacattattagcaaataatgctcttgcatccagtgcctcttcagatcatgacttcgtattccagaggtggttcatcagccttaggtcatcatttcttgaggtcctaacaaaagttcttgatatccttaatgcacactcttcctatgaagcaagaggagaccatttatctttgtctggagagtttgtcaaagaccaagtgcttgctttggatcattgctctctaagattaagtgacttggcaaaaagttatgaccttcttgctgcatcccatatggacctggagcgacatggctcaagtagtatagccaggcttgctttcatgtgctcacttttggcattttgtactgcatattctgtttatttctcaaaggcatgtaactacgtagagtactgcaagcttccaaagaggttttcccatgcttcaatcctacaagatttgtatggaagagtagatgggtctgactggcaggttgtttcccagctgcgacagtttatgtccacttcttttgacgaacttgacagcttacagtccagcacatggatcagtggttcatgtaatctggagaaggatttgtattctctttgtcattttgctgtggcatctttgcttggtgtatgtgatagtgctgaagctgaaaaaatacaaaatggagaggattgtttatctgctttgcaaggaggattgcaagtgttgtccagcatcttgcagaagtatttggaattgccttttgtggttcccaagtactttttcagagtaaagccttgccttggtgctgaactttacatatttgattcaaatcatttgaatgaaaaaggaatgtctatagagcctggttttctattgtctctaaccctctgcatgaagtggaagtgtgtgttagaaagaagcaccattcgcatcgtgaaattgtactgcattttggccgcaagcttagagacctgcttggatacagcaggaacaagaagcaagcagtttgatcagcacaggaccgctgaaatggtcgaattgaactccaagctgctacagtacataaagaatgatctgaggaaggctaggaatgagaagaagaattcccatagtgtcatggagatggtgactgcctttgcatgctttgaaccaacagatagtgggcaggggttctcaggatgcctgctggatgtctcctcgttccctgaaggctcttatcagataaagtggcaggcgtgctgtgtcgatgagaatgggtcctattttagtctcctgcccctgaacgatggttccatattttctgtccagaagtcctaactctaactgaatggccgctgcggttatgggaatggaagatggaacatactcttcttgctcgcagtgtctgttcctgagttcatttttatgcacacagaaggcttgtgtgtctatgatccgcctatatggtctgggtttgacatgttcactctattacttgtgttgtggcagtaaattacagaggcctggtgctgaggcttgtaggcagcatgaactgatgaatgagcagatgttgctgctgatcttcaccttgctgctattctgaacagaatcagcactagcagataacatagatcgtttgatgaattgacacagaggcagatgtttttcagctggttaatgtgcattctctgtctctgtgggcaacctgaccgatgacaattcacattgtacacctgtttgtagcgctgattattcttttaatgcagattgtgtataggcctggcgaaaaattgaatctacgagatttccagtatcctgtaaataacgtatctcatatctctggatgactttattgctgaccaacctggtggatctctgactactggaggatgcaacagaacagagtgttgctgtggattttataatgttggaagtagaagctgcattcatgtgcgatggtgcttctaaaatgccaattcttttgtaaacagaatttgtgatcttgaaaactttgtggtacggagatacaattctggtaatgagacccaaggtcatgggctagtgaagagatggttagaacttagaagagcttaaggatgacaaggaggatacactgtaagctgtatttgtgtttagagatcacattatcgattctgttaaacacatatattgcaacatgtatgcatcagcagaccagatagctgatggttttccaccttgccaggcatgcaagtaccgtggtcaccctattgagcttgtcaccccaaataacgcaaaatggacttgtccaataaatgaacagcttgcagcttctgatgttactgacactgctgtgagaattgaagaacaaacagtgttgtttctgcctacttcggaagacagtccaaacttgcagggagcctctgcggttgggttgatagcccagtggtgaaggcggcgttgtccctttcaccaggtcaggggttcgaccgttggttccgcacccataaaaaaaatcccctcactgtcccgcctgctcttggggatcgatgtcctgtgcgccaccttccgtttgggccgctgcagagtggacagttgtactcgggccgttagtgatgtgggccaaggttcagaggttttctcagccaggaccagtggtttgggtcctttagtattataccacaagagcggtcattcccttcccggccgttttttttgcagtgagcctctccttccatttcttttgatgtaattgatagcctcaacaaacgaaggagtcataatggggaggttttatgttgtgattcccagttcaaacgatgttgaagcttctctaactgatgagagctcagatgggaacactcaaattttctatggtctatatgaaacccttttcgagcttgaccagggacttgtttgctcctcatcatgcaatattggaaagatgaaaattggaactcttcagtgttactacctactatcttcttgaacaatctgaaaaaggaccagtgctccccctgtcagggacggatctagcggtgggtgggcggggctcgagtctccctaccgtttcggatcccatgaagccccactacagtctcctctaatctaaaatgtatacaatataatgtagaatgagcttttatactgcagcaatttagttcagtccctcctaaacttttttctggctctgtccctgcccctgttctattttgatttgtgatgtagtgagagacatattttttatttttgtgaaatgtatatttcaccgcttgtagtaagtagcctaaaaccatattggattggattcctaccgctgaataactatctttgtcataatgcttgtacttcagatgcttataagttgccagaatagaaagtattccctccgtcctaaaatacaatttgttttagactaaatatacattcattcaataacctatgaatatagtttataggtatgtctatatacattcattcattcggggacataaaaaag

SEQ ID NO: 34030 - DNA, 5158 bp, Zea Mays
ctctcacactcagtagcgcaacgaatgatatgtcccaaacgcacgtcctacctgattggataaaatgtcaaggctgcaatttttgcggctagttgcatttgtcatctgtcagatgacttctcaaggataattcttgaagtgttcagaagattgatatgttctcagacatcagagccacaagtcatcatgtcagcagctaaggctttctggaagcttggttctacgttggctgttatccataaagttcatgaggttggaaaacagatggttctaggcacactggaagacgtcttcaaatctgaaatgctcttttcactctcaagactgtcatccaagtcgatcattttgttttctgaccaggtggatttattgttactgtttatggatcataattcctcttctatgaagtctgtggcgttaaaatgcatgtgttttatgtttcggagaaatatctgccattttccagttattaggaatgtttttggcagattgtttccattaattgatgatgaggattttccacttgactgtaagagcgatgtgttaaggattctgcagaagatgttatgcagtaaaacgtcaagtaatcatcgtgccaatggttctgagttatctaagctacttctagctgctgaaagttctttagattcttcttgtttggaggtgcaaggtaccgctctggaaattcttgtggaaatcttttgtattctcaaggaagttgggtcagataacatatcagttctcaagggttcgtcatttgcacatgctgagtggcaaggaataacgaacaatgtaccattaactgaagataatagtatgaacggacctctgtgtaagatcattgcaatgattgtgaatcatattatatccctggccaatgaagttgctagcagagatatctgcatatcatctgcagtggataaggcatacaaaactcctttcagacttatgctaaagcttgtttcatgctacccttctgctgctgctgtaactcttcatatactgaaaagccttgtaaaagaactgtttctaattaatggaagtgattactctgaagtttctgttacatctgttgaaccattccagacaagtgttgcccttaaagaattgagtacttcagatgacaatgttcaactgttagctacatgcatcaaagcttcctgcattggaacacttattggcaatggaaaactggattttctcaaaattgattgcaagaatagaaagtccataatgcatgatctaatttgttgcatgctcaaatttgcaaatgcttgtcatgaggtgctatgtgaaacatctggtgctagatacaatcttcatgatagcatcaagggtctaatcaagtatgtgcgtcaggatgcccctcagcactggagcacatatgaatccttccatttgataatgtgtgcttgtgttacccggaatacttgtaaaatcaatcgtggtaatcaagaatctggtgattcaaaagagcatcataatacactattcactccttctgtttggataactcaggaattatgtgcacttcgaatgaccaaaatgcttataaagaagcagaaatactgggaagcttataggtcttctatgtactgttgttgtaaaggtctttggttcacagcttcttttgtcttcagaaaactggcagatgcttttgaagcaggctctttcagtttttggctcaaatcgttgctacttttttctgctggcgaaattgagatgaagctattgtttttttcctcagcaactataaagttagttggtgagctaaaaatggagggtgatttaagtgaggatctttactgtaatgaaacagatgctgatagcaccctcagtagatcatcagagttacatggtttccaagcaaagatatctgatatttgtggcagaacattattagcaaataatgctcttgcatccagtgcctcttcagatcatgacttcgtattccagaggtggttcatcagccttaggtcatcatttcttgaggtcctaacaaaagttcttgatatccttaatgcacactcttcctatgaagcaagaggagaccatttatctttgtctggagagtttgtcaaagaccaagtgcttgctttggatcattgctctctaagattaagtgacttggcaaaaagttatgaccttcttgctgcatcccatatggacctggagcgacatggctcaagtagtatagccaggcttgctttcatgtgctcacttttggcattttgtactgcatattctgtttatttctcaaaggcatgtaactacgtagagtactgcaagcttccaaagaggttttcccatgcttcaatcctacaagatttgtatggaagagtagatgggtctgactggcaggttgtttcccagctgcgacagtttatgtccacttcttttgacgaacttgacagcttacagtccagcacatggatcagtggttcatgtaatctggagaaggatttgtattctctttgtcattttgctgtggcatctttgcttggtgtatgtgatagtgctgaagctgaaaaaatacaaaatggagaggattgtttatctgctttgcaaggaggattgcaagtgttgtccagcatcttgcagaagtatttggaattgccttttgtggttcccaagtactttttcagagtaaagccttgccttggtgctgaactttacatatttgattcaaatcatttgaatgaaaaaggaatgtctatagagcctggttttctattgtctctaaccctctgcatgaagtggaagtgtgtgttagaaagaagcaccattcgcatcgtgaaattgtactgcattttggccgcaagcttagagacctgcttggatacagcaggaacaagaagcaagcagtttgatcagcacaggaccgctgaaatggtcgaattgaactccaagctgctacagtacataaagaatgatctgaggaaggctaggaatgagaagaagaattcccatagtgtcatggagatggtgactgcctttgcatgctttgaaccaacagatagtgggcaggggttctcaggatgcctgctggatgtctcctcgttccctgaaggctcttatcagataaagtggcaggcgtgctgtgtcgatgagaatgggtcctattttagtctcctgcccctgaacgatggttccatattttctgtccagaagtcctaactctaactgaatggccgctgcggttatgggaatggaagatggaacatactcttcttgctcgcagtgtctgttcctgagttcatttttatgcacacagaaggcttgtgtgtctatgatccgcctatatggtctgggtttgacatgttcactctattacttgtgttgtggcagtaaattacagaggcctggtgctgaggcttgtaggcagcatgaactgatgaatgagcagatgttgctgctgatcttcaccttgctgctattctgaacagaatcagcactagcagataacatagatcgtttgatgaattgacacagccagaggcagatgtttttcagctggttaatgtgcattctctgtctctgtgggcaacctgaccgatgacaattcacattgtacacctgtttgtagcgctgattattcttttaatgcagattgtgtataggcctggcgaaaaattgaatctacgagatttccagtatcctgtaaataacgtatctcatatctctggatgactttattgctgaccaacctggtggatctctgactactggaggatgcaacagaacagagtgttgctgtggattttataatgttggaagtagaagctgcattcatgtgcgatggtgcttctaaaatgccaattcttttgtaaacagaatttgtgatcttgaaaactttgtggtacggagatacaattctggtaatgagacccaaggtcatgggctagtgaagagatggttagaacttagaagagcttaaggatgacaaggaggatacactgcatgcaagtaccgtggtcaccctattgagcttgtcaccccaaataacgcaaaatggacttgtccaataaatgaacagcttgcagcttctgatgttactgacactgctgtgagaattgaagaacaaacagtgttgtttctgcctacttcggaagacagtccaaacttgcagggagcctctgcggttgggttgatagcccagtggtgaaggcggcgttgtccctttcaccaggtcaggggttcgaccgttggttccgcacccataaaaaaaatcccctcactgtcccgcctgctcttggggatcgatgtcctgtgcgccaccttccgtttgggccgctgcagagtggacagttgtactcgggccgttagtgatgtgggccaaggttcagaggttttctcagccaggaccagtggtttgggtcctttagtattataccacaagagcggtcattcccttcccggccgttttttttgcagagtcataatggggaggttttatgttgtgattcccagttcaaacgatgttgaagcttctctaactgatgagagctcagatgggaacactcaaattttctatggtctatatgaaacccttttcgagcttgaccagggacttgtttgctcctcatcatgcaatattggaaagatgaaaattggaactcttcagtgttactacctactatcttcttgaacaatctgaaaaaggaccagtgctccccctgtcagggacggatctagcggtgggtgggcggggctcgagtctccctaccgtttcggatcccatgaagccccactacagtctcctctaatctaaaatgtatacaatataatgtagaatgagcttttatactgcagcaatttagttcagtccctcctaaacttttttctggctctgtccctgcccctgttctattttgatttgtgatgtagtgagagacatattttttatttttgtgaaatgtatatttcaccgcttgtagtaagtagcctaaaaccatattggattggattcctaccgctgaataactatctttgtcataatgcttgtacttcagatgcttataagttgccagaatagaaagtattccctccgtcctaaaatacaatttgttttagactaaatatacattcattcaataacctatgaatatagtttataggtatgtctatatacattcattcattcggggacataaaaaag

SEQ ID NO: 34031 - DNA, 6241 bp, Zea Mays
ctctcacactcagtagcgcaacgaatgatatgtcccaaacgcacgtcctacctgattggataaaatgtcaaggctgcaatttttgcggctagttgcatttgtcatctgtcagatgacttctcaaggataattcttgaagtgttcagaagattgatatgttctcagacatcagagccacaagtcatcatgtcagcagctaaggctttctggaagcttggttctacgttggctgttatccataaagttcatgaggttggaaaacagatggttctaggcacactggaagacgtcttcaaatctgaaatgctcttttcactctcaagactgtcatccaagtcgatcattttgttttctgaccaggtggatttattgttactgtttatggatcataattcctcttctatgaagtctgtggcgttaaaatgcatgtgttttatgtttcggagaaatatctgccattttccagttattaggaatgtttttggcagattgtttccattaattgatgatgaggattttccacttgactgtaagagcgatgtgttaaggattctgcagaagatgttatgcagtaaaacgtcaagtaatcatcgtgccaatggttctgagttatctaagctacttctagctgctgaaagttctttagattcttcttgtttggaggtgcaaggtaccgctctggaaattcttgtggaaatcttttgtattctcaaggaagttgggtcagataacatatcagttctcaagggttcgtcatttgcacatgctgagtggcaaggaataacgaacaatgtaccattaactgaagataatagtatgaacggacctctgtgtaagatcattgcaatgattgtgaatcatattatatccctggccaatgaagttgctagcagagatatctgcatatcatctgcagtggataaggcatacaaaactcctttcagacttatgctaaagcttgtttcatgctacccttctgctgctgctgtaactcttcatatactgaaaagccttgtaaaagaactgtttctaattaatggaagtgattactctgaagtttctgttacatctgttgaaccattccagacaagtgttgcccttaaagaattgagtacttcagatgacaatgttcaactgttagctacatgcatcaaagcttcctgcattggaacacttattggcaatggaaaactggattttctcaaaattgattgcaagaatagaaagtccataatgcatgatctaatttgttgcatgctcaaatttgcaaatgcttgtcatgaggtgctatgtgaaacatctggtgctagatacaatcttcatgatagcatcaagggtctaatcaagtatgtgcgtcaggatgcccctcagcactggagcacatatgaatccttccatttgataatgtgtgcttgtgttacccggaatacttgtaaaatcaatcgtggtaatcaagaatctggtgattcaaaagagcatcataatacactattcactccttctgtttggataactcaggaattatgtgcacttcgaatgaccaaaatgcttataaagaagcagaaatactgggaagcttataggtcttctatgtactgttgttgtaaaggtctttggttcacagcttcttttgtcttcagaaaactggcagatgcttttgaagcaggctctttcagtttttggctcaaatcgttgctacttttttctgctggcgaaattgagatgaagctattgtttttttcctcagcaactataaagttagttggtgagctaaaaatggagggtgatttaagtgaggatctttactgtaatgaaacagatgctgatagcaccctcagtagatcatcagagttacatggtttccaagcaaagatatctgatatttgtggcagaacattattagcaaataatgctcttgcatccagtgcctcttcagatcatgacttcgtattccagaggtggttcatcagccttaggtcatcatttcttgaggtcctaacaaaagttcttgatatccttaatgcacactcttcctatgaagcaagaggagaccatttatctttgtctggagagtttgtcaaagaccaagtgcttgctttggatcattgctctctaagattaagtgacttggcaaaaagttatgaccttcttgctgcatcccatatggacctggagcgacatggctcaagtagtatagccaggcttgctttcatgtgctcacttttggcattttgtactgcatattctgtttatttctcaaaggcatgtaactacgtagagtactgcaagcttccaaagaggttttcccatgcttcaatcctacaagatttgtatggaagagtagatgggtctgactggcaggttgtttcccagctgcgacagtttatgtccacttcttttgacgaacttgacagcttacagtccagcacatggatcagtggttcatgtaatctggagaaggatttgtattctctttgtcattttgctgtggcatctttgcttggtgtatgtgatagtgctgaagctgaaaaaatacaaaatggagaggattgtttatctgctttgcaaggaggattgcaagtgttgtccagcatcttgcagaagtatttggaattgccttttgtggttcccaagtactttttcagagtaaagccttgccttggtgctgaactttacatatttgattcaaatcatttgaatgaaaaaggaatgtctatagagcctggttttctattgtctctaaccctctgcatgaagtggaagtgtgtgttagaaagaagcaccattcgcatcgtgaaattgtactgcattttggccgcaagcttagagacctgcttggatacagcaggaacaagaagcaagcagtttgatcagcacaggaccgctgaaatggtcgaattgaactccaagctgctacagtacataaagaatgatctgaggaaggctaggaatgagaagaagaattcccatagtgtcatggagatggtgactgcctttgcatgctttgaaccaacagatagtgggcaggggttctcaggatgcctgctggatgtctcctcgttccctgaaggctcttatcagataaagtggcaggcgtgctgtgtcgatgagaatgggtcctattttagtctcctgcccctgaacgatggttccatattttctgtccagaagtcctaactctaactgaatggccgctgcggttatgggaatggaagatggaacatactcttcttgctcgcagtgtctgttcctgagttcatttttatgcacacagaaggcttgtgtgtctatgatccgcctatatggtctgggtttgacatgttcactctattacttgtgttgtggcagtaaattacagaggcctggtgctgaggcttgtaggcagcatgaactgatgaatgagcagatgttgctgctgatcttcaccttgctgctattctgaacagaatcagcactagcagataacatagatcgtttgatgaattgacacaggtgtagctccaccttttcctattctgaatttgactttctaatggctttagttgagttttagttgagtttcaacttgtgtagaagcagtacaggttccagttcccctgtaacttgtagtttagagaaaaatagtatagtgctactcctacacggctagtacaaggcaatggctctgagcttctggatacaattttggatagtactatttatcatactttaactcgaattcgagtagaaatacatatattgtcgaatactaatgcaaaatggatatcgtaaatttgaatccaaattcagatgtctaaattttgaagataacatgttttttattgatagtttcgtagtctaataaaatcatcatagatgaaggaatttaaaacatagctatacaacaccgtgtataaagacaactaaaatattttaataattaaatatataaaatagaagaaaattatagataatataaattgagtactaaattcaaataaattttagaagtatataaataaaacaaaatactaatttagctgctttatccatctgtccctgccgtggatctgtttgtttagtgtttgcatgcgtgcacaactgcttgctgattccaaattaatcacatcaccaactccctatcggcatgtagtgcctccctccctttgtttgtttgggatcgaattgggcactgatacacaccactgatgcttgatatgcagtgctcccttcgtttgcattgccgcctatataggtcccatagttaacttcgtgtgctccctttcattctcctatggcagaaccggtttaccaccttccgtttgctagaaacggggaccaatttatcaatgttattatacaaatgactgggtgtgctgtcaattatataatatttgggattacttgaatcacttctatgtcacatttatcagccagaggcagatgtttttcagctggttaatgtgcattctctgtctctgtgggcaacctgaccgatgacaattcacattgtacacctgtttgtagcgctgattattcttttaatgcagattgtgtataggcctggcgaaaaattgaatctacgagatttccagtatcctgtaaataacgtatctcatatctctggatgactttattgctgaccaacctggtggatctctgactactggaggatgcaacagaacagagtgttgctgtggattttataatgttggaagtagaagctgcattcatgtgcgatggtgcttctaaaatgccaattcttttgtaaacagaatttgtgatcttgaaaactttgtggtacggagatacaattctggtaatgagacccaaggtcatgggctagtgaagagatggttagaacttagaagagcttaaggatgacaaggaggatacactgtaagctgtatttgtgtttagagatcacattatcgattctgttaaacacatatattgcaacatgtatgcatcagcagaccagatagctgatggttttccaccttgccaggcatgcaagtaccgtggtcaccctattgagcttgtcaccccaaataacgcaaaatggacttgtccaataaatgaacagcttgcagcttctgatgttactgacactgctgtgagaattgaagaacaaacagtgttgtttctgcctacttcggaagacagtccaaacttgcagggagcctctgcggttgggttgatagcccagtggtgaaggcggcgttgtccctttcaccaggtcaggggttcgaccgttggttccgcacccataaaaaaaatcccctcactgtcccgcctgctcttggggatcgatgtcctgtgcgccaccttccgtttgggccgctgcagagtggacagttgtactcgggccgttagtgatgtgggccaaggttcagaggttttctcagccaggaccagtggtttgggtcctttagtattataccacaagagcggtcattcccttcccggccgttttttttgcagtgagcctctccttccatttcttttgatgtaattgatagcctcaacaaacgaaggagtcataatggggaggttttatgttgtgattcccagttcaaacgatgttgaagcttctctaactgatgagagctcagatgggaacactcaaattttctatggtctatatgaaacccttttcgagcttgaccagggacttgtttgctcctcatcatgcaatattggaaagatgaaaattggaactcttcagtgttactacctactatcttcttgaacaatctgaaaaaggaccagtgctccccctgtcagggacggatctagcggtgggtgggcggggctcgagtctccctaccgtttcggatcccatgaagccccactacagtctcctctaatctaaaatgtatacaatataatgtagaatgagcttttatactgcagcaatttagttcagtccctcctaaacttttttctggctctgtccctgcccctgttctattttgatttgtgatgtagtgagagacatattttttatttttgtgaaatgtatatttcaccgcttgtagtaagtagcctaaaaccatattggattggattcctaccgctgaataactatctttgtcataatgcttgtacttcagatgcttataagttgccagaatagaaagtattccctccgtcctaaaatacaatttgttttagactaaatatacattcattcaataacctatgaatatagtttataggtatgtctatatacattcattcattcggggacataaaaaag

SEQ ID NO: 34032 - DNA, 5930 bp, Zea Mays
ttggagcggattccagcggcatccgccatggactggagcatcgacctcgacaggggtctccgctcccgccaaccagcaacgcgcgtccgcgccgtcgacgccgccggcccacgcctccgccagctctgcacttgcgccaccgcccccgcgcccgtcgcctccgcgtacggcgtcttgcccggggaggcgcgcgtcttcgcggagaccatgctcctccgcctcgccaccgaattcaggagcgccgacgtcgccatgcgggtccgcatcatcaagaccctcctcaattctgccacgggtccaggggcgctagccggggcgcgcatcacggagcctgaccagctgctcaggagggtcaaggtggtctacgacactgggaacaagcgggacagggcgcttgcactgcgcatgttcgggtgcttcgccgacatcgccaaggacagcgtgcacgtccgctctctcatactttccagtttgagtgcctccagtgctttggaggtcaaggctgcaatttttgcggctagttgcatttgtcatctgtcagatgacttctcaaggataattcttgaagtgttcagaagattgatatgttctcagacatcagagccacaagtcatcatgtcagcagctaaggctttctggaagcttggttctacgttggctgttatccataaagttcatgaggttggaaaacagatggttctaggcacactggaagacgtcttcaaatctgaaatgctcttttcactctcaagactgtcatccaagtcgatcattttgttttctgaccaggtggatttattgttactgtttatggatcataattcctcttctatgaagtctgtggcgttaaaatgcatgtgttttatgtttcggagaaatatctgccattttccagttattaggaatgtttttggcagattgtttccattaattgatgatgaggattttccacttgactgtaagagcgatgtgttaaggattctgcagaagatgttatgcagtaaaacgtcaagtaatcatcgtgccaatggttctgagttatctaagctacttctagctgctgaaagttctttagattcttcttgtttggaggtgcaaggtaccgctctggaaattcttgtggaaatcttttgtattctcaaggaagttgggtcagataacatatcagttctcaagggttcgtcatttgcacatgctgagtggcaaggaataacgaacaatgtaccattaactgaagataatagtatgaacggacctctgtgtaagatcattgcaatgattgtgaatcatattatatccctggccaatgaagttgctagcagagatatctgcatatcatctgcagtggataaggcatacaaaactcctttcagacttatgctaaagcttgtttcatgctacccttctgctgctgctgtaactcttcatatactgaaaagccttgtaaaagaactgtttctaattaatggaagtgattactctgaagtttctgttacatctgttgaaccattccagacaagtgttgcccttaaagaattgagtacttcagatgacaatgttcaactgttagctacatgcatcaaagcttcctgcattggaacacttattggcaatggaaaactggattttctcaaaattgattgcaagaatagaaagtccataatgcatgatctaatttgttgcatgctcaaatttgcaaatgcttgtcatgaggtgctatgtgaaacatctggtgctagatacaatcttcatgatagcatcaagggtctaatcaagtatgtgcgtcaggatgcccctcagcactggagcacatatgaatccttccatttgataatgtgtgcttgtgttacccggaatacttgtaaaatcaatcgtggtaatcaagaatctggtgattcaaaagagcatcataatacactattcactccttctgtttggataactcaggaattatgtgcacttcgaatgaccaaaatgcttataaagaagcagaaatactgggaagcttataggtcttctatgtactgttgttgtaaaggtctttggttcacagcttcttttgtcttcagaaaactggcagatgcttttgaagcaggctctttcagtttttggctcaaatcgttgctacttttttctgctggcgaaattgagatgaagctattgtttttttcctcagcaactataaagttagttggtgagctaaaaatggagggtgatttaagtgaggatctttactgtaatgaaacagatgctgatagcaccctcagtagatcatcagagttacatggtttccaagcaaagatatctgatatttgtggcagaacattattagcaaataatgctcttgcatccagtgcctcttcagatcatgacttcgtattccagaggtggttcatcagccttaggtcatcatttcttgaggtcctaacaaaagttcttgatatccttaatgcacactcttcctatgaagcaagaggagaccatttatctttgtctggagagtttgtcaaagaccaagtgcttgctttggatcattgctctctaagattaagtgacttggcaaaaagttatgaccttcttgctgcatcccatatggacctggagcgacatggctcaagtagtatagccaggcttgctttcatgtgctcacttttggcattttgtactgcatattctgtttatttctcaaaggcatgtaactacgtagagtactgcaagcttccaaagaggttttcccatgcttcaatcctacaagatttgtatggaagagtagatgggtctgactggcaggttgtttcccagctgcgacagtttatgtccacttcttttgacgaacttgacagcttacagtccagcacatggatcagtggttcatgtaatctggagaaggatttgtattctctttgtcattttgctgtggcatctttgcttggtgtatgtgatagtgctgaagctgaaaaaatacaaaatggagaggattgtttatctgctttgcaaggaggattgcaagtgttgtccagcatcttgcagaagtatttggaattgccttttgtggttcccaagtactttttcagagtaaagccttgccttggtgctgaactttacatatttgattcaaatcatttgaatgaaaaaggaatgtctatagagcctggttttctattgtctctaaccctctgcatgaagtggaagtgtgtgttagaaagaagcaccattcgcatcgtgaaattgtactgcattttggccgcaagcttagagacctgcttggatacagcaggaacaagaagcaagcagtttgatcagcacaggaccgctgaaatggtcgaattgaactccaagctgctacagtacataaagaatgatctgaggaaggctaggaatgagaagaagaattcccatagtgtcatggagatggtgactgcctttgcatgctttgaaccaacagatagtgggcaggggttctcaggatgcctgctggatgtctcctcgttccctgaaggctcttatcagataaagtggcaggcgtgctgtgtcgatgagaatgggtcctattttagtctcctgcccctgaacgatggttccatattttctgtccagaagtcctaactctaactgaatggccgctgcggttatgggaatggaagatggaacatactcttcttgctcgcagtgtctgttcctgagttcatttttatgcacacagaaggcttgtgtgtctatgatccgcctatatggtctgggtttgacatgttcactctattacttgtgttgtggcagtaaattacagaggcctggtgctgaggcttgtaggcagcatgaactgatgaatgagcagatgttgctgctgatcttcaccttgctgctattctgaacagaatcagcactagcagataacatagatcgtttgatgaattgacacagccagaggcagatgtttttcagctggttaatgtgcattctctgtctctgtgggcaacctgaccgatgacaattcacattgtacacctgtttgtagcgctgattattcttttaatgcagattgtgtataggcctggcgaaaaattgaatctacgagatttccagtatcctgtaaataacgtatctcatatctctggatgactttattgctgaccaacctggtggatctctgactactggaggatgcaacagaacagagtgttgctgtggattttataatgttggaagtagaagctgcattcatgtgcgatggtgcttctaaaatgccaattcttttgtaaacagaatttgtgatcttgaaaactttgtggtacggagatacaattctggtaatggtaaggaagtctcatgatattagtaaccatttactagttttgatgtttatgttacaataataagatgatctttcatgatcaagctacaaatcataacatggtcatgctatttagtttgttttctatatcattttaagatcatactatcatggagttacattttgatgaatgacttacacaaccatcacccccatgttaggagttccttacactcagattaacattcaaaactgctcgcatgtaaggtaagctaacactatatatgtttgctatatatttggaactgcagagacccaaggtcatgggctagtgaagagatggttagaacttagaagagcttaaggatgacaaggaggatacactgcatgcaagtaccgtggtcaccctattgagcttgtcaccccaaataacgcaaaatggacttgtccaataaatgaacagcttgcagcttctgatgttactgacactgctgtgagaattgaagaacaaacagtgttgtttctgcctacttcggaagacagtccaaacttgcagggagcctctgcggttgggttgatagcccagtggtgaaggcggcgttgtccctttcaccaggtcaggggttcgaccgttggttccgcacccataaaaaaaatcccctcactgtcccgcctgctcttggggatcgatgtcctgtgcgccaccttccgtttgggccgctgcagagtggacagttgtactcgggccgttagtgatgtgggccaaggttcagaggttttctcagccaggaccagtggtttgggtcctttagtattataccacaagagcggtcattcccttcccggccgttttttttgcagtgagcctctccttccatttcttttgatgtaattgatagcctcaacaaacgaaggagtcataatggggaggttttatgttgtgattcccagttcaaacgatgttgaagcttctctaactgatgagagctcagatgggaacactcaaattttctatggtctatatgaaacccttttcgagcttgaccagggacttgtttgctcctcatcatgcaatattggaaagatgaaaattggaactcttcagtgttactacctactatcttcttgaacaatctgaaaaaggaccagtgctccccctgtcagggacggatctagcggtgggtgggcggggctcgagtctccctaccgtttcggatcccatgaagccccactacagtctcctctaatctaaaatgtatacaatataatgtagaatgagcttttatactgcagcaatttagttcagtccctcctaaacttttttctggctctgtccctgcccctgttctattttgatttgtgatgtagtgagagacatattttttatttttgtgaaatgtatatttcaccgcttgtagtaagtagcctaaaaccatattggattggattcctaccgctgaataactatctttgtcataatgcttgtacttcagatgcttataagttgccagaatagaaagtattccctccgtcctaaaatacaatttgttttagactaaatatacattcattcaataacctatgaatatagtttataggtatgtctatatacattcattcattcggggacataaaaaag

SEQ ID NO: 34033 - DNA, 5776 bp, Zea Mays
ttggagcggattccagcggcatccgccatggactggagcatcgacctcgacaggggtctccgctcccgccaaccagcaacgcgcgtccgcgccgtcgacgccgccggcccacgcctccgccagctctgcacttgcgccaccgcccccgcgcccgtcgcctccgcgtacggcgtcttgcccggggaggcgcgcgtcttcgcggagaccatgctcctccgcctcgccaccgaattcaggagcgccgacgtcgccatgcgggtccgcatcatcaagaccctcctcaattctgccacgggtccaggggcgctagccggggcgcgcatcacggagcctgaccagctgctcaggagggtcaaggtggtctacgacactgggaacaagcgggacagggcgcttgcactgcgcatgttcgggtgcttcgccgacatcgccaaggacagcgtgcacgtccgctctctcatactttccagtttgagtgcctccagtgctttggaggtcaaggctgcaatttttgcggctagttgcatttgtcatctgtcagatgacttctcaaggataattcttgaagtgttcagaagattgatatgttctcagacatcagagccacaagtcatcatgtcagcagctaaggctttctggaagcttggttctacgttggctgttatccataaagttcatgaggttggaaaacagatggttctaggcacactggaagacgtcttcaaatctgaaatgctcttttcactctcaagactgtcatccaagtcgatcattttgttttctgaccaggtggatttattgttactgtttatggatcataattcctcttctatgaagtctgtggcgttaaaatgcatgtgttttatgtttcggagaaatatctgccattttccagttattaggaatgtttttggcagattgtttccattaattgatgatgaggattttccacttgactgtaagagcgatgtgttaaggattctgcagaagatgttatgcagtaaaacgtcaagtaatcatcgtgccaatggttctgagttatctaagctacttctagctgctgaaagttctttagattcttcttgtttggaggtgcaaggtaccgctctggaaattcttgtggaaatcttttgtattctcaaggaagttgggtcagataacatatcagttctcaagggttcgtcatttgcacatgctgagtggcaaggaataacgaacaatgtaccattaactgaagataatagtatgaacggacctctgtgtaagatcattgcaatgattgtgaatcatattatatccctggccaatgaagttgctagcagagatatctgcatatcatctgcagtggataaggcatacaaaactcctttcagacttatgctaaagcttgtttcatgctacccttctgctgctgctgtaactcttcatatactgaaaagccttgtaaaagaactgtttctaattaatggaagtgattactctgaagtttctgttacatctgttgaaccattccagacaagtgttgcccttaaagaattgagtacttcagatgacaatgttcaactgttagctacatgcatcaaagcttcctgcattggaacacttattggcaatggaaaactggattttctcaaaattgattgcaagaatagaaagtccataatgcatgatctaatttgttgcatgctcaaatttgcaaatgcttgtcatgaggtgctatgtgaaacatctggtgctagatacaatcttcatgatagcatcaagggtctaatcaagtatgtgcgtcaggatgcccctcagcactggagcacatatgaatccttccatttgataatgtgtgcttgtgttacccggaatacttgtaaaatcaatcgtggtaatcaagaatctggtgattcaaaagagcatcataatacactattcactccttctgtttggataactcaggaattatgtgcacttcgaatgaccaaaatgcttataaagaagcagaaatactgggaagcttataggtcttctatgtactgttgttgtaaaggtctttggttcacagcttcttttgtcttcagaaaactggcagatgcttttgaagcaggctctttcagtttttggctcaaatcgttgctacttttttctgctggcgaaattgagatgaagctattgtttttttcctcagcaactataaagttagttggtgagctaaaaatggagggtgatttaagtgaggatctttactgtaatgaaacagatgctgatagcaccctcagtagatcatcagagttacatggtttccaagcaaagatatctgatatttgtggcagaacattattagcaaataatgctcttgcatccagtgcctcttcagatcatgacttcgtattccagaggtggttcatcagccttaggtcatcatttcttgaggtcctaacaaaagttcttgatatccttaatgcacactcttcctatgaagcaagaggagaccatttatctttgtctggagagtttgtcaaagaccaagtgcttgctttggatcattgctctctaagattaagtgacttggcaaaaagttatgaccttcttgctgcatcccatatggacctggagcgacatggctcaagtagtatagccaggcttgctttcatgtgctcacttttggcattttgtactgcatattctgtttatttctcaaaggcatgtaactacgtagagtactgcaagcttccaaagaggttttcccatgcttcaatcctacaagatttgtatggaagagtagatgggtctgactggcaggttgtttcccagctgcgacagtttatgtccacttcttttgacgaacttgacagcttacagtccagcacatggatcagtggttcatgtaatctggagaaggatttgtattctctttgtcattttgctgtggcatctttgcttggtgtatgtgatagtgctgaagctgaaaaaatacaaaatggagaggattgtttatctgctttgcaaggaggattgcaagtgttgtccagcatcttgcagaagtatttggaattgccttttgtggttcccaagtactttttcagagtaaagccttgccttggtgctgaactttacatatttgattcaaatcatttgaatgaaaaaggaatgtctatagagcctggttttctattgtctctaaccctctgcatgaagtggaagtgtgtgttagaaagaagcaccattcgcatcgtgaaattgtactgcattttggccgcaagcttagagacctgcttggatacagcaggaacaagaagcaagcagtttgatcagcacaggaccgctgaaatggtcgaattgaactccaagctgctacagtacataaagaatgatctgaggaaggctaggaatgagaagaagaattcccatagtgtcatggagatggtgactgcctttgcatgctttgaaccaacagatagtgggcaggggttctcaggatgcctgctggatgtctcctcgttccctgaaggctcttatcagataaagtggcaggcgtgctgtgtcgatgagaatgggtcctattttagtctcctgcccctgaacgatggttccatattttctgtccagaagtcctaactctaactgaatggccgctgcggttatgggaatggaagatggaacatactcttcttgctcgcagttaaattacagaggcctggtgctgaggcttgtaggcagcatgaactgatgaatgagcagatgttgctgctgatcttcaccttgctgctattctgaacagaatcagcactagcagataacatagatcgtttgatgaattgacacagaaccggtttaccaccttccgtttgctagaaacggggaccaatttatcaatgttattatacaaatgactgggtgtgctgtcaattatataatatttgggattacttgaatcacttctatgtcacatttatcagccagaggcagatgtttttcagctggttaatgtgcattctctgtctctgtgggcaacctgaccgatgacaattcacattgtacacctgtttgtagcgctgattattcttttaatgcagattgtgtataggcctggcgaaaaattgaatctacgagatttccagtatcctgtaaataacgtatctcatatctctggatgactttattgctgaccaacctggtggatctctgactactggaggatgcaacagaacagagtgttgctgtggattttataatgttggaagtagaagctgcattcatgtgcgatggtgcttctaaaatgccaattcttttgtaaacagaatttgtgatcttgaaaactttgtggtacggagatacaattctggtaatgagacccaaggtcatgggctagtgaagagatggttagaacttagaagagcttaaggatgacaaggaggatacactgtaagctgtatttgtgtttagagatcacattatcgattctgttaaacacatatattgcaacatgtatgcatcagcagaccagatagctgatggttttccaccttgccaggcatgcaagtaccgtggtcaccctattgagcttgtcaccccaaataacgcaaaatggacttgtccaataaatgaacagcttgcagcttctgatgttactgacactgctgtgagaattgaagaacaaacagtgttgtttctgcctacttcggaagacagtccaaacttgcagggagcctctgcggttgggttgatagcccagtggtgaaggcggcgttgtccctttcaccaggtcaggggttcgaccgttggttccgcacccataaaaaaaatcccctcactgtcccgcctgctcttggggatcgatgtcctgtgcgccaccttccgtttgggccgctgcagagtggacagttgtactcgggccgttagtgatgtgggccaaggttcagaggttttctcagccaggaccagtggtttgggtcctttagtattataccacaagagcggtcattcccttcccggccgttttttttgcagtgagcctctccttccatttcttttgatgtaattgatagcctcaacaaacgaaggagtcataatggggaggttttatgttgtgattcccagttcaaacgatgttgaagcttctctaactgatgagagctcagatgggaacactcaaattttctatggtctatatgaaacccttttcgagcttgaccagggacttgtttgctcctcatcatgcaatattggaaagatgaaaattggaactcttcagtgttactacctactatcttcttgaacaatctgaaaaaggaccagtgctccccctgtcagggacggatctagcggtgggtgggcggggctcgagtctccctaccgtttcggatcccatgaagccccactacagtctcctctaatctaaaatgtatacaatataatgtagaatgagcttttatactgcagcaatttagttcagtccctcctaaacttttttctggctctgtccctgcccctgttctattttgatttgtgatgtagtgagagacatattttttatttttgtgaaatgtatatttcaccgcttgtagtaagtagcctaaaaccatattggattggattcctaccgctgaataactatctttgtcataatgcttgtacttcagatgcttataagttgccagaatagaaagtattccctccgtcctaaaatacaatttgttttagactaaatatacattcattcaataacctatgaatatagtttataggtatgtctatatacattcattcattcggggacataaaaaag

SEQ ID NO: 34034 - DNA, 6375 bp, Zea Mays
ttggagcggattccagcggcatccgccatggactggagcatcgacctcgacaggggtctccgctcccgccaaccagcaacgcgcgtccgcgccgtcgacgccgccggcccacgcctccgccagctctgcacttgcgccaccgcccccgcgcccgtcgcctccgcgtacggcgtcttgcccggggaggcgcgcgtcttcgcggagaccatgctcctccgcctcgccaccgaattcaggagcgccgacgtcgccatgcgggtccgcatcatcaagaccctcctcaattctgccacgggtccaggggcgctagccggggcgcgcatcacggagcctgaccagctgctcaggagggtcaaggtggtctacgacactgggaacaagcgggacagggcgcttgcactgcgcatgttcgggtgcttcgccgacatcgccaaggacagcgtgcacgtccgctctctcatactttccagtttgagtgcctccagtgctttggaggttggaaaacagatggttctaggcacactggaagacgtcttcaaatctgaaatgctcttttcactctcaagactgtcatccaagtcgatcattttgttttctgaccaggtggatttattgttactgtttatggatcataattcctcttctatgaagtctgtggcgttaaaatgcatgtgttttatgtttcggagaaatatctgccattttccagttattaggaatgtttttggcagattgtttccattaattgatgatgaggattttccacttgactgtaagagcgatgtgttaaggattctgcagaagatgttatgcagtaaaacgtcaagtaatcatcgtgccaatggttctgagttatctaagctacttctagctgctgaaagttctttagattcttcttgtttggaggtgcaaggtaccgctctggaaattcttgtggaaatcttttgtattctcaaggaagttgggtcagataacatatcagttctcaagggttcgtcatttgcacatgctgagtggcaaggaataacgaacaatgtaccattaactgaagataatagtatgaacggacctctgtgtaagatcattgcaatgattgtgaatcatattatatccctggccaatgaagttgctagcagagatatctgcatatcatctgcagtggataaggcatacaaaactcctttcagacttatgctaaagcttgtttcatgctacccttctgctgctgctgtaactcttcatatactgaaaagccttgtaaaagaactgtttctaattaatggaagtgattactctgaagtttctgttacatctgttgaaccattccagacaagtgttgcccttaaagaattgagtacttcagatgacaatgttcaactgttagctacatgcatcaaagcttcctgcattggaacacttattggcaatggaaaactggattttctcaaaattgattgcaagaatagaaagtccataatgcatgatctaatttgttgcatgctcaaatttgcaaatgcttgtcatgaggtgctatgtgaaacatctggtgctagatacaatcttcatgatagcatcaagggtctaatcaagtatgtgcgtcaggatgcccctcagcactggagcacatatgaatccttccatttgataatgtgtgcttgtgttacccggaatacttgtaaaatcaatcgtggtaatcaagaatctggtgattcaaaagagcatcataatacactattcactccttctgtttggataactcaggaattatgtgcacttcgaatgaccaaaatgcttataaagaagcagaaatactgggaagcttataggtcttctatgtactgttgttgtaaaggtctttggttcacagcttcttttgtcttcagaaaactggcagatgcttttgaagcaggctctttcagtttttggctcaaatcgttgctacttttttctgctggcgaaattgagatgaagctattgtttttttcctcagcaactataaagttagttggtgagctaaaaatggagggtgatttaagtgaggatctttactgtaatgaaacagatgctgatagcaccctcagtagatcatcagagttacatggtttccaagcaaagatatctgatatttgtggcagaacattattagcaaataatgctcttgcatccagtgcctcttcagatcatgacttcgtattccagaggtggttcatcagccttaggtcatcatttcttgaggtcctaacaaaagttcttgatatccttaatgcacactcttcctatgaagcaagaggagaccatttatctttgtctggagagtttgtcaaagaccaagtgcttgctttggatcattgctctctaagattaagtgacttggcaaaaagttatgaccttcttgctgcatcccatatggacctggagcgacatggctcaagtagtatagccaggcttgctttcatgtgctcacttttggcattttgtactgcatattctgtttatttctcaaaggcatgtaactacgtagagtactgcaagcttccaaagaggttttcccatgcttcaatcctacaagatttgtatggaagagtagatgggtctgactggcaggttgtttcccagctgcgacagtttatgtccacttcttttgacgaacttgacagcttacagtccagcacatggatcagtggttcatgtaatctggagaaggatttgtattctctttgtcattttgctgtggcatctttgcttggtgtatgtgatagtgctgaagctgaaaaaatacaaaatggagaggattgtttatctgctttgcaaggaggattgcaagtgttgtccagcatcttgcagaagtatttggaattgccttttgtggttcccaagtactttttcagagtaaagccttgccttggtgctgaactttacatatttgattcaaatcatttgaatgaaaaaggaatgtctatagagcctggttttctattgtctctaaccctctgcatgaagtggaagtgtgtgttagaaagaagcaccattcgcatcgtgaaattgtactgcattttggccgcaagcttagagacctgcttggatacagcaggaacaagaagcaagcagtttgatcagcacaggaccgctgaaatggtcgaattgaactccaagctgctacagtacataaagaatgatctgaggaaggctaggaatgagaagaagaattcccatagtgtcatggagatggtgactgcctttgcatgctttgaaccaacagatagtgggcaggggttctcaggatgcctgctggatgtctcctcgttccctgaaggctcttatcagataaagtggcaggcgtgctgtgtcgatgagaatgggtcctattttagtctcctgcccctgaacgatggttccatattttctgtccagaagtcctaactctaactgaatggccgctgcggttatgggaatggaagatggaacatactcttcttgctcgcagtgtctgttcctgagttcatttttatgcacacagaaggcttgtgtgtctatgatccgcctatatggtctgggtttgacatgttcactctattacttgtgttgtggcagtaaattacagaggcctggtgctgaggcttgtaggcagcatgaactgatgaatgagcagatgttgctgctgatcttcaccttgctgctattctgaacagaatcagcactagcagataacatagatcgtttgatgaattgacacaggtgtagctccaccttttcctattctgaatttgactttctaatggctttagttgagttttagttgagtttcaacttgtgtagaagcagtacaggttccagttcccctgtaacttgtagtttagagaaaaatagtatagtgctactcctacacggctagtacaaggcaatggctctgagcttctggatacaattttggatagtactatttatcatactttaactcgaattcgagtagaaatacatatattgtcgaatactaatgcaaaatggatatcgtaaatttgaatccaaattcagatgtctaaattttgaagataacatgttttttattgatagtttcgtagtctaataaaatcatcatagatgaaggaatttaaaacatagctatacaacaccgtgtataaagacaactaaaatattttaataattaaatatataaaatagaagaaaattatagataatataaattgagtactaaattcaaataaattttagaagtatataaataaaacaaaatactaatttagctgctttatccatctgtccctgccgtggatctgtttgtttagtgtttgcatgcgtgcacaactgcttgctgattccaaattaatcacatcaccaactccctatcggcatgtagtgcctccctccctttgtttgtttgggatcgaattgggcactgatacacaccactgatgcttgatatgcagtgctcccttcgtttgcattgccgcctatataggtcccatagttaacttcgtgtgctccctttcattctcctatggcagaaccggtttaccaccttccgtttgctagaaacggggaccaatttatcaatgttattatacaaatgactgggtgtgctgtcaattatataatatttgggattacttgaatcacttctatgtcacatttatcagccagaggcagatgtttttcagctggttaatgtgcattctctgtctctgtgggcaacctgaccgatgacaattcacattgtacacctgtttgtagcgctgattattcttttaatgcagattgtgtataggcctggcgaaaaattgaatctacgagatttccagtatcctgtaaataacgtatctcatatctctggatgactttattgctgaccaacctggtggatctctgactactggaggatgcaacagaacagagtgttgctgtggattttataatgttggaagtagaagctgcattcatgtgcgatggtgcttctaaaatgccaattcttttgtaaacagaatttgtgatcttgaaaactttgtggtacggagatacaattctggtaatgagacccaaggtcatgggctagtgaagagatggttagaacttagaagagcttaaggatgacaaggaggatacactgcatgcaagtaccgtggtcaccctattgagcttgtcaccccaaataacgcaaaatggacttgtccaataaatgaacagcttgcagcttctgatgttactgacactgctgtgagaattgaagaacaaacagtgttgtttctgcctacttcggaagacagtccaaacttgcagggagcctctgcggttgggttgatagcccagtggtgaaggcggcgttgtccctttcaccaggtcaggggttcgaccgttggttccgcacccataaaaaaaatcccctcactgtcccgcctgctcttggggatcgatgtcctgtgcgccaccttccgtttgggccgctgcagagtggacagttgtactcgggccgttagtgatgtgggccaaggttcagaggttttctcagccaggaccagtggtttgggtcctttagtattataccacaagagcggtcattcccttcccggccgttttttttgcagtgagcctctccttccatttcttttgatgtaattgatagcctcaacaaacgaaggagtcataatggggaggttttatgttgtgattcccagttcaaacgatgttgaagcttctctaactgatgagagctcagatgggaacactcaaattttctatggtctatatgaaacccttttcgagcttgaccagggacttgtttgctcctcatcatgcaatattggaaagatgaaaattggaactcttcagtgttactacctactatcttcttgaacaatctgaaaaaggaccagtgctccccctgtcagggacggatctagcggtgggtgggcggggctcgagtctccctaccgtttcggatcccatgaagccccactacagtctcctctaatctaaaatgtatacaatataatgtagaatgagcttttatactgcagcaatttagttcagtccctcctaaacttttttctggctctgtccctgcccctgttctattttgatttgtgatgtagtgagagacatattttttatttttgtgaaatgtatatttcaccgcttgtagtaagtagcctaaaaccatattggattggattcctaccgctgaataactatctttgtcataatgcttgtacttcagatgcttataagttgccagaatagaaagtattccctccgtcctaaaatacaatttgttttagactaaatatacattcattcaataacctatgaatatagtttataggtatgtctatatacattcattcattcggggacataaaaaag

SEQ ID NO: 34035 - DNA, 6699 bp, Zea Mays
cagcgccgccgcggtcgtcgtcgatggagttggagcggattccagcggcatccgccatggactggagcatcgacctcgacaggggtctccgctcccgccaaccagcaacgcgcgtccgcgccgtcgacgccgccggcccacgcctccgccagctctgcacttgcgccaccgcccccgcgcccgtcgcctccgcgtacggcgtcttgcccggggaggcgcgcgtcttcgcggagaccatgctcctccgcctcgccaccgaattcaggagcgccgacgtcgccatgcgggtccgcatcatcaagaccctcctcaattctgccacgggtccaggggcgctagccggggcgcgcatcacggagcctgaccagctgctcaggagggtcaaggtggtctacgacactgggaacaagcgggacagggcgcttgcactgcgcatgttcgggtgcttcgccgacatcgccaaggacagcgtgcacgtccgctctctcatactttccagtttgagtgcctccagtgctttggaggtcaaggctgcaatttttgcggctagttgcatttgtcatctgtcagatgacttctcaaggataattcttgaagtgttcagaagattgatatgttctcagacatcagagccacaagtcatcatgtcagcagctaaggctttctggaagcttggttctacgttggctgttatccataaagttcatgaggttggaaaacagatggttctaggcacactggaagacgtcttcaaatctgaaatgctcttttcactctcaagactgtcatccaagtcgatcattttgttttctgaccaggtggatttattgttactgtttatggatcataattcctcttctatgaagtctgtggcgttaaaatgcatgtgttttatgtttcggagaaatatctgccattttccagttattaggaatgtttttggcagattgtttccattaattgatgatgaggattttccacttgactgtaagagcgatgtgttaaggattctgcagaagatgttatgcagtaaaacgtcaagtaatcatcgtgccaatggttctgagttatctaagctacttctagctgctgaaagttctttagattcttcttgtttggaggtgcaaggtaccgctctggaaattcttgtggaaatcttttgtattctcaaggaagttgggtcagataacatatcagttctcaagggttcgtcatttgcacatgctgagtggcaaggaataacgaacaatgtaccattaactgaagataatagtatgaacggacctctgtgtaagatcattgcaatgattgtgaatcatattatatccctggccaatgaagttgctagcagagatatctgcatatcatctgcagtggataaggcatacaaaactcctttcagacttatgctaaagcttgtttcatgctacccttctgctgctgctgtaactcttcatatactgaaaagccttgtaaaagaactgtttctaattaatggaagtgattactctgaagtttctgttacatctgttgaaccattccagacaagtgttgcccttaaagaattgagtacttcagatgacaatgttcaactgttagctacatgcatcaaagcttcctgcattggaacacttattggcaatggaaaactggattttctcaaaattgattgcaagaatagaaagtccataatgcatgatctaatttgttgcatgctcaaatttgcaaatgcttgtcatgaggtgctatgtgaaacatctggtgctagatacaatcttcatgatagcatcaagggtctaatcaagtatgtgcgtcaggatgcccctcagcactggagcacatatgaatccttccatttgataatgtgtgcttgtgttacccggaatacttgtaaaatcaatcgtggtaatcaagaatctggtgattcaaaagagcatcataatacactattcactccttctgtttggataactcaggaattatgtgcacttcgaatgaccaaaatgcttataaagaagcagaaatactgggaagcttataggtcttctatgtactgttgttgtaaaggtctttggttcacagcttcttttgtcttcagaaaactggcagatgcttttgaagcaggctctttcagtttttggctcaaatcgttgctacttttttctgctggcgaaattgagatgaagctattgtttttttcctcagcaactataaagttagttggtgagctaaaaatggagggtgatttaagtgaggatctttactgtaatgaaacagatgctgatagcaccctcagtagatcatcagagttacatggtttccaagcaaagatatctgatatttgtggcagaacattattagcaaataatgctcttgcatccagtgcctcttcagatcatgacttcgtattccagaggtggttcatcagccttaggtcatcatttcttgaggtcctaacaaaagttcttgatatccttaatgcacactcttcctatgaagcaagaggagaccatttatctttgtctggagagtttgtcaaagaccaagtgcttgctttggatcattgctctctaagattaagtgacttggcaaaaagttatgaccttcttgctgcatcccatatggacctggagcgacatggctcaagtagtatagccaggcttgctttcatgtgctcacttttggcattttgtactgcatattctgtttatttctcaaaggcatgtaactacgtagagtactgcaagcttccaaagaggttttcccatgcttcaatcctacaagatttgtatggaagagtagatgggtctgactggcaggttgtttcccagctgcgacagtttatgtccacttcttttgacgaacttgacagcttacagtccagcacatggatcagtggttcatgtaatctggagaaggatttgtattctctttgtcattttgctgtggcatctttgcttggtgtatgtgatagtgctgaagctgaaaaaatacaaaatggagaggattgtttatctgctttgcaaggaggattgcaagtgttgtccagcatcttgcagaagtatttggaattgccttttgtggttcccaagtactttttcagagtaaagccttgccttggtgctgaactttacatatttgattcaaatcatttgaatgaaaaaggaatgtctatagagcctggttttctattgtctctaaccctctgcatgaagtggaagtgtgtgttagaaagaagcaccattcgcatcgtgaaattgtactgcattttggccgcaagcttagagacctgcttggatacagcaggaacaagaagcaagcagtttgatcagcacaggaccgctgaaatggtcgaattgaactccaagctgctacagtacataaagaatgatctgaggaaggctaggaatgagaagaagaattcccatagtgtcatggagatggtgactgcctttgcatgctttgaaccaacagatagtgggcaggggttctcaggatgcctgctggatgtctcctcgttccctgaaggctcttatcagataaagtggcaggcgtgctgtgtcgatgagaatgggtcctattttagtctcctgcccctgaacgatggttccatattttctgtccagaagtcctaactctaactgaatggccgctgcggttatgggaatggaagatggaacatactcttcttgctcgcagtgtctgttcctgagttcatttttatgcacacagaaggcttgtgtgtctatgatccgcctatatggtctgggtttgacatgttcactctattacttgtgttgtggcagtaaattacagaggcctggtgctgaggcttgtaggcagcatgaactgatgaatgagcagatgttgctgctgatcttcaccttgctgctattctgaacagaatcagcactagcagataacatagatcgtttgatgaattgacacaggtgtagctccaccttttcctattctgaatttgactttctaatggctttagttgagttttagttgagtttcaacttgtgtagaagcagtacaggttccagttcccctgtaacttgtagtttagagaaaaatagtatagtgctactcctacacggctagtacaaggcaatggctctgagcttctggatacaattttggatagtactatttatcatactttaactcgaattcgagtagaaatacatatattgtcgaatactaatgcaaaatggatatcgtaaatttgaatccaaattcagatgtctaaattttgaagataacatgttttttattgatagtttcgtagtctaataaaatcatcatagatgaaggaatttaaaacatagctatacaacaccgtgtataaagacaactaaaatattttaataattaaatatataaaatagaagaaaattatagataatataaattgagtactaaattcaaataaattttagaagtatataaataaaacaaaatactaatttagctgctttatccatctgtccctgccgtggatctgtttgtttagtgtttgcatgcgtgcacaactgcttgctgattccaaattaatcacatcaccaactccctatcggcatgtagtgcctccctccctttgtttgtttgggatcgaattgggcactgatacacaccactgatgcttgatatgcagtgctcccttcgtttgcattgccgcctatataggtcccatagttaacttcgtgtgctccctttcattctcctatggcagaaccggtttaccaccttccgtttgctagaaacggggaccaatttatcaatgttattatacaaatgactgggtgtgctgtcaattatataatatttgggattacttgaatcacttctatgtcacatttatcagccagaggcagatgtttttcagctggttaatgtgcattctctgtctctgtgggcaacctgaccgatgacaattcacattgtacacctgtttgtagcgctgattattcttttaatgcagattgtgtataggcctggcgaaaaattgaatctacgagatttccagtatcctgtaaataacgtatctcatatctctggatgactttattgctgaccaacctggtggatctctgactactggaggatgcaacagaacagagtgttgctgtggattttataatgttggaagtagaagctgcattcatgtgcgatggtgcttctaaaatgccaattcttttgtaaacagaatttgtgatcttgaaaactttgtggtacggagatacaattctggtaatgagacccaaggtcatgggctagtgaagagatggttagaacttagaagagcttaaggatgacaaggaggatacactgtaagctgtatttgtgtttagagatcacattatcgattctgttaaacacatatattgcaacatgtatgcatcagcagaccagatagctgatggttttccaccttgccaggcatgcaagtaccgtggtcaccctattgagcttgtcaccccaaataacgcaaaatggacttgtccaataaatgaacagcttgcagcttctgatgttactgacactgctgtgagaattgaagaacaaacagtgttgtttctgcctacttcggaagacagtccaaacttgcagggagcctctgcggttgggttgatagcccagtggtgaaggcggcgttgtccctttcaccaggtcaggggttcgaccgttggttccgcacccataaaaaaaatcccctcactgtcccgcctgctcttggggatcgatgtcctgtgcgccaccttccgtttgggccgctgcagagtggacagttgtactcgggccgttagtgatgtgggccaaggttcagaggttttctcagccaggaccagtggtttgggtcctttagtattataccacaagagcggtcattcccttcccggccgttttttttgcagtgagcctctccttccatttcttttgatgtaattgatagcctcaacaaacgaaggagtcataatggggaggttttatgttgtgattcccagttcaaacgatgttgaagcttctctaactgatgagagctcagatgggaacactcaaattttctatggtctatatgaaacccttttcgagcttgaccagggacttgtttgctcctcatcatgcaatattggaaagatgaaaattggaactcttcagtgttactacctactatcttcttgaacaatctgaaaaaggaccagtgctccccctgtcagggacggatctagcggtgggtgggcggggctcgagtctccctaccgtttcggatcccatgaagccccactacagtctcctctaatctaaaatgtatacaatataatgtagaatgagcttttatactgcagcaatttagttcagtccctcctaaacttttttctggctctgtccctgcccctgttctattttgatttgtgatgtagtgagagacatattttttatttttgtgaaatgtatatttcaccgcttgtagtaagtagcctaaaaccatattggattggattcctaccgctgaataactatctttgtcataatgcttgtacttcagatgcttataagttgccagaatagaaagtattccctccgtcctaaaatacaatttgttttagactaaatatacattcattcaataacctatgaatatagtttataggtatgtctatatacattcattcattcggggacataaaaaag

SEQ ID NO: 34036 - DNA, 5742 bp, Zea Mays
cagcgccgccgcggtcgtcgtcgatggagttggagcggattccagcggcatccgccatggactggagcatcgacctcgacaggggtctccgctcccgccaaccagcaacgcgcgtccgcgccgtcgacgccgccggcccacgcctccgccagctctgcacttgcgccaccgcccccgcgcccgtcgcctccgcgtacggcgtcttgcccggggaggcgcgcgtcttcgcggagaccatgctcctccgcctcgccaccgaattcaggagcgccgacgtcgccatgcgggtccgcatcatcaagaccctcctcaattctgccacgggtccaggggcgctagccggggcgcgcatcacggagcctgaccagctgctcaggagggtcaaggtggtctacgacactgggaacaagcgggacagggcgcttgcactgcgcatgttcgggtgcttcgccgacatcgccaaggacagcgtgtcaaggctgcaatttttgcggctagttgcatttgtcatctgtcagatgacttctcaaggataattcttgaagtgttcagaagattgatatgttctcagacatcagagccacaagtcatcatgtcagcagctaaggctttctggaagcttggttctacgttggctgttatccataaagttcatgaggttggaaaacagatggttctaggcacactggaagacgtcttcaaatctgaaatgctcttttcactctcaagactgtcatccaagtcgatcattttgttttctgaccagggctggtgagtctgagtggctcagggagctagttctcaagccggtgacccgggttcgatccccggtgttggcattgggaagcctctctgttggccttccttgtgatccccctacttcatcctttgtggatttattgttactgtttatggatcataattcctcttctatgaagtctgtggcgttaaaatgcatgtgttttatgtttcggagaaatatctgccattttccagttattaggaatgtttttggcagattgtttccattaattgatgatgaggattttccacttgactgtaagagcgatgtgttaaggattctgcagaagatgttatgcagtaaaacgtcaagtaatcatcgtgccaatggttctgagttatctaagctacttctagctgctgaaagttctttagattcttcttgtttggaggtgcaaggtaccgctctggaaattcttgtggaaatcttttgtattctcaaggaagttgggtcagataacatatcagttctcaagggttcgtcatttgcacatgctgagtggcaaggaataacgaacaatgtaccattaactgaagataatagtatgaacggacctctgtgtaagatcattgcaatgattgtgaatcatattatatccctggccaatgaagttgctagcagagatatctgcatatcatctgcagtggataaggcatacaaaactcctttcagacttatgctaaagcttgtttcatgctacccttctgctgctgctgtaactcttcatatactgaaaagccttgtaaaagaactgtttctaattaatggaagtgattactctgaagtttctgttacatctgttgaaccattccagacaagtgttgcccttaaagaattgagtacttcagatgacaatgttcaactgttagctacatgcatcaaagcttcctgcattggaacacttattggcaatggaaaactggattttctcaaaattgattgcaagaatagaaagtccataatgcatgatctaatttgttgcatgctcaaatttgcaaatgcttgtcatgaggtgctatgtgaaacatctggtgctagatacaatcttcatgatagcatcaagggtctaatcaagtatgtgcgtcaggatgcccctcagcactggagcacatatgaatccttccatttgataatgtgtgcttgtgttacccggaatacttgtaaaatcaatcgtggtaatcaagaatctggtgattcaaaagagcatcataatacactattcactccttctgtttggataactcaggaattatgtgcacttcgaatgaccaaaatgcttataaagaagcagaaatactgggaagcttataggtcttctatgtactgttgttgtaaaggtctttggttcacagcttcttttgtcttcagaaaactggcagatgcttttgaagcaggctctttcagtttttggctcaaatcgttgctacttttttctgctggcgaaattgagatgaagctattgtttttttcctcagcaactataaagttagttggtgagctaaaaatggagggtgatttaagtgaggatctttactgtaatgaaacagatgctgatagcaccctcagtagatcatcagagttacatggtttccaagcaaagatatctgatatttgtggcagaacattattagcaaataatgctcttgcatccagtgcctcttcagatcatgacttcgtattccagaggtggttcatcagccttaggtcatcatttcttgaggtcctaacaaaagttcttgatatccttaatgcacactcttcctatgaagcaagaggagaccatttatctttgtctggagagtttgtcaaagaccaagtgcttgctttggatcattgctctctaagattaagtgacttggcaaaaagttatgaccttcttgctgcatcccatatggacctggagcgacatggctcaagtagtatagccaggcttgctttcatgtgctcacttttggcattttgtactgcatattctgtttatttctcaaaggcatgtaactacgtagagtactgcaagcttccaaagaggttttcccatgcttcaatcctacaagatttgtatggaagagtagatgggtctgactggcaggttgtttcccagctgcgacagtttatgtccacttcttttgacgaacttgacagcttacagtccagcacatggatcagtggttcatgtaatctggagaaggatttgtattctctttgtcattttgctgtggcatctttgcttggtgtatgtgatagtgctgaagctgaaaaaatacaaaatggagaggattgtttatctgctttgcaaggaggattgcaagtgttgtccagcatcttgcagaagtatttggaattgccttttgtggttcccaagtactttttcagagtaaagccttgccttggtgctgaactttacatatttgattcaaatcatttgaatgaaaaaggaatgtctatagagcctggttttctattgtctctaaccctctgcatgaagtggaagtgtgtgttagaaagaagcaccattcgcatcgtgaaattgtactgcattttggccgcaagcttagagacctgcttggatacagcaggaacaagaagcaagcagtttgatcagcacaggaccgctgaaatggtcgaattgaactccaagctgctacagtacataaagaatgatctgaggaaggctaggaatgagaagaagaattcccatagtgtcatggagatggtgactgcctttgcatgctttgaaccaacagatagtgggcaggggttctcaggatgcctgctggatgtctcctcgttccctgaaggctcttatcagataaagtggcaggcgtgctgtgtcgatgagaatgggtcctattttagtctcctgcccctgaacgatggttccatattttctgtccagaagtcctaactctaactgaatggccgctgcggttatgggaatggaagatggaacatactcttcttgctcgcagtgtctgttcctgagttcatttttatgcacacagaaggcttgtgtgtctatgatccgcctatatggtctgggtttgacatgttcactctattacttgtgttgtggcagtaaattacagaggcctggtgctgaggcttgtaggcagcatgaactgatgaatgagcagatgttgctgctgatcttcaccttgctgctattctgaacagaatcagcactagcagataacatagatcgtttgatgaattgacacagccagaggcagatgtttttcagctggttaatgtgcattctctgtctctgtgggcaacctgaccgatgacaattcacattgtacacctgtttgtagcgctgattattcttttaatgcagattgtgtataggcctggcgaaaaattgaatctacgagatttccagtatcctgtaaataacgtatctcatatctctggatgactttattgctgaccaacctggtggatctctgactactggaggatgcaacagaacagagtgttgctgtggattttataatgttggaagtagaagctgcattcatgtgcgatggtgcttctaaaatgccaattcttttgtaaacagaatttgtgatcttgaaaactttgtggtacggagatacaattctggtaatgagacccaaggtcatgggctagtgaagagatggttagaacttagaagagcttaaggatgacaaggaggatacactgcatgcaagtaccgtggtcaccctattgagcttgtcaccccaaataacgcaaaatggacttgtccaataaatgaacagcttgcagcttctgatgttactgacactgctgtgagaattgaagaacaaacagtgttgtttctgcctacttcggaagacagtccaaacttgcagggagcctctgcggttgggttgatagcccagtggtgaaggcggcgttgtccctttcaccaggtcaggggttcgaccgttggttccgcacccataaaaaaaatcccctcactgtcccgcctgctcttggggatcgatgtcctgtgcgccaccttccgtttgggccgctgcagagtggacagttgtactcgggccgttagtgatgtgggccaaggttcagaggttttctcagccaggaccagtggtttgggtcctttagtattataccacaagagcggtcattcccttcccggccgttttttttgcagtgagcctctccttccatttcttttgatgtaattgatagcctcaacaaacgaaggagtcataatggggaggttttatgttgtgattcccagttcaaacgatgttgaagcttctctaactgatgagagctcagatgggaacactcaaattttctatggtctatatgaaacccttttcgagcttgaccagggacttgtttgctcctcatcatgcaatattggaaagatgaaaattggaactcttcagtgttactacctactatcttcttgaacaatctgaaaaaggaccagtgctccccctgtcagggacggatctagcggtgggtgggcggggctcgagtctccctaccgtttcggatcccatgaagccccactacagtctcctctaatctaaaatgtatacaatataatgtagaatgagcttttatactgcagcaatttagttcagtccctcctaaacttttttctggctctgtccctgcccctgttctattttgatttgtgatgtagtgagagacatattttttatttttgtgaaatgtatatttcaccgcttgtagtaagtagcctaaaaccatattggattggattcctaccgctgaataactatctttgtcataatgcttgtacttcagatgcttataagttgccagaatagaaagtattccctccgtcctaaaatacaatttgttttagactaaatatacattcattcaataacctatgaatatagtttataggtatgtctatatacattcattcattcggggacataaaaaag

SEQ ID NO: 34037 - DNA, 6556 bp, Zea Mays
caaaaaccaccaccgtccgccagcgccgccgcggtcgtcgtcgatggagttggagcggattccagcggcatccgccatggactggagcatcgacctcgacaggggtctccgctcccgccaaccagcaacgcgcgtccgcgccgtcgacgccgccggcccacgcctccgccagctctgcacttgcgccaccgcccccgcgcccgtcgcctccgcgtacggcgtcttgcccggggaggcgcgcgtcttcgcggagaccatgctcctccgcctcgccaccgaattcaggagcgccgacgtcgccatgcgggtccgcatcatcaagaccctcctcaattctgccacgggtccaggggcgctagccggggcgcgcatcacggagcctgaccagctgctcaggagggtcaaggtggtctacgacactgggaacaagcgggacagggcgcttgcactgcgcatgttcgggtgcttcgccgacatcgccaaggacagcgtgcacgtccgctctctcatactttccagtttgagtgcctccagtgctttggaggtcaaggctgcaatttttgcggctagttgcatttgtcatctgtcagatgacttctcaaggataattcttgaagtgttcagaagattgatatgttctcagacatcagagccacaagtcatcatgtcagcagctaaggctttctggaagcttggttctacgttggctgttatccataaagttcatgaggttggaaaacagatggttctaggcacactggaagacgtcttcaaatctgaaatgctcttttcactctcaagactgtcatccaagtcgatcattttgttttctgaccaggtggatttattgttactgtttatggatcataattcctcttctatgaagtctgtggcgttaaaatgcatgtgttttatgtttcggagaaatatctgccattttccagttattaggaatgtttttggcagattgtttccattaattgatgatgaggattttccacttgactgtaagagcgatgtgttaaggattctgcagaagatgttatgcagtaaaacgtcaagtaatcatcgtgccaatggttctgagttatctaagctacttctagctgctgaaagttctttagattcttcttgtttggaggtgcaaggtaccgctctggaaattcttgtggaaatcttttgtattctcaaggaagttgggtcagataacatatcagttctcaagggttcgtcatttgcacatgctgagtggcaaggaataacgaacaatgtaccattaactgaagataatagtatgaacggacctctgtgtaagatcattgcaatgattgtgaatcatattatatccctggccaatgaagttgctagcagagatatctgcatatcatctgcagtggataaggcatacaaaactcctttcagacttatgctaaagcttgtttcatgctacccttctgctgctgctgtaactcttcatatactgaaaagccttgtaaaagaactgtttctaattaatggaagtgattactctgaagtttctgttacatctgttgaaccattccagacaagtgttgcccttaaagaattgagtacttcagatgacaatgttcaactgttagctacatgcatcaaagcttcctgcattggaacacttattggcaatggaaaactggattttctcaaaattgattgcaagaatagaaagtccataatgcatgatctaatttgttgcatgctcaaatttgcaaatgcttgtcatgaggtgctatgtgaaacatctggtgctagatacaatcttcatgatagcatcaagggtctaatcaagtatgtgcgtcaggatgcccctcagcactggagcacatatgaatccttccatttgataatgtgtgcttgtgttacccggaatacttgtaaaatcaatcgtggtaatcaagaatctggtgattcaaaagagcatcataatacactattcactccttctgtttggataactcaggaattatgtgcacttcgaatgaccaaaatgcttataaagaagcagaaatactgggaagcttataggtcttctatgtactgttgttgtaaaggtctttggttcacagcttcttttgtcttcagaaaactggcagatgcttttgaagcaggctctttcagtttttggctcaaatcgttgctacttttttctgctggcgaaattgagatgaagctattgtttttttcctcagcaactataaagttagttggtgagctaaaaatggagggtgatttaagtgaggatctttactgtaatgaaacagatgctgatagcaccctcagtagatcatcagagttacatggtttccaagcaaagatatctgatatttgtggcagaacattattagcaaataatgctcttgcatccagtgcctcttcagatcatgacttcgtattccagaggtggttcatcagccttaggtcatcatttcttgaggtcctaacaaaagttcttgatatccttaatgcacactcttcctatgaagcaagaggagaccatttatctttgtctggagagtttgtcaaagaccaagtgcttgctttggatcattgctctctaagattaagtgacttggcaaaaagttatgaccttcttgctgcatcccatatggacctggagcgacatggctcaagtagtatagccaggcttgctttcatgtgctcacttttggcattttgtactgcatattctgtttatttctcaaaggcatgtaactacgtagagtactgcaagcttccaaagaggttttcccatgcttcaatcctacaagatttgtatggaagagtagatgggtctgactggcaggttgtttcccagctgcgacagtttatgtccacttcttttgacgaacttgacagcttacagtccagcacatggatcagtggttcatgtaatctggagaaggatttgtattctctttgtcattttgctgtggcatctttgcttggtgtatgtgatagtgctgaagctgaaaaaatacaaaatggagaggattgtttatctgctttgcaaggaggattgcaagtgttgtccagcatcttgcagaagtatttggaattgccttttgtggttcccaagtactttttcagagtaaagccttgccttggtgctgaactttacatatttgattcaaatcatttgaatgaaaaaggaatgtctatagagcctggttttctattgtctctaaccctctgcatgaagtggaagtgtgtgttagaaagaagcaccattcgcatcgtgaaattgtactgcattttggccgcaagcttagagacctgcttggatacagcaggaacaagaagcaagcagtttgatcagcacaggaccgctgaaatggtcgaattgaactccaagctgctacagtacataaagaatgatctgaggaaggctaggaatgagaagaagaattcccatagtgtcatggagatggtgactgcctttgcatgctttgaaccaacagatagtgggcaggggttctcaggatgcctgctggatgtctcctcgttccctgaaggctcttatcagataaagtggcaggcgtgctgtgtcgatgagaatgggtcctattttagtctcctgcccctgaacgatggttccatattttctgtccagaagtcctaactctaactgaatggccgctgcggttatgggaatggaagatggaacatactcttcttgctcgcagtgtctgttcctgagttcatttttatgcacacagaaggcttgtgtgtctatgatccgcctatatggtctgggtttgacatgttcactctattacttgtgttgtggcagtaaattacagaggcctggtgctgaggcttgtaggcagcatgaactgatgaatgagcagatgttgctgctgatcttcaccttgctgctattctgaacagaatcagcactagcagataacatagatcgtttgatgaattgacacaggtgtagctccaccttttcctattctgaatttgactttctaatggctttagttgagttttagttgagtttcaacttgtgtagaagcagtacaggttccagttcccctgtaacttgtagtttagagaaaaatagtatagtgctactcctacacggctagtacaaggcaatggctctgagcttctggatacaattttggatagtactatttatcatactttaactcgaattcgagtagaaatacatatattgtcgaatactaatgcaaaatggatatcgtaaatttgaatccaaattcagatgtctaaattttgaagataacatgttttttattgatagtttcgtagtctaataaaatcatcatagatgaaggaatttaaaacatagctatacaacaccgtgtataaagacaactaaaatattttaataattaaatatataaaatagaagaaaattatagataatataaattgagtactaaattcaaataaattttagaagtatataaataaaacaaaatactaatttagctgctttatccatctgtccctgccgtggatctgtttgtttagtgtttgcatgcgtgcacaactgcttgctgattccaaattaatcacatcaccaactccctatcggcatgtagtgcctccctccctttgtttgtttgggatcgaattgggcactgatacacaccactgatgcttgatatgcagtgctcccttcgtttgcattgccgcctatataggtcccatagttaacttcgtgtgctccctttcattctcctatggcagaaccggtttaccaccttccgtttgctagaaacggggaccaatttatcaatgttattatacaaatgactgggtgtgctgtcaattatataatatttgggattacttgaatcacttctatgtcacatttatcagccagaggcagatgtttttcagctggttaatgtgcattctctgtctctgtgggcaacctgaccgatgacaattcacattgtacacctgtttgtagcgctgattattcttttaatgcagattgtgtataggcctggcgaaaaattgaatctacgagatttccagtatcctgtaaataacgtatctcatatctctggatgactttattgctgaccaacctggtggatctctgactactggaggatgcaacagaacagagtgttgctgtggattttataatgttggaagtagaagctgcattcatgtgcgatggtgcttctaaaatgccaattcttttgtaaacagaatttgtgatcttgaaaactttgtggtacggagatacaattctggtaatgagacccaaggtcatgggctagtgaagagatggttagaacttagaagagcttaaggatgacaaggaggatacactgcatgcaagtaccgtggtcaccctattgagcttgtcaccccaaataacgcaaaatggacttgtccaataaatgaacagcttgcagcttctgatgttactgacactgctgtgagaattgaagaacaaacagtgttgtttctgcctacttcggaagacagtccaaacttgcagggagcctctgcggttgggttgatagcccagtggtgaaggcggcgttgtccctttcaccaggtcaggggttcgaccgttggttccgcacccataaaaaaaatcccctcactgtcccgcctgctcttggggatcgatgtcctgtgcgccaccttccgtttgggccgctgcagagtggacagttgtactcgggccgttagtgatgtgggccaaggttcagaggttttctcagccaggaccagtggtttgggtcctttagtattataccacaagagcggtcattcccttcccggccgttttttttgcagagtcataatggggaggttttatgttgtgattcccagttcaaacgatgttgaagcttctctaactgatgagagctcagatgggaacactcaaattttctatggtctatatgaaacccttttcgagcttgaccagggacttgtttgctcctcatcatgcaatattggaaagatgaaaattggaactcttcagtgttactacctactatcttcttgaacaatctgaaaaaggaccagtgctccccctgtcagggacggatctagcggtgggtgggcggggctcgagtctccctaccgtttcggatcccatgaagccccactacagtctcctctaatctaaaatgtatacaatataatgtagaatgagcttttatactgcagcaatttagttcagtccctcctaaacttttttctggctctgtccctgcccctgttctattttgatttgtgatgtagtgagagacatattttttatttttgtgaaatgtatatttcaccgcttgtagtaagtagcctaaaaccatattggattggattcctaccgctgaataactatctttgtcataatgcttgtacttcagatgcttataagttgccagaatagaaagtattccctccgtcctaaaatacaatttgttttagactaaatatacattcattcaataacctatgaatatagtttataggtatgtctatatacattcattcattcggggacataaaaaag

SEQ ID NO: 34038 - DNA, 1414 bp, Zea Mays
gtgtagaaaggcggcgcctcttttggcacccagctgagcattgcatttccttcctccttttcccagtcggaggaatgcaatgccgtaaacgaaagtttcccatccttgtgttttggggggtgggccatcgcggtgttgataagaaaaaggcggactccttgtaccagtttggttttgttttgtacgcgcattggttcctggcttgctcaataaattgcaaccacttccttccgaattccgatctagcggactaccagttcctcccgatcttgggtttgaggaggccccgagccgagcgtcaggcatggagcactgctatttgaggcagccgatctcgagggccgaggcagtgcccgagaggaggtccaggttgtggcagatggacgcgctgccgctgccgccccgggcggaggtcctctgcccccagcctcgccgcgccgcccggatccccttcgccgtttcagtaaacaaggccatccccaggtcgaattggttagttcttggattacctttatcacgttttctgtccggcaatcctgatggtgccaagattgcaaataattgctgcaacctgcaacgccctggtgcatgcgcatctaactattttgtccagaatggatgtgttcaatgataaagattactagtctggtagtactactaatcacgaccctctttgctgaacctctttactccccgcatctgcagtgcgcttccgccgtacagaccagcctccgcctgcgacatactcgatgatcttatcctcagcaagaatgacttctcagatggagcagattcgagcagcggccaggcgggttttttatgcggctcgcctccagtgcgcgctaacaaccctgtcgtccatgacccgcagttcggtaaaagagcgctgccatccatgtctcccctagggagcagctcccacgtcaagcttaaggttgaggcaggctcgccatcctgcggcgttagcagcagcccgaaagtgaggatcgaaggctttgcctgtggcaactcggagacccactacgcagttacgccgctccttgtgtgaatcgaatcgccgtggtggcgtagcctgatcagagtcgcgttttttgcccttctgaatctgctgccatctgaagcttcacaattgcattgagcagtatgatttatgtgtgtctagtaaatgtagctggagttgcatggataatgaaggaggagcctgtgaatagagcgtttttactttttttttggtattcgggaagtaagatgcagcatcgagttttcagttattatggatgcatctttgttttgtcatacgaaggaaactatatatgtagctttgattttttttcctagatatattcatgctgtagccaaatcatccgggcaggtcaaaattctggagcttcaatagtcttctctctctctctat

SEQ ID NO: 34039 - DNA, 1198 bp, Zea Mays
tttgccgtgtagaaaggcggcgcctcttttggcacccagctgagcattgcatttccttcctccttttcccagtcggaggaatgcaatgccgtaaacgaaagtttcccatccttgtgttttggggggtgggccatcgcggtgttgataagaaaaaggcggactccttgtaccagtttggttttgttttgtacgcgcattggttcctggcttgctcaataaattgcaaccacttccttccgaattccgatctagcggactaccagttcctcccgatcttgggtttgaggaggccccgagccgagcgtcaggcatggagcactgctatttgaggcagccgatctcgagggccgaggcagtgcccgagaggaggtccaggttgtggcagatggacgcgctgccgctgccgccccgggcggaggtcctctgcccccagcctcgccgcgccgcccggatccccttcgccgtttcagtaaacaaggccatccccagtgcgcttccgccgtacagaccagcctccgcctgcgacatactcgatgatcttatcctcagcaagaatgacttctcagatggagcagattcgagcagcggccaggcgggttttttatgcggctcgcctccagtgcgcgctaacaaccctgtcgtccatgacccgcagttcggtaaaagagcgctgccatccatgtctcccctagggagcagctcccacgtcaagcttaaggttgaggcaggctcgccatcctgcggcgttagcagcagcccgaaagtgaggatcgaaggctttgcctgtggcaactcggagacccactacgcagttacgccgctccttgtgtgaatcgaatcgccgtggtggcgtagcctgatcagagtcgcgttttttgcccttctgaatctgctgccatctgaagcttcacaattgcattgagcagtatgatttatgtgtgtctagtaaatgtagctggagttgcatggataatgaaggaggagcctgtgaatagagcgtttttactttttttttggtattcgggaagtaagatgcagcatcgagttttcagttattatggatgcatctttgttttgtcatacgaaggaaactatatatgtagctttgattttttttcctagatatattcatgctgtagccaaatcatccgggcaggtcaaaattctggagcttcaatagtcttctctctctctctat

SEQ ID NO: 34040 - DNA, 4299 bp, Zea Mays
ggagagggctgagacggggaagaagccccgtaccctatcgcgctcgccccggggaggagggggagggacgggcggactggagggaggcatctggaattcttagcctcctccgccgcggcctctactaagcagcacgcgaggacatccccaaagcctgggtgctggggctacaaggccgctactttgccccttgctacgcgctcgcccgcgagagccttgtgcctctcgtctccggcagacgccatggacgaagaggacgacgaccagcgcctgctgcacagcctcggcgtcacgtccgccaacatcgaggacatcgagaagaaaatcctctcgcaggtccaaactgaaccgaagcgcgatgacgagccaggagcagccgtcgatgaccccagcgggagtagtgttgcgcctgagtttgatgcgcaggccaatctgcaccagaagctgcgttccgtgcaactcgagatcgatgccgtagcttccaccattaaaagagctaagaacgccagcgttgatggacaagataaaaagaagcagaaacaagccaatcacacttctcaggatgaacctcatggaggagcgctccagcaggctcttgccactgagcgccttaaaagcctcaagaaagctaaagctcagattcagaaagagatattgcagtcggacccctacccatctggctcggacaacaggaaagataaaatgctagccatgctggttgaagaggagccaaggcgtaagaagaagtcgctaatgccggctcgagggcctaagaaaacgtcagctcctagactgaaaaccatgagttatgatgacgacgatgacttcgatgcagtgcttgatggggcttctgcaggatttatggaaacagaaagggaagaactaatcaggaagggcttgctgacaccatttcacaaattgaagggctttgagaagcgtgttgaattacctggaccttctcataggcaaaatgatccctccgaacaagctgaagaagcaattgaagcttccaggattgctagagtcgctcagtcaatgcagcaaattgcacaaagtcgccctacaacaaaattgcttgatccagaatctttacctaggctggacgcacctactgctccatttcaaaggcttggaagacccctaaaacgccctgtacctcctagttcagaaggacgggaaaggaagagacaaaggaataagaccaagaggcctttgcctgacaagaaatggagaaaagccaattcaaggaaggaatcactattggaaactgatggtgaggatgttggggactttgcgacatcagtttctgaggatgatgatcaagcagcagaaggtggattatctcctgttattcttgaaggtggtttgagaattcctggcacaatttatgaacagctatttgattaccaaaaagtgggagtgcagtggctgtgggagttacactgtcaaagagccggtggaattattggagacgaaatgggcctgggaaaaactgtgcaagttctatcatttcttggttctttgcataacagcggcatgtacaagcccagcatcgttgtttgtcctgtaacacttcttcaacagtggcaaagggaggccagtaggtggtatccaaaattcaaggtggaaatcttacatgattctgcaaatggttcgagtaaaaagagcaaggcatatagtgattctgacagcgaaggttcttgggatagtgatcaggaagaggttagacgtgcaaagcctgcaaagaagtgggatgacttgatttcacgggtagtaaattcgggatcaggtttgcttttaaccacatatgagcagctaagaatcttaggggagaagttgcttgatatagaatggggatatgctgtgttggatgagggtcatcgtataaggaaccctaacgctgagataacgctggtgtgcaagcaactgcaaactgtgcacaggataatcatgacaggtgcacctattcaaaataaactttctgagctctggtctcttttcgatttcgtgttcccagggaaactaggtgtgctgcctgtatttgagactgaattttctgtgccaattactgttggtggttatgctaatgcgacaccattgcaagtgtcaacagcatacagatgcgctattgttcttcgtgatcttatcatgccatatcttcttagacggatgaaagttgatgtcaatgcacagctccccaagaaaacagagcatgttcttttttgtagtctaactgcagggcagcgttctacttatcgtgcttttcttgctagttcagaggtggaacaaatatttgatggcaatagaaattcactgtatggtatagatgtcctaaggaaaatatgcaatcatcctgatctactcgagagagaacatgctgctcagaatcctgactatgggaatcctgaaagaagtggaaagatgaaagtagttgagcaagttctcaaagtctggaaggaccaaggtcaccgagttcttctgttcactcaaactcaacaaatgcttgacattttagagaacttcctgacggcctgtgactaccaataccgaagaatggatggactaacacctgcaaaacaaaggatggcactaattgacgagttcaataacacagatgaaatctttgttttcattctgaccacaaaagttggtggtttgggtacaaacttgactggcgcaaacaggattattatttatgaccccgactggaacccttcaacagacatgcaggccagagaacgtgcatggcgaattgggcaaactagagatgtaatggtttacagactgatcacacgtgggacaatagaggagaaagtctatcatcgacagatatacaagcatttccttaccaacaaagtactgaaaaaccctcagcagaggagattctttaaagccagagacatgaaggatttattcacactacaagatgatgaagggaatggttcaactgaaacgtcaaatattttcggccaattgtccaaagatgtgaacgttggagttccaaatgatggtcaacagcatcaggtacatattgcttcggctttgtcaagcaccagtgaagctgaaccatctaatggtgggaacagtaaagtggatgataactctgaccaagcagacgaagaatcgagcattttgaagagtctttttggtgctcaaggcattcatagtgcgatcaatcatgatgccataatggatgctaacgatgaccagaaagtgcgcttagaagcagaagcttcacaagtggcacaaagggcagctgaagctttacgtcaatcgcgaatgctcagaagccatgacagttttgctgttcccacatggaccggaagatctggtgctgctggggcaccctcctctgttcgcaggaagtttgggtccacagttaacagccagttgatcccttcctcacagccatcagaaacgtccagcagcaggaatcgaagtcttccagtgggtgctctgagtggcaaggcactgtcatctgctgaacttctggctaagattcgtggaacccgagaggcatctgcttcagatgcattggagcatcaactcaacgtaggatcatcttccaatcttgtatcaagtccatctgggaatggtggccgtgcatctaaccctcctaacagaagcatgatcgtgcaacctgaagtcctgatccgccagttgtgcaccttcattcaacataacggtgggtctgccacctccacgagcataacggaacacttcaagagtcgcattcagtccaaggatatgcttctcttcaagaacctgctgaaggagatagcaactttgcaaagaggcgcggaaggttctgtgtgggtgctgaaacctgattacacgtgatttttaactgtagttcacaggaacaaaattttggtataggagtcgttttcgatagggttttatttttaattttgctagggagatctttttttcgtggcttactgagtgattctttttctaaggagacttaacacgaagaaatcttaggcgatgtgttggtgttgtgaatacaagaataggaatcccaacatgctatgatcttggagaaaggatagcagattctttgcaggccacaaaggttggtgctcaagttttttagtagcttcttacttctggattagttggccagtattcgtttccatctggaatcttgtgcttgtttagcagaagctggtatataagatcggtcattcttggcatgtctggatcatgggctaactagactaacaactagttgctaaacttgatccatggaggatctaaataggagaaaataataagagaatagtttctctacaa

SEQ ID NO: 34041 - DNA, 2460 bp, Zea Mays
atgccggcccatccaacccctcccgccgcgcgcctcagcggcgtcacatcccgccgccacgcggagctgcttctccacagcggcgtcgacggcgtttctgtcaaggacctccgcctccgccgcatcgtcccacccgccgccggctccctcgacacctcccccaagtgcgtctcacccgtgaaacccggatctgttgacagcacgcctccggaggctgtgtcgtcagcggcggcggcggcggccggggaccttgaccggaagttgaggcgcccccgcggtctaagctcgtccgcgatccacgctcgtttggctaccggcgcctgctgcctttcctgaacgagatgacgaaaaacaatagctcaatcggcaaggaggtgttcctgcaagacacggctgcacacccaacggatgagctcagccgatctgattctcggttagctgatgaatctataggcgttagtcacagcgaacctgatgccatggatcctgtcgagccggcggtggtgagcactggaggagacaccgatgggaaggctacctgcggcaatgtcatggaagagaccaagactgcccctcatgacctaactaacaagccgttgcttgcccgatgcacaaggtcgaggtttgtccatcatccaagctcgttcagctacaagaggatgctgccatttctaatggaagacgaaatatatgctcaagaaagtggcagggtcaaaattcgaaaagttgctgaggaaaggcagtttgcggcaaacaagcatgatgcctcagccaatgggcagcagtgtcttgctgtctcggatgactcttctcaggaaggcaatagagctcaatttaaaatagtggaagaagaaaagccactaaaagcagatgtgaatcatattcttgatgacagacagcttaagcctcctgtcatagaagcgtctcctgattgtagtgcaactgaagtgcaaaatgtcatgcagcaagaagctttagcttcaagtcaagttcccctaacttcttttgatggtgaattaacatcagacggggacaatgtccagtccattggacaacatcagcttgttgtatcagaagagtctcaagaggaatgcaaaagagatgaagtcaacagaagcattcacgatgaagcagtacaatcagatgggggctatgctctggatagcagagaatttcagcctgctgcatcagaagtctcttgttcagaaaacagcatggctggagtgcaaggggctgcacaagaagaaccgttacctttagatggagttcaggaaaattcagacatgggcgacgatgtttccacagagcaggctcagctctgtgtcacaagtgaatccttgtctgcgcagctgcaaaacaatgctgaattcgctgaagtactgccgtgccaagacttggactcaggatgtcacgacattggtttcggtagtcctaccaagagagtcgtaccatcgttgcatcggcattgcgcacaacaacctcaggactctgtggtttctcatgatgatcagcttcttgacgatgacatacaaatggtcggcagactttctgatccctgtgctgctgacagatcctcatcaatggaggaaatgtctggccgcattctgttcacccaatcagcatcgagcaaagcagccatatcatggccaagtggtgcccattcaatggaaaaaagagctcggtctcctaaggagctttccccaaagaaagggatactcaagaggagtacacgggggtgcaagggtatctgcatgtgcctggactgctgtacgtttcgcctacacgccgaccgagctttcgagttctccaggaagcagatgagagaagccgatgacatcataagtaacttactgaaggaggtggacagtcttaggagcctgctggagaagcatgctggccaagcagcccgaagacaggcctgccgggtgcaggaggtggccaggaaccgctgccagcagatgtttgcggatctaaactcccactgcagaatccccggaccaagggttaggttcgccgaatacgtcgaggagaaggccgcgtcgtctccacgcaggagcagccggaggtgactggatttcaggaggtggcaggtgaactggcctgcccgatcgtgttgctgaattgttcggtacaataactaagtagtgctgcttggcgaaccatcacccttgtcactggtttgtgttggtttgccatgctttgagctttgagttttgtactgtatactatgtgttccctacattccagaaaattgtaagtcgatttgactttttagttatatgcctagttacatagcaaaagttattacatatctagaaaagtcggagtgacttgtaatttgaagaggaggggatacaatttatatattcatagacaatagcttcagattcgttgagttggtcagcatgagttctggtttgtttcaggtcttctttttgaacgttagactgtctccagcag

SEQ ID NO: 34042 - DNA, 2808 bp, Zea Mays
gcaggcgcggacgcagccaccatgccggcccatccaacccctcccgccgcgcgcctcagcggcgtcacatcccgccgccacgcggagctgcttctccacagcggcgtcgacggcgtttctgtcaaggacctccgcctccgccgcatcgtcccacccgccgccggctccctcgacacctcccccaagtgcgtctcacccgtgaaacccggatctgttgacagcacgcctccggaggctgtgtcgtcagcggcggcggcggcggccggggaccttgaccggaagttggcgcccccgcggtctaagctcgtccgcgatccacgctcgtttggctaccggcgcctgctgcctttcctgaacgagatgacgaaaaacactcaatcggcaaggaggtgttcctgcaagacacggctgcacacccaacggatgagctcagccgatctgattctcggttagctgatgaatctataggcgttagtcacagcgaacctgatgccatggatcctgtcgagccggcggtggtgagcactggaggagacaccgatgggaaggctacctgcggcaatgtcatggaagagaccaagactgcccctcatgacctaactaacaagccgttgcttgcccgatgcacaaggtcgaggtttgtccatcatccaagctcgttcagctacaagaggatgctgccatttctaatggaagacgaaatatatgctcaagaaagtggcagggtcaaaattcgaaaagttgctgaggaaaggcagtttgcggcaaacaagcatgatgcctcagccaatgggcagcagtgtcttgctgtctcggatgactcttctcaggaaggcaatagagctcaatttaaaatagtggaagaagaaaagccactaaaagcagatgtgaatcatattcttgatgacagacagcttaagcctcctgtcatagaagcgtctcctgattgtagtgcaactgaagtgcaaaatgtcatgcagcaagaagctttagcttcaagtcaagttcccctaacttcttttgatggtgaattaacatcagacggggacaatgtccagtccattggacaacatcagcttgttgtatcagaagagtctcaagaggaatgcaaaagagatgaagtcaacagaagcattcacgatgaagcagtacaatcagatgggggctatgctctggatagcagagaatttcagcctgctgcatcagaagtctcttgttcagaaaacagcatggctggagtgcaaggggctgcacaagaagaaccgttacctttagatggagttcaggaaaattcagacatgggcgacgatgtttccacagagcaggctcagctctgtgtcacaagtgaatccttgtctgcgcagctgcaaaacaatgctgaattcgctgaagtactgccgtgccaagacttggactcaggatgtcacgacattggtttcggtagtcctaccaagagagtcgtaccatcgttgcatcggcattgcgcacaacaacctcaggactctgtggtttctcatgatgatcagcttcttgacgatgacatacaaatggtcggcagactttctgatccctgtgctgctgacagatcctcatcaatggaggaaatgtctggccgcattctgttcacccaatcagcatcgagcaaagcagccatatcatggccaagtggtgcccattcaatggaaaaaagagctcggtctcctaaggagctttccccaaagaaagggatactcaagaggagtacacgggggtgcaagggtatctgcatgtgcctggactgctgtacgtttcgcctacacgccgaccgagctttcgagttctccaggaagcagatgagagaagccgatgacatcataagtaacttactgaaggaggtggacagtcttaggagcctgctggagaagcatgctggccaagtaagtataaatccgtgcatttcagtttttgtttctttttttttcttctcctcatcatcatgaagtttttgtgcaattaggaatgctaatatccactcttcactagtatgacgagttctacattgacctgtggtgaccatttgacctgaatacttactttgtcctgagcttcccatctcctttacattatttggctggctgttccagtgtctgaaattcgcgttgaatatgccttgctaaacgcacgggcagttctgtactcaccaaagtatacggaaccctcgattcttacttcttaccgtcgtctgaaaattgcaaccggaatcaacacaggcagcccgaagacaggcctgccgggtgcaggaggtggccaggaaccgctgccagcagatgtttgcggatctaaactcccactgcagaatccccggaccaagggttaggttcgccgaatacgtcgaggagaaggccgcgtcgtctccacgcaggagcagccggaggtgactggatttcaggaggtggcaggtgaactggcctgcccgatcgtgttgctgaattgttcggtacaataactaagtagtgctgcttggcgaaccatcacccttgtcactggtttgtgttggtttgccatgctttgagctttgagttttgtactgtatactatgtgttccctacattccagaaaattgtaagtcgatttgactttttagttatatgcctagttacatagcaaaagttattacatatctagaaaagtcggagtgacttgtaatttgaagaggaggggatacaatttatatattcatagacaatagcttcagattcgttgagttggtcagcatgagttctggtttgtttcaggtcttctttttgaacgttagactgtctccagcag

SEQ ID NO: 34043 - DNA, 2828 bp, Zea Mays
ggccgcccctaccctagcaggcgcggacgcagccaccatgccggcccatccaacccctcccgccgcgcgcctcagcggcgtcacatcccgccgccacgcggagctgcttctccacagcggcgtcgacggcgtttctgtcaaggacctccgcctccgccgcatcgtcccacccgccgccggctccctcgacacctcccccaagtgcgtctcacccgtgaaacccggatctgttgacagcacgcctccggaggctgtgtcgtcagcggcggcggcggcggccggggaccttgaccggaagttggcgcccccgcggtctaagctcgtccgcgatccacgctcgtttggctaccggcgcctgctgcctttcctgaacgagatgacgaaaaacaatagctcaatcggcaaggaggtgttcctgcaagacacggctgcacacccaacggatgagctcagccgatctgattctcggttagctgatgaatctataggcgttagtcacagcgaacctgatgccatggatcctgtcgagccggcggtggtgagcactggaggagacaccgatgggaaggctacctgcggcaatgtcatggaagagaccaagactgcccctcatgacctaactaacaagccgttgcttgcccgatgcacaaggtcgaggtttgtccatcatccaagctcgttcagctacaagaggatgctgccatttctaatggaagacgaaatatatgctcaagaaagtggcagggtcaaaattcgaaaagttgctgaggaaaggcagtttgcggcaaacaagcatgatgcctcagccaatgggcagcagtgtcttgctgtctcggatgactcttctcaggaaggcaatagagctcaatttaaaatagtggaagaagaaaagccactaaaagcagatgtgaatcatattcttgatgacagacagcttaagcctcctgtcatagaagcgtctcctgattgtagtgcaactgaagtgcaaaatgtcatgcagcaagaagctttagcttcaagtcaagttcccctaacttcttttgatggtgaattaacatcagacggggacaatgtccagtccattggacaacatcagcttgttgtatcagaagagtctcaagaggaatgcaaaagagatgaagtcaacagaagcattcacgatgaagcagtacaatcagatgggggctatgctctggatagcagagaatttcagcctgctgcatcagaagtctcttgttcagaaaacagcatggctggagtgcaaggggctgcacaagaagaaccgttacctttagatggagttcaggaaaattcagacatgggcgacgatgtttccacagagcaggctcagctctgtgtcacaagtgaatccttgtctgcgcagctgcaaaacaatgctgaattcgctgaagtactgccgtgccaagacttggactcaggatgtcacgacattggtttcggtagtcctaccaagagagtcgtaccatcgttgcatcggcattgcgcacaacaacctcaggactctgtggtttctcatgatgatcagcttcttgacgatgacatacaaatggtcggcagactttctgatccctgtgctgctgacagatcctcatcaatggaggaaatgtctggccgcattctgttcacccaatcagcatcgagcaaagcagccatatcatggccaagtggtgcccattcaatggaaaaaagagctcggtctcctaaggagctttccccaaagaaagggatactcaagaggagtacacgggggtgcaagggtatctgcatgtgcctggactgctgtacgtttcgcctacacgccgaccgagctttcgagttctccaggaagcagatgagagaagccgatgacatcataagtaacttactgaaggaggtggacagtcttaggagcctgctggagaagcatgctggccaagtaagtataaatccgtgcatttcagtttttgtttctttttttttcttctcctcatcatcatgaagtttttgtgcaattaggaatgctaatatccactcttcactagtatgacgagttctacattgacctgtggtgaccatttgacctgaatacttactttgtcctgagcttcccatctcctttacattatttggctggctgttccagtgtctgaaattcgcgttgaatatgccttgctaaacgcacgggcagttctgtactcaccaaagtatacggaaccctcgattcttacttcttaccgtcgtctgaaaattgcaaccggaatcaacacaggcagcccgaagacaggcctgccgggtgcaggaggtggccaggaaccgctgccagcagatgtttgcggatctaaactcccactgcagaatccccggaccaagggttaggttcgccgaatacgtcgaggagaaggccgcgtcgtctccacgcaggagcagccggaggtgactggatttcaggaggtggcaggtgaactggcctgcccgatcgtgttgctgaattgttcggtacaataactaagtagtgctgcttggcgaaccatcacccttgtcactggtttgtgttggtttgccatgctttgagctttgagttttgtactgtatactatgtgttccctacattccagaaaattgtaagtcgatttgactttttagttatatgcctagttacatagcaaaagttattacatatctagaaaagtcggagtgacttgtaatttgaagaggaggggatacaatttatatattcatagacaatagcttcagattcgttgagttggtcagcatgagttctggtttgtttcaggtcttctttttgaacgttagactgtctccagcag

SEQ ID NO: 34044 - DNA, 2514 bp, Zea Mays
cacaatcccattcagacgcggccgcccctaccctagcaggcgcggacgcagccaccatgccggcccatccaacccctcccgccgcgcgcctcagcggcgtcacatcccgccgccacgcggagctgcttctccacagcggcgtcgacggcgtttctgtcaaggacctccgcctccgccgcatcgtcccacccgccgccggctccctcgacacctcccccaagtgcgtctcacccgtgaaacccggatctgttgacagcacgcctccggaggctgtgtcgtcagcggcggcggcggcggccggggaccttgaccggaagttggcgcccccgcggtctaagctcgtccgcgatccacgctcgtttggctaccggcgcctgctgcctttcctgaacgagatgacgaaaaacaatagctcaatcggcaaggaggtgttcctgcaagacacggctgcacacccaacggatgagctcagccgatctgattctcggttagctgatgaatctataggcgttagtcacagcgaacctgatgccatggatcctgtcgagccggcggtggtgagcactggaggagacaccgatgggaaggctacctgcggcaatgtcatggaagagaccaagactgcccctcatgacctaactaacaagccgttgcttgcccgatgcacaaggtcgaggtttgtccatcatccaagctcgttcagctacaagaggatgctgccatttctaatggaagacgaaatatatgctcaagaaagtggcagggtcaaaattcgaaaagttgctgaggaaaggcagtttgcggcaaacaagcatgatgcctcagccaatgggcagcagtgtcttgctgtctcggatgactcttctcaggaaggcaatagagctcaatttaaaatagtggaagaagaaaagccactaaaagcagatgtgaatcatattcttgatgacagacagcttaagcctcctgtcatagaagcgtctcctgattgtagtgcaactgaagtgcaaaatgtcatgcagcaagaagctttagcttcaagtcaagttcccctaacttcttttgatggtgaattaacatcagacggggacaatgtccagtccattggacaacatcagcttgttgtatcagaagagtctcaagaggaatgcaaaagagatgaagtcaacagaagcattcacgatgaagcagtacaatcagatgggggctatgctctggatagcagagaatttcagcctgctgcatcagaagtctcttgttcagaaaacagcatggctggagtgcaaggggctgcacaagaagaaccgttacctttagatggagttcaggaaaattcagacatgggcgacgatgtttccacagagcaggctcagctctgtgtcacaagtgaatccttgtctgcgcagctgcaaaacaatgctgaattcgctgaagtactgccgtgccaagacttggactcaggatgtcacgacattggtttcggtagtcctaccaagagagtcgtaccatcgttgcatcggcattgcgcacaacaacctcaggactctgtggtttctcatgatgatcagcttcttgacgatgacatacaaatggtcggcagactttctgatccctgtgctgctgacagatcctcatcaatggaggaaatgtctggccgcattctgttcacccaatcagcatcgagcaaagcagccatatcatggccaagtggtgcccattcaatggaaaaaagagctcggtctcctaaggagctttccccaaagaaagggatactcaagaggagtacacgggggtgcaagggtatctgcatgtgcctggactgctgtacgtttcgcctacacgccgaccgagctttcgagttctccaggaagcagatgagagaagccgatgacatcataagtaacttactgaaggaggtggacagtcttaggagcctgctggagaagcatgctggccaagcagcccgaagacaggcctgccgggtgcaggaggtggccaggaaccgctgccagcagatgtttgcggatctaaactcccactgcagaatccccggaccaagggttaggttcgccgaatacgtcgaggagaaggccgcgtcgtctccacgcaggagcagccggaggtgactggatttcaggaggtggcaggtgaactggcctgcccgatcgtgttgctgaattgttcggtacaataactaagtagtgctgcttggcgaaccatcacccttgtcactggtttgtgttggtttgccatgctttgagctttgagttttgtactgtatactatgtgttccctacattccagaaaattgtaagtcgatttgactttttagttatatgcctagttacatagcaaaagttattacatatctagaaaagtcggagtgacttgtaatttgaagaggaggggatacaatttatatattcatagacaatagcttcagattcgttgagttggtcagcatgagttctggtttgtttcaggtcttctttttgaacgttagactgtctccagcag

SEQ ID NO: 34045 - DNA, 2862 bp, Zea Mays
ccttcttcctccccgtctcacaatcacaatcccattcagacgcggccgcccctaccctagcaggcgcggacgcagccaccatgccggcccatccaacccctcccgccgcgcgcctcagcggcgtcacatcccgccgccacgcggagctgcttctccacagcggcgtcgacggcgtttctgtcaaggacctccgcctccgccgcatcgtcccacccgccgccggctccctcgacacctcccccaagtgcgtctcacccgtgaaacccggatctgttgacagcacgcctccggaggctgtgtcgtcagcggcggcggcggcggccggggaccttgaccggaagttgattcgtcttcgtttggtccgcatcgcattccccctgtgcttacgctgtctccctgcacgcccgtgtcctggtggttcagatagctcaatcggcaaggaggtgttcctgcaagacacggctgcacacccaacggatgagctcagccgatctgattctcggttagctgatgaatctataggcgttagtcacagcgaacctgatgccatggatcctgtcgagccggcggtggtgagcactggaggagacaccgatgggaaggctacctgcggcaatgtcatggaagagaccaagactgcccctcatgacctaactaacaagccgttgcttgcccgatgcacaaggtcgaggtttgtccatcatccaagctcgttcagctacaagaggatgctgccatttctaatggaagacgaaatatatgctcaagaaagtggcagggtcaaaattcgaaaagttgctgaggaaaggcagtttgcggcaaacaagcatgatgcctcagccaatgggcagcagtgtcttgctgtctcggatgactcttctcaggaaggcaatagagctcaatttaaaatagtggaagaagaaaagccactaaaagcagatgtgaatcatattcttgatgacagacagcttaagcctcctgtcatagaagcgtctcctgattgtagtgcaactgaagtgcaaaatgtcatgcagcaagaagctttagcttcaagtcaagttcccctaacttcttttgatggtgaattaacatcagacggggacaatgtccagtccattggacaacatcagcttgttgtatcagaagagtctcaagaggaatgcaaaagagatgaagtcaacagaagcattcacgatgaagcagtacaatcagatgggggctatgctctggatagcagagaatttcagcctgctgcatcagaagtctcttgttcagaaaacagcatggctggagtgcaaggggctgcacaagaagaaccgttacctttagatggagttcaggaaaattcagacatgggcgacgatgtttccacagagcaggctcagctctgtgtcacaagtgaatccttgtctgcgcagctgcaaaacaatgctgaattcgctgaagtactgccgtgccaagacttggactcaggatgtcacgacattggtttcggtagtcctaccaagagagtcgtaccatcgttgcatcggcattgcgcacaacaacctcaggactctgtggtttctcatgatgatcagcttcttgacgatgacatacaaatggtcggcagactttctgatccctgtgctgctgacagatcctcatcaatggaggaaatgtctggccgcattctgttcacccaatcagcatcgagcaaagcagccatatcatggccaagtggtgcccattcaatggaaaaaagagctcggtctcctaaggagctttccccaaagaaagggatactcaagaggagtacacgggggtgcaagggtatctgcatgtgcctggactgctgtacgtttcgcctacacgccgaccgagctttcgagttctccaggaagcagatgagagaagccgatgacatcataagtaacttactgaaggaggtggacagtcttaggagcctgctggagaagcatgctggccaagtaagtataaatccgtgcatttcagtttttgtttctttttttttcttctcctcatcatcatgaagtttttgtgcaattaggaatgctaatatccactcttcactagtatgacgagttctacattgacctgtggtgaccatttgacctgaatacttactttgtcctgagcttcccatctcctttacattatttggctggctgttccagtgtctgaaattcgcgttgaatatgccttgctaaacgcacgggcagttctgtactcaccaaagtatacggaaccctcgattcttacttcttaccgtcgtctgaaaattgcaaccggaatcaacacaggcagcccgaagacaggcctgccgggtgcaggaggtggccaggaaccgctgccagcagatgtttgcggatctaaactcccactgcagaatccccggaccaagggttaggttcgccgaatacgtcgaggagaaggccgcgtcgtctccacgcaggagcagccggaggtgactggatttcaggaggtggcaggtgaactggcctgcccgatcgtgttgctgaattgttcggtacaataactaagtagtgctgcttggcgaaccatcacccttgtcactggtttgtgttggtttgccatgctttgagctttgagttttgtactgtatactatgtgttccctacattccagaaaattgtaagtcgatttgactttttagttatatgcctagttacatagcaaaagttattacatatctagaaaagtcggagtgacttgtaatttgaagaggaggggatacaatttatatattcatagacaatagcttcagattcgttgagttggtcagcatgagttctggtttgtttcaggtcttctttttgaacgttagactgtctccagcag

SEQ ID NO: 34046 - DNA, 852 bp, Zea Mays
ccgtctcccgactccattcttgtgggagccatcagcataggaacaggaagagggatctgggtggagaaggtcctgggaggaccagatcgccgagctgaagaggaggagcgtggcgaaggattcagaagagaacctgtcgtggggcgctcgcatgcggagaagggccgaggcgtcagcagcggagtagctgcgacaagcgagccttccaaatgcagctgtactcgtacgtagcatgtggagcgaagcgaaacggaatatatttttctggtgggtacaatttggtctgcaaggtttttaaggcgtggatctaaagatgtccagatggaaaccttcagagacagacctgttacgagaattggacgtgtagcagtagtagctgtagcggtggcatctggccaggattgaggaggaacagcagcacctggatggagtgtggtggctgctggctgcagaccaacacccttggccctggctacataatagttgagttcctgcctggccacctgggcctggctggctgtatgtaaacgactcaactatgttactccttgagactcctgttacatctgtggcaggtccagtgtaaatgtaaatactacaagcatcaataacgaaggagcaagccagttgttcttccaatattcagggtgtttccttcttttgttttgttttcctttctcaagcatcaatattgaggttgtgggcttatgcgggagaggcaattattcatatctttaggagcatgacctttgcttaggctatggccatacaaatggccgtgcaaaatagagtgcactgcttatagagtgtaagcttgaaatgagagatgacgataagataagtaagttgttg

SEQ ID NO: 34047 - DNA, 1924 bp, Zea Mays
gtcctccctcttctgtaaatagagatcaccatcttcccctactcgtagatcaaaatctcggtcaagatcacctatcaagtaccgtaggagcagacgatcccgctcctactctcccccagttggacgctcaagggagcatcgatcacgatcaccatcaagatctcgccactcaaagcatggtagtgatcgatcacatagggatgataaggatatgtatagcaggtccgggagaagggagagtgaacgatcccgtgatcatcattcatctcgttcaaggaggaacagaagcaaaagtagaagtccaaggcataagaagccctccagagttgactctaggtcacccaagaaacaaagactcgaaagtttaagcccatcaaaatcaaggtcggctcgggctggttcaaggtcaccacgacatcataagggaagcaaatcatcgccaactagtgatcgtcattctcgccatagcaggcattcaaggtccagatctcttgacagaaagcatcatcacagtgataaaaaggacagcagaaagtctgagattcaggacgacagaagatctcatagaggcagcagacgcgacaaagatgaaagttcagtgaaggatgatggggaaagatctcatagaggtagtagacgcgacaaagatgaaagttcagtgaaggatgatggggaaagatctcatagaggtagcagacgcaacaaagatgaaagttcagtgaaggatgatggggaaagatctcatagaggtagcagacgcgacaaagatgaaagttcagtgaaggatgatggggaaagatctcatagaggtagcagacgcggcaaagatgaaagttcagtgaaggatgatggggaaagatctcatagaggtagcagactcgacaaagatgaaagttcagtgaaggatgatggggaaagatctcatagaggtagcagacgcgacaaagatgaaagttcagtgaaggatgatggggaaagatctcatagaggtagcagacgcgacaaagatgaaaattcagtgaaggatgatggggaacgatctcatagaagcagtagaggtgacaacgatggaaggtctgtaaaagatccagtggaagataaaagggtggatagtaatgctgtcgcacataagaggagctctgaagatgaaatcctgaacaacaatagtagtaaccataagaaacatagacatgaagttggtttggaagttgatgaaggaaatgatgtgtgccctgctgtagcagaccctaatgggaaacatgaaactggaggcatgaagatcttcggagaactcgagtgctgttcggagcgctcatctgatatattaaaatgcttatgattccatgaagagttgttggagcacatttctgggatgtcggttgaagatacaaggaagtacacactcaagtttttcgagggggcctggcattggagtatgttttaagggaagtcagttcattttatgaatgaggattattttgtggatgctcaattacatgctctcaggaataagactgttctgcatctgagctgcgagcctgcaagtgaactgcgtatttgctggcgcacttctttcaaagcgggatcagcattacccttgttaagttgaatgggagctgagtcataactctcattgcaatgtttttccggagctagtagggaaacacccataaactccaatctcttttccgaaaaattcctttcttattaagggaaaaaagaaacatgctattctctttttttgggtaggaagaataataaaattaggtagggaggtgctagattccatacgctagttcttttcttcaccgccctcgttcgttaggctgtggccaccaaccgtgtatctgaccgtgcaaatagactatatctctagcagattatttatctcacttcctatgttaaactttactttgcaaacaat

SEQ ID NO: 34048 - DNA, 1911 bp, Zea Mays
aaaccttgcagatcaccatcttcccctactcgtagatcaaaatctcggtcaagatcacctatcaagtaccgtaggagcagacgatcccgctcctactctcccccagttggacgctcaagggagcatcgatcacgatcaccatcaagatctcgccactcaaagcatggtagtgatcgatcacatagggatgataaggatatgtatagcaggtccgggagaagggagagtgaacgatcccgtgatcatcattcatctcgttcaaggaggaacagaagcaaaagtagaagtccaaggcataagaagccctccagagttgactctaggtcacccaagaaacaaagactcgaaagtttaagcccatcaaaatcaaggtcggctcgggctggttcaaggtcaccacgacatcataagggaagcaaatcatcgccaactagtgatcgtcattctcgccatagcaggcattcaaggtccagatctcttgacagaaagcatcatcacagtgataaaaaggacagcagaaagtctgagattcaggacgacagaagatctcatagaggcagcagacgcgacaaagatgaaagttcagtgaaggatgatggggaaagatctcatagaggtagtagacgcgacaaagatgaaagttcagtgaaggatgatggggaaagatctcatagaggtagcagacgcaacaaagatgaaagttcagtgaaggatgatggggaaagatctcatagaggtagcagacgcgacaaagatgaaagttcagtgaaggatgatggggaaagatctcatagaggtagcagacgcggcaaagatgaaagttcagtgaaggatgatggggaaagatctcatagaggtagcagactcgacaaagatgaaagttcagtgaaggatgatggggaaagatctcatagaggtagcagacgcgacaaagatgaaagttcagtgaaggatgatggggaaagatctcatagaggtagcagacgcgacaaagatgaaaattcagtgaaggatgatggggaacgatctcatagaagcagtagaggtgacaacgatggaaggtctgtaaaagatccagtggaagataaaagggtggatagtaatgctgtcgcacataagaggagctctgaagatgaaatcctgaacaacaatagtagtaaccataagaaacatagacatgaagttggtttggaagttgatgaaggaaatgatgtgtgccctgctgtagcagaccctaatgggaaacatgaaactggaggcatgaagatcttcggagaactcgagtgctgttcggagcgctcatctgatatattaaaatgcttatgattccatgaagagttgttggagcacatttctgggatgtcggttgaagatacaaggaagtacacactcaagtttttcgagggggcctggcattggagtatgttttaagggaagtcagttcattttatgaatgaggattattttgtggatgctcaattacatgctctcaggaataagactgttctgcatctgagctgcgagcctgcaagtgaactgcgtatttgctggcgcacttctttcaaagcgggatcagcattacccttgttaagttgaatgggagctgagtcataactctcattgcaatgtttttccggagctagtagggaaacacccataaactccaatctcttttccgaaaaattcctttcttattaagggaaaaaagaaacatgctattctctttttttgggtaggaagaataataaaattaggtagggaggtgctagattccatacgctagttcttttcttcaccgccctcgttcgttaggctgtggccaccaaccgtgtatctgaccgtgcaaatagactatatctctagcagattatttatctcacttcctatgttaaactttactttgcaaacaat

SEQ ID NO: 34049 - DNA, 3526 bp, Zea Mays
cacgcctcctcttcctcgttgcccctcggccctcatcccctgcatctgctccccctctaggcctctaccgaaccctagccggccagctgagcttattgaaggcaagctaggcgagagcagcgtccgccgccgcgctctcatggcggcgcccaaaccgatctgggtgcgccaggctgaggaggcaaagctcaagtccgaggcggagaccgctgccgccgccaaggccgccttcgacgccaccttcaaggccctcgctgccgcgtctggtgacgactacaacgatgtcgaccccgccccaccctccccagccgagctcacctccaccgactcggacgacgatgctccggccctgccaggcccggtcgacccgtccaagtgctccgccgcggggcctggcatcgctggcggctctgccggaacgccctccactttcaccgtcgtcgccaaggatcgccacagccggaggctcaccgccggtggggcgcgcgtgcacgtgcgtgtctcgcccgctgcgggagtcggcggggacgatctcgaaggcactgtcaaggacaacggggacggatcctacacggtcacctacgtcgtccccaagcgcggcaactacatggtacacgttgagcttgacggcgtctccgtcatggggagccccttccccgtcttcttcagcggttccaccgccacaccatcagccgctttccccaccgcgctacctgctgtcagctctgcctaccccaacatggttaaccagaccatgcctaatatgcccaattacacaggcgcgccctccagtgccttccccagcctcctcggggccatgcctagttccaccgctgggtcctcgggcggagtcatcctgccaggggttggtgcttcactgggggagatatgccgggactacatgaacgggaggtgcacaaaggtggagactgactgtaagttcacccatccaccgcaacagctgctgatgtcgttgcttgctgccacgacttctgtcagtgctctcgggcatgcgcccttggcgccctctgcggctgccatggcagctgctcaggccatcatggctgcccaggcactgcaggcacatgctgcacaggccaaagctgcaggtggaacttcaggctcaacaaacaaagctgatgaagctgatgccctgaagagaacagttcaaattagcaacctgagtccacttcttactgtggattatattaaacagctatttggattttgtggtaaagttgttgattgtgtcatgacagatacaaagcagattgtgtatgttgagtactccaaacctgaagaagcaactgcagcattggagctcaatagcaagagtgttggtggtcgtccattgaatgtggagatggctaaagctcttcctcctaaagcaaataataacttgcctatgatgatgcagcaagccgttcagttgcaacagatacaattccagcaggcactaatgatgcaacagtcaatagcagcccaacaggctgctgcacgtgctgccaccatgaaatctgccactgaagcagctgcagcaagggctgctgagataagcaggaagttgaaggcagagggctttggtggggacaacatggaagaaaaggatgccaaagggaagtcaggatcaccatcttcccctactcgtagatcaaaatctcggtcaagatcacctatcaagtaccgtaggagcagacgatcccgctcctactctcccccagttggacgctcaagggagcatcgatcacgatcaccatcaagatctcgccactcaaagcatggtagtgatcgatcacatagggatgataaggatatgtatagcaggtccgggagaagggagagtgaacgatcccgtgatcatcattcatctcgttcaaggaggaacagaagcaaaagtagaagtccaaggcataagaagccctccagagttgactctaggtcacccaagaaacaaagactcgaaagtttaagcccatcaaaatcaaggtcggctcgggctggttcaaggtcaccacgacatcataagggaagcaaatcatcgccaactagtgatcgtcattctcgccatagcaggcattcaaggtccagatctcttgacagaaagcatcatcacagtgataaaaaggacagcagaaagtctgagattcaggacgacagaagatctcatagaggcagcagacgcgacaaagatgaaagttcagtgaaggatgatggggaaagatctcatagaggtagtagacgcgacaaagatgaaagttcagtgaaggatgatggggaaagatctcatagaggtagcagacgcaacaaagatgaaagttcagtgaaggatgatggggaaagatctcatagaggtagcagacgcgacaaagatgaaagttcagtgaaggatgatggggaaagatctcatagaggtagcagacgcggcaaagatgaaagttcagtgaaggatgatggggaaagatctcatagaggtagcagactcgacaaagatgaaagttcagtgaaggatgatggggaaagatctcatagaggtagcagacgcgacaaagatgaaagttcagtgaaggatgatggggaaagatctcatagaggtagcagacgcgacaaagatgaaaattcagtgaaggatgatggggaacgatctcatagaagcagtagaggtgacaacgatggaaggtctgtaaaagatccagtggaagataaaagggtggatagtaatgctgtcgcacataagaggagctctgaagatgaaatcctgaacaacaatagtagtaaccataagaaacatagacatgaagttggtttggaagttgatgaaggaaatgatgtgtgccctgctgtagcagaccctaatgggaaacatgaaactggaggcatgaagatcttcggagaactcgagtgctgttcggagcgctcatctgatatattaaaatgcttatgattccatgaagagttgttggagcacatttctgggatgtcggttgaagatacaaggaagtacacactcaagtttttcgagggggcctggcattggagtatgttttaagggaagtcagttcattttatgaatgaggattattttgtggatgctcaattacatgctctcaggaataagactgttctgcatctgagctgcgagcctgcaagtgaactgcgtatttgctggcgcacttctttcaaagcgggatcagcattacccttgttaagttgaatgggagctgagtcataactctcattgcaatgtttttccggagctagtagggaaacacccataaactccaatctcttttccgaaaaattcctttcttattaagggaaaaaagaaacatgctattctctttttttgggtaggaagaataataaaattaggtagggaggtgctagattccatacgctagttcttttcttcaccgccctcgttcgttaggctgtggccaccaaccgtgtatctgaccgtgcaaatagactatatctctagcagattatttatctcacttcctatgttaaactttactttgcaaacaat

SEQ ID NO: 34050 - DNA, 2607 bp, Zea Mays
cgcctctgagctcttgacgctgagcaccgtggtctgtttgcggccatagacctcgtgtgcagtcatctcggagttttgtggttgagggagatgtctgcctagacttcccggatgacgcctatcgccggctacattcatgaattggaggttgtcgcgttccggctcggggtccaccatgccctggtcaccgctcggcctctcggctcaacaaacaaagctgatgaagctgatgccctgaagagaacagttcaaattagcaacctgagtccacttcttactgtggattatattaaacagctatttggattttgtggtaaagttgttgattgtgtcatgacagatacaaagcagattgtgtatgttgagtactccaaacctgaagaagcaactgcagcattggagctcaatagcaagagtgttggtggtcgtccattgaatgtggagatggctaaagctcttcctcctaaagcaaataataacttgcctatgatgatgcagcaagccgttcagttgcaacagatacaattccagcaggcactaatgatgcaacagtcaatagcagcccaacaggctgctgcacgtgctgccaccatgaaatctgccactgaagcagctgcagcaagggctgctgagataagcaggaagttgaaggcagagggctttggtggggacaacatggaagaaaaggatgccaaagggaagtcaggatcaccatcttcccctactcgtagatcaaaatctcggtcaagatcacctatcaagtaccgtaggagcagacgatcccgctcctactctcccccagttggacgctcaagggagcatcgatcacgatcaccatcaagatctcgccactcaaagcatggtagtgatcgatcacatagggatgataaggatatgtatagcaggtccgggagaagggagagtgaacgatcccgtgatcatcattcatctcgttcaaggaggaacagaagcaaaagtagaagtccaaggcataagaagccctccagagttgactctaggtcacccaagaaacaaagactcgaaagtttaagcccatcaaaatcaaggtcggctcgggctggttcaaggtcaccacgacatcataagggaagcaaatcatcgccaactagtgatcgtcattctcgccatagcaggcattcaaggtccagatctcttgacagaaagcatcatcacagtgataaaaaggacagcagaaagtctgagattcaggacgacagaagatctcatagaggcagcagacgcgacaaagatgaaagttcagtgaaggatgatggggaaagatctcatagaggtagtagacgcgacaaagatgaaagttcagtgaaggatgatggggaaagatctcatagaggtagcagacgcaacaaagatgaaagttcagtgaaggatgatggggaaagatctcatagaggtagcagacgcgacaaagatgaaagttcagtgaaggatgatggggaaagatctcatagaggtagcagacgcggcaaagatgaaagttcagtgaaggatgatggggaaagatctcatagaggtagcagactcgacaaagatgaaagttcagtgaaggatgatggggaaagatctcatagaggtagcagacgcgacaaagatgaaagttcagtgaaggatgatggggaaagatctcatagaggtagcagacgcgacaaagatgaaaattcagtgaaggatgatggggaacgatctcatagaagcagtagaggtgacaacgatggaaggtctgtaaaagatccagtggaagataaaagggtggatagtaatgctgtcgcacataagaggagctctgaagatgaaatcctgaacaacaatagtagtaaccataagaaacatagacatgaagttggtttggaagttgatgaaggaaatgatgtgtgccctgctgtagcagaccctaatgggaaacatgaaactggaggcatgaagatcttcggagaactcgagtgctgttcggagcgctcatctgatatattaaaatgcttatgattccatgaagagttgttggagcacatttctgggatgtcggttgaagatacaaggaagtacacactcaagtttttcgagggggcctggcattggagtatgttttaagggaagtcagttcattttatgaatgaggattattttgtggatgctcaattacatgctctcaggaataagactgttctgcatctgagctgcgagcctgcaagtgaactgcgtatttgctggcgcacttctttcaaagcgggatcagcattacccttgttaagttgaatgggagctgagtcataactctcattgcaatgtttttccggagctagtagggaaacacccataaactccaatctcttttccgaaaaattcctttcttattaagggaaaaaagaaacatgctattctctttttttgggtaggaagaataataaaattaggtagggaggtgctagattccatacgctagttcttttcttcaccgccctcgttcgttaggctgtggccaccaaccgtgtatctgaccgtgcaaatagactatatctctagcagattatttatctcacttcctatgttaaactttactttgcaaacaat

SEQ ID NO: 34051 - DNA, 3243 bp, Zea Mays
cctcttcctcgttgcccctcggccctcatcccctgcatctgctccccctctaggcctctaccgaaccctagccggccagctgagcttattgaaggcaagctaggcgagagcagcgtccgccgccgcgctctcatggcggcgcccaaaccgatctgggtgcgccaggctgaggaggcaaagctcaagtccgaggcggagaccgctgccgccgccaaggccgccttcgacgccaccttcaaggccctcgctgccgcgtctggtgacgactacaacgatgtcgaccccgccccaccctccccagccgagctcacctccaccgactcggacgacgatgctccggccctgccaggcccggtcgacccgtccaagtgctccgccgcggggcctggcatcgctggcggctctgccggaacgccctccactttcaccgtcgtcgccaaggatcgccacagccggaggctcaccgccggtggggcgcgcgtgcacgtgcgtgtctcgcccgctgcgggagtcggcggggacgatctcgaaggcactgtcaaggacaacggggacggatcctacacggtcacctacgtcgtccccaagcgcggcaactacatggtacacgttgagcttgacggcgtctccgtcatggggagccccttccccgtcttcttcagcggttccaccgccacaccatcagccgctttccccaccgcgctacctgctgtcagctctgcctaccccaacatggttaaccagaccatgcctaatatgcccaattacacaggcgcgccctccagtgccttccccagcctcctcggggccatgcctagttccaccgctgggtcctcgggcggagtcatcctgccaggggttggtgcttcactgggggagatatgccgggactacatgaacgggaggtgcacaaaggtggagactgactgtaagttcacccatccaccgcaacagctgctgatgtcgttgcttgctgccacgacttctgtcagtgctctcgggcatgcgcccttggcgccctctgcggctgccatggcagctgctcaggccatcatggctgcccaggcactgcaggcacatgctgcacaggccaaagctgcaggtggaacttcaggctcaacaaacaaagctgatgaagctgatgccctgaagagaacagttcaaattagcaacctgagtccacttcttactgtggattatattaaacagctatttggattttgtggtaaagttgttgattgtgtcatgacagatacaaagcagattgtgtatgttgagtactccaaacctgaagaagcaactgcagcattggagctcaatagcaagagtgttggtggtcgtccattgaatgtggagatggctaaagctcttcctcctaaagcaaataataacttgcctatgatgatgcagcaagccgttcagttgcaacagatacaattccagcaggcactaatgatgcaacagtcaatagcagcccaacaggctgctgcacgtgctgccaccatgaaatctgccactgaagcagctgcagcaagggctgctgagataagcaggaagttgaaggcagagggctttggtggggacaacatggaagaaaaggatgccaaagggaagtcaggatcaaaatctcggtcaagatcacctatcaagtaccgtaggagcagacgatcccgctcctactctcccccagttggacgctcaagggagcatcgatcacgatcaccatcaagatctcgccactcaaagcatggtagtgatcgatcacatagggatgataaggatatgtatagcaggtccgggagaagggagagtgaacgatcccgtgatcatcattcatctcgttcaaggaggaacagaagcaaaagtagaagtccaaggcataagaagccctccagagttgactctaggtcacccaagaaacaaagactcgaaagtttaagcccatcaaaatcaaggtcggctcgggctggttcaaggtcaccacgacatcataagggaagcaaatcatcgccaactagtgatcgtcattctcgccatagcaggcattcaaggtccagatctcttgacagaaagcatcatcacagtgataaaaaggacagcagaaagtctgagattcaggacgacagaagatctcatagaggcagcagacgcgacaaagatgaaagttcagtgaaggatgatggggaaagatctcatagaggtagtagacgcgacaaagatgaaagttcagtgaaggatgatggggaaagatctcatagaggtagcagacgcaacaaagatgaaagttcagtgaaggatgatggggaaagatctcatagaggtagcagacgcgacaaagatgaaagttcagtgaaggatgatggggaaagatctcatagaggtagcagacgcggcaaagatgaaagttcagtgaaggatgatggggaaagatctcatagaggtagcagactcgacaaagatgaaagttcagtgaaggatgatggggaaagatctcatagaggtagcagacgcgacaaagatgaaagttcagtgaaggatgatggggaaagatctcatagaggtagcagacgcgacaaagatgaaaattcagtgaaggatgatggggaacgatctcatagaagcagtagaggtgacaacgatggaaggtctgtaaaagatccagtggaagataaaagggtggatagtaatgctgtcgcacataagaggagctctgaagatgaaatcctgaacaacaatagtagtaaccataagaaacatagacatgaagttggtttggaagttgatgaaggaaatgatgtgtgccctgctgtagcagaccctaatgggaaacatgaaactggaggcatgaagatcttcggagaactcgagtgctgttcggagcgctcatctgatatattaaaatgcttatgattccatgaagagttgttggagcacatttctgggatgtcggttgaagatacaaggaagtacacactcaagtaaagtccatatacaagactataaacaactcatattctaggctcttgcatttgaactggaatgctttggctagtaaaattgtccaaatatgcttgtccgccttctgacgcactttgtttgttagaagtcctgtttttgtatcttgtatcaggaatggttcaaaaagtttgacctgatataccatacttgtacactgtcttttgacagtcacatggaattgtgaattgtgatgtaagttttatatatcttgtcttctgcttaatt

SEQ ID NO: 34052 - DNA, 3103 bp, Zea Mays
cgcctcctcttcctcgttgcccctcggccctcatcccctgcatctgctccccctctaggcctctaccgaaccctagccggccagctgagcttattgaaggcaagctaggcgagagcagcgtccgccgccgcgctctcatggcggcgcccaaaccgatctgggtgcgccaggctgaggaggcaaagctcaagtccgaggcggagaccgctgccgccgccaaggccgccttcgacgccaccttcaaggccctcgctgccgcgtctggtgacgactacaacgatgtcgaccccgccccaccctccccagccgagctcacctccaccgactcggacgacgatgctccggccctgccaggcccggtcgacccgtccaagtgctccgccgcggggcctggcatcgctggcggctctgccggaacgccctccactttcaccgtcgtcgccaaggatcgccacagccggaggctcaccgccggtggggcgcgcgtgcacgtgcgtgtctcgcccgctgcgggagtcggcggggacgatctcgaaggcactgtcaaggacaacggggacggatcctacacggtcacctacgtcgtccccaagcgcggcaactacatggcgcgccctccagtgccttccccagcctcctcggggccatgcctagttccaccgctgggtcctcgggcggagtcatcctgccaggggttggtgcttcactgggggagatatgccgggactacatgaacgggaggtgcacaaaggtggagactgactgtaagttcacccatccaccgcaacagctgctgatgtcgttgcttgctgccacgacttctgtcagtgctctcgggcatgcgcccttggcgccctctgcggctgccatggcagctgctcaggccatcatggctgcccaggcactgcaggcacatgctgcacaggccaaagctgcaggtggaacttcaggctcaacaaacaaagctgatgaagctgatgccctgaagagaacagttcaaattagcaacctgagtccacttcttactgtggattatattaaacagctatttggattttgtggtaaagttgttgattgtgtcatgacagatacaaagcagattgtgtatgttgagtactccaaacctgaagaagcaactgcagcattggagctcaatagcaagagtgttggtggtcgtccattgaatgtggagatggctaaagctcttcctcctaaagcaaataataacttgcctatgatgatgcagcaagccgttcagttgcaacagatacaattccagcaggcactaatgatgcaacagtcaatagcagcccaacaggctgctgcacgtgctgccaccatgaaatctgccactgaagcagctgcagcaagggctgctgagataagcaggaagttgaaggcagagggctttggtggggacaacatggaagaaaaggatgccaaagggaagtcaggatcaccatcttcccctactcgtagatcaaaatctcggtcaagatcacctatcaagtaccgtaggagcagacgatcccgctcctactctcccccagttggacgctcaagggagcatcgatcacgatcaccatcaagatctcgccactcaaagcatggtagtgatcgatcacatagggatgataaggatatgtatagcaggtccgggagaagggagagtgaacgatcccgtgatcatcattcatctcgttcaaggaggaacagaagcaaaagtagaagtccaaggcataagaagccctccagagttgactctaggtcacccaagaaacaaagactcgaaagtttaagcccatcaaaatcaaggtcggctcgggctggttcaaggtcaccacgacatcataagggaagcaaatcatcgccaactagtgatcgtcattctcgccatagcaggcattcaaggtccagatctcttgacagaaagcatcatcacagtgataaaaaggacagcagaaagtctgagattcaggacgacagaagatctcatagaggcagcagacgcgacaaagatgaaagttcagtgaaggatgatggggaaagatctcatagaggtagtagacgcgacaaagatgaaagttcagtgaaggatgatggggaaagatctcatagaggtagcagacgcaacaaagatgaaagttcagtgaaggatgatggggaaagatctcatagaggtagcagacgcgacaaagatgaaagttcagtgaaggatgatggggaaagatctcatagaggtagcagacgcggcaaagatgaaagttcagtgaaggatgatggggaaagatctcatagaggtagcagactcgacaaagatgaaagttcagtgaaggatgatggggaaagatctcatagaggtagcagacgcgacaaagatgaaagttcagtgaaggatgatggggaaagatctcatagaggtagcagacgcgacaaagatgaaaattcagtgaaggatgatggggaacgatctcatagaagcagtagaggtgacaacgatggaaggtctgtaaaagatccagtggaagataaaagggtggatagtaatgctgtcgcacataagaggagctctgaagatgaaatcctgaacaacaatagtagtaaccataagaaacatagacatgaagttggtttggaagttgatgaaggaaatgatgtgtgccctgctgtagcagaccctaatgggaaacatgaaactggaggcatgaagatcttcggagaactcgagtgctgttcggagcgctcatctgatatattaaaatgcttatgattccatgaagagttgttggagcacatttctgggatgtcggttgaagatacaaggaagtacacactcaagtaaagtccatatacaagactataaacaactcatattctaggctcttgcatttgaactggaatgctttggctagtaaaattgtccaaatatgcttgtccgccttctgacgcactttgtttgttagaagtcctgtttttgtatcttgtatcaggaatggttcaaaaagtttgacctgatataccatacttgtacactgtcttttgacagtcacatggaattgtgaattgtgatgtaagttttatatatcttgtcttctgcttaatt

SEQ ID NO: 34053 - DNA, 508 bp, Zea Mays
caccacgtcgttaggcaaccgccttgaggtgctaatatctatcagacctggaaacgcgccactccctgctgaaaaccatgggtttgggacagtcgagtcatttgctgaaatcttgacatgaagggaggatgcatcctcaacatgcatgcatgctgtgctatttaaagatggaaacggattgaactagtttcaaaaggcagatggaatggtttcatggccatgatttgcatcttcatactagctttatttacattgcccatgttcagtttgtcggagaccataaacacatgggatcaccaagttatcttacccttgattggtttcctttaactcgtccggtttgctgttcgtttcttcagtttcgtcaggcattgggtctgttagtcagggccaggggcaaagctaggtagaagcctgtggatgcacatgcaccacaattttttgtaaaactagtgttttgtccaaatttttaccatatatgcaccacctacaacttattactacgcat

SEQ ID NO: 34054 - DNA, 1083 bp, Zea Mays
cggcggtcccctccacccgggatccatgtggacgtatgcggatgcggtgagcaggtagcatccactgcactctgcagaggaggaaggaagaggaccgacaaagatggggatggcattgccattgccgccggcgtcacaggggttgttgcgttccaggaggatgagcttcctcgcttcgccgccgctgtcgctcaaggcagccggtggaatcagcatcccatgcccgtggcgattggatggccgccgtccacgagcagccccagccagtgttcctcgactagcatcagtgcgaagcgtggtgctggacatcgagggcacgacgagccccatctcgttcgtgacggacgtgctcttcccctacgcccgcgacaacgtccgcacgcacctggacgccacctactccacccgcgagaccaaggacgacatcgccctgctgcgcgctcaggtcgagcaggacctagccgagggcgtccccggcgccgtcccggtcccgcccgacggcgccggcaaggaccgcgtcgtcgacgccctggtcgccaacgtggaggccatgatcgcggcggataggaagataacctcgctgaagcagttgcaggccttgaggtgctaatatctatcagacctggaaacgcgccactccctgctgaaaaccatgggtttgggacagtcgagtcatttgctgaaatcttgacatgaagggaggatgcatcctcaacatgcatgcatgctgtgctatttaaagatggaaacggattgaactagtttcaaaaggcagatggaatggtttcatggccatgatttgcatcttcatactagctttatttacattgcccatgttcagtttgtcggagaccataaacacatgggatcaccaagttatcttacccttgattggtttcctttaactcgtccggtttgctgttcgtttcttcagtttcgtcaggcattgggtctgttagtcagggccaggggcaaagctaggtagaagcctgtggatgcacatgcaccacaattttttgtaaaactagtgttttgtccaaatttttaccatatatgcaccacctacaacttattactacgcat

SEQ ID NO: 34055 - DNA, 1420 bp, Zea Mays
cggcggtcccctccacccgggatccatgtggacgtatgcggatgcggtgagcaggtagcatccactgcactctgcagaggaggaaggaagaggaccgacaaagatggggatggcattgccattgccgccggcgtcacaggggttgttgcgttccaggaggatgagcttcctcgcttcgccgccgctgtcgctcaaggcagccggtggaatcagcatcccatgcccgtggcgattggatggccgccgtccacgagcagccccagccagtgttcctcgactagcatcagtgcgaagcgtggtgctggacatcgagggcacgacgagccccatctcgttcgtgacggacgtgctcttcccctacgcccgcgacaacgtccgcacgcacctggacgccacctactccacccgcgagaccaaggacgacatcgccctgctgcgcgctcaggtcgagcaggacctagccgagggcgtccccggcgccgtcccggtcccgcccgacggcgccggcaaggaccgcgtcgtcgacgccctggtcgccaacgtggaggccatgatcgcggcggataggaagataacctcgctgaagcagttgcagggccacatctggaggactgggttcgagtgccaagaaatcaagggggtggtgttcgacgacgtgccgccggctctcgagaggtggcacgccagcggcatcaagtcgcagacgtacatctattcaagtggcagcagggaagcccagaggctcatcttcgggaacactacctacggcgaccttagaaggcacctgtgcggattttttgacgcaacaattgggaccaagagagacgctcgcagctactatgagatctggcagacggtcggggtggaccggccgtctcagatactgttcctcacggacgtgtgccaggaagccacggcagcacaggctgcaggccttgaggtgctaatatctatcagacctggaaacgcgccactccctgctgaaaaccatgggtttgggacagtcgagtcatttgctgaaatcttgacatgaagggaggatgcatcctcaacatgcatgcatgctgtgctatttaaagatggaaacggattgaactagtttcaaaaggcagatggaatggtttcatggccatgatttgcatcttcatactagctttatttacattgcccatgttcagtttgtcggagaccataaacacatgggatcaccaagttatcttacccttgattggtttcctttaactcgtccggtttgctgttcgtttcttcagtttcgtcaggcattgggtctgttagtcagggccaggggcaaagctaggtagaagcctgtggatgcacatgcaccacaattttttgtaaaactagtgttttgtccaaatttttaccatatatgcaccacctacaacttattactacgcat

SEQ ID NO: 34056 - DNA, 1573 bp, Zea Mays
cggcggtcccctccacccgggatccatgtggacgtatgcggatgcggtgagcaggtagcatccactgcactctgcagaggaggaaggaagaggaccgacaaagatggggatggcattgccattgccgccggcgtcacaggggttgttgcgttccaggaggatgagcttcctcgcttcgccgccgctgtcgctcaaggcagccggtggaatcagcatcccatgcccgtggcgattggatggccgccgtccacgagcagccccagccagtgttcctcgactagcatcagtggtgaatgcgcagtcacttatcctcgatttccttgccgtcgcactcgcaccacatatatgcccgtagcgcaacgcaaccgggcgcccaaaacaaaaaaaagctgcgcgctctgatccgaatcgcactcgctggcacgccgcagcgaagcgtggtgctggacatcgagggcacgacgagccccatctcgttcgtgacggacgtgctcttcccctacgcccgcgacaacgtccgcacgcacctggacgccacctactccacccgcgagaccaaggacgacatcgccctgctgcgcgctcaggtcgagcaggacctagccgagggcgtccccggcgccgtcccggtcccgcccgacggcgccggcaaggaccgcgtcgtcgacgccctggtcgccaacgtggaggccatgatcgcggcggataggaagataacctcgctgaagcagttgcagtcgcagacgtacatctattcaagtggcagcagggaagcccagaggctcatcttcgggaacactacctacggcgaccttagaaggcacctgtgcggattttttgacgcaacaattgggtacgctgtacatctagtatcacacctttccgctcactgatgattcgtatgcgtcactgtgactatggctgttaatctatcctttttggcctggcgcgcgtctgcaacgaaaggaccaagagagacgctcgcagctactatgagatctggcagacggtcggggtggaccggccgtctcagatactgttcctcacggacgtgtgccaggaagccacggcagcacaggctgcaggccttgaggtgctaatatctatcagacctggaaacgcgccactccctgctgaaaaccatgggtttgggacagtcgagtcatttgctgaaatcttgacatgaagggaggatgcatcctcaacatgcatgcatgctgtgctatttaaagatggaaacggattgaactagtttcaaaaggcagatggaatggtttcatggccatgatttgcatcttcatactagctttatttacattgcccatgttcagtttgtcggagaccataaacacatgggatcaccaagttatcttacccttgattggtttcctttaactcgtccggtttgctgttcgtttcttcagtttcgtcaggcattgggtctgttagtcagggccaggggcaaagctaggtagaagcctgtggatgcacatgcaccacaattttttgtaaaactagtgttttgtccaaatttttaccatatatgcaccacctacaacttattactacgcat

SEQ ID NO: 34057 - DNA, 1522 bp, Zea Mays
gccgtgaaaactacgcagagcagtaaaataaccgcagttaccagctgacctccctcaattcctcggccatccgtacgtctccgccttcggggctttcttcttggtctcgttccttggctggacaaaacacctgtggcagcggccgcgctgcttgcctcgccttgctctcggttcgtggggcatggcggcttcgccggcttgtgctccggggctcatctccggccccaccctccctcccctgcccgttgccttccgctgctactgggcccaaaagccctcctccgcgtcgacctcctccaggcgcccgtgccgcaggcggttcgttcccgttgcagctgcctccacccgcacctcctctgcggctgctcggggcctcgacgccgacgacttccgccacccgctggacaagcagaacactctgctgctgagagcaattcccgggctcaacgacgtgggcaaagctttgctaggacccgtctcggagcaagttatggtactccagaacattggaacatcagttctcgtctccccgaaccagcttccagatctccaccaactgctggttgaggctgcgaagctcttgaacaccgaagctcctgacttgtacataaggcagaatcctgttccaaatgcctacaccttagcaatcaacggcaaaaaaccattcattgtcgttcacacaagccttgtggagctgcttactccaagggaattgcaggctgttttggctcatgagctgggtcacctcaagtgcgatcatggtgtttggctcacttttgccaatatactcacaatgggagcatacactgtccctggttttggcatggttgctggcttcctggaagagcagctatacagatggctacgagctgcagagctgacttgtgacagggcagctcttcttgtggtgcaagatccgaagtcatctctgttctgatgaaattggccggaggatgcccatctcttgccgacaagctaaatgtggatgccttcctggagcaagctcgttcgtacgacaaggctgcatcgaacccagttgggtggtacatccggaatgcacaaaccagagagctttcacaccctttgcctgtgatgcgagccagagagatcgatgagtggtcaagaagccaggagtacaagaccgtaatgcaaaaaatgtttcagatggggctgaacagagtatagttagtggcgacacatacgaagaggactgtagagtctgtagcttgtgtatggaagggaatgtctgtatatggagaaggctggtgtttctggaaaaaaaacagatacaaacatagacatattgtatatatttgcagttgaatttagtctccttgtatatgatatatttttttcttttttgttactgtgtaatactgtaactagaatgaataaaagtttgtttgagtttgccggataactggaaagatcggcatggttagcctttccaaagtcccgagtcccgtgacaatgtgatgcataagaggcgaggctattatgaatcagcaagctacggctagta

SEQ ID NO: 34058 - DNA, 1503 bp, Zea Mays
gccgtgaaaactacgcagagcagtaaaataaccgcagttaccagctgacctccctcaattcctcggccatccgtacgtctccgccttcggggctttcttcttggtctcgttccttggctggacaaaacacctgtggcagcggccgcgctgcttgcctcgccttgctctcggttcgtggggcatggcggcttcgccggcttgtgctccggggctcatctccggccccaccctccctcccctgcccgttgccttccgctgctactgggcccaaaagccctcctccgcgtcgacctcctccaggcgcccgtgccgcaggcggttcgttcccgttgcagctgcctccacccgcacctcctctgcggctgctcggggcctcgacgccgacgacttccgccacccgctggacaagcagaacactctgctgctgagagcaattcccgggctcaacgacgtgggcaaagctttgctaggacccgtctcggagcaagttatggtactccagaacattggaacatcagttctcgtctccccgaaccagcttccagatctccaccaactgctggttgaggctgcgaagctcttgaacaccgaagctcctgacttgtacataaggcagaatcctgttccaaatgcctacaccttagcaatcaacggcaaaaaaccattcattgtcgttcacacaagccttgtggagctgcttactccaagggaattgcaggctgttttggctcatgagctgggtcacctcaagtgcgatcatggtgtttggctcacttttgccaatatactcacaatgggagcatacactgtccctggttttggcatggttgctggcttcctggaagagcagctatacagatggctacgagctgcagagctgacttgtgacagggcagctcttcttgtggtgcaagatccgaagaggtagtcatctctgttctgatgaaattggccggaggatgcccatctcttgccgacaagctaaatgtggatgccttcctggagcaagctcgttcgtacgacaaggctgcatcgaacccagaatgcacaaaccagagagctttcacaccctttgcctgtgatgcgagccagagagatcgatgagtggtcaagaagccaggagtacaagaccgtaatgcaaaaaatgtttcagatggggctgaacagagtatagttagtggcgacacatacgaagagagtctgtagcttgtgtatggaagggaatgtctgtatatggagaaggctggtgtttctggaaaaaaaacagatacaaacatagacatattgtatatatttgcagttgaatttagtctccttgtatatgatatatttttttcttttttgttactgtgtaatactgtaactagaatgaataaaagtttgtttgagtttgccggataactggaaagatcggcatggttagcctttccaaagtcccgagtcccgtgacaatgtgatgcataagaggcgaggctattatgaatcagcaagctacggctagta

SEQ ID NO: 34059 - DNA, 1528 bp, Zea Mays
gccgtgaaaactacgcagagcagtaaaataaccgcagttaccagctgacctccctcaattcctcggccatccgtacgtctccgccttcggggctttcttcttggtctcgttccttggctggacaaaacacctgtggcagcggccgcgctgcttgcctcgccttgctctcggttcgtggggcatggcggcttcgccggcttgtgctccggggctcatctccggccccaccctccctcccctgcccgttgccttccgctgctactgggcccaaaagccctcctccgcgtcgacctcctccaggcgcccgtgccgcaggcggttcgttcccgttgcagctgcctccacccgcacctcctctgcggctgctcggggcctcgacgccgacgacttccgccacccgctggacaagcagaacactctgctgctgagagcaattcccgggctcaacgacgtgggcaaagctttgctaggacccgtctcggagcaagttatggtactccagaacattggaacatcagttctcgtctccccgaaccagcttccagatctccaccaactgctggttgaggctgcgaagctcttgaacaccgaagctcctgacttgtacataaggcagaatcctgttccaaatgcctacaccttagcaatcaacggcaaaaaaccattcattgtcgttcacacaagccttgtggagctgcttactccaagggaattgcaggctgttttggctcatgagctgggtcacctcaagtgcgatcatggtgtttggctcacttttgccaatatactcacaatgggagcatacactgtccctggttttggcatggttgctggcttcctggaagagcagctatacagatggctacgagctgcagagctgacttgtgacagggcagctcttcttgtggtgcaagatccgaagaggtagtcatctctgttctgatgaaattggccggaggatgcccatctcttgccgacaagctaaatgtggatgccttcctggagcaagctcgttcgtacgacaaggctgcatcgaacccagttgggtggtacatccggaatgcacaaaccagagagctttcacaccctttgcctgtgatgcgagccagagagatcgatgagtggtcaagaagccaggagtacaagaccgtaatgcaaaaaatgtttcagatggggctgaacagagtatagttagtggcgacacatacgaagaggactgtagagtctgtagcttgtgtatggaagggaatgtctgtatatggagaaggctggtgtttctggaaaaaaaacagatacaaacatagacatattgtatatatttgcagttgaatttagtctccttgtatatgatatatttttttcttttttgttactgtgtaatactgtaactagaatgaataaaagtttgtttgagtttgccggataactggaaagatcggcatggttagcctttccaaagtcccgagtcccgtgacaatgtgatgcataagaggcgaggctattatgaatcagcaagctacggctagta

SEQ ID NO: 34060 - DNA, 694 bp, Zea Mays
cacaaatccagtttcatatgaaggataacaacattcagaaataccgagatagataaatggcacaggaaaatacaggtgacaacgggtgctgctgcacttaaaggaaagctacatgcatttaatcagaacattagtgatcaagttgctggttacatgagagatccaagccggatgattaacaggatgtacttgaccaactctgctgttagagtatttggaaaggatgtgggagaacctggaacagctgaggagagtcggcattttactctctaaaaaagcagcaggttaaaaagagaaagcttgtcgatcgtcgtgcttcgaagagcaggaagatacggtaccatgtccacgagaagatcactaatttcatggcaccggagcccatggttcttcctccaatggctccgaagttgtttgagaatttatttgggaatagcagctagaatccataaactgcagtaggtttacatttctttctgttgccttttctacttctataaactgtagtaggtatgatgtcactagacttagactgaattgtaagttttgatgtcctcatcagttttgtgcgtagacaagcagagcctagttcaccaatcaaattatgcttcgatttgggcctgatgagtgccatttaccggtggacccgcggtgagtcgtgatatacgtgattatcgaaaaatgagttttccta

SEQ ID NO: 34061 - DNA, 1361 bp, Zea Mays
cacaaatccagtttcatatgaaggataacaacattcagaaataccgagatagataaatggcacaggaaaatacaggtgacaacgggtgctgctgcacttaaaggaaagctacatgcatttaatcagaacattagtgatcaagttgctggttacatgagagatccaagccggatgattaacaggatgtacttgaccaactctgctgttagagtatttggaaaggatgtgggagaacctggaacagctgaggaggttcgagcatttactacatttcccttaaaaatatttcaaaccttatttggtctccttcagtctactgaagtgtaacggcctgtagttaattgaagctcatttcttcccctgagatgatttccccttttctatcataaccttggttatttatctgttacactaacattgctatcagaatgctactatttgtacaaatagaagatataatgcggactacactacctgagcttatttcatcgcctttgctataactcaggggcacattatggaaggtgatcctgaacttattgatgattctgagttttatcaacaacttctcaaggagttccttgagtcatgtgatagaggggcatcaagttagttcatttttaattattgaacttattattatttatttacacacataggcgtacacctatcgatcccggattcgattgaaatacattagggccaggatgacctattatccgtctgtttccacccctagaatttatttatatatcaacatgcatactgaaacatggttcatctaacagaagatacatgtttcaagaatttcagttttcatttgtatattcataaactgttaccattctaagatttgtaaaaatgtatatgtttgtactttcaccttaagcgtccaccaaataccatttattgtatgcagagtcggcattttactctctaaaaaagcagcaggttaaaaagagaaagcttgtcgatcgtcgtgcttcgaagagcaggaagatacggtaccatgtccacgagaagatcactaatttcatggcaccggagcccatggttcttcctccaatggctccgaagttgtttgagaatttatttgggaatagcagctagaatccataaactgcagtaggtttacatttctttctgttgccttttctacttctataaactgtagtaggtatgatgtcactagacttagactgaattgtaagttttgatgtcctcatcagttttgtgcgtagacaagcagagcctagttcaccaatcaaattatgcttcgatttgggcctgatgagtgccatttaccggtggacccgcggtgagtcgtgatatacgtgattatcgaaaaatgagttttccta

SEQ ID NO: 34062 - DNA, 1682 bp, Zea Mays
cctattttgattgatgagtgccaactgttactttctaaaaaacggcaccgtacggtaaggtttgttttcttccattcagtttgttgtactgtggagatcaaactagctaagggcagagccaaatttggggattcttcaactgaagccttgtatagatatagtttgaaagatgatgaacgaacacagagaggaggatgccttgagaggtcaagcagtcaaaaaccagaaggcgatatgggacaagaccatggaaatgagattcttgctgcagaaggcgttttctacttccaacaagttaccccaggaatccatcagaacaaggttttgcaatcatgataagcagatagagcaagcatatgatgatcttttgaattcgacgaaacatactttgagcagcatgatggagctgcaggaggctttgcttgagagtaatcaggctacaaaggatgccaatgaaattccttctgcctcaaatggagacaatgacgagtggtcagaagtacagagattgcaggcaaggataacaacattcagaaataccgagatagataaatggcacaggaaaatacaggtgacaacgggtgctgctgcacttaaaggaaagctacatgcatttaatcagaacattagtgatcaagttgctggttacatgagagatccaagccggatgattaacaggatgtacttgaccaactctgctgttagagtatttggaaaggatgtgggagaacctggaacagctgaggagaatgctactatttgtacaaatagaagatataatgcggactacactacctgagcttatttcatcgcctttgctataactcaggggcacattatggaaggtgatcctgaacttattgatgattctgagttttatcaacaacttctcaaggagttccttgagtcatgtgatagaggggcatcaagttagttcatttttaattattgaacttattattatttatttacacacataggcgtacacctatcgatcccggattcgattgaaatacattagggccaggatgacctattatccgtctgtttccacccctagaatttatttatatatcaacatgcatactgaaacatggttcatctaacagaagatacatgtttcaagaatttcagttttcatttgtatattcataaactgttaccattctaagatttgtaaaaatgtatatgtttgtactttcaccttaagcgtccaccaaataccatttattgtatgcagagtcggcattttactctctaaaaaagcagcaggttaaaaagagaaagcttgtcgatcgtcgtgcttcgaagagcaggaagatacggtaccatgtccacgagaagatcactaatttcatggcaccggagcccatggttcttcctccaatggctccgaagttgtttgagaatttatttgggaatagcagctagaatccataaactgcagtaggtttacatttctttctgttgccttttctacttctataaactgtagtaggtatgatgtcactagacttagactgaattgtaagttttgatgtcctcatcagttttgtgcgtagacaagcagagcctagttcaccaatcaaattatgcttcgatttgggcctgatgagtgccatttaccggtggacccgcggtgagtcgtgatatacgtgattatcgaaaaatgagttttccta

SEQ ID NO: 34063 - DNA, 1884 bp, Zea Mays
cctattttgattgatgagtgccaactgttactttctaaaaaacggcaccgtacgatatagtttgaaagatgatgaacgaacacagagaggaggatgccttgagaggtcaagcagtcaaaaaccagaaggcgatatgggacaagaccatggaaatgagattcttgctgcagaaggcgttttctacttccaacaagttaccccaggaatccatcagaacaaggttttgcaatcatgataagcagatagagcaagcatatgatgatcttttgaattcgacgaaacatactttgagcagcatgatggagctgcaggaggttcagttagttgcacacattgttttcctttcactcctatgattttcctcaatatgatcaaaatgtttcttttgcaaataataattgaaatgtttctcattgtactcaacctcttaaactacctataggctttgcttgagagtaatcaggctacaaaggatgccaatgaaattccttctgcctcaaatggagacaatgacgagtggtcagaagtacagagattgcaggcaaggataacaacattcagaaataccgagatagataaatggcacaggaaaatacaggtgacaacgggtgctgctgcacttaaaggaaagctacatgcatttaatcagaacattagtgatcaagttgctggttacatgagagatccaagccggatgattaacaggatgtacttgaccaactctgctgttagagtatttggaaaggatgtgggagaacctggaacagctgaggaggttcgagcatttactacatttcccttaaaaatatttcaaaccttatttggtctccttcagtctactgaagtgtaacggcctgtagttaattgaagctcatttcttcccctgagatgatttccccttttctatcataaccttggttatttatctgttacactaacattgctatcagaatgctactatttgtacaaatagaagatataatgcggactacactacctgagcttatttcatcgcctttgctataactcaggggcacattatggaaggtgatcctgaacttattgatgattctgagttttatcaacaacttctcaaggagttccttgagtcatgtgatagaggggcatcaagttagttcatttttaattattgaacttattattatttatttacacacataggcgtacacctatcgatcccggattcgattgaaatacattagggccaggatgacctattatccgtctgtttccacccctagaatttatttatatatcaacatgcatactgaaacatggttcatctaacagaagatacatgtttcaagaatttcagttttcatttgtatattcataaactgttaccattctaagatttgtaaaaatgtatatgtttgtactttcaccttaagcgtccaccaaataccatttattgtatgcagagtcggcattttactctctaaaaaagcagcaggttaaaaagagaaagcttgtcgatcgtcgtgcttcgaagagcaggaagatacggtaccatgtccacgagaagatcactaatttcatggcaccggagcccatggttcttcctccaatggctccgaagttgtttgagaatttatttgggaatagcagctagaatccataaactgcagtaggtttacatttctttctgttgccttttctacttctataaactgtagtaggtatgatgtcactagacttagactgaattgtaagttttgatgtcctcatcagttttgtgcgtagacaagcagagcctagttcaccaatcaaattatgcttcgatttgggcctgatgagtgccatttaccggtggacccgcggtgagtcgtgatatacgtgattatcgaaaaatgagttttccta

SEQ ID NO: 34064 - DNA, 1311 bp, Zea Mays
attatcgttgcatcaacgcatcctattttgattgatgagtgccaactgttactttctaaaaaacggcaccgtacggtaaggtttgttttcttccattcagtttgttgtactgtggagatcaaactagctaagggcagagccaaatttggggattcttcaactgaagccttgtatagatatagtttgaaagatgatgaacgaacacagagaggaggatgccttgagaggtcaagcagtcaaaaaccagaaggcgatatgggacaagaccatggaaatgagattcttgctgcagaaggcgttttctacttccaacaagttaccccaggaatccatcagaacaaggttttgcaatcatgataagcagatagagcaagcatatgatgatcttttgaattcgacgaaacatactttgagcagcatgatggagctgcaggaggctttgcttgagagtaatcaggctacaaaggatgccaatgaaattccttctgcctcaaatggagacaatgacgagtggtcagaagtacagagattgcaggcaaggataacaacattcagaaataccgagatagataaatggcacaggaaaatacaggtgacaacgggtgctgctgcacttaaaggaaagctacatgcatttaatcagaacattagtgatcaagttgctggttacatgagagatccaagccggatgattaacaggatgtacttgaccaactctgctgttagagtatttggaaaggatgtgggagaacctggaacagctgaggaggggcacattatggaaggtgatcctgaacttattgatgattctgagttttatcaacaacttctcaaggagttccttgagtcatgtgatagaggggcatcaaagtcggcattttactctctaaaaaagcagcaggttaaaaagagaaagcttgtcgatcgtcgtgcttcgaagagcaggaagatacggtaccatgtccacgagaagatcactaatttcatggcaccggagcccatggttcttcctccaatggctccgaagttgtttgagaatttatttgggaatagcagctagaatccataaactgcagtaggtttacatttctttctgttgccttttctacttctataaactgtagtaggtatgatgtcactagacttagactgaattgtaagttttgatgtcctcatcagttttgtgcgtagacaagcagagcctagttcaccaatcaaattatgcttcgatttgggcctgatgagtgccatttaccggtggacccgcggtgagtcgtgatatacgtgattatcgaaaaatgagttttccta

SEQ ID NO: 34065 - DNA, 1625 bp, Zea Mays
attattatcgttgcatcaacgcatcctattttgattgatgagtgccaactgttactttctaaaaaacggcaccgtacggtaaggtttgttttcttccattcagtttgttgtactgtggagatcaaactagctaagggcagagccaaatttggggattcttcaactgaagccttgtatagatatagtttgaaagatgatgaacgaacacagagaggaggatgccttgagaggtcaagcagtcaaaaaccagaaggcgatatgggacaagaccatggaaatgagattcttgctgcagaaggcgttttctacttccaacaagttaccccaggaatccatcagaacaaggttttgcaatcatgataagcagatagagcaagcatatgatgatcttttgaattcgacgaaacatactttgagcagcatgatggagctgcaggaggctttgcttgagagtaatcaggctacaaaggatgccaatgaaattccttctgcctcaaatggagacaatgacgagtggtcagaagtacagagattgcaggcaaggataacaacattcagaaataccgagatagataaatggcacaggaaaatacaggtgacaacgggtgctgctgcacttaaaggaaagctacatgcatttaatcagaacattagtgatcaagttgctggttacatgagagatccaagccggatgattaacaggatgtacttgaccaactctgctgttagagtatttggaaaggatgtgggagaacctggaacagctgaggaggggcacattatggaaggtgatcctgaacttattgatgattctgagttttatcaacaacttctcaaggagttccttgagtcatgtgatagaggggcatcaagttagttcatttttaattattgaacttattattatttatttacacacataggcgtacacctatcgatcccggattcgattgaaatacattagggccaggatgacctattatccgtctgtttccacccctagaatttatttatatatcaacatgcatactgaaacatggttcatctaacagaagatacatgtttcaagaatttcagttttcatttgtatattcataaactgttaccattctaagatttgtaaaaatgtatatgtttgtactttcaccttaagcgtccaccaaataccatttattgtatgcagagtcggcattttactctctaaaaaagcagcaggttaaaaagagaaagcttgtcgatcgtcgtgcttcgaagagcaggaagatacggtaccatgtccacgagaagatcactaatttcatggcaccggagcccatggttcttcctccaatggctccgaagttgtttgagaatttatttgggaatagcagctagaatccataaactgcagtaggtttacatttctttctgttgccttttctacttctataaactgtagtaggtatgatgtcactagacttagactgaattgtaagttttgatgtcctcatcagttttgtgcgtagacaagcagagcctagttcaccaatcaaattatgcttcgatttgggcctgatgagtgccatttaccggtggacccgcggtgagtcgtgatatacgtgattatcgaaaaatgagttttccta

SEQ ID NO: 34066 - DNA, 1467 bp, Zea Mays
gcacagtgagccagacagcgaatatagtttgaaagatgatgaacgaacacagagaggaggatgccttgagaggtcaagcagtcaaaaaccagaaggcgatatgggacaagaccatggaaatgagattcttgctgcagaaggcgttttctacttccaacaagttaccccaggaatccatcagaacaaggttttgcaatcatgataagcagatagagcaagcatatgatgatcttttgaattcgacgaaacatactttgagcagcatgatggagctgcaggaggctttgcttgagagtaatcaggctacaaaggatgccaatgaaattccttctgcctcaaatggagacaatgacgagtggtcagaagtacagagattgcaggcaaggataacaacattcagaaataccgagatagataaatggcacaggaaaatacaggtgacaacgggtgctgctgcacttaaaggaaagctacatgcatttaatcagaacattagtgatcaagttgctggttacatgagagatccaagccggatgattaacaggatgtacttgaccaactctgctgttagagtatttggaaaggatgtgggagaacctggaacagctgaggaggggcacattatggaaggtgatcctgaacttattgatgattctgagttttatcaacaacttctcaaggagttccttgagtcatgtgatagaggggcatcaagttagttcatttttaattattgaacttattattatttatttacacacataggcgtacacctatcgatcccggattcgattgaaatacattagggccaggatgacctattatccgtctgtttccacccctagaatttatttatatatcaacatgcatactgaaacatggttcatctaacagaagatacatgtttcaagaatttcagttttcatttgtatattcataaactgttaccattctaagatttgtaaaaatgtatatgtttgtactttcaccttaagcgtccaccaaataccatttattgtatgcagagtcggcattttactctctaaaaaagcagcaggttaaaaagagaaagcttgtcgatcgtcgtgcttcgaagagcaggaagatacggtaccatgtccacgagaagatcactaatttcatggcaccggagcccatggttcttcctccaatggctccgaagttgtttgagaatttatttgggaatagcagctagaatccataaactgcagtaggtttacatttctttctgttgccttttctacttctataaactgtagtaggtatgatgtcactagacttagactgaattgtaagttttgatgtcctcatcagttttgtgcgtagacaagcagagcctagttcaccaatcaaattatgcttcgatttgggcctgatgagtgccatttaccggtggacccgcggtgagtcgtgatatacgtgattatcgaaaaatgagttttccta

SEQ ID NO: 34067 - DNA, 1777 bp, Zea Mays
aatcccgagtctcgagcgagtagcgacggccgcgcctgcgcctgcctgcgtcttccgtggcggcgcccctacctctcgaacccgtcaggcggtctggccgacctcgcttcctcggctagctacctactcgccagcgtctattgtccagcaggcgcccagctcccaagcggccgcagtgcccctgcttctgcccttgcacgttcggcccctgtgctgcactgcacagtaaggtttgttttcttccattcagtttgttgtactgtggagatcaaactagctaagggcagagccaaatttggggattcttcaactgaagccttgtatagatatagtttgaaagatgatgaacgaacacagagaggaggatgccttgagaggtcaagcagtcaaaaaccagaaggcgatatgggacaagaccatggaaatgagattcttgctgcagaaggcgttttctacttccaacaagttaccccaggaatccatcagaacaaggttttgcaatcatgataagcagatagagcaagcatatgatgatcttttgaattcgacgaaacatactttgagcagcatgatggagctgcaggaggttcagctttgcttgagagtaatcaggctacaaaggatgccaatgaaattccttctgcctcaaatggagacaatgacgagtggtcagaagtacagagattgcaggcaaggataacaacattcagaaataccgagatagataaatggcacaggaaaatacaggtgacaacgggtgctgctgcacttaaaggaaagctacatgcatttaatcagaacattagtgatcaagttgctggttacatgagagatccaagccggatgattaacaggatgtacttgaccaactctgctgttagagtatttggaaaggatgtgggagaacctggaacagctgaggaggggcacattatggaaggtgatcctgaacttattgatgattctgagttttatcaacaacttctcaaggagttccttgagtcatgtgatagaggggcatcaagttagttcatttttaattattgaacttattattatttatttacacacataggcgtacacctatcgatcccggattcgattgaaatacattagggccaggatgacctattatccgtctgtttccacccctagaatttatttatatatcaacatgcatactgaaacatggttcatctaacagaagatacatgtttcaagaatttcagttttcatttgtatattcataaactgttaccattctaagatttgtaaaaatgtatatgtttgtactttcaccttaagcgtccaccaaataccatttattgtatgcagagtcggcattttactctctaaaaaagcagcaggttaaaaagagaaagcttgtcgatcgtcgtgcttcgaagagcaggaagatacggtaccatgtccacgagaagatcactaatttcatggcaccggagcccatggttcttcctccaatggctccgaagttgtttgagaatttatttgggaatagcagctagaatccataaactgcagtaggtttacatttctttctgttgccttttctacttctataaactgtagtaggtatgatgtcactagacttagactgaattgtaagttttgatgtcctcatcagttttgtgcgtagacaagcagagcctagttcaccaatcaaattatgcttcgatttgggcctgatgagtgccatttaccggtggacccgcggtgagtcgtgatatacgtgattatcgaaaaatgagttttccta

SEQ ID NO: 34068 - DNA, 1655 bp, Zea Mays
gcccccacccggccgtccacctaatcccgagtctcgagcgagtagcgacggccgcgcctgcgcctgcctgcgtcttccgtggcggcgcccctacctctcgaacccgtcaggcggtctggccgacctcgcttcctcggctagctacctactcgccagcgtctattgtccagcaggcgcccagctcccaagcggccgcagtgcccctgcttctgcccttgcacgttcggcccctgtgctgcactgcacagtaaggtttgttttcttccattcagtttgttgtactgtggagatcaaactagctaagggcagagccaaatttggggattcttcaactgaagccttgtatagatatagtttgaaagatgatgaacgaacacagagaggaggatgccttgagaggtcaagcagtcaaaaaccagaaggcgatatgggacaagaccatggaaatgagattcttgctgcagaaggcgttttctacttccaacaagttaccccaggaatccatcagaacaaggttttgcaatcatgataagcagatagagcaagcatatgatgatcttttgaattcgacgaaacatactttgagcagcatgatggagctgcaggaggctttgcttgagagtaatcaggctacaaaggatgccaatgaaattccttctgcctcaaatggagacaatgacgagtggtcagaagtacagagattgcaggcaaggataacaacattcagaaataccgagatagataaatggcacaggaaaatacaggtgacaacgggtgctgctgcacttaaaggaaagctacatgcatttaatcagaacattagtgatcaagttgctggttacatgagagatccaagccggatgattaacaggatgtacttgaccaactctgctgttagagtatttggaaaggatgtgggagaacctggaacagctgaggaggttcgagcatttactacatttcccttaaaaatatttcaaaccttatttggtctccttcagtctactgaagtgtaacggcctgtagttaattgaagctcatttcttcccctgagatgatttccccttttctatcataaccttggttatttatctgttacactaacattgctatcagaatgctactatttgtacaaatagaagatataatgcggactacactacctgagcttatttcatcgcctttgctataactcaggggcacattatggaagagtcggcattttactctctaaaaaagcagcaggttaaaaagagaaagcttgtcgatcgtcgtgcttcgaagagcaggaagatacggtaccatgtccacgagaagatcactaatttcatggcaccggagcccatggttcttcctccaatggctccgaagttgtttgagaatttatttgggaatagcagctagaatccataaactgcagtaggtttacatttctttctgttgccttttctacttctataaactgtagtaggtatgatgtcactagacttagactgaattgtaagttttgatgtcctcatcagttttgtgcgtagacaagcagagcctagttcaccaatcaaattatgcttcgatttgggcctgatgagtgccatttaccggtggacccgcggtgagtcgtgatatacgtgattatcgaaaaatgagttttccta

SEQ ID NO: 34069 - DNA, 1813 bp, Zea Mays
ccagcccccacccggccgtccacctaatcccgagtctcgagcgagtagcgacggccgcgcctgcgcctgcctgcgtcttccgtggcggcgcccctacctctcgaacccgtcaggcggtctggccgacctcgcttcctcggctagctacctactcgccagcgtctattgtccagcaggcgcccagctcccaagcggccgcagtgcccctgcttctgcccttgcacgttcggcccctgtgctgcactgcacagtgagccagacagcgagtaaggtttgttttcttccattcagtttgttgtactgtggagatcaaactagctaagggcagagccaaatttggggattcttcaactgaagccttgtatagatatagtttgaaagatgatgaacgaacacagagaggaggatgccttgagaggtcaagcagtcaaaaaccagaaggcgatatgggacaagaccatggaaatgagattcttgctgcagaaggcgttttctacttccaacaagttaccccaggaatccatcagaacaaggttttgcaatcatgataagcagatagagcaagcatatgatgatcttttgaattcgacgaaacatactttgagcagcatgatggagctgcaggaggctttgcttgagagtaatcaggctacaaaggatgccaatgaaattccttctgcctcaaatggagacaatgacgagtggtcagaagtacagagattgcaggcaaggataacaacattcagaaataccgagatagataaatggcacaggaaaatacaggtgacaacgggtgctgctgcacttaaaggaaagctacatgcatttaatcagaacattagtgatcaagttgctggttacatgagagatccaagccggatgattaacaggatgtacttgaccaactctgctgttagagtatttggaaaggatgtgggagaacctggaacagctgaggaggggcacattatggaaggtgatcctgaacttattgatgattctgagttttatcaacaacttctcaaggagttccttgagtcatgtgatagaggggcatcaagttagttcatttttaattattgaacttattattatttatttacacacataggcgtacacctatcgatcccggattcgattgaaatacattagggccaggatgacctattatccgtctgtttccacccctagaatttatttatatatcaacatgcatactgaaacatggttcatctaacagaagatacatgtttcaagaatttcagttttcatttgtatattcataaactgttaccattctaagatttgtaaaaatgtatatgtttgtactttcaccttaagcgtccaccaaataccatttattgtatgcagagtcggcattttactctctaaaaaagcagcaggttaaaaagagaaagcttgtcgatcgtcgtgcttcgaagagcaggaagatacggtaccatgtccacgagaagatcactaatttcatggcaccggagcccatggttcttcctccaatggctccgaagttgtttgagaatttatttgggaatagcagctagaatccataaactgcagtaggtttacatttctttctgttgccttttctacttctataaactgtagtaggtatgatgtcactagacttagactgaattgtaagttttgatgtcctcatcagttttgtgcgtagacaagcagagcctagttcaccaatcaaattatgcttcgatttgggcctgatgagtgccatttaccggtggacccgcggtgagtcgtgatatacgtgattatcgaaaaatgagttttccta

SEQ ID NO: 34070 - DNA, 1502 bp, Zea Mays
ccagcccccacccggccgtccacctaatcccgagtctcgagcgagtagcgacggccgcgcctgcgcctgcctgcgtcttccgtggcggcgcccctacctctcgaacccgtcaggcggtctggccgacctcgcttcctcggctagctacctactcgccagcgtctattgtccagcaggcgcccagctcccaagcggccgcagtgcccctgcttctgcccttgcacgttcggcccctgtgctgcactgcacagtgagccagacagcgagtaaggtttgttttcttccattcagtttgttgtactgtggagatcaaactagctaagggcagagccaaatttggggattcttcaactgaagccttgtatagatatagtttgaaagatgatgaacgaacacagagaggaggatgccttgagaggtcaagcagtcaaaaaccagaaggcgatatgggacaagaccatggaaatgagattcttgctgcagaaggcgttttctacttccaacaagttaccccaggaatccatcagaacaaggttttgcaatcatgataagcagatagagcaagcatatgatgatcttttgaattcgacgaaacatactttgagcagcatgatggagctgcaggaggctttgcttgagagtaatcaggctacaaaggatgccaatgaaattccttctgcctcaaatggagacaatgacgagtggtcagaagtacagagattgcaggcaaggataacaacattcagaaataccgagatagataaatggcacaggaaaatacaggtgacaacgggtgctgctgcacttaaaggaaagctacatgcatttaatcagaacattagtgatcaagttgctggttacatgagagatccaagccggatgattaacaggatgtacttgaccaactctgctgttagagtatttggaaaggatgtgggagaacctggaacagctgaggaggggcacattatggaaggtgatcctgaacttattgatgattctgagttttatcaacaacttctcaaggagttccttgagtcatgtgatagaggggcatcaaagtcggcattttactctctaaaaaagcagcaggttaaaaagagaaagcttgtcgatcgtcgtgcttcgaagagcaggaagatacggtaccatgtccacgagaagatcactaatttcatggcaccggagcccatggttcttcctccaatggctccgaagttgtttgagaatttatttgggaatagcagctagaatccataaactgcagtaggtttacatttctttctgttgccttttctacttctataaactgtagtaggtatgatgtcactagacttagactgaattgtaagttttgatgtcctcatcagttttgtgcgtagacaagcagagcctagttcaccaatcaaattatgcttcgatttgggcctgatgagtgccatttaccggtggacccgcggtgagtcgtgatatacgtgattatcgaaaaatgagttttccta

SEQ ID NO: 34071 - DNA, 2076 bp, Zea Mays
cccacggtttcctctccttcggcccagcccccacccggccgtccacctaatcccgagtctcgagcgagtagcgacggccgcgcctgcgcctgcctgcgtcttccgtggcggcgcccctacctctcgaacccgtcaggcggtctggccgacctcgcttcctcggctagctacctactcgccagcgtctattgtccagcaggcgcccagctcccaagcggccgcagtgcccctgcttctgcccttgcacgttcggcccctgtgctgcactgcacagtaaggtttgttttcttccattcagtttgttgtactgtggagatcaaactagctaagggcagagccaaatttggggattcttcaactgaagccttgtatagatatagtttgaaagatgatgaacgaacacagagaggaggatgccttgagaggtcaagcagtcaaaaaccagaaggcgatatgggacaagaccatggaaatgagattcttgctgcagaaggcgttttctacttccaacaagttaccccaggaatccatcagaacaaggttttgcaatcatgataagcagatagagcaagcatatgatgatcttttgaattcgacgaaacatactttgagcagcatgatggagctgcaggaggctttgcttgagagtaatcaggctacaaaggatgccaatgaaattccttctgcctcaaatggagacaatgacgagtggtcagaagtacagagattgcaggcaaggataacaacattcagaaataccgagatagataaatggcacaggaaaatacaggtgacaacgggtgctgctgcacttaaaggaaagctacatgcatttaatcagaacattagtgatcaagttgctggttacatgagagatccaagccggatgattaacaggatgtacttgaccaactctgctgttagagtatttggaaaggatgtgggagaacctggaacagctgaggaggttcgagcatttactacatttcccttaaaaatatttcaaaccttatttggtctccttcagtctactgaagtgtaacggcctgtagttaattgaagctcatttcttcccctgagatgatttccccttttctatcataaccttggttatttatctgttacactaacattgctatcagaatgctactatttgtacaaatagaagatataatgcggactacactacctgagcttatttcatcgcctttgctataactcaggggcacattatggaaggtgatcctgaacttattgatgattctgagttttatcaacaacttctcaaggagttccttgagtcatgtgatagaggggcatcaagttagttcatttttaattattgaacttattattatttatttacacacataggcgtacacctatcgatcccggattcgattgaaatacattagggccaggatgacctattatccgtctgtttccacccctagaatttatttatatatcaacatgcatactgaaacatggttcatctaacagaagatacatgtttcaagaatttcagttttcatttgtatattcataaactgttaccattctaagatttgtaaaaatgtatatgtttgtactttcaccttaagcgtccaccaaataccatttattgtatgcagagtcggcattttactctctaaaaaagcagcaggttaaaaagagaaagcttgtcgatcgtcgtgcttcgaagagcaggaagatacggtaccatgtccacgagaagatcactaatttcatggcaccggagcccatggttcttcctccaatggctccgaagttgtttgagaatttatttgggaatagcagctagaatccataaactgcagtaggtttacatttctttctgttgccttttctacttctataaactgtagtaggtatgatgtcactagacttagactgaattgtaagttttgatgtcctcatcagttttgtgcgtagacaagcagagcctagttcaccaatcaaattatgcttcgatttgggcctgatgagtgccatttaccggtggacccgcggtgagtcgtgatatacgtgattatcgaaaaatgagttttccta

SEQ ID NO: 34072 - DNA, 1431 bp, Zea Mays
aattcacccacggtttcctctccttcggcccagcccccacccggccgtccacctaatcccgagtctcgagcgagtagcgacggccgcgcctgcgcctgcctgcgtcttccgtggcggcgcccctacctctcgaacccgtcaggcggtctggccgacctcgcttcctcggctagctacctactcgccagcgtctattgtccagcaggcgcccagctcccaagcggccgcagtgcccctgcttctgcccttgcacgttcggcccctgtgctgcactgcacagtaaggtttgttttcttccattcagtttgttgtactgtggagatcaaactagctaagggcagagccaaatttggggattcttcaactgaagccttgtatagatatagtttgaaagatgatgaacgaacacagagaggaggatgccttgagaggtcaagcagtcaaaaaccagaaggcgatatgggacaagaccatggaaatgagattcttgctgcagaaggcgttttctacttccaacaagttaccccaggaatccatcagaacaaggttttgcaatcatgataagcagatagagcaagcatatgatgatcttttgaattcgacgaaacatactttgagcagcatgatggagctgcaggaggctttgcttgagagtaatcaggctacaaaggatgccaatgaaattccttctgcctcaaatggagacaatgacgagtggtcagaagtacagagattgcaggcaaggataacaacattcagaaataccgagatagataaatggcacaggaaaatacaggtgacaacgggtgctgctgcacttaaaggaaagctacatgcatttaatcagaacattagtgatcaagttgctggttacatgagagatccaagccggatgattaacaggatgtacttgaccaactctgctgttagagtatttggaaaggatgtgggagaacctggaacagctgaggaggggcacattatggaagagtcggcattttactctctaaaaaagcagcaggttaaaaagagaaagcttgtcgatcgtcgtgcttcgaagagcaggaagatacggtaccatgtccacgagaagatcactaatttcatggcaccggagcccatggttcttcctccaatggctccgaagttgtttgagaatttatttgggaatagcagctagaatccataaactgcagtaggtttacatttctttctgttgccttttctacttctataaactgtagtaggtatgatgtcactagacttagactgaattgtaagttttgatgtcctcatcagttttgtgcgtagacaagcagagcctagttcaccaatcaaattatgcttcgatttgggcctgatgagtgccatttaccggtggacccgcggtgagtcgtgatatacgtgattatcgaaaaatgagttttccta

SEQ ID NO: 34073 - DNA, 1775 bp, Zea Mays
ggagaattcacccacggtttcctctccttcggcccagcccccacccggccgtccacctaatcccgagtctcgagcgagtagcgacggccgcgcctgcgcctgcctgcgtcttccgtggcggcgcccctacctctcgaacccgtcaggcggtctggccgacctcgcttcctcggctagctacctactcgccagcgtctattgtccagcaggcgcccagctcccaagcggccgcagtgcccctgcttctgcccttgcacgttcggcccctgtgctgcactgcacagtaaggtttgttttcttccattcagtttgttgtactgtggagatcaaactagctaagggcagagccaaatttggggattcttcaactgaagccttgtatagatatagtttgaaagatgatgaacgaacacagagaggaggatgccttgagaggtcaagcagtcaaaaaccagaaggcgatatgggacaagaccatggaaatgagattcttgctgcagaaggcgttttctacttccaacaagttaccccaggaatccatcagaacaaggttttgcaatcatgataagcagatagagcaagcatatgatgatcttttgaattcgacgaaacatactttgagcagcatgatggagctgcaggaggctttgcttgagagtaatcaggctacaaaggatgccaatgaaattccttctgcctcaaatggagacaatgacgagtggtcagaagtacagagattgcaggcaaggataacaacattcagaaataccgagatagataaatggcacaggaaaatacaggtgacaacgggtgctgctgcacttaaaggaaagctacatgcatttaatcagaacattagtgatcaagttgctggttacatgagagatccaagccggatgattaacaggatgtacttgaccaactctgctgttagagtatttggaaaggatgtgggagaacctggaacagctgaggaggttcgagcatttactacatttcccttaaaaatatttcaaaccttatttggtctccttcagtctactgaagtgtaacggcctgtagttaattgaagctcatttcttcccctgagatgatttccccttttctatcataaccttggttatttatctgttacactaacattgctatcagaatgctactatttgtacaaatagaagatataatgcggactacactacctgagcttatttcatcgcctttgctataactcaggggcacattatggaaggtgatcctgaacttattgatgattctgagttttatcaacaacttctcaaggagttccttgagtcatgtgatagaggggcatcaaagtcggcattttactctctaaaaaagcagcaggttaaaaagagaaagcttgtcgatcgtcgtgcttcgaagagcaggaagatacggtaccatgtccacgagaagatcactaatttcatggcaccggagcccatggttcttcctccaatggctccgaagttgtttgagaatttatttgggaatagcagctagaatccataaactgcagtaggtttacatttctttctgttgccttttctacttctataaactgtagtaggtatgatgtcactagacttagactgaattgtaagttttgatgtcctcatcagttttgtgcgtagacaagcagagcctagttcaccaatcaaattatgcttcgatttgggcctgatgagtgccatttaccggtggacccgcggtgagtcgtgatatacgtgattatcgaaaaatgagttttccta

SEQ ID NO: 34074 - DNA, 1616 bp, Zea Mays
aatttttttcgtcgcggagagaggatgaggagccttgtatagatatagtttgaaagatgatgaacgaacacagagaggaggatgccttgagaggtcaagcagtcaaaaaccagaaggcgatatgggacaagaccatggaaatgagattcttgctgcagaaggcgttttctacttccaacaagttaccccaggaatccatcagaacaaggttttgcaatcatgataagcagatagagcaagcatatgatgatcttttgaattcgacgaaacatactttgagcagcatgatggagctgcaggaggttcagttagttgcacacattgttttcctttcactcctatgattttcctcaatatgatcaaaatgtttcttttgcaaataataattgaaatgtttctcattgtactcaacctcttaaactacctataggctttgcttgagagtaatcaggctacaaaggatgccaatgaaattccttctgcctcaaatggagacaatgacgagtggtcagaagtacagagattgcaggcaaggataacaacattcagaaataccgagatagataaatggcacaggaaaatacaggtgacaacgggtgctgctgcacttaaaggaaagctacatgcatttaatcagaacattagtgatcaagttgctggttacatgagagatccaagccggatgattaacaggatgtacttgaccaactctgctgttagagtatttggaaaggatgtgggagaacctggaacagctgaggaggggcacattatggaaggtgatcctgaacttattgatgattctgagttttatcaacaacttctcaaggagttccttgagtcatgtgatagaggggcatcaagttagttcatttttaattattgaacttattattatttatttacacacataggcgtacacctatcgatcccggattcgattgaaatacattagggccaggatgacctattatccgtctgtttccacccctagaatttatttatatatcaacatgcatactgaaacatggttcatctaacagaagatacatgtttcaagaatttcagttttcatttgtatattcataaactgttaccattctaagatttgtaaaaatgtatatgtttgtactttcaccttaagcgtccaccaaataccatttattgtatgcagagtcggcattttactctctaaaaaagcagcaggttaaaaagagaaagcttgtcgatcgtcgtgcttcgaagagcaggaagatacggtaccatgtccacgagaagatcactaatttcatggcaccggagcccatggttcttcctccaatggctccgaagttgtttgagaatttatttgggaatagcagctagaatccataaactgcagtaggtttacatttctttctgttgccttttctacttctataaactgtagtaggtatgatgtcactagacttagactgaattgtaagttttgatgtcctcatcagttttgtgcgtagacaagcagagcctagttcaccaatcaaattatgcttcgatttgggcctgatgagtgccatttaccggtggacccgcggtgagtcgtgatatacgtgattatcgaaaaatgagttttccta

SEQ ID NO: 34075 - DNA, 1270 bp, Zea Mays
gtaatttttttcgtcgcggagagaggatgaggaggtaaggtttgttttcttccattcagtttgttgtactgtggagatcaaactagctaagggcagagccaaatttggggattcttcaactgaagccttgtatagatatagtttgaaagatgatgaacgaacacagagaggaggatgccttgagaggtcaagcagtcaaaaaccagaaggcgatatgggacaagaccatggaaatgagattcttgctgcagaaggcgttttctacttccaacaagttaccccaggaatccatcagaacaaggttttgcaatcatgataagcagatagagcaagcatatgatgatcttttgaattcgacgaaacatactttgagcagcatgatggagctgcaggaggctttgcttgagagtaatcaggctacaaaggatgccaatgaaattccttctgcctcaaatggagacaatgacgagtggtcagaagtacagagattgcaggcaaggataacaacattcagaaataccgagatagataaatggcacaggaaaatacaggtgacaacgggtgctgctgcacttaaaggaaagctacatgcatttaatcagaacattagtgatcaagttgctggttacatgagagatccaagccggatgattaacaggatgtacttgaccaactctgctgttagagtatttggaaaggatgtgggagaacctggaacagctgaggaggggcacattatggaaggtgatcctgaacttattgatgattctgagttttatcaacaacttctcaaggagttccttgagtcatgtgatagaggggcatcaaagtcggcattttactctctaaaaaagcagcaggttaaaaagagaaagcttgtcgatcgtcgtgcttcgaagagcaggaagatacggtaccatgtccacgagaagatcactaatttcatggcaccggagcccatggttcttcctccaatggctccgaagttgtttgagaatttatttgggaatagcagctagaatccataaactgcagtaggtttacatttctttctgttgccttttctacttctataaactgtagtaggtatgatgtcactagacttagactgaattgtaagttttgatgtcctcatcagttttgtgcgtagacaagcagagcctagttcaccaatcaaattatgcttcgatttgggcctgatgagtgccatttaccggtggacccgcggtgagtcgtgatatacgtgattatcgaaaaatgagttttccta

SEQ ID NO: 34076 - DNA, 1493 bp, Zea Mays
aaatgtttgcggagatctctacaagtaatttttttcgtcgcggagagaggatgaggagatatagtttgaaagatgatgaacgaacacagagaggaggatgccttgagaggtcaagcagtcaaaaaccagaaggcgatatgggacaagaccatggaaatgagattcttgctgcagaaggcgttttctacttccaacaagttaccccaggaatccatcagaacaaggttttgcaatcatgataagcagatagagcaagcatatgatgatcttttgaattcgacgaaacatactttgagcagcatgatggagctgcaggaggttcagttagttgcacacattgttttcctttcactcctatgattttcctcaatatgatcaaaatgtttcttttgcaaataataattgaaatgtttctcattgtactcaacctcttaaactacctataggctttgcttgagagtaatcaggctacaaaggatgccaatgaaattccttctgcctcaaatggagacaatgacgagtggtcagaagtacagagattgcaggcaaggataacaacattcagaaataccgagatagataaatggcacaggaaaatacaggtgacaacgggtgctgctgcacttaaaggaaagctacatgcatttaatcagaacattagtgatcaagttgctggttacatgagagatccaagccggatgattaacaggatgtacttgaccaactctgctgttagagtatttggaaaggatgtgggagaacctggaacagctgaggaggttcgagcatttactacatttcccttaaaaatatttcaaaccttatttggtctccttcagtctactgaagtgtaacggcctgtagttaattgaagctcatttcttcccctgagatgatttccccttttctatcataaccttggttatttatctgttacactaacattgctatcagaatgctactatttgtacaaatagaagatataatgcggactacactacctgagcttatttcatcgcctttgctataactcaggggcacattatggaagagtcggcattttactctctaaaaaagcagcaggttaaaaagagaaagcttgtcgatcgtcgtgcttcgaagagcaggaagatacggtaccatgtccacgagaagatcactaatttcatggcaccggagcccatggttcttcctccaatggctccgaagttgtttgagaatttatttgggaatagcagctagaatccataaactgcagtaggtttacatttctttctgttgccttttctacttctataaactgtagtaggtatgatgtcactagacttagactgaattgtaagttttgatgtcctcatcagttttgtgcgtagacaagcagagcctagttcaccaatcaaattatgcttcgatttgggcctgatgagtgccatttaccggtggacccgcggtgagtcgtgatatacgtgattatcgaaaaatgagttttccta

SEQ ID NO: 34077 - DNA, 1166 bp, Zea Mays
attttttcgtcgcggagagaggataaggaggtaaggtttgttttcttccattcagtttgttgtactgtggagatcaaactagctaagggcagagccaaatttggggattcttcaactgaagccttgtatagatatagtttgaaagatgatgaacgaacacagagaggaggatgccttgagaggtcaagcagtcaaaaaccagaaggcgatatgggacaagaccatggaaatgagattcttgctgcagaaggcgttttctacttccaacaagttaccccaggaatccatcagaacaaggttttgcaatcatgataagcagatagagcaagcatatgatgatcttttgaattcgacgaaacatactttgagcagcatgatggagctgcaggaggctttgcttgagagtaatcaggctacaaaggatgccaatgaaattccttctgcctcaaatggagacaatgacgagtggtcagaagtacagagattgcaggcaaggataacaacattcagaaataccgagatagataaatggcacaggaaaatacaggtgacaacgggtgctgctgcacttaaaggaaagctacatgcatttaatcagaacattagtgatcaagttgctggttacatgagagatccaagccggatgattaacaggatgtacttgaccaactctgctgttagagtatttggaaaggatgtgggagaacctggaacagctgaggagagtcggcattttactctctaaaaaagcagcaggttaaaaagagaaagcttgtcgatcgtcgtgcttcgaagagcaggaagatacggtaccatgtccacgagaagatcactaatttcatggcaccggagcccatggttcttcctccaatggctccgaagttgtttgagaatttatttgggaatagcagctagaatccataaactgcagtaggtttacatttctttctgttgccttttctacttctataaactgtagtaggtatgatgtcactagacttagactgaattgtaagttttgatgtcctcatcagttttgtgcgtagacaagcagagcctagttcaccaatcaaattatgcttcgatttgggcctgatgagtgccatttaccggtggacccgcggtgagtcgtgatatacgtgattatcgaaaaatgagttttccta

SEQ ID NO: 34078 - DNA, 1496 bp, Zea Mays
ctacaagtaaattttttcgtcgcggagagaggataaggagccttgtatagatatagtttgaaagatgatgaacgaacacagagaggaggatgccttgagaggtcaagcagtcaaaaaccagaaggcgatatgggacaagaccatggaaatgagattcttgctgcagaaggcgttttctacttccaacaagttaccccaggaatccatcagaacaaggttttgcaatcatgataagcagatagagcaagcatatgatgatcttttgaattcgacgaaacatactttgagcagcatgatggagctgcaggaggctttgcttgagagtaatcaggctacaaaggatgccaatgaaattccttctgcctcaaatggagacaatgacgagtggtcagaagtacagagattgcaggcaaggataacaacattcagaaataccgagatagataaatggcacaggaaaatacaggtgacaacgggtgctgctgcacttaaaggaaagctacatgcatttaatcagaacattagtgatcaagttgctggttacatgagagatccaagccggatgattaacaggatgtacttgaccaactctgctgttagagtatttggaaaggatgtgggagaacctggaacagctgaggaggggcacattatggaaggtgatcctgaacttattgatgattctgagttttatcaacaacttctcaaggagttccttgagtcatgtgatagaggggcatcaagttagttcatttttaattattgaacttattattatttatttacacacataggcgtacacctatcgatcccggattcgattgaaatacattagggccaggatgacctattatccgtctgtttccacccctagaatttatttatatatcaacatgcatactgaaacatggttcatctaacagaagatacatgtttcaagaatttcagttttcatttgtatattcataaactgttaccattctaagatttgtaaaaatgtatatgtttgtactttcaccttaagcgtccaccaaataccatttattgtatgcagagtcggcattttactctctaaaaaagcagcaggttaaaaagagaaagcttgtcgatcgtcgtgcttcgaagagcaggaagatacggtaccatgtccacgagaagatcactaatttcatggcaccggagcccatggttcttcctccaatggctccgaagttgtttgagaatttatttgggaatagcagctagaatccataaactgcagtaggtttacatttctttctgttgccttttctacttctataaactgtagtaggtatgatgtcactagacttagactgaattgtaagttttgatgtcctcatcagttttgtgcgtagacaagcagagcctagttcaccaatcaaattatgcttcgatttgggcctgatgagtgccatttaccggtggacccgcggtgagtcgtgatatacgtgattatcgaaaaatgagttttccta

SEQ ID NO: 34079 - DNA, 1595 bp, Zea Mays
ggagatctctacaagtaaattttttcgtcgcggagagaggataaggaggtaaggtttgttttcttccattcagtttgttgtactgtggagatcaaactagctaagggcagagccaaatttggggattcttcaactgaagccttgtatagatatagtttgaaagatgatgaacgaacacagagaggaggatgccttgagaggtcaagcagtcaaaaaccagaaggcgatatgggacaagaccatggaaatgagattcttgctgcagaaggcgttttctacttccaacaagttaccccaggaatccatcagaacaaggttttgcaatcatgataagcagatagagcaagcatatgatgatcttttgaattcgacgaaacatactttgagcagcatgatggagctgcaggaggctttgcttgagagtaatcaggctacaaaggatgccaatgaaattccttctgcctcaaatggagacaatgacgagtggtcagaagtacagagattgcaggcaaggataacaacattcagaaataccgagatagataaatggcacaggaaaatacaggtgacaacgggtgctgctgcacttaaaggaaagctacatgcatttaatcagaacattagtgatcaagttgctggttacatgagagatccaagccggatgattaacaggatgtacttgaccaactctgctgttagagtatttggaaaggatgtgggagaacctggaacagctgaggaggggcacattatggaaggtgatcctgaacttattgatgattctgagttttatcaacaacttctcaaggagttccttgagtcatgtgatagaggggcatcaagttagttcatttttaattattgaacttattattatttatttacacacataggcgtacacctatcgatcccggattcgattgaaatacattagggccaggatgacctattatccgtctgtttccacccctagaatttatttatatatcaacatgcatactgaaacatggttcatctaacagaagatacatgtttcaagaatttcagttttcatttgtatattcataaactgttaccattctaagatttgtaaaaatgtatatgtttgtactttcaccttaagcgtccaccaaataccatttattgtatgcagagtcggcattttactctctaaaaaagcagcaggttaaaaagagaaagcttgtcgatcgtcgtgcttcgaagagcaggaagatacggtaccatgtccacgagaagatcactaatttcatggcaccggagcccatggttcttcctccaatggctccgaagttgtttgagaatttatttgggaatagcagctagaatccataaactgcagtaggtttacatttctttctgttgccttttctacttctataaactgtagtaggtatgatgtcactagacttagactgaattgtaagttttgatgtcctcatcagttttgtgcgtagacaagcagagcctagttcaccaatcaaattatgcttcgatttgggcctgatgagtgccatttaccggtggacccgcggtgagtcgtgatatacgtgattatcgaaaaatgagttttccta

SEQ ID NO: 34080 - DNA, 1303 bp, Zea Mays
atgttatgtaagtgtttgcggagatctctacaagtaaattttttcgtcgcggagagaggataaggaggtaaggtttgttttcttccattcagtttgttgtactgtggagatcaaactagctaagggcagagccaaatttggggattcttcaactgaagccttgtatagatatagtttgaaagatgatgaacgaacacagagaggaggatgccttgagaggtcaagcagtcaaaaaccagaaggcgatatgggacaagaccatggaaatgagattcttgctgcagaaggcgttttctacttccaacaagttaccccaggaatccatcagaacaaggttttgcaatcatgataagcagatagagcaagcatatgatgatcttttgaattcgacgaaacatactttgagcagcatgatggagctgcaggaggctttgcttgagagtaatcaggctacaaaggatgccaatgaaattccttctgcctcaaatggagacaatgacgagtggtcagaagtacagagattgcaggcaaggataacaacattcagaaataccgagatagataaatggcacaggaaaatacaggtgacaacgggtgctgctgcacttaaaggaaagctacatgcatttaatcagaacattagtgatcaagttgctggttacatgagagatccaagccggatgattaacaggatgtacttgaccaactctgctgttagagtatttggaaaggatgtgggagaacctggaacagctgaggaggggcacattatggaaggtgatcctgaacttattgatgattctgagttttatcaacaacttctcaaggagttccttgagtcatgtgatagaggggcatcaaagtcggcattttactctctaaaaaagcagcaggttaaaaagagaaagcttgtcgatcgtcgtgcttcgaagagcaggaagatacggtaccatgtccacgagaagatcactaatttcatggcaccggagcccatggttcttcctccaatggctccgaagttgtttgagaatttatttgggaatagcagctagaatccataaactgcagtaggtttacatttctttctgttgccttttctacttctataaactgtagtaggtatgatgtcactagacttagactgaattgtaagttttgatgtcctcatcagttttgtgcgtagacaagcagagcctagttcaccaatcaaattatgcttcgatttgggcctgatgagtgccatttaccggtggacccgcggtgagtcgtgatatacgtgattatcgaaaaatgagttttccta

SEQ ID NO: 34081 - DNA, 2464 bp, Zea Mays
gcgccgcccggcaatccaaacaatcctgcttgggttcgattcgcttcgccttcgtcttcagcgctcaagatcagtttagccgaggtgccgggcgcggtttggctgtccggaggcttttagagttactggaaccccgatgccccaagtgaagtccagctacgatggcgccggcggggactacattaagtggatgtgcggcgccggcggccgcccgggcggcgccatggccagcctccaccgcggggtgggctcccttgttcgtgacatcagcgacccctgcctcaatccctccccagttaaggtatcaatactccatgccggtgacaatgccaatgtatctgttgctcccttgtcagtgacattggctgacacccccaaccggtgccactacaccgctttatttttccatgacactattgagacatcatgccttgtttacaatagcatttgtgctgcttatagaatcactgatcacttacaacatttattgcggcataagatacctcgcaggggaaacagaatgctgaaaccagaaagatggcacgcgtgttttgacagtgacgggaaggctatatgtttccgtaaagcccttaagttcattgtcttaggaggtgtggatccttctattcgagcggaagtttgggaatttcttattggctgctacaccttaagtactacagcggaatataggggaaaactaagagctgctcgaagggagaaatatcgttatttaattaagcaatgccagagcatgcatacaagcattggtacaggtgagcttgcatatgctgttggatcaaagctgatggatgtcaggaccttgcccaaagaaactgaaggtggagaagtcagcacaagtcagcaagctgaacatgaagtgccttgcagtttagcagaaaattcgaatttgatttatggttctggttgcacaacgcggccccataaaaggaaaatttgtagtaaatcagctgaaacagttggtttcaatcaacataatgataactctagaggttctggagattgtgatgtcattggtgaaccaaggtatgacagtgatgccttcatcgattttccttccctaactggtacaaacttggtcgcaaatggtgacggggatagcaatggagttgaagaaaatccttgcaatttcttggtctctgaacatagagtaaggccccatgatgaacacatgcacagcttccagatcaataataacatagatctcataatagagtcaaatacattctccaatgatatatttcgacctagcagtagtgactcagccatctttcactcagatgcgtacaagcatgatagatggttagacgatactggctatagtgaagaaattatagattccttgaggatatctgatgcaccagaatcagatttagttgatggaatgaaatcaaatggttcaatagctgacaaagatagagtctctgaatggctttggacactgcatcgaattgtggttgatgtggtgagaacagatagccaccttgatttctatggagaatcaaggaatatggctagaatgtctgatatacttgctgtttatgcatgggttgatccttccactggatactgtcaaggtatgagtgatctgctgtcaccttttgttgtcatatatgaggatgatgcagatgccttttggtgctttgagatgctactgagaaggatgcgtgaaaatttccagatggagggaccaacaggagttatgaagcaattgcaagcattgtggaagataatggaactgacagatgctgaattatttgaacatttttcggcaattggtgctgaaagccttcattttgcttttcggatgctgctagtcctttttcgtcgagagctgtcctttgaggaatcacttatcatgtgggagatgatgtgggctgctgattttgatgaagaagcagtcaggcatttagaagagaactgcctagaaccattgctagtagatctgagcaatggcttatcatctgaagtcaaagaagtgcatcggatcaacagttccacaagaagaaaacccagaaccaggaaatgccatagtagaaatggtgaaatctgtggagcttgccaccctggaatgaaatctagtacaagaaatcatctctgtggcttgtccggtgctacaatatgggcaagacctcagcagatgccacatccaagtgcaagtgtgctagcaaagggtggagattatgaacttcctatattctgtgtggcggctatcttgataattaaccgccagaagataataagagggactcactcaatagatgatgcgatcaagatgttcaatgataatgtgctcaaaataaatgtaaaaagatgtgtacgcttggcaatcaagctaaggaagaagtacttgtacaaggtgtgctggatcagtattgacctgaagtatggtacatgtccaagatccggcattattcaggattgcaagatgaagctgtggaattaa

SEQ ID NO: 34082 - DNA, 2511 bp, Zea Mays
cgattctattctacgccgctataatcagtcgtgcggcgtcgtcggcgaccttgccgcctgcggcgcggaccacgcggttattatacagctaaccggggctttgagctacagccttctcttgtggggaggcatccccgtcctctacttcgtcgctgccctctgctgcgcctggactggcgtggagtggagatccatccacccgcacttgccacgatctcttccttctcgtagttggttgcggatttgcttactttggtgcgccgcccggcaatccaaacaatcctgcttgggttcgattcgcttcgccttcgtcttcagcgctcaagatcagtttagccgaggtgccgggcgcggtttggctgtccggaggcttttagagttactggaaccccgatgccccaagtgaagtccagctacgatggcgccggcggggactacattaagtggatgtgcggcgccggcggccgcccgggcggcgccatggccagcctccaccgcggggtgggctcccttgttcgtgacatcagcgacccctgcctcaatccctccccagttaagggaaacagaatgctgaaaccagaaagatggcacgcgtgttttgacagtgacgggaaggctatatgtttccgtaaagcccttaagttcattgtcttaggaggtgtggatccttctattcgagcggaagtttgggaatttcttattggctgctacaccttaagtactacagcggaatataggggaaaactaagagctgctcgaagggagaaatatcgttatttaattaagcaatgccagagcatgcatacaagcattggtacaggtgagcttgcatatgctgttggatcaaagctgatggatgtcaggaccttgcccaaagaaactgaaggtggagaagtcagcacaagtcagcaagctgaacatgaagtgccttgcagtttagcagaaaattcgaatttgatttatggttctggttgcacaacgcggccccataaaaggaaaatttgtagtaaatcagctgaaacagttggtttcaatcaacataatgataactctagaggttctggagattgtgatgtcattggtgaaccaaggtatgacagtgatgccttcatcgattttccttccctaactggtacaaacttggtcgcaaatggtgacggggatagcaatggagttgaagaaaatccttgcaatttcttggtctctgaacatagagtaaggccccatgatgaacacatgcacagcttccagatcaataataacatagatctcataatagagtcaaatacattctccaatgatatatttcgacctagcagtagtgactcagccatctttcactcagatgcgtacaagcatgatagatggttagacgatactggctatagtgaagaaattatagattccttgaggatatctgatgcaccagaatcagatttagttgatggaatgaaatcaaatggttcaatagctgacaaagatagagtctctgaatggctttggacactgcatcgaattgtggttgatgtggtgagaacagatagccaccttgatttctatggagaatcaaggaatatggctagaatgtctgatatacttgctgtttatgcatgggttgatccttccactggatactgtcaaggtatgagtgatctgctgtcaccttttgttgtcatatatgaggatgatgcagatgccttttggtgctttgagatgctactgagaaggatgcgtgaaaatttccagatggagggaccaacaggagttatgaagcaattgcaagcattgtggaagataatggaactgacagatgctgaattatttgaacatttttcggcaattggtgctgaaagccttcattttgcttttcggatgctgctagtcctttttcgtcgagagctgtcctttgaggaatcacttatcatgtgggagatgatgtgggctgctgattttgatgaagaagcagtcaggcatttagaagagaactgcctagaaccattgctagtagatctgagcaatggcttatcatctgaagtcaaagaagtgcatcggatcaacagttccacaagaagaaaacccagaaccaggaaatgccatagtagaaatggtgaaatctgtggagcttgccaccctggaatgaaatctagtacaagaaatcatctctgtggcttgtccggtgctacaatatgggcaagacctcagcagatgccacatccaagtgcaagtgtgctagcaaagggtggagattatgaacttcctatattctgtgtggcggctatcttgataattaaccgccagaagataataagagggactcactcaatagatgatgcgatcaagatgttcaatgataatgtgctcaaaataaatgtaaaaagatgtgtacgcttggcaatcaagctaaggaagaagtacttgtacaaggtgtgctggatcagtattgacctgaagtatggtacatgtccaagatccggcattattcaggattgcaagatgaagctgtggaattaa

SEQ ID NO: 34083 - DNA, 2627 bp, Zea Mays
cgattctattctacgccgctataatcagtcgtgcggcgtcgtcggcgaccttgccgcctgcggcgcggaccacgcggttattatacagctaaccggggctttgagctacagccttctcttgtggggaggcatccccgtcctctacttcgtcgctgccctctgctgcgcctggactggcgtggagtggagatccatccacccgcacttgccacgatctcttccttctcgtgtcgagttggttgcggatttgcttactttggtgcgccgcccggcaatccaaacaatcctgcttgggttcgattcgcttcgccttcgtcttcagcgctcaagatcagtttagccgaggtgccgggcgcggtttggctgtccggaggcttttagagttactggaaccccgatgccccaagtgaagtccagctacgatggcgccggcggggactacattaagtggatgtgcggcgccggcggccgcccgggcggcgccatggccagcctccaccgcggggtgggctcccttgttcgtgacatcagcgacccctgcctcaatccctccccaggaaacagaatgctgaaaccagaaagatggcacgcgtgttttgacagtgacgggaaggctatatgtttccgtaaagcccttaagttcattgtcttaggaggtgtggatccttctattcgagcggaagtttgggaatttcttattggctgctacaccttaagtactacagcggaatataggggaaaactaagagctgctcgaagggagaaatatcgttatttaattaagcaatgccagagcatgcatacaagcattggtacaggtgagcttgcatatgctgttggatcaaagctgatggatgtcaggaccttgcccaaagaaactgaaggtggagaagtcagcacaagtcagcaagctgaacatgaagtgccttgcagtttagcagaaaattcgaatttgatttatggttctggttgcacaacgcggccccataaaaggaaaatttgtagtaaatcagctgaaacagttggtttcaatcaacataatgataactctagaggttctggagattgtgatgtcattggtgaaccaaggtatgacagtgatgccttcatcgattttccttccctaactggtacaaacttggtcgcaaatggtgacggggatagcaatggagttgaagaaaatccttgcaatttcttggtctctgaacatagagtaaggccccatgatgaacacatgcacagcttccagatcaataataacatagatctcataatagagtcaaatacattctccaatgatatatttcgacctagcagtagtgactcagccatctttcactcagatgcgtacaagcatgatagatggttagacgatactggctatagtgaagaaattatagattccttgaggatatctgatgcaccagaatcagatttagttgatggaatgaaatcaaatggttcaatagctgacaaagatagagtctctgaatggctttggacactgcatcgaattgtggttgatgtggtgagaacagatagccaccttgatttctatggagaatcaaggaatatggctagaatgtctgatatacttgctgtttatgcatgggttgatccttccactggatactgtcaaggtatgagtgatctgctgtcaccttttgttgtcatatatgaggatgatgcagatgccttttggtgctttgagatgctactgagaaggatgatggagggaccaacaggagttatgaagcaattgcaagcattgtggaagataatggaactgacagatgctgaattatttgaacatttttcggcaattggtgctgaaagccttcattttgcttttcggatgctgctagtcctttttcgtcgagagctgtcctttgaggaatcacttatcatgtgggagatgatgtgggctgctgattttgatgaagaagcagtcaggcatttagaagagaactgcctagaaccattgctagtagatctgagcaatggcttatcatctgaagtcaaagaagtgcatcggatcaacagttccacaagaagaaaacccagaaccaggaaatgccatagtagaaatggtgaaatctgtggagcttgccaccctggaatgaaatctagtacaagaaatcatctctgtggcttgtccggtgctacaatatgggcaagacctcagcagatgccacatccaagtgcaagtgtgctagcaaagggtggagattatgaacttcctatattctgtgtggcggctatcttgataattaaccgccagaagataataagagggactcactcaatagatgatgcgatcaagatgttcaatgataatgtgctcaaaataaatgtaaaaagatgtgtacgcttggcaatcaagctaaggaagaagtacttgtacaagtcattgaaaggtggctctagtgatgataaagaaagctgaagaacctgcacttcccttgtagaaaaaactagatatttctccatcatgcattgctatctaggtgtgctggatcagtattgacctgaagtatggtacatgtccaagatccggcattattcaggattgcaaggcaatctgtacatattatacttgaaaacaacagatgaagctgtggaattaa

SEQ ID NO: 34084 - DNA, 2247 bp, Zea Mays
cgattctattctacgccgctataatcagtcgtgcggcgtcgtcggcgaccttgccgcctgcggcgcggaccacgcggttattatacagctaaccggggctttgagctacagccttctcttgtggggaggcatccccgtcctctacttcgtcgctgccctctgctgcgcctggactggcgtggagtggagatccatccacccgcacttgccacgatctcttccttctcgtagttggttgcggatttgcttactttggtgcgccgcccggcaatccaaacaatcctgcttgggttcgattcgcttcgccttcgtcttcagcgctcaagatcagtttagccgaggtgccgggcgcggtttggctgtccggaggcttttagagttactggaaccccgatgccccaagtgaagtccagctacgatggcgccggcggggactacattaagtggatgtgcggcgccggcggccgcccgggcggcgccatggccagcctccaccgcggggtgggctcccttgttcgtgacatcagcgacccctgcctcaatccctccccagttaagggaaacagaatgctgaaaccagaaagatggcacgcgtgttttgacagtgacgggaaggctatatgtttccgtaaagcccttaagttcattgtcttaggaggtgtggatccttctattcgagcggaagtttgggaatttcttattggctgctacaccttaagtactacagcggaatataggggaaaactaagagctgctcgaagggagaaatatcgttatttaattaagcaatgccagagcatgcatacaagcattggtacaggtgagcttgcatatgctgttggatcaaagctgatggatgtcaggaccttgcccaaagaaactgaaggtggagaagtcagcacaagtcagcaagctgaacatgaagtgccttgcagtttagcagaaaattcgaatttgatttatggttctggttgcacaacgcggccccataaaaggaaaatttgtagtaaatcagctgaaacagttggtttcaatcaacataatgataactctagaggttctggagattgtgatgtcattggtgaaccaaggtatgacagtgatgccttcatcgattttccttccctaactggtacaaacttggtcgcaaatggtgacggggatagcaatggagttgaagaaaatccttgcaatttcttggtctctgaacatagagtaaggccccatgatgaacacatgcacagcttccagatcaataataacatagatctcataatagagtcaaatacattctccaatgatatatttcgacctagcagtagtgactcagccatctttcactcagatgcgtacaagcatgatagatggttagacgatactggctatagtgaagaaattatagattccttgaggatatctgatgcaccagaatcagatttagttgatggaatgaaatcaaatggttcaatagctgacaaagatagagtctctgaatggctttggacactgcatcgaattgtggttgatgtggtgagaacagatagccaccttgatttctatggagaatcaaggaatatggctagaatgtctgatatacttgctgtttatgcatgggttgatccttccactggatactgtcaaggtatgagtgatctgctgtcaccttttgttgtcatatatgaggatgatgcagatgccttttggtgctttgagatgctactgagaaggatgcgtgaaaatttccagatggagggaccaacaggagttatgaagcaattgcaagcattgtggaagataatggaactgacagatgctgaattatttgaacatttttcggcaattggtgctgaaagccttcattttgcttttcggatgctgctagtcctttttcgtcgagagctgtcctttgaggaatcacttatcatgtgggagatgatgtgggctgctgattttgatgaagaagcagtcaggcatttagaagagaactgcctagaaccattgctagtagatctgagcaatggcttatcatctgaagtcaaagaaatgttcaatgataatgtgctcaaaataaatgtaaaaagatgtgtacgcttggcaatcaagctaaggaagaagtacttgtacaaggtgtgctggatcagtattgacctgaagtatggtacatgtccaagatccggcattattcaggattgcaaggcaatctgtacatattatacttgaaaacaacagatgaagctgtggaattaa

SEQ ID NO: 34085 - DNA, 2214 bp, Zea Mays
cgattctattctacgccgctataatcagtcgtgcggcgtcgtcggcgaccttgccgcctgcggcgcggaccacgcggttattatacagctaaccggggctttgagctacagccttctcttgtggggaggcatccccgtcctctacttcgtcgctgccctctgctgcgcctggactggcgtggagtggagatccatccacccgcacttgccacgatctcttccttctcgtagttggttgcggatttgcttactttggtgcgccgcccggcaatccaaacaatcctgcttgggttcgattcgcttcgccttcgtcttcagcgctcaagatcagtttagccgaggtgccgggcgcggtttggctgtccggaggcttttagagttactggaaccccgatgccccaagtgaagtccagctacgatggcgccggcggggactacattaagtggatgtgcggcgccggcggccgcccgggcggcgccatggccagcctccaccgcggggtgggctcccttgttcgtgacatcagcgacccctgcctcaatccctccccagttaagggaaacagaatgctgaaaccagaaagatggcacgcgtgttttgacagtgacgggaaggctatatgtttccgtaaagcccttaagttcattgtcttaggaggtgtggatccttctattcgagcggaagtttgggaatttcttattggctgctacaccttaagtactacagcggaatataggggaaaactaagagctgctcgaagggagaaatatcgttatttaattaagcaatgccagagcatgcatacaagcattggtacaggtgagcttgcatatgctgttggatcaaagctgatggatgtcaggaccttgcccaaagaaactgaaggtggagaagtcagcacaagtcagcaagctgaacatgaagtgccttgcagtttagcagaaaattcgaatttgatttatggttctggttgcacaacgcggccccataaaaggaaaatttgtagtaaatcagctgaaacagttggtttcaatcaacataatgataactctagaggttctggagattgtgatgtcattggtgaaccaaggtatgacagtgatgccttcatcgattttccttccctaactggtacaaacttggtcgcaaatggtgacggggatagcaatggagttgaagaaaatccttgcaatttcttggtctctgaacatagagtaaggccccatgatgaacacatgcacagcttccagatcaataataacatagatctcataatagagtcaaatacattctccaatgatatatttcgacctagcagtagtgactcagccatctttcactcagatgcgtacaagcatgatagatggttagacgatactggctatagtgaagaaattatagattccttgaggatatctgatgcaccagaatcagatttagttgatggaatgaaatcaaatggttcaatagctgacaaagatagagtctctgaatggctttggacactgcatcgaattgtggttgatgtggtgagaacagatagccaccttgatttctatggagaatcaaggaatatggctagaatgtctgatatacttgctgtttatgcatgggttgatccttccactggatactgtcaaggtatgagtgatctgctgtcaccttttgttgtcatatatgaggatgatgcagatgccttttggtgctttgagatgctactgagaaggatgcgtgaaaatttccagatggagggaccaacaggagttatgaagcaattgcaagcattgtggaagataatggaactgacagatgctgaattatttgaacatttttcggcaattggtgctgaaagccttcattttgcttttcggatgctgctagtcctttttcgtcgagagctgtcctttgaggaatcacttatcatgtgggagatgatgtgggctgctgattttgatgaagaagcagtcaggcatttagaagagaactgcctagaaccattgctagtagatctgagcaatggcttatcatctgaagtcaaagaaatgttcaatgataatgtgctcaaaataaatgtaaaaagatgtgtacgcttggcaatcaagctaaggaagaagtacttgtacaaggtgtgctggatcagtattgacctgaagtatggtacatgtccaagatccggcattattcaggattgcaagatgaagctgtggaattaa

SEQ ID NO: 34086 - DNA, 2638 bp, Zea Mays
cgattctattctacgccgctataatcagtcgtgcggcgtcgtcggcgaccttgccgcctgcggcgcggaccacgcggttattatacagctaaccggggctttgagctacagccttctcttgtggggaggcatccccgtcctctacttcgtcgctgccctctgctgcgcctggactggcgtggagtggagatccatccacccgcacttgccacgatctcttccttctcgtagttggttgcggatttgcttactttggtgcgccgcccggcaatccaaacaatcctgcttgggttcgattcgcttcgccttcgtcttcagcgctcaagatcagtttagccgaggtgccgggcgcggtttggctgtccggaggcttttagagttactggaaccccgatgccccaagtgaagtccagctacgatggcgccggcggggactacattaagtggatgtgcggcgccggcggccgcccgggcggcgccatggccagcctccaccgcggggtgggctcccttgttcgtgacatcagcgacccctgcctcaatccctccccaggaaacagaatgctgaaaccagaaagatggcacgcgtgttttgacagtgacgggaaggctatatgtttccgtaaagcccttaagttcattgtcttaggaggtgtggatccttctattcgagcggaagtttgggaatttcttattggctgctacaccttaagtactacagcggaatataggggaaaactaagagctgctcgaagggagaaatatcgttatttaattaagcaatgccagagcatgcatacaagcattggtacaggtgagcttgcatatgctgttggatcaaagctgatggatgtcaggaccttgcccaaagaaactgaaggtggagaagtcagcacaagtcagcaagctgaacatgaagtgccttgcagtttagcagaaaattcgaatttgatttatggttctggttgcacaacgcggccccataaaaggaaaatttgtagtaaatcagctgaaacagttggtttcaatcaacataatgataactctagaggttctggagattgtgatgtcattggtgaaccaaggtatgacagtgatgccttcatcgattttccttccctaactggtacaaacttggtcgcaaatggtgacggggatagcaatggagttgaagaaaatccttgcaatttcttggtctctgaacatagagtaaggccccatgatgaacacatgcacagcttccagatcaataataacatagatctcataatagagtcaaatacattctccaatgatatatttcgacctagcagtagtgactcagccatctttcactcagatgcgtacaagcatgatagatggttagacgatactggctatagtgaagaaattatagattccttgaggatatctgatgcaccagaatcagatttagttgatggaatgaaatcaaatggttcaatagctgacaaagatagagtctctgaatggctttggacactgcatcgaattgtggttgatgtggtgagaacagatagccaccttgatttctatggagaatcaaggaatatggctagaatgtctgatatacttgctgtttatgcatgggttgatccttccactggatactgtcaaggtatgagtgatctgctgtcaccttttgttgtcatatatgaggatgatgcagatgccttttggtgctttgagatgctactgagaaggatgcgtgaaaatttccagatggagggaccaacaggagttatgaagcaattgcaagcattgtggaagataatggaactgacagatgctgaattatttgaacatttttcggcaattggtgctgaaagccttcattttgcttttcggatgctgctagtcctttttcgtcgagagctgtcctttgaggaatcacttatcatgtgggagatgatgtgggctgctgattttgatgaagaagcagtcaggcatttagaagagaactgcctagaaccattgctagtagatctgagcaatggcttatcatctgaagtcaaagaagtgcatcggatcaacagttccacaagaagaaaacccagaaccaggaaatgccatagtagaaatggtgaaatctgtggagcttgccaccctggaatgaaatctagtacaagaaatcatctctgtggcttgtccggtgctacaatatgggcaagacctcagcagatgccacatccaagtgcaagtgtgctagcaaagggtggagattatgaacttcctatattctgtgtggcggctatcttgataattaaccgccagaagataataagagggactcactcaatagatgatgcgatcaagatgttcaatgataatgtgctcaaaataaatgtaaaaagatgtgtacgcttggcaatcaagctaaggaagaagtacttgtacaagtcattgaaaggtggctctagtgatgataaagaaagctgaagaacctgcacttcccttgtagaaaaaactagatatttctccatcatgcattgctatctaggtgtgctggatcagtattgacctgaagtatggtacatgtccaagatccggcattattcaggattgcaaggcaatctgtacatattatacttgaaaacaacagatgaagctgtggaattaa

SEQ ID NO: 34087 - DNA, 2314 bp, Zea Mays
cgattctattctacgccgctataatcagtcgtgcggcgtcgtcggcgaccttgccgcctgcggcgcggaccacgcggttattatacagctaaccggggctttgagctacagccttctcttgtggggaggcatccccgtcctctacttcgtcgctgccctctgctgcgcctggactggcgtggagtggagatccatccacccgcacttgccacgatctcttccttctcgtagttggttgcggatttgcttactttggtgcgccgcccggcaatccaaacaatcctgcttgggttcgattcgcttcgccttcgtcttcagcgctcaagatcagtttagccgaggtgccgggcgcggtttggctgtccggaggcttttagagttactggaaccccgatgccccaagtgaagtccagctacgatggcgccggcggggactacattaagtggatgtgcggcgccggcggccgcccgggcggcgccatggccagcctccaccgcggggtgggctcccttgttcgtgacatcagcgacccctgcctcaatccctccccagttaagggaaacagaatgctgaaaccagaaagatggcacgcgtgttttgacagtgacgggaaggctatatgtttccgtaaagcccttaagttcattgtcttaggaggtgtggatccttctattcgagcggaagtttgggaatttcttattggctgctacaccttaagtactacagcggaatataggggaaaactaagagctgctcgaagggagaaatatcgttatttaattaagcaatgccagagcatgcatacaagcattggtacaggtgagcttgcatatgctgttggatcaaagctgatggatgtcaggaccttgcccaaagaaactgaaggtggagaagtcagcacaagtcagcaagctgaacatgaagtgccttgcagtttagcagaaaattcgaatttgatttatggttctggttgcacaacgcggccccataaaaggaaaatttgtagtaaatcagctgaaacagttggtttcaatcaacataatgataactctagaggttctggagattgtgatgtcattggtgaaccaaggtatgacagtgatgccttcatcgattttccttccctaactggtacaaacttggtcgcaaatggtgacggggatagcaatggagttgaagaaaatccttgcaatttcttggtctctgaacatagagtaaggccccatgatgaacacatgcacagcttccagatcaataataacatagatctcataatagagtcaaatacattctccaatgatatatttcgacctagcagtagtgactcagccatctttcactcagatgcgtacaagcatgatagatggttagacgatactggctatagtgaagaaattatagattccttgaggatatctgatgcaccagaatcagatttagttgatggaatgaaatcaaatggttcaatagctgacaaagatagagtctctgaatggctttggacactgcatcgaattgtggttgatgtggtgagaacagatagccaccttgatttctatggagaatcaaggaatatggctagaatgtctgatatacttgctgtttatgcatgggttgatccttccactggatactgtcaaggtatgagtgatctgctgtcaccttttgttgtcatatatgaggatgatgcagatgccttttggtgctttgagatgctactgagaaggatgcgtgaaaatttccagatggagggaccaacaggagttatgaagcaattgcaagcattgtggaagataatggaactgacagatgctgaattatttgaacatttttcggcaattggtgctgaaagccttcattttgcttttcggatgctgctagtcctttttcgtcgagagctgtcctttgaggaatcacttatcatgtgggagatgatgtgggctgctgattttgatgaagaagcagtcaggcatttagaagagaactgcctagaaccattgctagtagatctgagcaatggcttatcatctgaagtcaaagaaatgttcaatgataatgtgctcaaaataaatgtaaaaagatgtgtacgcttggcaatcaagctaaggaagaagtacttgtacaagtcattgaaaggtggctctagtgatgataaagaaagctgaagaacctgcacttcccttgtagaaaaaactagatatttctccatcatgcattgctatctaggtgtgctggatcagtattgacctgaagtatggtacatgtccaagatccggcattattcaggattgcaagatgaagctgtggaattaa

SEQ ID NO: 34088 - DNA, 2648 bp, Zea Mays
cgattctattctacgccgctataatcagtcgtgcggcgtcgtcggcgaccttgccgcctgcggcgcggaccacgcggttattatacagctaaccggggctttgagctacagccttctcttgtggggaggcatccccgtcctctacttcgtcgctgccctctgctgcgcctggactggcgtggagtggagatccatccacccgcacttgccacgatctcttccttctcgtgtcgagttggttgcggatttgcttactttggtgcgccgcccggcaatccaaacaatcctgcttgggttcgattcgcttcgccttcgtcttcagcgctcaagatcagtttagccgaggtgccgggcgcggtttggctgtccggaggcttttagagttactggaaccccgatgccccaagtgaagtccagctacgatggcgccggcggggactacattaagtggatgtgcggcgccggcggccgcccgggcggcgccatggccagcctccaccgcggggtgggctcccttgttcgtgacatcagcgacccctgcctcaatccctccccagttaagggaaacagaatgctgaaaccagaaagatggcacgcgtgttttgacagtgacgggaaggctatatgtttccgtaaagcccttaagttcattgtcttaggaggtgtggatccttctattcgagcggaagtttgggaatttcttattggctgctacaccttaagtactacagcggaatataggggaaaactaagagctgctcgaagggagaaatatcgttatttaattaagcaatgccagagcatgcatacaagcattggtacaggtgagcttgcatatgctgttggatcaaagctgatggatgtcaggaccttgcccaaagaaactgaaggtggagaagtcagcacaagtcagcaagctgaacatgaagtgccttgcagtttagcagaaaattcgaatttgatttatggttctggttgcacaacgcggccccataaaaggaaaatttgtagtaaatcagctgaaacagttggtttcaatcaacataatgataactctagaggttctggagattgtgatgtcattggtgaaccaaggtatgacagtgatgccttcatcgattttccttccctaactggtacaaacttggtcgcaaatggtgacggggatagcaatggagttgaagaaaatccttgcaatttcttggtctctgaacatagagtaaggccccatgatgaacacatgcacagcttccagatcaataataacatagatctcataatagagtcaaatacattctccaatgatatatttcgacctagcagtagtgactcagccatctttcactcagatgcgtacaagcatgatagatggttagacgatactggctatagtgaagaaattatagattccttgaggatatctgatgcaccagaatcagatttagttgatggaatgaaatcaaatggttcaatagctgacaaagatagagtctctgaatggctttggacactgcatcgaattgtggttgatgtggtgagaacagatagccaccttgatttctatggagaatcaaggaatatggctagaatgtctgatatacttgctgtttatgcatgggttgatccttccactggatactgtcaaggtatgagtgatctgctgtcaccttttgttgtcatatatgaggatgatgcagatgccttttggtgctttgagatgctactgagaaggatgcgtgaaaatttccagatggagggaccaacaggagttatgaagcaattgcaagcattgtggaagataatggaactgacagatgctgaattatttgaacatttttcggcaattggtgctgaaagccttcattttgcttttcggatgctgctagtcctttttcgtcgagagctgtcctttgaggaatcacttatcatgtgggagatgatgtgggctgctgattttgatgaagaagcagtcaggcatttagaagagaactgcctagaaccattgctagtagatctgagcaatggcttatcatctgaagtcaaagaagtgcatcggatcaacagttccacaagaagaaaacccagaaccaggaaatgccatagtagaaatggtgaaatctgtggagcttgccaccctggaatgaaatctagtacaagaaatcatctctgtggcttgtccggtgctacaatatgggcaagacctcagcagatgccacatccaagtgcaagtgtgctagcaaagggtggagattatgaacttcctatattctgtgtggcggctatcttgataattaaccgccagaagataataagagggactcactcaatagatgatgcgatcaagatgttcaatgataatgtgctcaaaataaatgtaaaaagatgtgtacgcttggcaatcaagctaaggaagaagtacttgtacaagtcattgaaaggtggctctagtgatgataaagaaagctgaagaacctgcacttcccttgtagaaaaaactagatatttctccatcatgcattgctatctaggtgtgctggatcagtattgacctgaagtatggtacatgtccaagatccggcattattcaggattgcaaggcaatctgtacatattatacttgaaaacaacagatgaagctgtggaattaa

SEQ ID NO: 34089 - DNA, 2646 bp, Zea Mays
cgcgattctattctacgccgctataatcagtcgtgcggcgtcgtcggcgaccttgccgcctgcggcgcggaccacgcggttattatacagctaaccggggctttgagctacagccttctcttgtggggaggcatccccgtcctctacttcgtcgctgccctctgctgcgcctggactggcgtggagtggagatccatccacccgcacttgccacgatctcttccttctcgtagttggttgcggatttgcttactttggtgcgccgcccggcaatccaaacaatcctgcttgggttcgattcgcttcgccttcgtcttcagcgctcaagatcagtttagccgaggtgccgggcgcggtttggctgtccggaggcttttagagttactggaaccccgatgccccaagtgaagtccagctacgatggcgccggcggggactacattaagtggatgtgcggcgccggcggccgcccgggcggcgccatggccagcctccaccgcggggtgggctcccttgttcgtgacatcagcgacccctgcctcaatccctccccagttaagggaaacagaatgctgaaaccagaaagatggcacgcgtgttttgacagtgacgggaaggctatatgtttccgtaaagcccttaagttcattgtcttaggaggtgtggatccttctattcgagcggaagtttgggaatttcttattggctgctacaccttaagtactacagcggaatataggggaaaactaagagctgctcgaagggagaaatatcgttatttaattaagcaatgccagagcatgcatacaagcattggtacaggtgagcttgcatatgctgttggatcaaagctgatggatgtcaggaccttgcccaaagaaactgaaggtggagaagtcagcacaagtcagcaagctgaacatgaagtgccttgcagtttagcagaaaattcgaatttgatttatggttctggttgcacaacgcggccccataaaaggaaaatttgtagtaaatcagctgaaacagttggtttcaatcaacataatgataactctagaggttctggagattgtgatgtcattggtgaaccaaggtatgacagtgatgccttcatcgattttccttccctaactggtacaaacttggtcgcaaatggtgacggggatagcaatggagttgaagaaaatccttgcaatttcttggtctctgaacatagagtaaggccccatgatgaacacatgcacagcttccagatcaataataacatagatctcataatagagtcaaatacattctccaatgatatatttcgacctagcagtagtgactcagccatctttcactcagatgcgtacaagcatgatagatggttagacgatactggctatagtgaagaaattatagattccttgaggatatctgatgcaccagaatcagatttagttgatggaatgaaatcaaatggttcaatagctgacaaagatagagtctctgaatggctttggacactgcatcgaattgtggttgatgtggtgagaacagatagccaccttgatttctatggagaatcaaggaatatggctagaatgtctgatatacttgctgtttatgcatgggttgatccttccactggatactgtcaaggtatgagtgatctgctgtcaccttttgttgtcatatatgaggatgatgcagatgccttttggtgctttgagatgctactgagaaggatgcgtgaaaatttccagatggagggaccaacaggagttatgaagcaattgcaagcattgtggaagataatggaactgacagatgctgaattatttgaacatttttcggcaattggtgctgaaagccttcattttgcttttcggatgctgctagtcctttttcgtcgagagctgtcctttgaggaatcacttatcatgtgggagatgatgtgggctgctgattttgatgaagaagcagtcaggcatttagaagagaactgcctagaaccattgctagtagatctgagcaatggcttatcatctgaagtcaaagaagtgcatcggatcaacagttccacaagaagaaaacccagaaccaggaaatgccatagtagaaatggtgaaatctgtggagcttgccaccctggaatgaaatctagtacaagaaatcatctctgtggcttgtccggtgctacaatatgggcaagacctcagcagatgccacatccaagtgcaagtgtgctagcaaagggtggagattatgaacttcctatattctgtgtggcggctatcttgataattaaccgccagaagataataagagggactcactcaatagatgatgcgatcaagatgttcaatgataatgtgctcaaaataaatgtaaaaagatgtgtacgcttggcaatcaagctaaggaagaagtacttgtacaagtcattgaaaggtggctctagtgatgataaagaaagctgaagaacctgcacttcccttgtagaaaaaactagatatttctccatcatgcattgctatctaggtgtgctggatcagtattgacctgaagtatggtacatgtccaagatccggcattattcaggattgcaaggcaatctgtacatattatacttgaaaacaacagatgaagctgtggaattaa

SEQ ID NO: 34090 - DNA, 2617 bp, Zea Mays
cgcgattctattctacgccgctataatcagtcgtgcggcgtcgtcggcgaccttgccgcctgcggcgcggaccacgcggttattatacagctaaccggggctttgagctacagccttctcttgtggggaggcatccccgtcctctacttcgtcgctgccctctgctgcgcctggactggcgtggagtggagatccatccacccgcacttgccacgatctcttccttctcgtgtcgagttggttgcggatttgcttactttggtgcgccgcccggcaatccaaacaatcctgcttgggttcgattcgcttcgccttcgtcttcagcgctcaagatcagtttagccgaggtgccgggcgcggtttggctgtccggaggcttttagagttactggaaccccgatgccccaagtgaagtccagctacgatggcgccggcggggactacattaagtggatgtgcggcgccggcggccgcccgggcggcgccatggccagcctccaccgcggggtgggctcccttgttcgtgacatcagcgacccctgcctcaatccctccccagttaagggaaacagaatgctgaaaccagaaagatggcacgcgtgttttgacagtgacgggaaggctatatgtttccgtaaagcccttaagttcattgtcttaggaggtgtggatccttctattcgagcggaagtttgggaatttcttattggctgctacaccttaagtactacagcggaatataggggaaaactaagagctgctcgaagggagaaatatcgttatttaattaagcaatgccagagcatgcatacaagcattggtacaggtgagcttgcatatgctgttggatcaaagctgatggatgtcaggaccttgcccaaagaaactgaaggtggagaagtcagcacaagtcagcaagctgaacatgaagtgccttgcagtttagcagaaaattcgaatttgatttatggttctggttgcacaacgcggccccataaaaggaaaatttgtagtaaatcagctgaaacagttggtttcaatcaacataatgataactctagaggttctggagattgtgatgtcattggtgaaccaaggtatgacagtgatgccttcatcgattttccttccctaactggtacaaacttggtcgcaaatggtgacggggatagcaatggagttgaagaaaatccttgcaatttcttggtctctgaacatagagtaaggccccatgatgaacacatgcacagcttccagatcaataataacatagatctcataatagagtcaaatacattctccaatgatatatttcgacctagcagtagtgactcagccatctttcactcagatgcgtacaagcatgatagatggttagacgatactggctatagtgaagaaattatagattccttgaggatatctgatgcaccagaatcagatttagttgatggaatgaaatcaaatggttcaatagctgacaaagatagagtctctgaatggctttggacactgcatcgaattgtggttgatgtggtgagaacagatagccaccttgatttctatggagaatcaaggaatatggctagaatgtctgatatacttgctgtttatgcatgggttgatccttccactggatactgtcaaggtatgagtgatctgctgtcaccttttgttgtcatatatgaggatgatgcagatgccttttggtgctttgagatgctactgagaaggatgcgtgaaaatttccagatggagggaccaacaggagttatgaagcaattgcaagcattgtggaagataatggaactgacagatgctgaattatttgaacatttttcggcaattggtgctgaaagccttcattttgcttttcggatgctgctagtcctttttcgtcgagagctgtcctttgaggaatcacttatcatgtgggagatgatgtgggctgctgattttgatgaagaagcagtcaggcatttagaagagaactgcctagaaccattgctagtagatctgagcaatggcttatcatctgaagtcaaagaagtgcatcggatcaacagttccacaagaagaaaacccagaaccaggaaatgccatagtagaaatggtgaaatctgtggagcttgccaccctggaatgaaatctagtacaagaaatcatctctgtggcttgtccggtgctacaatatgggcaagacctcagcagatgccacatccaagtgcaagtgtgctagcaaagggtggagattatgaacttcctatattctgtgtggcggctatcttgataattaaccgccagaagataataagagggactcactcaatagatgatgcgatcaagatgttcaatgataatgtgctcaaaataaatgtaaaaagatgtgtacgcttggcaatcaagctaaggaagaagtacttgtacaagtcattgaaaggtggctctagtgatgataaagaaagctgaagaacctgcacttcccttgtagaaaaaactagatatttctccatcatgcattgctatctaggtgtgctggatcagtattgacctgaagtatggtacatgtccaagatccggcattattcaggattgcaagatgaagctgtggaattaa

SEQ ID NO: 34091 - DNA, 1664 bp, Zea Mays
acgagcatgatgatggcaactggcacggtccacgctcatcggcaagacaccaatggtatatctcaacaatgtcgtcaagggctctgtcgccaatgttgctgctaagcttgagattatggagccctgttgtagcgtcaaggacaggatagggtacagtatgataaatgatgctgaacagaagggcttgattactcctggaaagagtgttttagtggaagcaacaagtggaaatacaggcattggtcttgcctttattgctgcttccaaaggatataagttgatattaacaatgccttcatcaatgagcatggagagaagagtcctactcagagcttttggtgctgaacttgtccttactgatgctgcaaaagggatgaaaggggccgtagataaggctacagagattttaaataagacacccaattcttacatgcttcaacagtttgataaccctgccaaccctaaggtacattatgagaccactggcccagagatctgggaggattcaaaggggaaggtggatatactcattggcggaattggaacaggtgggacaatatctggtgctggccgtttcctcaaggagaaaaattctggaattaaggttattggtattgagccttctgaaagtaacatactctccggtggaaaacctggtccacataagattcagggaattggtgcaggatttgttccaaggaacttggatagcgatattcttgatgaagtaattgagatatcaagtgatgaagctgttgagacagcaaaacagttggctgttcaggaaggattactggttgtgtttccgagttttggcgagaggtacctttcatctgtcctctatcagtccataagagaagaatgcgagaacatgcagcctgagccatgacggagccgtcactttaaacagcataataaatgtatctggaataagatgcgtgggcaccattagtgtgctccaattggtatcatttggcccatgctcacgctatccttttgcctctatgaccggaactaatcaggcgtgtgagaaatatccatgactctcccaattgctttccattaacaaaatgattacacctctgaattgtctatacgattcaggctgatttgattggtaattgtaaacaacttgtccttgaatctttgaagtcaaacaaagtcagttggctgaatcagctgaatatatgttatatgcattttttttgcgtgtcgctatcacagcattatgcatctcaaacaagtgtcacatgatggaacgaggatgatgtatggcagcgttatgcatctgaatgttggcatatggcaagcacgacaaggcgtgacagaagggagcagctagtgtgcatatccatttctgcgccgttctcccctcctgataatgacctggacgcacgtctaatggacgttcgtacactgcaatttttcacctggatagaaatgagcatgttatgggtatgccttaatttgcacggctgatgacacatgtccgtgaagtcttttacgtgagcctggaaatatgtccgatccggatactcatggtgcttggatttttgttgtctttccatgtatatatattaatagaaaaaactgtcatggaatctatctttttgtataatcgttgtgaaaccaaaccatcaaaagtcaaaaaaaagtctcaaaat

SEQ ID NO: 34092 - DNA, 1735 bp, Zea Mays
acgagcatgatgatggcaactggcacggtccacggtacttcacgctgactgacacgggcggtggcaccctgtagatgccacacatgtacatcaaaattgcagccagctcatcggcaagacaccaatggtatatctcaacaatgtcgtcaagggctctgtcgccaatgttgctgctaagcttgagattatggagccctgttgtagcgtcaaggacaggatagggtacagtatgataaatgatgctgaacagaagggcttgattactcctggaaagagtgttttagtggaagcaacaagtggaaatacaggcattggtcttgcctttattgctgcttccaaaggatataagttgatattaacaatgccttcatcaatgagcatggagagaagagtcctactcagagcttttggtgctgaacttgtccttactgatgctgcaaaagggatgaaaggggccgtagataaggctacagagattttaaataagacacccaattcttacatgcttcaacagtttgataaccctgccaaccctaaggtgggacaatatctggtgctggccgtttcctcaaggagaaaaattctggaattaaggttattggtattgagccttctgaaagtaacatactctccggtggaaaacctggtccacataagattcagggaattggtgcaggatttgttccaaggaacttggatagcgatattcttgatgaagtaattgagatatcaagtgatgaagctgttgagacagcaaaacagttggctgttcaggaaggattactggttggaatctcctctggagcagctgctgccgctgccataaaggttgcgaaaagaccagaaaatgctggaaagttgatagtggttgtgtttccgagttttggcgagaggtacctttcatctgtcctctatcagtccataagagaagaatgcgagaacatgcagcctgagccatgacggagccgtcactttaaacagcataataaatgtatctggaataagatgcgtgggcaccattagtgtgctccaattggtatcatttggcccatgctcacgctatccttttgcctctatgaccggaactaatcaggcgtgtgagaaatatccatgactctcccaattgctttccattaacaaaatgattacacctctgaattgtctatacgattcaggctgatttgattggtaattgtaaacaacttgtccttgaatctttgaagtcaaacaaagtcagttggctgaatcagctgaatatatgttatatgcattttttttgcgtgtcgctatcacagcattatgcatctcaaacaagtgtcacatgatggaacgaggatgatgtatggcagcgttatgcatctgaatgttggcatatggcaagcacgacaaggcgtgacagaagggagcagctagtgtgcatatccatttctgcgccgttctcccctcctgataatgacctggacgcacgtctaatggacgttcgtacactgcaatttttcacctggatagaaatgagcatgttatgggtatgccttaatttgcacggctgatgacacatgtccgtgaagtcttttacgtgagcctggaaatatgtccgatccggatactcatggtgcttggatttttgttgtctttccatgtatatatattaatagaaaaaactgtcatggaatctatctttttgtataatcgttgtgaaaccaaaccatcaaaagtcaaaaaaaagtctcaaaat

SEQ ID NO: 34093 - DNA, 1654 bp, Zea Mays
acgagcatgatgatggcaactggcacggtccacggtacttcacgctgactgacacgggcggtggcaccctgtagatgccacacatgtacatcaaaattgcagccagctcatcggcaagacaccaatggtatatctcaacaatgtcgtcaagggctctgtcgccaatgttgctgctaagcttgagattatggagccctgttgtagcgtcaaggacaggatagggtacagtatgataaatgatgctgaacagaagggcttgattactcctggaaagagtgttttagtggaagcaacaagtggaaatacaggcattggtcttgcctttattgctgcttccaaaggatataagttgatattaacaatgccttcatcaatgagcatggagagaagagtcctactcagagcttttggtgctgaacttgtccttactgatgctgcaaaagggatgaaaggggccgtagataaggctacagagattttaaataagacacccaattcttacatgcttcaacagtttgataaccctgccaaccctaaggtacattatgagaccactggcccagagatctgggaggattcaaaggggaaggtggatatactcattggcggaattggaacaggttattggtattgagccttctgaaagtaacatactctccggtggaaaacctggtccacataagattcagggaattggtgcaggatttgttccaaggaacttggatagcgatattcttgatgaagtaattgagatatcaagtgatgaagctgttgagacagcaaaacagttggctgttcaggaaggattactggttggaatctcctctggagcagctgctgccgctgccataaaggttgcgaaaagaccagaaaatgctggaaagttgatagtggttgtgtttccgagttttggcgagaggtacctttcatctgtcctctatcagtccataagagaagaatgcgagaacatgcagcctgagccatgacggagccgtcactttaaacagcataataaatgtatctggaataagatgcgtgggcaccattagtgtgctccaattggtatcatttggcccatgctcacgctatccttttgcctctatgaccggaactaatcaggcgtgtgagaaatatccatgactctcccaattgctttccattaacaaaatgattacacctctgaattgtctatacgattcaggctgatttgattgcattatgcatctcaaacaagtgtcacatgatggaacgaggatgatgtatggcagcgttatgcatctgaatgttggcatatggcaagcacgacaaggcgtgacagaagggagcagctagtgtgcatatccatttctgcgccgttctcccctcctgataatgacctggacgcacgtctaatggacgttcgtacactgcaatttttcacctggatagaaatgagcatgttatgggtatgccttaatttgcacggctgatgacacatgtccgtgaagtcttttacgtgagcctggaaatatgtccgatccggatactcatggtgcttggatttttgttgtctttccatgtatatatattaatagaaaaaactgtcatggaatctatctttttgtataatcgttgtgaaaccaaaccatcaaaagtcaaaaaaaagtctcaaaat

SEQ ID NO: 34094 - DNA, 1812 bp, Zea Mays
acgagcatgatgatggcaactggcacggtccacggtacttcacgctgactgacacgggcggtggcaccctgtagatgccacacatgtacatcaaaattgcagccagctcatcggcaagacaccaatggtatatctcaacaatgtcgtcaagggctctgtcgccaatgttgctgctaagcttgagattatggagccctgttgtagcgtcaaggacagggtacagtatgataaatgatgctgaacagaagggcttgattactcctggaaagagtgttttagtggaagcaacaagtggaaatacaggcattggtcttgcctttattgctgcttccaaaggatataagttgatattaacaatgccttcatcaatgagcatggagagaagagtcctactcagagcttttggtgctgaacttgtccttactgatgctgcaaaagggatgaaaggggccgtagataaggctacagagattttaaataagacacccaattcttacatgcttcaacagtttgataaccctgccaaccctaaggtacattatgagaccactggcccagagatctgggaggattcaaaggggaaggtggatatactcattggcggaattggaacaggtgggacaatatctggtgctggccgtttcctcaaggagaaaaattctggaattaaggttattggtattgagccttctgaaagtaacatactctccggtggaaaacctggtccacataagattcagggaattggtgcaggatttgttccaaggaacttggatagcgatattcttgatgaagtaattgagatatcaagtgatgaagctgttgagacagcaaaacagttggctgttcaggaaggattactggttggaatctcctctggagcagctgctgccgctgccataaaggttgcgaaaagaccagaaaatgctggaaagttgatagtggttgtgtttccgagttttggcgagaggtacctttcatctgtcctctatcagtccataagagaagaatgcgagaacatgcagcctgagccatgacggagccgtcactttaaacagcataataaatgtatctggaataagatgcgtgggcaccattagtgtgctccaattggtatcatttggcccatgctcacgctatccttttgcctctatgaccggaactaatcaggcgtgtgagaaatatccatgactctcccaattgctttccattaacaaaatgattacacctctgaattgtctatacgattcaggctgatttgattggtaattgtaaacaacttgtccttgaatctttgaagtcaaacaaagtcagttggctgaatcagctgaatatatgttatatgcattttttttgcgtgtcgctatcacagcattatgcatctcaaacaagtgtcacatgatggaacgaggatgatgtatggcagcgttatgcatctgaatgttggcatatggcaagcacgacaaggcgtgacagaagggagcagctagtgtgcatatccatttctgcgccgttctcccctcctgataatgacctggacgcacgtctaatggacgttcgtacactgcaatttttcacctggatagaaatgagcatgttatgggtatgccttaatttgcacggctgatgacacatgtccgtgaagtcttttacgtgagcctggaaatatgtccgatccggatactcatggtgcttggatttttgttgtctttccatgtatatatattaatagaaaaaactgtcatggaatctatctttttgtataatcgttgtgaaaccaaaccatcaaaagtcaaaaaaaagtctcaaaat

SEQ ID NO: 34095 - DNA, 1710 bp, Zea Mays
acgagcatgatgatggcaactggcacggtccacggtacttcacgctgactgacacgggcggtggcaccctgtagatgccacacatgtacatcaaaattgcagccagctcatcggcaagacaccaatggtatatctcaacaatgtcgtcaagggctctgtcgccaatgttgctgctaagcttgagattatggagccctgttgtagcgtcaaggacaggatagggtacagtatgataaatgatgctgaacagaagggcttgattactcctggaaagagtgttttagtggaagcaacaagtggaaatacaggcattggtcttgcctttattgctgcttccaaaggatataagttgatattaacaatgccttcatcaatgagcatggagagaagagtcctactcagagcttttggtgctgaacttgtccttactgatgctgcaaaagggatgaaaggggccgtagataaggctacagagattttaaataagacacccaattcttacatgcttcaacagtttgataaccctgccaaccctaaggtacattatgagaccactggcccagagatctgggaggattcaaaggggaaggtggatatactcattggcggaattggaacaggtgggacaatatctggtgctggccgtttcctcaaggagaaaaattctggaattaaggttattggtattgagccttctgaaagtaacatactctccggtggaaaacctggtccacataagattcagggaattggtgcaggatttgttccaaggaacttggatagcgatattcttgatgaagtaattgagatatcaagtgatgaagctgttgagacagcaaaacagttggctgttcaggaaggattactggttggaatctcctctggagcagctgctgccgctgccataaaggttgcgaaaagaccagaaaatgctggaaagttgatagtggttgtgtttccgagttttggcgagaggtacctttcatctgtcctctatcagtccataagagaagaatgcgagaacatgcagcctgagccatgacggagccgtcactttaaacagcataataaatgtatctggaataagatgcgtgggcaccattagtgtgctccaattggtatcatttggcccatgctcacgctatccttttgcctctatgaccggaactaatcaggcgtgtgagaaatatccatgactctcccaattgctttccattaacaaaatgattacacctctgaattgtctatacgattcaggctgatttgattgcattatgcatctcaaacaagtgtcacatgatggaacgaggatgatgtatggcagcgttatgcatctgaatgttggcatatggcaagcacgacaaggcgtgacagaagggagcagctagtgtgcatatccatttctgcgccgttctcccctcctgataatgacctggacgcacgtctaatggacgttcgtacactgcaatttttcacctggatagaaatgagcatgttatgggtatgccttaatttgcacggctgatgacacatgtccgtgaagtcttttacgtgagcctggaaatatgtccgatccggatactcatggtgcttggatttttgttgtctttccatgtatatatattaatagaaaaaactgtcatggaatctatctttttgtataatcgttgtgaaaccaaaccatcaaaagtcaaaaaaaagtctcaaaat

SEQ ID NO: 34096 - DNA, 1774 bp, Zea Mays
gatcgatgctgtgacagagaactcttggaagtccaaggcactctaggggacacgagcatgatgatggcaactggcacggtccacgctcatcggcaagacaccaatggtatatctcaacaatgtcgtcaagggctctgtcgccaatgttgctgctaagcttgagattatggagccctgttgtagcgtcaaggacaggatagggtacagtatgataaatgatgctgaacagaagggcttgattactcctggaaagagtgttttagtggaagcaacaagtggaaatacaggcattggtcttgcctttattgctgcttccaaaggatataagttgatattaacaatgccttcatcaatgagcatggagagaagagtcctactcagagcttttggtgctgaacttgtccttactgatgctgcaaaagggatgaaaggggccgtagataaggctacagagattttaaataagacacccaattcttacatgcttcaacagtttgataaccctgccaaccctaaggtacattatgagaccactggcccagagatctgggaggattcaaaggggaaggtggatatactcattggcggaattggaacaggtgggacaatatctggtgctggccgtttcctcaaggagaaaaattctggaattaaggttattggtattgagccttctgaaagtaacatactctccggtggaaaacctggtccacataagattcagggaattggtgcaggatttgttccaaggaacttggatagcgatattcttgatgaagtaattgagatatcaagtgatgaagctgttgagacagcaaaacagttggctgttcaggaaggattactgctgctgccgctgccataaaggttgcgaaaagaccagaaaatgctggaaagttgatagtggttgtgtttccgagttttggcgagaggtacctttcatctgtcctctatcagtccataagagaagaatgcgagaacatgcagcctgagccatgacggagccgtcactttaaacagcataataaatgtatctggaataagatgcgtgggcaccattagtgtgctccaattggtatcatttggcccatgctcacgctatccttttgcctctatgaccggaactaatcaggcgtgtgagaaatatccatgactctcccaattgctttccattaacaaaatgattacacctctgaattgtctatacgattcaggctgatttgattggtaattgtaaacaacttgtccttgaatctttgaagtcaaacaaagtcagttggctgaatcagctgaatatatgttatatgcattttttttgcgtgtcgctatcacagcattatgcatctcaaacaagtgtcacatgatggaacgaggatgatgtatggcagcgttatgcatctgaatgttggcatatggcaagcacgacaaggcgtgacagaagggagcagctagtgtgcatatccatttctgcgccgttctcccctcctgataatgacctggacgcacgtctaatggacgttcgtacactgcaatttttcacctggatagaaatgagcatgttatgggtatgccttaatttgcacggctgatgacacatgtccgtgaagtcttttacgtgagcctggaaatatgtccgatccggatactcatggtgcttggatttttgttgtctttccatgtatatatattaatagaaaaaactgtcatggaatctatctttttgtataatcgttgtgaaaccaaaccatcaaaagtcaaaaaaaagtctcaaaat

SEQ ID NO: 34097 - DNA, 3334 bp, Zea Mays
ccttgatagggcgctagtacaggcgctggcctaggcgtccagcaaggcccaaatgtggaggttggcctgttttagaaagaggaatagatggatgatatttaggagattgatttgagtttgttaggaaagtgcacctagtatataaagggaaccttaggaatgtaattggattatcgaagaaggaataaacctccctaggtgggtgggtttcttttcgacggtggttgccggcgattcagcagtggtcaccggcgctgaaaccaccacagcaccacactattgcctcgctgccctctgcactcaagcttagtcccatctttccttcattctcccctttgcttttcatatcgctagcaccacatcaatttggtatcaatgacttccatgtcagcaccctgttcgatcctgtgagatgaacgccaagatcgaccgcatcttgggacagacttagggaggtaggtatcttatggagatatatagcatcaagtcgacggcacgactttggctaaggcacgtgtagatttgatctaaaagaaagcaagtgatcaaaagtaatcatatgctaatagaacagtccattaaaatcaccatgcctaaggctcatgtgcagtagtctgatttgttggataaatgatttcccagtcatataccacaataatttgtagtgttcctatttgaatgacacctaataaaaggaattgattttgcagttgcaaatccatgtagctcctgatcctagaatgaaacttgtgcggcccctttttgagctctggcaaccttgctaacatattttaaactcacacagctgcaggctgttttgatctaatgttcactatactaacttagtagcattcgaaatcaacatccctacaactgaagctatccttcagaactgtagttataggaaatgctctttctgttcagatgaattatttcactgttgctaccaactgaagctagctgtctccctattgagtacatcagaaaaatgcacaaatggctctatcagctcattgttctgtgaagagaccacaacgctctagtaaattatataggggtacgaactaagaatgtttatttgcagtcatgtctgtttatctttcaatacacttgtgaaatgagcttaaactatcattactttgtggtgctatgagaacaattcaactttcaacctaaccttattggggttaagatattatctggcaaaatttcagtccacataatattcaattgtgtgagtgttcatggaataatcagttaggttcaatttagcaaaacttcagaattagtttgaattcagtaaatatattgacaatgttcagtcagtggaatttcaattggaattaagttactaagcctatctgcaacaaacagactaatccaaaatctgcaagataaacaagaaattaaatgaacagagtgagttgacatggttttagagcacacactttgatgctgatgtaaagcttggtgacacgattgcgactcacggcgccacggtggtgacgaccacggctgccgcgctagagatggaggagatcgctgccttggcctgggcgtgtcacttggatgagctgctgctggagtgcgatgtgatcgatgctgtgacagagaactcttggaagtccaaggcactctaggggacacgagcatgatgatggcaactggcacggtccacgctcatcggcaagacaccaatggtatatctcaacaatgtcgtcaagggctctgtcgccaatgttgctgctaagcttgagattatggagccctgttgtagcgtcaaggacaggatagggtacagtatgataaatgatgctgaacagaagggcttgattactcctggaaagagtgttttagtggaagcaacaagtggaaatacaggcattggtcttgcctttattgctgcttccaaaggatataagttgatattaacaatgccttcatcaatgagcatggagagaagagtcctactcagagcttttggtgctgaacttgtccttactgatgctgcaaaagggatgaaaggggccgtagataaggctacagagattttaaataagacacccaattcttacatgcttcaacagtttgataaccctgccaaccctaaggtacattatgagaccactggcccagagatctgggaggattcaaaggggaaggtggatatactcattggcggaattggaacaggttattggtattgagccttctgaaagtaacatactctccggtggaaaacctggtccacataagattcagggaattggtgcaggatttgttccaaggaacttggatagcgatattcttgatgaagtaattgagatatcaagtgatgaagctgttgagacagcaaaacagttggctgttcaggaaggattactggttggaatctcctctggagcagctgctgccgctgccataaaggttgcgaaaagaccagaaaatgctggaaagttgatagtggttgtgtttccgagttttggcgagaggtacctttcatctgtcctctatcagtccataagagaagaatgcgagaacatgcagcctgagccatgacggagccgtcactttaaacagcataataaatgtatctggaataagatgcgtgggcaccattagtgtgctccaattggtatcatttggcccatgctcacgctatccttttgcctctatgaccggaactaatcaggcgtgtgagaaatatccatgactctcccaattgctttccattaacaaaatgattacacctctgaattgtctatacgattcaggctgatttgattggtaattgtaaacaacttgtccttgaatctttgaagtcaaacaaagtcagttggctgaatcagctgaatatatgttatatgcattttttttgcgtgtcgctatcacagcattatgcatctcaaacaagtgtcacatgatggaacgaggatgatgtatggcagcgttatgcatctgaatgttggcatatggcaagcacgacaaggcgtgacagaagggagcagctagtgtgcatatccatttctgcgccgttctcccctcctgataatgacctggacgcacgtctaatggacgttcgtacactgcaatttttcacctggatagaaatgagcatgttatgggtatgccttaatttgcacggctgatgacacatgtccgtgaagtcttttacgtgagcctggaaatatgtccgatccggatactcatggtgcttggatttttgttgtctttccatgtatatatattaatagaaaaaactgtcatggaatctatctttttgtataatcgttgtgaaaccaaaccatcaaaagtcaaaaaaaagtctcaaaat

SEQ ID NO: 34098 - DNA, 3283 bp, Zea Mays
ccttgatagggcgctagtacaggcgctggcctaggcgtccagcaaggcccaaatgtggaggttggcctgttttagaaagaggaatagatggatgatatttaggagattgatttgagtttgttaggaaagtgcacctagtatataaagggaaccttaggaatgtaattggattatcgaagaaggaataaacctccctaggtgggtgggtttcttttcgacggtggttgccggcgattcagcagtggtcaccggcgctgaaaccaccacagcaccacactattgcctcgctgccctctgcactcaagcttagtcccatctttccttcattctcccctttgcttttcatatcgctagcaccacatcaatttggtatcaatgacttccatgtcagcaccctgttcgatcctgtgagatgaacgccaagatcgaccgcatcttgggacagacttagggaggtaggtatcttatggagatatatagcatcaagtcgacggcacgactttggctaaggcacgtgtagatttgatctaaaagaaagcaagtgatcaaaagtaatcatatgctaatagaacagtccattaaaatcaccatgcctaaggctcatgtgcagtagtctgatttgttggataaatgatttcccagtcatataccacaataatttgtagtgttcctatttgaatgacacctaataaaaggaattgattttgcagttgcaaatccatgtagctcctgatcctagaatgaaacttgtgcggcccctttttgagctctggcaaccttgctaacatattttaaactcacacagctgcaggctgttttgatctaatgttcactatactaacttagtagcattcgaaatcaacatccctacaactgaagctatccttcagaactgtagttataggaaatgctctttctgttcagatgaattatttcactgttgctaccaactgaagctagctgtctccctattgagtacatcagaaaaatgcacaaatggctctatcagctcattgttctgtgaagagaccacaacgctctagtaaattatataggggtacgaactaagaatgtttatttgcagtcatgtctgtttatctttcaatacacttgtgaaatgagcttaaactatcattactttgtggtgctatgagaacaattcaactttcaacctaaccttattggggttaagatattatctggcaaaatttcagtccacataatattcaattgtgtgagtgttcatggaataatcagttaggttcaatttagcaaaacttcagaattagtttgaattcagtaaatatattgacaatgttcagtcagtggaatttcaattggaattaagttactaagcctatctgcaacaaacagactaatccaaaatctgcaagataaacaagaaattaaatgaacagagtgagttgacatggttttagagcacacactttgatgctgatgtaaagcttggtgacacgattgcgactcacggcgccacggtggtgacgaccacggctgccgcgctagagatggaggagatcgctgccttggcctgggcgtgtcacttggatgagctgctgctggagtgcgatgtgatcgatgctgtgacagagaactcttggaagtccaaggcactctaggggacacgagcatgatgatggcaactggcacggtccacgctcatcggcaagacaccaatggtatatctcaacaatgtcgtcaagggctctgtcgccaatgttgctgctaagcttgagattatggagccctgttgtagcgtcaaggacaggatagggtacagtatgataaatgatgctgaacagaagggcttgattactcctggaaagagtgttttagtggaagcaacaagtggaaatacaggcattggtcttgcctttattgctgcttccaaaggatataagttgatattaacaatgccttcatcaatgagcatggagagaagagtcctactcagagcttttggtgctgaacttgtccttactgatgctgcaaaagggatgaaaggggccgtagataaggctacagagattttaaataagacacccaattcttacatgcttcaacagtttgataaccctgccaaccctaaggtacattatgagaccactggcccagagatctgggaggattcaaaggggaaggtggatatactcattggcggaattggaacaggtgggacaatatctggtgctggccgtttcctcaaggagaaaaattctggaattaaggttattggtattgagccttctgaaagtaacatactctccggtggaaaacctggtccacataagattcagggaattggtgcaggatttgttccaaggaacttggatagcgatattcttgatgaagtaattgagatatcaagtgatgaagctgttgagacagcaaaacagttggctgttcaggaaggattactggttggaatctcctctggagcagctgctgccgctgccataaaggttgcgaaaagaccagaaaatgctggaaagttgatagtggttgtgtttccgagttttggcgagaggtacctttcatctgtcctctatcagtccataagagaagaatgcgagaacatgcagcctgagccatgacggagccgtcactttaaacagcataataaatgtatctggaataagatgcgtgggcaccattagtgtgctccaattggtatcatttggcccatgctcacgctatccttttgcctctatgaccggaactaatcaggcgtgtgagaaatatccatgactctcccaattgctttccattaacaaaatgattacacctctgaattgtctatacgattcaggctgatttgattgcattatgcatctcaaacaagtgtcacatgatggaacgaggatgatgtatggcagcgttatgcatctgaatgttggcatatggcaagcacgacaaggcgtgacagaagggagcagctagtgtgcatatccatttctgcgccgttctcccctcctgataatgacctggacgcacgtctaatggacgttcgtacactgcaatttttcacctggatagaaatgagcatgttatgggtatgccttaatttgcacggctgatgacacatgtccgtgaagtcttttacgtgagcctggaaatatgtccgatccggatactcatggtgcttggatttttgttgtctttccatgtatatatattaatagaaaaaactgtcatggaatctatctttttgtataatcgttgtgaaaccaaaccatcaaaagtcaaaaaaaagtctcaaaat

SEQ ID NO: 34099 - DNA, 452 bp, Zea Mays
cgggcactgacgcacatgtttgaaagtaatcatcaggggagtgacatggatcctcgaacgatttccgagccttgcaagcaggctctgatgaccccaggtccccaaccgaggcaatagctacaggatacgctacgcatggctttgctctcgaaagtccagtgagatcgagctagcagacgtgtataatgttctacaattaatacattattctaagaaactggccaaacgtatgtctcgtcgtgacgaaaagaaaaataaaaatataggcccaattacttttattaaataggagtgtatagttctgcacctaagtaagagcttgttactatacaaaaactgactattagtaagatgagatgtatagtttacagtcggtctaccggctaaaccattaaccttgctctaattttatatatatgcaaacataaatgtatagaaaaagttcgagcctg

SEQ ID NO: 34100 - DNA, 518 bp, Zea Mays
ggcgctctcctccacctacagctcgccccgtctcctcctctccccatggcggctcccctcggatccctccctccatggctaccgtcgcccccaagcccgcggtcttgtcgagctcgcccaacccttccccatcttctctccacctctctgatgatcagcgcccttaccccatggtgccatggatgccgccctcccctaacggcatgctcccagcgcctcctccccacgctcgtcttggcatggaggtcaaccatgggatgcatcacaccaacctcaccggccataccccctgctcctccccaccatccacagccccaacgtcatcgccgtgtttagtcatggtacgctagatgattatgcgagctgaaggacatggatcagagcgaaccataagatgatattggtggattaatcttgtggatgcatcaagccaacaccagaatggaagatgttcaccaagtggtcgtcaattaacaacactaacgtagtgtttatcccaggcaagccccggtgcattt

SEQ ID NO: 34101 - DNA, 927 bp, Zea Mays
ctactgtattcccttcaacatgtgcgatccagccaccagaaaattctccccacgctcgcttgagtagcagcgctcgactccctgctcgtcggccaccaggacgacatctccacgcgccgagttcctcccatggctatcccaaaccctagccgagatcccctcctgtgtcggccactatctccttcaccaggacgacatctccacgcgccgagttcctcccatggctatcccaaaccctagccgagatcccctcctgtgtcggccactatctccttcaccaggcgctctcctccacctacagctcgccccgtctcctcctctccccatggcggctcccctcggatccctccctccatggctaccgtcgcccccaagcccgcggtcttgtcgagctcgcccaacccttccccatcttctctccacctctctgatgatcagcgcccttaccccatggtgccatggatgccgccctcccctaacggcatgctcccagcgcctcctccccacgctcgtcttggcatggaggtcaaccatgggatgcatcacaccaacctcaccggccataccccctgctcctccccaccatccacagccccaacgtcatcgccgtgtttagtcatgagagaaaggttctaaggtttggttggaaaagaaagctatagcacgtcgaccaccaggtgtttgatgaattagatgaatcaacgcttgttgcggttattgtgaagtttcggttcatatgagcttttgggggtacgctagatgattatgcgagctgaaggacatggatcagagcgaaccataagatgatattggtggattaatcttgtggatgcatcaagccaacaccagaatggaagatgttcaccaagtggtcgtcaattaacaacactaacgtagtgtttatcccaggcaagccccggtgcattt

SEQ ID NO: 34102 - DNA, 1098 bp, Zea Mays
gtctgtactagtttgactggtatcttttgtttcgtccggtttacatctcgcgtagatttaatctgagaactaaattatctgtgtagtcttttgtgtaaaaaatgagaaggaaaataggaaaaatcttttctcaattatcttctaccgccctcaacatctttgccttatcctaggtgtgcccagaaatctctagaattcttccacgtactcctctctccaatccaatcaattcacatacgtatctcagttttcatttgcttcactactgtattcccttcaacatgtgcgatccagccaccagaaaattctccccacgctcgcttgagtagcagcgctcgactccctgctcgtcggccaccaggacgacatctccacgcgccgagttcctcccatggctatcccaaaccctagccgagatcccctcctgtgtcggccactatctccttcaccaggcgctctcctccacctacagctcgccccatctcctcctctccccatggcggctcccctcggatccctccctccatggctaccgtcgcccccaagcccgcggtcttgccgagctcgcccaacccttccccatcttctctccacctctctgatgatcagcgcccttaccccatggtgccagagacgccaccctctcctaacggcatgctcccagcgcctcctccccacgctcgtcttggcatggaggtcaaccatgggatgcatcacaccaacctcaccggccataccccctgctcctccccaccgtccgcagccccaacgtcatcgccgtgtttagtcatgagagaaaggttctaaggtttggttggaaaagaaagctatagcacgtcgaccaccaggtgtttgatgaattagatgaatcaacgcttgttgcggttattgtgaagtttcggttcatatgagcttttgggggtacgctagatgattatgcgagctgaaggacatggatcagagcgaaccataagatgatattggtggattaatcttgtggatgcatcaagccaacaccagaatggaagatgttcaccaagtggtcgtcaattaacaacactaacgtagtgtttatcccaggcaagccccggtgcattt

SEQ ID NO: 34103 - DNA, 1293 bp, Zea Mays
cgaatttatttgatctcagataaatcaatggaacaatatcatcttgtccctgataaattaagcgtatctcgacgactaaagttttggtgcaaaataattcagtcctcgctcatccaccgagaaattgagtccgaggatttataattgagatttgattctctagtaaattatctgctctaaattaaatcaagtgcagtctgtactagtttgactggtatcttttgtttcgtccggtttacatctcgcgtagatttaatctgagaactaaattatctgtgtagtcttttgtgtaaaaaatgagaaggaaaataggaaaaatcttttctcaattatcttctaccgccctcaacatctttgccttatcctaggtgtgcccagaaatctctagaattcttccacgtactcctctctccaatccaatcaattcacatacgtatctcagttttcatttgcttcactactgtattcccttcaacatgtgcgatccagccaccagaaaattctccccacgctcgcttgagtagcagcgctcgactccctgctcgtcggccaccaggacgacatctccacgcgccgagttcctcccatggctatcccaaaccctagccgagatcccctcctgtgtcggccactatctccttcaccaggcgctctcctccacctacagctcgccccatctcctcctctccccatggcggctcccctcggatccctccctccatggctaccgtcgcccccaagcccgcggtcttgccgagctcgcccaacccttccccatcttctctccacctctctgatgatcagcgcccttaccccatggtgccagagacgccaccctctcctaacggcatgctcccagcgcctcctccccacgctcgtcttggcatggaggtcaaccatgggatgcatcacaccaacctcaccggccataccccctgctcctccccaccgtccgcagccccaacgtcatcgccgtgtttagtcatgagagaaaggttctaaggtttggttggaaaagaaagctatagcacgtcgaccaccaggtgtttgatgaattagatgaatcaacgcttgttgcggttattgtgaagtttcggttcatatgagcttttggaggtacgctagatgattatgcgagctgaaggacatggatcagagcgaaccataagatgatattggtggattaatcttgtggatgcatcaagccaacaccagaatggaagatgttcaccaagtggtcgtcaattaacaacactaacgtagtgtttatcccaggcaagccccggtgcattt

SEQ ID NO: 34104 - DNA, 1282 bp, Zea Mays
gtctgtactagtttgactggtatcttttgtttcgtccggtttacatctcgcgtagatttaatctgagaactaaattatctgtgtagtcttttgtgtaaaaaatgagaaggaaaataggaaaaatcttttctcaattatcttctaccgccctcaacatctttgccttatcctaggtgtgcccagaaatctctagaattcttccacgtactcctctctccaatccaatcaattcacatacgtatctcagttttcatttgcttcactactgtattcccttcaacatgtgcgatccagccaccagaaaattctccccacgctcgcttgagtagcagcgctcgactccctgctcgtcggccaccaggacgacatctccacgcgccgagttcctcccatggctatcccaaaccctagccgagatcccctcctgtgtcggccactatctccttcaccaggcgctctcctccacctacagctcgccccatctcctcctctccccatggcggctcccctcggatccctccctccatggctaccgtcgcccccaagcccgcggtcttgccgagctcgcccaacccttccccatcttctctccacctctctgatgatcagcgcccttaccccatggtgccagagacgccaccctctcctaacggcatgctcccagcgcctcctccccacgctcgtcttggcatggaggtcaaccatgggatgcatcacaccaacctcaccggccataccccctgctcctccccaccgtccgcagccccaacgtcatcgccgtgtttagtcatgagagaaaggttctaaggtttggttggaaaagaaagctatagcacgtcgaccaccaggtgtttgatgaattagatgaatcaacgcttgttgcggttattgtgaagtttcggttcatatgagcttttgggggtgagccagtttctcgctcttatttttggtactatgcataaagtgattagatgtattatatgcgatgttacatggcgatgttagggaaggattttcctttatattttccttaggatagttgagcataggtattgtttgatgttagattaggatttaaaatatacaagtgtgcgaggaatagtggtaaatcagtggttgttgtcaaaataccgtgttgtatgtattgttatgattctatccataattataatggagtcgcgtcgtatgattgagttaattgttcttgtgttcacaatcataaattccctgtgtgtacagttttgattgcgcaactaatccggtgaagcaaactacgttttct

SEQ ID NO: 34105 - DNA, 1472 bp, Zea Mays
cgaatttatttgatctcagataaatcaatggaacaatatcatcttgtccctgataaattaagcgtatctcgacgactaaagttttggtgcaaaataattcagtcctcgctcatccaccgagaaattgagtccgaggatttataattgagatttgattctctagtaaattatctgctctaaattaaatcaagtgcagtctgtactagtttgactggtatcttttgtttcgtccggtttacatctcgcgtagatttaatctgagaactaaattatctgtgtagtcttttgtgtaaaaaatgagaaggaaaataggaaaaatcttttctcaattatcttctaccgccctcaacatctttgccttatcctaggtgtgcccagaaatctctagaattcttccacgtactcctctctccaatccaatcaattcacatacgtatctcagttttcatttgcttcactactgtattcccttcaacatgtgcgatccagccaccagaaaattctccccacgctcgcttgagtagcagcgctcgactccctgctcgtcggccaccaggacgacatctccacgcgccgagttcctcccatggctatcccaaaccctagccgagatcccctcctgtgtcggccactatctccttcaccaggcgctctcctccacctacagctcgccccatctcctcctctccccatggcggctcccctcggatccctccctccatggctaccgtcgcccccaagcccgcggtcttgccgagctcgcccaacccttccccatcttctctccacctctctgatgatcagcgcccttaccccatggtgccagagacgccaccctctcctaacggcatgctcccagcgcctcctccccacgctcgtcttggcatggaggtcaaccatgggatgcatcacaccaacctcaccggccataccccctgctcctccccaccgtccgcagccccaacgtcatcgccgtgtttagtcatgagagaaaggttctaaggtttggttggaaaagaaagctatagcacgtcgaccaccaggtgtttgatgaattagatgaatcaacgcttgttgcggttattgtgaagtttcggttcatatgagcttttggaggtacgctagatgattatgcgagctgaaggacatggatcagagcgaaccataagatgatattggtggattaatcttgtggatgcatcaagccaacaccagaatggaagatgctcaccaagtggtcgtcaattaacaacactaacgtagtgtttatcccaggcaagccccggtgcatttgccacctccttgttgtttttaaaacttttatcacttatatgttgcattaggtgataagagttgagtgatgaaacagttgatgcattgccattccttggaatttgattatcttccttgatacctgttttacaaaaagaactaatgaggcttagccctgcctagagaattaaaacttgttt

SEQ ID NO: 34106 - DNA, 1418 bp, Zea Mays
ctggacccagtctatccggtaaccgattccaagttccaaccaatcccccctctccatccaatcccaccccaaacccaacccagacatggccgaccacgacccccgcgccgccgcggcctcctcgtccgccggaggcgacgaagacgacgagggtaccgacactgatgtctccgactccaacctcggcaatccccagggccaggatcctctacccttccccgacgcagcttgggtcccaccccatcctctcgctcccgcccacgagcccgccggcgcacttccgccgccgctgccgcagggtccttccgcgggcgcctcggccacgacggatgactcgcgtcggctgttccagcggctgtggacggacgaggaggagctcctcatcctgcgcggcttcctcgacttcacggcgcgccggggcaccactttcgcgtcgcaccagtacgacacgggccccttctacgaggagatccgccgccgcctctccttcgaattcaccaagagtcagctcattgagaagctgcgccgcctcaagaagaagtaccgcgtctgcgccgcgcgcgtcgcggcgcagggcgacgcgttcgcgttccggagcgtgcatgagggcgccatctacgacgtcgcgcggcacatctggcgccccgcgttcaggcgcggcgaaggcggcggcgcggccgacgcctcagacgaggacgacatcaaccccgtggccgccgctgcgatggaggatggcggcggcgggagcgcgtccacgcccgtgcccacggcgaggggcaggggaggccggtgcgttcggaggaggaccgcgcaagagctggaggcccccgcattgccagccacatccgcgctgctgctaagtgatgcagctgaggaccggcattgtgcactggtggcgccgccgaggaggctatcaagagtatcatgtcaccgttactgaaggagttcatcaactctgtcgctgtcggtgggcagagtggattcggattggggcttggcacaggattcggcggcattggcggcttcgacattcttggtcttggtacaggggttcctggcccaaatcctggaatgcccagtgatgataagtggaggcagcagcagattctggagcttgaggtttatctaaagaggattgagcttgtgcgcgaacaggttactgctgctttagaagacctcaggtcatcagaaggctgaggggcgatcttcttctatagtcttttcgttagagcctacctcgttacaaacattctaattgtatttaatttaaaataggtgtttgaactcgtcataagattagaggctgaaaagattgatttgtagatggactcacgatgaaggctgttatctacttgctacctgcttcattgtcggacatgttcagtccctcttttgttagaattcagtgcatagtttcc

SEQ ID NO: 34107 - DNA, 449 bp, Zea Mays
caaggccacacacacacacacaccactaggctaggttagccttttaatcgtcgtcgagaagcaagaagggcgcgcacgcaagcaggcaagcaagaagagagccgatcgaccgagagctagcacgcgatggcgaggcgaggaacatcaagaccacgacgacggagaagaaggacgacgcggtggtgcagccgcagaccttcccgcccttcgaccgcctcggcggcggcgcgtccccggcgttcggcggcctccccggcggcagcattcctggcagcagcattcccgggttcagcatgcccggcagcggcagcagcctacccgggttcagcttgcccggcagcggcagcatgcccctcttcggcggcggctccccgggcttcagcggcttcggcggcatgcccgggtcgcccaccgccggctccgtccccgagcacgccaacaagccctga

SEQ ID NO: 34108 - DNA, 1503 bp, Zea Mays
ctccgagaaactactgcgctacgaagtgtggcccgcctagcccacaggataataaccggataaggggcatgcaatgcacgcccaggtggccgtgctcctcgccgccggcgcccctccgccaccgtggccgcctcacccctcgtggcaccatcgccagatcccttgccgtcggcctttcaagccgccccactctctgcgcgacggcggcggcggacagccgccgcccccggtcgtggtcccagcttcgaagaggcgcgcctggccggccgtctcggcggcgctgttcggtgcagggttcctcctgggcccgctcctcgacggaatccactcccgcgtcggcctccaggtgtacgggaacggcgccctcgaagccggggcccttcgcacccacgtcctggtgccgcccctgctcggcgcgttctacctcaccgtcggcctgctccacctgttcctggacgagagggcgcccccgaaatccagggccaccgggaccgcgcggaggacggcgacgtcgctgctcgttcttgcgctgttcatcgagacgagcgcggagatgtacagggcaggggtggcgagcaacgtggaggcctacgtcctgttcgccggcgcggagtttgcgtggctcttcctcgatggctcctggctgggcttcgccgtcgcctgcctcgtcggcacggtttgcccgctcgcggagatcccgctgatcaagttgcttgggtgctggagctatccgaacgccgacgtccacctgctcggcgaggtggctcgattcacggctggcaataaacaaggacgtcgcggacgcggagggaggcgacgaggcagctcggtcttgagtcacaccggcgggaacaccagccggcgtatcccgggcttgggtccatgcggactggagtttagtgctcggagcagcagtgctgttcgtctaaaggcgatgcggccttaattttacgatgatggccgggaaccatgtccggtgggccgggccgggccgggggaggagaacgatgggtacggttgcgcataacttttgttataatgatctgaaagcatggccgcattgatacggttggatgcgtgggatttgtcttcaggaaaaagggcgaaaggcactcctggggcgatgttcgtggcgacaggtgttctgaattctgatacggtttagtcttttcgctctgattgaacgcgcactactacaccagtacacctgagaaatagagtgtcttgtgttgttctgctttggatgcacaccgcagaaaatgagcttattgcggatttttaactgtttaacgctacggactttaagagatcgtcgggggtgtttagtagagctcccacaactctgattttagaaagccaaatggttaaaatctgagttgctccatcgtggatgtaaagttaatctagtctccattttgtactagagagtgggagcaaaaaaaacatgttttctgttgctctcaacctactccctacactgcaacccctcgggaatcacttcac

SEQ ID NO: 34109 - DNA, 1503 bp, Zea Mays
gtcaggactgaggaccatctccgagaaactactgcgctacgaagtgtggcccgcctagcccacaggataataaccggataaggggcatgcaatgcacgcccaggtggccgtgctcctcgccgccggcgcccctccgccaccgtggccgcctcacccctcgtggcaccatcgccagatcccttgccgtcggcctttcaagccgccccactctctgcgcgacggcggcggcggacagccgccgcccccggtcgtggtcccagcttcgaagaggcgcgcctggccggccgtctcggcggcgctgttcggtgcagggttcctcctgggcccgctcctcgacggaatccactcccgcgtcggcctccaggtgtacgggaacggcgccctcgaagccggggcccttcgcacccacgtcctggtgccgcccctgctcggcgcgttctacctcaccgtcggcctgctccacctgttcctggacgagagggcgcccccgaaatccagggccaccgggaccgcgcggaggacggcgacgtcgctgctcgttcttgcgctgttcatcgagacgagcgcggagatgtacagggcaggggtggcgagcaacgtggaggcctacgtcctgttcgccggcgcggagtttgcgtggctcttcctcgatggctcctggctgggcttcgccgtcgcctgcctcgtcggcacggtttgcccgctcgcggagatcccgctgatcaagttgcttgggtgctggagctatccgaacgccgacgtccacctgctcggcgaggggctggtgagctggacgacgacgtgctacttcgtctacaccccgttcctggcgaacctggcgaggtggctcgattcacggctggcaataaacaaggacgtcgcggacgcggagggaggcgacgaggcagctcggtcttgagtcacaccggcgggaacaccagccggcgtatcccgggcttgggtccatgcggactggagtttagtgctcggagcagcagtgctgttcgtctaaaggcgatgcggccttaattttacgatgatggccgggaaccatgtccggtgggccgggccgggccgggggaggagaacgatgggaaaaagggcgaaaggcactcctggggcgatgttcgtggcgacaggtgttctgaattctgatacggtttagtcttttcgctctgattgaacgcgcactactacaccagtacacctgagaaatagagtgtcttgtgttgttctgctttggatgcacaccgcagaaaatgagcttattgcggatttttaactgtttaacgctacggactttaagagatcgtcgggggtgtttagtagagctcccacaactctgattttagaaagccaaatggttaaaatctgagttgctccatcgtggatgtaaagttaatctagtctccattttgtactagagagtgggagcaaaaaaaacatgttttctgttgctctcaacctactccctacactgcaacccctcgggaatcacttcac

SEQ ID NO: 34110 - DNA, 2268 bp, Zea Mays
ttttcttctttttcttggtgttgttgctgtttcatcatcctttgctcattatctatcaccactagctgctaaatgggtctcctgtttcttaaatagcattggccgtgtaaacccagagttgtacgccttgagtatcgggacatgggtaaatcaaaggaggggtaccaatgcttgtacctcacaggatgatctagaagcatggatggggagatatgctgaagttctatgtgtaaattgttggcaggtaaagagatacattgatcaatattctgctacttccgttattggatttccatcagaagacctgcaacatatcatggacctatattcaagagctcaggaaaattggtcagcttctctgataactagttcatcagagacatgtagtcaagaaaaagtagagaagggttcagttctgctgcagcaaattgatgcatacaatgacttcttgaagagttttgcaaagcttgctcgctctgcttggacagaatttgatttatggtcaatgggcattggtcttttacttatgatgttgtcagttatcattcaggcatccatgcttgtaaatatgaccataagccaatcttcagatcagaaaagttctggttcaagcataattcatagactttcccttgctttttctttagtcgtgattcgagcagctagtttcttatcgaacagctatatattggcggaaggtagagttgcaaattttcttttggccacaagttgtatcaccagtgtgtggcactcggtgctgaaggggaacatcagcatagaaaactttgtttttcttcttttaaatattttcacacggtttggaattgaggttgggatgtcaaaacaattgcctgccccaacaattacaaaggatcatcctgtgagcgtcatttataaaatccttggtgctaattcttgcaacatcctcttggagctattccccatcatatctctagcctttgtggcttacattatgttgaaatgcctatcccgtgcaatctgtcagaggttcttgaagttctttcttttgtgtggaacaatggtgagttatttatctatagcgtttcattgggcttcagagactactttgtttgctcatgctgggactgttcaagaatttggaagaagtttggctcctcgcattgtttacactattggaggtctatcactagccatttctgcattttctcggatatttggttcaactgttcatttgaagttgaacaaaaggataattattttatcggctgtcatgctttgttcttggagtccaactattttgatcctgttgggaaggcaaggtccatttgtggcattgatttgcatgacaggagcttggtgtatgataaaattgcaacagaaacatcagagagagacagaactctctgttgctgaccctgtttcggtgattcagtggagccttcttgcagtttgtctattttatatgacaggtcactggtgtacatttgatggcctccgatatggtgcagctttcatcggttttgatcattttcatatcattcgacaaggccttctactttccattgacacctttggtatttctcatgtcctgccaattctaagccttccacttattgccatagtgtggtacaacaccatatccaaggacaacgaactgaaggacgtgattctcaacaatattaataaggtgcttttgatgtatggtcttataacaacaatcactgctacgctaacaatcatatgcgttgctattcaaaggcgtcacttaatggtttggggtttgtttgctccaaagtacgtattcgatgcaattggccttctcctcacagacttgttaatttgtttagcatcaatctactacagctgatgttgctttgcttcttgagttgcactgctaaccactaacacaacactgctattatgcttttgtgtgaatcggttgcagctagagatgctattttttcttattcttcttgtgactgcagtaagaccacacactaaacttagttcattcgtatttgtattggccaagtaagcataaaatatacaaccatagttggtctttcccacggatgttcacacttatacaaaaaggatactccctccgtcctaaaatatagttctttcaaaaatatagttcttcctagcctactttttttctgttcacattcatttaaatgataataaatatacatatatgtaaactatattcatatgttacttaatgaatatgttacttaatgaatgtatgagtcggggaccataattaggggtaccctcaagact

SEQ ID NO: 34111 - DNA, 3032 bp, Zea Mays
cccacttcgcgtccacccatcagctctcgtcctctcaccgtcctacgctctgccgcccgccaccaggcgccagatcgacaccggaggtgatgtcgccgccggcgagccaccgccgccgttctcggttccttagctggccgctgctcttcatcgcgatcctcgcgatccactcgctggcagtatacctttttacccgcggcttcctcctcacccgcaccgagctggacctccacagcagccgcgacgacttctcgccgcagggcaacgtctcccccggagaagcagccgtggatggacaagctgcacgttttgcagaagcttgctgccgacgaaaagacctcttcaaggatcttcaaagctctcgctgatccaccaacaactagcctccagcgccttaaggctctcaccacgggtggactccctacctttattgatgtcggcaatagttttggtgctcctgcaatagtcgaagataatataatgcatcagttggctaaaaatggaaagagagttgtcatgatgggggatgatacatggatacaactgtaccctgaacacttcaacaagtcattcccatacccttcctttaatgttaaagaccttgacacagtagataatggtgtaattgagcacttgcttccatctcttcacaaaaatgattgggatgttcttattgcacattttcttggagtggaccatgcaggacatatatttggtgttgactcaaccccgatgatccagaagttggagcaatacaatcagatcctggagggtgttattgacacattgagaagtctatccaaacctggtggtacccatgagaatactttgcttttggtaatgggtgatcatggtcaaaccctgaatggtgaccatggaggagggactgctgaagaggttgaaacatcgctgtttgcatggagtccaaggaccccaccagatgcagtcttatctgttcttgatgatagttcgtgcactgttaatctgcatggggaagaggtttgcgtcagcactatgcagcagcttgattttgcggtgactatatcagcacttcttggcataccttttccctttggaagcattggccgtgtaaacccagagttgtacgccttgagtatcgggacatgggtaaatcaaaggaggggtaccaatgcttgtacctcacaggatgatctagaagcatggatggggagatatgctgaagttctatgtgtaaattgttggcaggtaaagagatacattgatcaatattctgctacttccgttattggatttccatcagaagacctgcaacatatcatggacctatattcaagagctcaggaaaattggtcagcttctctgataactagttcatcagagacatgtagtcaagaaaaagtagagaagggttcagttctgctgcagcaaattgatgcatacaatgacttcttgaagagttttgcaaagcttgctcgctctgcttggacagaatttgatttatggtcaatgggcattggtcttttacttatgatgttgtcagttatcattcaggcatccatgcttaactttgtttttcttcttttaaatattttcacacggtttggaattgaggttgggatgtcaaaacaattgcctgccccaacaattacaaaggatcatcctgtgagcgtcatttataaaatccttggtgctaattcttgcaacatcctcttggagctattccccatcatatctctagcctttgtggcttacattatgttgaaatgcctatcccgtgcaatctgtcagaggttcttgaagttctttcttttgtgtggaacaatggtgagttatttatctatagcgtttcattgggcttcagagactactttgtttgctcatgctgggactgttcaagaatttggaagaagtttggctcctcgcattgtttacactattggaggtctatcactagccatttctgcattttctcggatatttggttcaactgttcatttgaagttgaacaaaaggataattattttatcggctgtcatgctttgttcttggagtccaactattttgatcctgttgggaaggcaaggtccatttgtggcattgatttgcatgacaggagcttggtgtatgataaaattgcaacagaaacatcagagagagacagaactctctgttgctgaccctgtttcggtgattcagtggagccttcttgcagtttgtctattttatatgacaggtcactggtgtacatttgatggcctccgatatggtgcagctttcatcggttttgatcattttcatatcattcgacaaggccttctactttccattgacacctttggtatttctcatgtcctgccaattctaagccttccacttattgccatagtgtggtacaacaccatatccaaggacaacgaactgaaggacgtgattctcaacaatattaataaggtgcttttgatgtatggtcttataacaacaatcactgctacgctaacaatcatatgcgttgctattcaaaggcgtcacttaatggtttggggtttgtttgctccaaagtacgtattcgatgcaattggccttctcctcacagacttgttaatttgtttagcatcaatctactacagctgatgttgctttgcttcttgagttgcactgctaaccactaacacaacactgctattatgcttttgtgtgaatcggttgcagctagagatgctattttttcttattcttcttgtgactgcagtaagaccacacactaaacttagttcattcgtatttgtattggccaagtaagcataaaatatacaaccatagttggtctttcccacggatgttcacacttatacaaaaaggatactccctccgtcctaaaatatagttctttcaaaaatatagttcttcctagcctactttttttctgttcacattcatttaaatgataataaatatacatatatgtaaactatattcatatgttacttaatgaatatgttacttaatgaatgtatgagtcggggaccataattaggggtaccctcaagact

SEQ ID NO: 34112 - DNA, 3130 bp, Zea Mays
cccacttcgcgtccacccatcagctctcgtcctctcaccgtcctacgctctgccgcccgccaccaggcgccagatcgacaccggaggtgatgtcgccgccggcgagccaccgccgccgttctcggttccttagctggccgctgctcttcatcgcgatcctcgcgatccactcgctggcagtatacctttttacccgcggcttcctcctcacccgcaccgagctggacctccacagcagccgcgacgacttctcgccgcagggcaacgtctcccccgggtgcgactcctggcccccggccgccgtcgaccgccttgtcattgtcgtcctcgacgcgctaagatttgatttcgtggcgccgagtaccttttttgcagagaagcagccgtggatggacaagctgcacgttttgcagaagcttgctgccgacgaaaagacctcttcaaggatcttcaaagctctcgctgatccaccaacaactagcctccagcgccttaaggctctcaccacgggtggactccctacctttattgatgtcggcaatagttttggtgctcctgcaatagtcgaagataatataatgcatcagttggctaaaaatggaaagagagttgtcatgatgggggatgatacatggatacaactgtaccctgaacacttcaacaagtcattcccatacccttcctttaatgttaaagaccttgacacagtagataatggtgtaattgagcacttgcttccatctcttcacaaaaatgattgggatgttcttattgcacattttcttggagtggaccatgcaggacatatatttggtgttgactcaaccccgatgatccagaagttggagcaatacaatcagatcctggagggtgttattgacacattgagaagtctatccaaacctggtggtacccatgagaatactttgcttttggtaatgggtgatcatggtcaaaccctgaatggtgaccatggaggagggactgctgaagaggttgaaacatcgctgtttgcatggagtccaaggaccccaccagatgcagtcttatctgttcttgatgatagttcgtgcactgttaatctgcatggggaagaggtttgcgtcagcactatgcagcagcttgattttgcggtgactatatcagcacttcttggcataccttttccctttggaagcattggccgtgtaaacccagagttgtacgccttgagtatcgggacatgggtaaatcaaaggaggggtaccaatgcttgtacctcacaggatgatctagaagcatggatggggagatatgctgaagttctatgtgtaaattgttggcaggtaaagagatacattgatcaatattctgctacttccgttattggatttccatcagaagacctgcaacatatcatggacctatattcaagagctcaggaaaattggtcagcttctctgataactagttcatcagagacatgtagtcaagaaaaagtagagaagggttcagttctgctgcagcaaattgatgcatacaatgacttcttgaagagttttgcaaagcttgctcgctctgcttggacagaatttgatttatggtcaatgggcattggtcttttacttatgatgttgtcagttatcattcaggcatccatgcttaactttgtttttcttcttttaaatattttcacacggtttggaattgaggttgggatgtcaaaacaattgcctgccccaacaattacaaaggatcatcctgtgagcgtcatttataaaatccttggtgctaattcttgcaacatcctcttggagctattccccatcatatctctagcctttgtggcttacattatgttgaaatgcctatcccgtgcaatctgtcagaggttcttgaagttctttcttttgtgtggaacaatggtgagttatttatctatagcgtttcattgggcttcagagactactttgtttgctcatgctgggactgttcaagaatttggaagaagtttggctcctcgcattgtttacactattggaggtctatcactagccatttctgcattttctcggatatttggttcaactgttcatttgaagttgaacaaaaggataattattttatcggctgtcatgctttgttcttggagtccaactattttgatcctgttgggaaggcaaggtccatttgtggcattgatttgcatgacaggagcttggtgtatgataaaattgcaacagaaacatcagagagagacagaactctctgttgctgaccctgtttcggtgattcagtggagccttcttgcagtttgtctattttatatgacaggtcactggtgtacatttgatggcctccgatatggtgcagctttcatcggttttgatcattttcatatcattcgacaaggccttctactttccattgacacctttggtatttctcatgtcctgccaattctaagccttccacttattgccatagtgtggtacaacaccatatccaaggacaacgaactgaaggacgtgattctcaacaatattaataaggtgcttttgatgtatggtcttataacaacaatcactgctacgctaacaatcatatgcgttgctattcaaaggcgtcacttaatggtttggggtttgtttgctccaaagtacgtattcgatgcaattggccttctcctcacagacttgttaatttgtttagcatcaatctactacagctgatgttgctttgcttcttgagttgcactgctaaccactaacacaacactgctattatgcttttgtgtgaatcggttgcagctagagatgctattttttcttattcttcttgtgactgcagtaagaccacacactaaacttagttcattcgtatttgtattggccaagtaagcataaaatatacaaccatagttggtctttcccacggatgttcacacttatacaaaaaggatactccctccgtcctaaaatatagttctttcaaaaatatagttcttcctagcctactttttttctgttcacattcatttaaatgataataaatatacatatatgtaaactatattcatatgttacttaatgaatatgttacttaatgaatgtatgagtcggggaccataattaggggtaccctcaagact

SEQ ID NO: 34113 - DNA, 3117 bp, Zea Mays
cccacttcgcgtccacccatcagctctcgtcctctcaccgtcctacgctctgccgcccgccaccaggcgccagatcgacaccggaggtgatgtcgccgccggcgagccaccgccgccgttctcggttccttagctggccgctgctcttcatcgcgatcctcgcgatccactcgctggcagtatacctttttacccgcggcttcctcctcacccgcaccgagctggacctccacagcagccgcgacgacttctcgccgcagggcaacgtctcccccgggtgcgactcctggcccccggccgccgtcgaccgccttgtcattgtcgtcctcgacgcgctaagatttgatttcgtggcgccgagtaccttttttgcagagaagcagccgtggatggacaagctgcacgttttgcagaagcttgctgccgacgaaaagacctcttcaaggatcttcaaagctctcgctgatccaccaacaactagcctccagcgccttaaggctctcaccacgggtggactccctacctttattgatgtcggcaatagttttggtgctcctgcaatagtcgaagataatataatgcatcagttggctaaaaatggaaagagagttgtcatgatgggggatgatacatggatacaactgtaccctgaacacttcaacaagtcattcccatacccttcctttaatgttaaagaccttgacacagtagataatggtgtaattgagcacttgcttccatctcttcacaaaaatgattgggatgttcttattgcacattttcttggagtggaccatgcaggacatatatttggtgttgactcaaccccgatgatccagaagttggagcaatacaatcagatcctggagggtgttattgacacattgagaagtctatccaaacctggtggtacccatgagaatactttgcttttggtaatgggtgatcatggtcaaaccctgaatggtgaccatggaggagggactgctgaagaggttgaaacatcgctgtttgcatggagtccaaggaccccaccagatgcagtcttatctgttcttgatgatagttcgtgcactgttaatctgcatggggaagaggtttgcgtcagcactatgcagcagcttgattttgcggtgactatatcagcacttcttggcataccttttccctttggaagcattggccgtgtaaacccagagttgtacgccttgagtatcgggacatgggtaaatcaaaggaggggtaccaatgcttgtacctcacaggatgatctagaagcatggatggggagatatgctgaagttctatgtgtaaattgttggcaggtaaagagatacattgatcaatattctgctacttccgttattggatttccatcagaagacctgcaacatatcatggacctatattcaagagctcaggaaaattggtcagcttctctgataactagttcatcagagacatgtagtcaagaaaaagtagagaagggttcagttctgctgcagcaaattgatgcatacaatgacttcttgaagagttttgcaaagcttgctcgctctgcttggacagaatttgatttatggtcaatgggcattggtcttttacttatgatgttgtcagttatcattcaggcatccatgcttgtaaatatgaccataagccaatcttcagatcagaaaagttctggttcaagcataattcatagactttcccttgctttttctttagtcgtgattcgagcagctagtttcttatcgaacagctatatattggcggaaggtagagttgcaaattttcttttggccacaagttgtatcaccagtgtgtggcactcggtgctgaaggggaacatcagcatagaaaactttgtttttcttcttttaaatattttcacacggtttggaattgaggttgggatgtcaaaacaattgcctgccccaacaattacaaaggatcatcctagactactttgtttgctcatgctgggactgttcaagaatttggaagaagtttggctcctcgcattgtttacactattggaggtctatcactagccatttctgcattttctcggatatttggttcaactgttcatttgaagttgaacaaaaggataattattttatcggctgtcatgctttgttcttggagtccaactattttgatcctgttgggaaggcaagcttggtgtatgataaaattgcaacagaaacatcagagagagacagaactctctgttgctgaccctgtttcggtgattcagtggagccttcttgcagtttgtctattttatatgacaggtcactggtgtacatttgatggcctccgatatggtgcagctttcatcggttttgatcattttcatatcattcgacaaggccttctactttccattgacacctttggtatttctcatgtcctgccaattctaagccttccacttattgccatagtgtggtacaacaccatatccaaggacaacgaactgaaggacgtgattctcaacaatattaataaggtgcttttgatgtatggtcttataacaacaatcactgctacgctaacaatcatatgcgttgctattcaaaggcgtcacttaatggtttggggtttgtttgctccaaagtacgtattcgatgcaattggccttctcctcacagacttgttaatttgtttagcatcaatctactacagctgatgttgctttgcttcttgagttgcactgctaaccactaacacaacactgctattatgcttttgtgtgaatcggttgcagctagagatgctattttttcttattcttcttgtgactgcagtaagaccacacactaaacttagttcattcgtatttgtattggccaagtaagcataaaatatacaaccatagttggtctttcccacggatgttcacacttatacaaaaaggatactccctccgtcctaaaatatagttctttcaaaaatatagttcttcctagcctactttttttctgttcacattcatttaaatgataataaatatacatatatgtaaactatattcatatgttacttaatgaatatgttacttaatgaatgtatgagtcggggaccataattaggggtaccctcaagact

SEQ ID NO: 34114 - DNA, 3120 bp, Zea Mays
cccacttcgcgtccacccatcagctctcgtcctctcaccgtcctacgctctgccgcccgccaccaggcgccagatcgacaccggaggtgatgtcgccgccggcgagccaccgccgccgttctcggttccttagctggccgctgctcttcatcgcgatcctcgcgatccactcgctggcagtatacctttttacccgcggcttcctcctcacccgcaccgagctggacctccacagcagccgcgacgacttctcgccgcagggcaacgtctcccccgggtgcgactcctggcccccggccgccgtcgaccgccttgtcattgtcgtcctcgacgcgctaagatttgatttcgtggcgccgagtaccttttttgcagagaagcagccgtggatggacaagctgcacgttttgcagaagcttgctgccgacgaaaagacctcttcaaggatcttcaaagctctcgctgatccaccaacaactagcctccagcgccttaaggctctcaccacgggtggactccctacctttattgatgtcggcaatagttttggtgctcctgcaatagtcgaagataatataatgcatcagttggctaaaaatggaaagagagttgtcatgatgggggatgatacatggatacaactgtaccctgaacacttcaacaagtcattcccatacccttcctttaatgttaaagaccttgacacagtagataatggtgtaattgagcacttgcttccatctcttcacaaaaatgattgggatgttcttattgcacattttcttggagtggacatatatttggtgttgactcaaccccgatgatccagaagttggagcaatacaatcagatcctggagggtgttattgacacattgagaagtctatccaaacctggtggtacccatgagaatactttgcttttggtaatgggtgatcatggtcaaaccctgaatggtgaccatggaggagggactgctgaagaggttgaaacatcgctgtttgcatggagtccaaggaccccaccagatgcagtcttatctgttcttgatgatagttcgtgcactgttaatctgcatggggaagaggtttgcgtcagcactatgcagcagcttgattttgcggtgactatatcagcacttcttggcataccttttccctttggaagcattggccgtgtaaacccagagttgtacgccttgagtatcgggacatgggtaaatcaaaggaggggtaccaatgcttgtacctcacaggatgatctagaagcatggatggggagatatgctgaagttctatgtgtaaattgttggcaggtaaagagatacattgatcaatattctgctacttccgttattggatttccatcagaagacctgcaacatatcatggacctatattcaagagctcaggaaaattggtcagcttctctgataactagttcatcagagacatgtagtcaagaaaaagtagagaagggttcagttctgctgcagcaaattgatgcatacaatgacttcttgaagagttttgcaaagcttgctcgctctgcttggacagaatttgatttatggtcaatgggcattggtcttttacttatgatgttgtcagttatcattcaggcatccatgcttaactttgtttttcttcttttaaatattttcacacggtttggaattgaggttgggatgtcaaaacaattgcctgccccaacaattacaaaggatcatcctgtgagcgtcatttataaaatccttggtgctaattcttgcaacatcctcttggagctattccccatcatatctctagcctttgtggcttacattatgttgaaatgcctatcccgtgcaatctgtcagaggttcttgaagttctttcttttgtgtggaacaatggtgagttatttatctatagcgtttcattgggcttcagagactactttgtttgctcatgctgggactgttcaagaatttggaagaagtttggctcctcgcattgtttacactattggaggtctatcactagccatttctgcattttctcggatatttggttcaactgttcatttgaagttgaacaaaaggataattattttatcggctgtcatgctttgttcttggagtccaactattttgatcctgttgggaaggcaaggtccatttgtggcattgatttgcatgacaggagcttggtgtatgataaaattgcaacagaaacatcagagagagacagaactctctgttgctgaccctgtttcggtgattcagtggagccttcttgcagtttgtctattttatatgacaggtcactggtgtacatttgatggcctccgatatggtgcagctttcatcggttttgatcattttcatatcattcgacaaggccttctactttccattgacacctttggtatttctcatgtcctgccaattctaagccttccacttattgccatagtgtggtacaacaccatatccaaggacaacgaactgaaggacgtgattctcaacaatattaataaggtgcttttgatgtatggtcttataacaacaatcactgctacgctaacaatcatatgcgttgctattcaaaggcgtcacttaatggtttggggtttgtttgctccaaagtacgtattcgatgcaattggccttctcctcacagacttgttaatttgtttagcatcaatctactacagctgatgttgctttgcttcttgagttgcactgctaaccactaacacaacactgctattatgcttttgtgtgaatcggttgcagctagagatgctattttttcttattcttcttgtgactgcagtaagaccacacactaaacttagttcattcgtatttgtattggccaagtaagcataaaatatacaaccatagttggtctttcccacggatgttcacacttatacaaaaaggatactccctccgtcctaaaatatagttctttcaaaaatatagttcttcctagcctactttttttctgttcacattcatttaaatgataataaatatacatatatgtaaactatattcatatgttacttaatgaatatgttacttaatgaatgtatgagtcggggaccataattaggggtaccctcaagact

SEQ ID NO: 34115 - DNA, 3047 bp, Zea Mays
cccacttcgcgtccacccatcagctctcgtcctctcaccgtcctacgctctgccgcccgccaccaggcgccagatcgacaccggaggtgatgtcgccgccggcgagccaccgccgccgttctcggttccttagctggccgctgctcttcatcgcgatcctcgcgatccactcgctggcagtatacctttttacccgcggcttcctcctcacccgcaccgagctggacctccacagcagccgcgacgacttctcgccgcagggcaacgtctcccccgggtgcgactcctggcccccggccgccgtcgaccgccttgtcattgtcgtcctcgacgcgctaagatttgatttcgtggcgccgagtaccttttttgcagagaagcagccgtggatggacaagctgcacgttttgcagaagcttgctgccgacgaaaagacctcttcaaggatcttcaaagctctcgctgatccaccaacaactagcctccagcgccttaaggctctcaccacgggtggactccctacctttattgatgtcggcaatagttttggtgctcctgcaatagtcgaagataatataatgcatcagttggctaaaaatggaaagagagttgtcatgatgggggatgatacatggatacaactgtaccctgaacacttcaacaagtcattcccatacccttcctttaatgttaaagaccttgacacagtagataatggtgtaattgagcacttgcttccatctcttcacaaaaatgattgggatgttcttattgcacattttcttggagtggacatatatttggtgttgactcaaccccgatgatccagaagttggagcaatacaatcagatcctggagggtgttattgacacattgagaagtctatccaaacctggtggtacccatgagaatactttgcttttggtaatgggtgatcatggtcaaaccctgaatggtgaccatggaggagggactgctgaagaggttgaaacatcgctgtttgcatggagtccaaggaccccaccagatgcagtcttatctgttcttgatgatagttcgtgcactgttaatctgcatggggaagaggtttgcgtcagcactatgcagcagcttgattttgcggtgactatatcagcacttcttggcataccttttccctttggaagcattggccgtgtaaacccagagttgtacgccttgagtatcgggacatgggtaaatcaaaggaggggtaccaatgcttgtacctcacaggatgatctagaagcatggatggggagatatgctgaagttctatgtgtaaattgttggcaggtaaagagatacattgatcaatattctgctacttccgttattggatttccatcagaagacctgcaacatatcatggacctatattcaagagctcaggaaaattggtcagcttctctgataactagttcatcagagacatgtagtcaagaaaaagtagagaagggttcagttctgctgcagcaaattgatgcatacaatgacttcttgaagagttttgcaaagcttgctcgctctgcttggacagaatttgatttatggtcaatgggcattggtcttttacttatgatgttgtcagttatcattcaggcatccatgcttgtaaatatgaccataagccaatcttcagatcagaaaagttctggttcaagcataattcatagactttcccttgctttttctttagtcgtgattcgagcagctagtttcttatcgaacagctatatattggcggaaggtagagttgcaaattttcttttggccacaagttgtatcaccagtgtgtggcactcggtgctgaaggggaacatcagcatagaaaactttgtttttcttcttttaaatattttcacacggtttggaattgaggttgggatgtcaaaacaattgcctgccccaacaattacaaaggatcatcctgtgagcgtcatttataaaatccttggtgctaattcttgcaacatcctcttggagctattccccatcatatctctagcctttgtggcttacattatgttgaaatgcctatcccgtgcaatctgtcagaggttcttgaagttctttcttttgtgtggaacaatgcttggtgtatgataaaattgcaacagaaacatcagagagagacagaactctctgttgctgaccctgtttcggtgattcagtggagccttcttgcagtttgtctattttatatgacaggtcactggtgtacatttgatggcctccgatatggtgcagctttcatcggttttgatcattttcatatcattcgacaaggccttctactttccattgacacctttggtatttctcatgtcctgccaattctaagccttccacttattgccatagtgtggtacaacaccatatccaaggacaacgaactgaaggacgtgattctcaacaatattaataaggtgcttttgatgtatggtcttataacaacaatcactgctacgctaacaatcatatgcgttgctattcaaaggcgtcacttaatggtttggggtttgtttgctccaaagtacgtattcgatgcaattggccttctcctcacagacttgttaatttgtttagcatcaatctactacagctgatgttgctttgcttcttgagttgcactgctaaccactaacacaacactgctattatgcttttgtgtgaatcggttgcagctagagatgctattttttcttattcttcttgtgactgcagtaagaccacacactaaacttagttcattcgtatttgtattggccaagtaagcataaaatatacaaccatagttggtctttcccacggatgttcacacttatacaaaaaggatactccctccgtcctaaaatatagttctttcaaaaatatagttcttcctagcctactttttttctgttcacattcatttaaatgataataaatatacatatatgtaaactatattcatatgttacttaatgaatatgttacttaatgaatgtatgagtcggggaccataattaggggtaccctcaagact

SEQ ID NO: 34116 - DNA, 3057 bp, Zea Mays
cccacttcgcgtccacccatcagctctcgtcctctcaccgtcctacgctctgccgcccgccaccaggcgccagatcgacaccggaggtgatgtcgccgccggcgagccaccgccgccgttctcggttccttagctggccgctgctcttcatcgcgatcctcgcgatccactcgctggcagtatacctttttacccgcggcttcctcctcacccgcaccgagctggacctccacagcagccgcgacgacttctcgccgcagggcaacgtctcccccgggtgcgactcctggcccccggccgccgtcgaccgccttgtcattgtcgtcctcgacgcgctaagatttgatttcgtggcgccgagtaccttttttgcagagaagcagccgtggatggacaagctgcacgttttgcagaagcttgctgccgacgaaaagacctcttcaaggatcttcaaagctctcgctgatccaccaacaactagcctccagcgccttaaggctctcaccacgggtggactccctacctttattgatgtcggcaatagttttggtgctcctgcaatagtcgaagataatataatgcatcagttggctaaaaatggaaagagagttgtcatgatgggggatgatacatggatacaactgtaccctgaacacttcaacaagtcattcccatacccttcctttaatgttaaagaccttgacacagtagataatggtgtaattgagcacttgcttccatctcttcacaaaaatgattgggatgttcttattgcacattttcttggagtggaccatgcaggacatatatttggtgttgactcaaccccgatgatccagaagttggagcaatacaatcagatcctggagggtgttattgacacattgagaagtctatccaaacctggtggtacccatgagaatactttgcttttggtaatgggtgatcatggtcaaaccctgaatggtgaccatggaggagggactgctgaagaggttgaaacatcgctgtttgcatggagtccaaggaccccaccagatgcagtcttatctgttcttgatgatagttcgtgcactgttaatctgcatggggaagaggtttgcgtcagcactatgcagcagcttgattttgcggtgactatatcagcacttcttggcataccttttccctttggaagcattggccgtgtaaacccagagttgtacgccttgagtatcgggacatgggtaaatcaaaggaggggtaccaatgcttgtacctcacaggatgatctagaagcatggatggggagatatgctgaagttctatgtgtaaattgttggcaggtaaagagatacattgatcaatattctgctacttccgttattggatttccatcagaagacctgcaacatatcatggacctatattcaagagctcaggaaaattggtcagcttctctgataactagttcatcagagacatgtagtcaagaaaaagtagagaagggttcagttctgctgcagcaaattgatgcatacaatgacttcttgaagagttttgcaaagcttgctcgctctgcttggacagaatttgatttatggtcaatgggcattggtcttttacttatgatgttgtcagttatcattcaggcatccatgcttgtaaatatgaccataagccaatcttcagatcagaaaagttctggttcaagcataattcatagactttcccttgctttttctttagtcgtgattcgagcagctagtttcttatcgaacagctatatattggcggaaggtagagttgcaaattttcttttggccacaagttgtatcaccagtgtgtggcactcggtgctgaaggggaacatcagcatagaaaactttgtttttcttcttttaaatattttcacacggtttggaattgaggttgggatgtcaaaacaattgcctgccccaacaattacaaaggatcatcctgtgagcgtcatttataaaatccttggtgctaattcttgcaacatcctcttggagctattccccatcatatctctagcctttgtggcttacattatgttgaaatgcctatcccgtgcaatctgtcagaggttcttgaagttctttcttttgtgtggaacaatgcttggtgtatgataaaattgcaacagaaacatcagagagagacagaactctctgttgctgaccctgtttcggtgattcagtggagccttcttgcagtttgtctattttatatgacaggtcactggtgtacatttgatggcctccgatatggtgcagctttcatcggttttgatcattttcatatcattcgacaaggccttctactttccattgacacctttggtatttctcatgtcctgccaattctaagccttccacttattgccatagtgtggtacaacaccatatccaaggacaacgaactgaaggacgtgattctcaacaatattaataaggtgcttttgatgtatggtcttataacaacaatcactgctacgctaacaatcatatgcgttgctattcaaaggcgtcacttaatggtttggggtttgtttgctccaaagtacgtattcgatgcaattggccttctcctcacagacttgttaatttgtttagcatcaatctactacagctgatgttgctttgcttcttgagttgcactgctaaccactaacacaacactgctattatgcttttgtgtgaatcggttgcagctagagatgctattttttcttattcttcttgtgactgcagtaagaccacacactaaacttagttcattcgtatttgtattggccaagtaagcataaaatatacaaccatagttggtctttcccacggatgttcacacttatacaaaaaggatactccctccgtcctaaaatatagttctttcaaaaatatagttcttcctagcctactttttttctgttcacattcatttaaatgataataaatatacatatatgtaaactatattcatatgttacttaatgaatatgttacttaatgaatgtatgagtcggggaccataattaggggtaccctcaagact

SEQ ID NO: 34117 - DNA, 3087 bp, Zea Mays
cccacttcgcgtccacccatcagctctcgtcctctcaccgtcctacgctctgccgcccgccaccaggcgccagatcgacaccggaggtgatgtcgccgccggcgagccaccgccgccgttctcggttccttagctggccgctgctcttcatcgcgatcctcgcgatccactcgctggcagtatacctttttacccgcggcttcctcctcacccgcaccgagctggacctccacagcagccgcgacgacttctcgccgcagggcaacgtctcccccgggtgcgactcctggcccccggccgccgtcgaccgccttgtcattgtcgtcctcgacgcgctaagatttgatttcgtggcgccgagtaccttttttgcagagaagcagccgtggatggacaagctgcacgttttgcagaagcttgctgccgacgaaaagacctcttcaaggatcttcaaagctctcgctgatccaccaacaactagcctccagcgccttaaggctctcaccacgggtggactccctacctttattgatgtcggcaatagttttggtgctcctgcaatagtcgaagataatataatgcatcagttggctaaaaatggaaagagagttgtcatgatgggggatgatacatggatacaactgtaccctgaacacttcaacaagtcattcccatacccttcctttaatgttaaagaccttgacacagtagataatggtgtaattgagcacttgcttccatctcttcacaaaaatgattgggatgttcttattgcacattttcttggagtggacatatatttggtgttgactcaaccccgatgatccagaagttggagcaatacaatcagatcctggagggtgttattgacacattgagaagtctatccaaacctggtggtacccatgagaatactttgcttttggtaatgggtgatcatggtcaaaccctgaatggtgaccatggaggagggactgctgaagaggttgaaacatcgctgtttgcatggagtccaaggaccccaccagatgcagtcttatctgttcttgatgatagttcgtgcactgttaatctgcatggggaagaggtttgcgtcagcactatgcagcagcttgattttgcggtgactatatcagcacttcttggcataccttttccctttggaagcattggccgtgtaaacccagagttgtacgccttgagtatcgggacatgggtaaatcaaaggaggggtaccaatgcttgtacctcacaggatgatctagaagcatggatggggagatatgctgaagttctatgtgtaaattgttggcaggtaaagagatacattgatcaatattctgctacttccgttattggatttccatcagaagacctgcaacatatcatggacctatattcaagagctcaggaaaattggtcagcttctctgataactagttcatcagagacatgtagtcaagaaaaagtagagaagggttcagttctgctgcagcaaattgatgcatacaatgacttcttgaagagttttgcaaagcttgctcgctctgcttggacagaatttgatttatggtcaatgggcattggtcttttacttatgatgttgtcagttatcattcaggcatccatgcttaactttgtttttcttcttttaaatattttcacacggtttggaattgaggttgggatgtcaaaacaattgcctgccccaacaattacaaaggatcatcctgtgagcgtcatttataaaatccttggtgctaattcttgcaacatcctcttggagctattccccatcatatctctagcctttgtggcttacattatgttgaaatgcctatcccgtgcaatctgtcagaggttcttgaagttctttcttttgtgtggaacaatggtgagttatttatctatagcgtttcattgggcttcagagactactttgtttgctcatgctgggactgttcaagaatttggaagaagtttggctcctcgcattgtttacactattggaggtctatcactagccatttctgcattttctcggatatttggttcaactgttcatttgaagttgaacaaaaggataattattttatcggctgtcatgctttgttcttggagtccaactattttgatcctgttgggaaggcaagcttggtgtatgataaaattgcaacagaaacatcagagagagacagaactctctgttgctgaccctgtttcggtgattcagtggagccttcttgcagtttgtctattttatatgacaggtcactggtgtacatttgatggcctccgatatggtgcagctttcatcggttttgatcattttcatatcattcgacaaggccttctactttccattgacacctttggtatttctcatgtcctgccaattctaagccttccacttattgccatagtgtggtacaacaccatatccaaggacaacgaactgaaggacgtgattctcaacaatattaataaggtgcttttgatgtatggtcttataacaacaatcactgctacgctaacaatcatatgcgttgctattcaaaggcgtcacttaatggtttggggtttgtttgctccaaagtacgtattcgatgcaattggccttctcctcacagacttgttaatttgtttagcatcaatctactacagctgatgttgctttgcttcttgagttgcactgctaaccactaacacaacactgctattatgcttttgtgtgaatcggttgcagctagagatgctattttttcttattcttcttgtgactgcagtaagaccacacactaaacttagttcattcgtatttgtattggccaagtaagcataaaatatacaaccatagttggtctttcccacggatgttcacacttatacaaaaaggatactccctccgtcctaaaatatagttctttcaaaaatatagttcttcctagcctactttttttctgttcacattcatttaaatgataataaatatacatatatgtaaactatattcatatgttacttaatgaatatgttacttaatgaatgtatgagtcggggaccataattaggggtaccctcaagact

SEQ ID NO: 34118 - DNA, 3110 bp, Zea Mays
cccacttcgcgtccacccatcagctctcgtcctctcaccgtcctacgctctgccgcccgccaccaggcgccagatcgacaccggaggtgatgtcgccgccggcgagccaccgccgccgttctcggttccttagctggccgctgctcttcatcgcgatcctcgcgatccactcgctggcagtatacctttttacccgcggcttcctcctcacccgcaccgagctggacctccacagcagccgcgacgacttctcgccgcagggcaacgtctcccccgggtgcgactcctggcccccggccgccgtcgaccgccttgtcattgtcgtcctcgacgcgctaagatttgatttcgtggcgccgagtaccttttttgcagagaagcagccgtggatggacaagctgcacgttttgcagaagcttgctgccgacgaaaagacctcttcaaggatcttcaaagctctcgctgatccaccaacaactagcctccagcgccttaaggctctcaccacgggtggactccctacctttattgatgtcggcaatagttttggtgctcctgcaatagtcgaagataatataatgcatcagttggctaaaaatggaaagagagttgtcatgatgggggatgatacatggatacaactgtaccctgaacacttcaacaagtcattcccatacccttcctttaatgttaaagaccttgacacagtagataatggtgtaattgagcacttgcttccatctcttcacaaaaatgattgggatgttcttattgcacattttcttggagtggacatatatttggtgttgactcaaccccgatgatccagaagttggagcaatacaatcagatcctggagtccattcttattttcttctatagggtgttattgacacattgagaagtctatccaaacctggtggtacccatgagaatactttgcttttggtaatgggtgatcatggtcaaaccctgaatggtgaccatggaggagggactgctgaagaggttgaaacatcgctgtttgcatggagtccaaggaccccaccagatgcagtcttatctgttcttgatgatagttcgtgcactgttaatctgcatggggaagaggtttgcgtcagcactatgcagcagcttgattttgcggtgactatatcagcacttcttggcataccttttccctttggaagcattggccgtgtaaacccagagttgtacgccttgagtatcgggacatgggtaaatcaaaggaggggtaccaatgcttgtacctcacaggatgatctagaagcatggatggggagatatgctgaagttctatgtgtaaattgttggcaggtaaagagatacattgatcaatattctgctacttccgttattggatttccatcagaagacctgcaacatatcatggacctatattcaagagctcaggaaaattggtcagcttctctgataactagttcatcagagacatgtagtcaagaaaaagtagagaagggttcagttctgctgcagcaaattgatgcatacaatgacttcttgaagagttttgcaaagcttgctcgctctgcttggacagaatttgatttatggtcaatgggcattggtcttttacttatgatgttgtcagttatcattcaggcatccatgcttaactttgtttttcttcttttaaatattttcacacggtttggaattgaggttgggatgtcaaaacaattgcctgccccaacaattacaaaggatcatcctgtgagcgtcatttataaaatccttggtgctaattcttgcaacatcctcttggagctattccccatcatatctctagcctttgtggcttacattatgttgaaatgcctatcccgtgcaatctgtcagaggttcttgaagttctttcttttgtgtggaacaatggtgagttatttatctatagcgtttcattgggcttcagagactactttgtttgctcatgctgggactgttcaagaatttggaagaagtttggctcctcgcattgtttacactattggaggtctatcactagccatttctgcattttctcggatatttggttcaactgttcatttgaagttgaacaaaaggataattattttatcggctgtcatgctttgttcttggagtccaactattttgatcctgttgggaaggcaagcttggtgtatgataaaattgcaacagaaacatcagagagagacagaactctctgttgctgaccctgtttcggtgattcagtggagccttcttgcagtttgtctattttatatgacaggtcactggtgtacatttgatggcctccgatatggtgcagctttcatcggttttgatcattttcatatcattcgacaaggccttctactttccattgacacctttggtatttctcatgtcctgccaattctaagccttccacttattgccatagtgtggtacaacaccatatccaaggacaacgaactgaaggacgtgattctcaacaatattaataaggtgcttttgatgtatggtcttataacaacaatcactgctacgctaacaatcatatgcgttgctattcaaaggcgtcacttaatggtttggggtttgtttgctccaaagtacgtattcgatgcaattggccttctcctcacagacttgttaatttgtttagcatcaatctactacagctgatgttgctttgcttcttgagttgcactgctaaccactaacacaacactgctattatgcttttgtgtgaatcggttgcagctagagatgctattttttcttattcttcttgtgactgcagtaagaccacacactaaacttagttcattcgtatttgtattggccaagtaagcataaaatatacaaccatagttggtctttcccacggatgttcacacttatacaaaaaggatactccctccgtcctaaaatatagttctttcaaaaatatagttcttcctagcctactttttttctgttcacattcatttaaatgataataaatatacatatatgtaaactatattcatatgttacttaatgaatatgttacttaatgaatgtatgagtcggggaccataattaggggtaccctcaagact

SEQ ID NO: 34119 - DNA, 3266 bp, Zea Mays
cccacttcgcgtccacccatcagctctcgtcctctcaccgtcctacgctctgccgcccgccaccaggcgccagatcgacaccggaggtgatgtcgccgccggcgagccaccgccgccgttctcggttccttagctggccgctgctcttcatcgcgatcctcgcgatccactcgctggcagtatacctttttacccgcggcttcctcctcacccgcaccgagctggacctccacagcagccgcgacgacttctcgccgcagggcaacgtctcccccgggtgcgactcctggcccccggccgccgtcgaccgccttgtcattgtcgtcctcgacgcgctaagatttgatttcgtggcgccgagtaccttttttgcagagaagcagccgtggatggacaagctgcacgttttgcagaagcttgctgccgacgaaaagacctcttcaaggatcttcaaagctctcgctgatccaccaacaactagcctccagcgccttaaggctctcaccacgggtggactccctacctttattgatgtcggcaatagttttggtgctcctgcaatagtcgaagataatataatgcatcagttggctaaaaatggaaagagagttgtcatgatgggggatgatacatggatacaactgtaccctgaacacttcaacaagtcattcccatacccttcctttaatgttaaagaccttgacacagtagataatggtgtaattgagcacttgcttccatctcttcacaaaaatgattgggatgttcttattgcacattttcttggagtggaccatgcaggacatatatttggtgttgactcaaccccgatgatccagaagttggagcaatacaatcagatcctggagggtgttattgacacattgagaagtctatccaaacctggtggtacccatgagaatactttgcttttggtaatgggtgatcatggtcaaaccctgaatggtgaccatggaggagggactgctgaagaggttgaaacatcgctgtttgcatggagtccaaggaccccaccagatgcagtcttatctgttcttgatgatagttcgtgcactgttaatctgcatggggaagaggtttgcgtcagcactatgcagcagcttgattttgcggtgactatatcagcacttcttggcataccttttccctttggaaggtctgcaagtttaacttgatgcttattctatggttcagttatcagtgactgttcttgcttgattgcaagctgctacatgttcttggttgtctgccttttcttctttttcttggtgttgttgctgtttcatcatcctttgctcattatctatcaccactagctgctaaatgggtctcctgtttcttaaatagcattggccgtgtaaacccagagttgtacgccttgagtatcgggacatgggtaaatcaaaggaggggtaccaatgcttgtacctcacaggatgatctagaagcatggatggggagatatgctgaagttctatgtgtaaattgttggcaggtaaagagatacattgatcaatattctgctacttccgttattggatttccatcagaagacctgcaacatatcatggacctatattcaagagctcaggaaaattggtcagcttctctgataactagttcatcagagacatgtagtcaagaaaaagtagagaagggttcagttctgctgcagcaaattgatgcatacaatgacttcttgaagagttttgcaaagcttgctcgctctgcttggacagaatttgatttatggtcaatgggcattggtcttttacttatgatgttgtcagttatcattcaggcatccatgcttgtaaatatgaccataagccaatcttcagatcagaaaagttctggttcaagcataattcatagactttcccttgctttttctttagtcgtgattcgagcagctagtttcttatcgaacagctatatattggcggaaggtagagttgcaaattttcttttggccacaagttgtatcaccagtgtgtggcactcggtgctgaaggggaacatcagcatagaaaactttgtttttcttcttttaaatattttcacacggtttggaattgaggttgggatgtcaaaacaattgcctgccccaacaattacaaaggatcatcctgtgagcgtcatttataaaatccttggtgctaattcttgcaacatcctcttggagctattccccatcatatctctagcctttgtggcttacattatgttgaaatgcctatcccgtgcaatctgtcagaggttcttgaagttctttcttttgtgtggaacaatgcttggtgtatgataaaattgcaacagaaacatcagagagagacagaactctctgttgctgaccctgtttcggtgattcagtggagccttcttgcagtttgtctattttatatgacaggtcactgtttaaaagtgaatttcaggtgtacatttgatggcctccgatatggtgcagctttcatcggttttgatcattttcatatcattcgacaaggccttctactttccattgacacctttggtatttctcatgtcctgccaattctaagccttccacttattgccatagtgtggtacaacaccatatccaaggacaacgaactgaaggacgtgattctcaacaatattaataaggtgcttttgatgtatggtcttataacaacaatcactgctacgctaacaatcatatgcgttgctattcaaaggcgtcacttaatggtttggggtttgtttgctccaaagtacgtattcgatgcaattggccttctcctcacagacttgttaatttgtttagcatcaatctactacagctgatgttgctttgcttcttgagttgcactgctaaccactaacacaacactgctattatgcttttgtgtgaatcggttgcagctagagatgctattttttcttattcttcttgtgactgcagtaagaccacacactaaacttagttcattcgtatttgtattggccaagtaagcataaaatatacaaccatagttggtctttcccacggatgttcacacttatacaaaaaggatactccctccgtcctaaaatatagttctttcaaaaatatagttcttcctagcctactttttttctgttcacattcatttaaatgataataaatatacatatatgtaaactatattcatatgttacttaatgaatatgttacttaatgaatgtatgagtcggggaccataattaggggtaccctcaagact

SEQ ID NO: 34120 - DNA, 2903 bp, Zea Mays
gtccgactccgatgcttatgttttattcaaacgcactcgtgtgtaaaatcgatgggtgcgagagtggacaaatctgaatgaggtgaaacaataccttggataatgaatcgggaaatggcatagctatcctgtttaaattaacaatgccaagccttggcaaagaacatctgatctgctgaacatgtatcatggtatgattcaaatgatcgagaaggtcggatactaatgtgtcagttaataatgtttggcacaagggagtggaggtattttgtaattcagatggaacacaagtgtgtgtttatgtgcatatggacatttctttctctgcctacaattgtatcattcaagggcatacgtaaagggcagatatgcttttttttcaggaattcctgaagacacattgagaaattttatgtccaatgtcttgcctgctgtattgatcctggagtttctcagtgggaccaatttgattgttcaaacgtttgctctagaagtagtcgcccctgccatgcctccattccaaggttggggaccatttcattctttggcatcccaaactaaagtccttgtgagtgtttctgcacaaccagatgatggcctccaaagacaaaagaagctatattcatcagcagttgccatgtcatccacacatcctcctatttcagcacctagctatcgttacatgcctggtgctttagatcttgccatttattcctcagatctatcacgtcctccagtgcagcataccagacacttagcaacagctgctcctgctcacgtagatgctgaccctccggatgcagcttcaaattctagcgcagctcctttgggattagtgcagcctccagtgtctcctcacagtggttgttgtgcaccgaacatggtacaaaaacgagggacccgggactgccattgtgtttatccagtgagaattgagctcttccttcgtaatgtttccttgacttcaaactggagcaacaaatttcttcaagaacttgcttctcagctcaacctgcgcgttaatcagtttgagattgtaaatttttatgttgttggagcttctgggctaaatatcacaatggatatagctccctacactggaattagctttgctgctgatcaagtcaaggcaatgaattattcacttactctgcatacagttcggattgatcctgtgttggtcggggactataatcttcttaatttaacttggttcaggtcattggctccagctccagctccagcattcacaatggcacctagggcctctccatctacagcatctacctttccaagacagagtgagggtccaagcaaaaatagacatgcaagcctgatcacagtggttattatatgtgttggttctctaattggagtcttgctgattgttttaacaatatgcttctgcacatttaggaaagggaaaaagagagtgcctcatgttgaaactcccaagcaaaggacagcagatgcagtttctacagtggagtcccttcctcgccccaccagcacaaggttcctttcatacgaagaactgaaagtggcaacaaataacttcgagccttcaagtgtgcttggagaaggtggttttggccgtgtcttcaagggggtactgggtgatggcactgctgtcgctataaagaagcttactaacggagggcaccaaggagataaggagtttttagttgaagtggaaatgctgagcaggttgcaccaccggaatcttgtgaaactgattggttattacagcagccgtgaatcatcacagaaccttctttgttatgagcttgttcccaatggaagcctagaggcttggcttcatggtacacaaggtgctagccgccccttggactgggacgccaggatgaggatagcacttgatgctgccaggggattagcatacctccatgaggattcgcagccttgcgcgccggaaggtcggacgaactatctttctactcgtgttatgggaactttcgggtatgttgcaccggagtacgccatgacaggacacttgcttgtaaaaagtgatgtatatagctatggagttgttctacttgaactactaactgggaggaggcccgttgatatgtcacagccctctgggcaggaaaacctagtgacttgggcacggccaattctccgagaccaagatagattaggagagctagctgatcccaggcttggcggccagtacccgaaagatgattttgtgcgggtgtgcacaatcgcagcagcctgcgtttcgccagaggcgaaccagaggccaacaatgggcgaggtggtgcagtcactcaagatggtgcagcgctctgtggagttccaggaatctgtgccaacacctcccgctcgccccaacgtccggcaatcgtcgacgacctatgagtctgatggcacctcgtccatgttctcttcgggccccttctcaggcctcagccccttcgagaccgaaaccattccaaggactgcggttttctcagaagatctccatgaaggtcgatgactggtggggggtggctgccttgccatcgccgagccgagccgtttctctagagcctgtagccatgtagtcaagcattcaaaggctggtggtccaattggcctggccagccattgggaggaaaggggtacctgtaaattccatttttctgcgccgtctcaaaagactactactagattattacaacccacaaggacgttctctggctttgtatggaagaaatggttttgttcgaagttgctgctgtcctcagtccatagctcctgaattacgcagacagacagtcctaactcctacatgcagccaaacgcccgttgtgtgggtggacatgtttgtagggtttctcagctgcatgcccctactggcctccaaccgcgttctcccgcggtcaagcaccctcacg

SEQ ID NO: 34121 - DNA, 2953 bp, Zea Mays
ctaccgtcgggagctcgttaccaacatttgggcgcacagtgggaaagctcgcctgtagattcgagtccgtttgggggtagtgggagcggcggattcgagttcacatgtagtcttccaggcgccagcagccatggaacaatcaatacggtagagattgtgcagcctatgcttaacagtgaggaggatgtaatggacactgcagcagatactaggcagtttcatattcgtagtctctgtggcctccttgcttgtggggggaaaaagtaatcttttttgtccgactccgatgcttatgttttattcaaacgcactcgtgtgtaaaatcgatgggtgcgagagtggacaaatctgaatgaggtgaaacaataccttggataatgaatcgggaaatggcatagctatcctgtttaaattaacaatgccaagccttggcaaagaacatctgatctgctgaacatgtatcatggtatgattcaaatgatcgagaaggtcggatactaatgtgtcagttaataatgtttggcacaagggagtggaggtattttgtaattcagatggaacacaagtgtgtgtttatgtgcatatggacatttctttctctgcctacaattgtatcattcaagggcatacgtaaagggcagatatggaattcctgaagacacattgagaaattttatgtccaatgtcttgcctgctgtattgatcctggagtttctcagtgggaccaatttgattgttcaaacgtttgctctagaagtagtcgcccctgccatgcctccattccaagtgcagcataccagacacttagcaacagctgctcctgctcacgtagatgctgaccctccggatgcagcttcaaattctagcgcagctcctttgggattagtgcagcctccagtgtctcctcacagtggttgttgtgcaccgaacatggtacaaaaacgagggacccgggactgccattgtgtttatccagtgagaattgagctcttccttcgtaatgtttccttgacttcaaactggagcaacaaatttcttcaagaacttgcttctcagctcaacctgcgcgttaatcagtttgagattgtaaatttttatgttgttggagcttctgggctaaatatcacaatggatatagctccctacactggaattagctttgctgctgatcaagtcaaggcaatgaattattcacttactctgcatacagttcggattgatcctgtgttggtcggggactataatcttcttaatttaacttggttcaggtcattggctccagctccagctccagcattcacaatggcacctagggcctctccatctacagcatctacctttccaagacagagtgagggtccaagcaaaaatagacatgcaagcctgatcacagtggttattatatgtgttggttctctaattggagtcttgctgattgttttaacaatatgcttctgcacatttaggaaagggaaaaagagagtgcctcatgttgaaactcccaagcaaaggacagcagatgcagtttctacagtggagtcccttcctcgccccaccagcacaaggttcctttcatacgaagaactgaaagtggcaacaaataacttcgagccttcaagtgtgcttggagaaggtggttttggccgtgtcttcaagggggtactgggtgatggcactgctgtcgctataaagaagcttactaacggagggcaccaaggagataaggagtttttagttgaagtggaaatgctgagcaggttgcaccaccggaatcttgtgaaactgattggttattacagcagccgtgaatcatcacagaaccttctttgttatgagcttgttcccaatggaagcctagaggcttggcttcatggtacacaaggtgctagccgccccttggactgggacgccaggatgaggatagcacttgatgctgccaggggattagcatacctccatgaggattcgcagccttgcgcgccggaaggtcggacgaactatctttctactcgtgttatgggaactttcgggtatgttgcaccggagtacgccatgacaggacacttgcttgtaaaaagtgatgtatatagctatggagttgttctacttgaactactaactgggaggaggcccgttgatatgtcacagccctctgggcaggaaaacctagtgacttgggcacggccaattctccgagaccaagatagattaggagagctagctgatcccaggcttggcggccagtacccgaaagatgattttgtgcgggtgtgcacaatcgcagcagcctgcgtttcgccagaggcgaaccagaggccaacaatgggcgaggtggtgcagtcactcaagatggtgcagcgctctgtggagttccaggaatctgtgccaacacctcccgctcgccccaacgtccggcaatcgtcgacgacctatgagtctgatggcacctcgtccatgttctcttcgggccccttctcaggcctcagccccttcgagaccgaaaccattccaaggactgcggttttctcagaagatctccatgaaggtcgatgactggtggggggtggctgccttgccatcgccgagccgagccgtttctctagagcctgtagccatgtagtcaagcattcaaaggctggtggtccaattggcctggccagccattgggaggaaaggggtacctgtaaattccatttttctgcgccgtctcaaaagactactactagattattacaacccacaaggacgttctctggctttgtatggaagaaatggttttgttcgaagttgctgctgtcctcagtccatagctcctgaattacgcagacagacagtcctaactcctacatgcagccaaacgcccgttgtgtgggtggacatgtttgtagggtttctcagctgcatgcccctactggcctccaaccgcgttctcccgcggtcaagcaccctcacg

SEQ ID NO: 34122 - DNA, 2724 bp, Zea Mays
ctgaaaaatccccctcccctccccgaggttgcagcggcgagggaggggagagataataataatcgcaggagggaaaagcagcagcgcaggcgcaaaaagcaaatcaaagccacaccaccaccaccaccggcagctgccgagagccgcgcccgcgcccgaacacaagggagagcggccggagaggaaagccaaatccatccactccaccccgtacgccgccgccgtccctgtccctcccctcttcccgcgcgcatgggccccaaatcgccagcgccgcgacgagcgcgcctgcccccgcggcggcggtagcagcagcagcagctgctgctgtgtgcttcgcgtcttcgccggggatggcgcggctcgggcgagcgggctgccgctccggtccagcccgaggaattcctgaagacacattgagaaattttatgtccaatgtcttgcctgctgtattgatcctggagtttctcagtgggaccaatttgattgttcaaacgtttgctctagaagtagtcgcccctgccatgcctccattccaagatctatcacgtcctccagtgcagcataccagacacttagcaacagctgctcctgctcacgtagatgctgaccctccggatgcagcttcaaattctagcgcagctcctttgggattagtgcagcctccagtgtctcctcacagtggttgttgtgcaccgaacatggtacaaaaacgagggacccgggactgccattgtgtttatccagtgagaattgagctcttccttcgtaatgtttccttgacttcaaactggagcaacaaatttcttcaagaacttgcttctcagctcaacctgcgcgttaatcagtttgagattgtaaatttttatgttgttggagcttctgggctaaatatcacaatggatatagctccctacactggaattagctttgctgctgatcaagtcaaggcaatgaattattcacttactctgcatacagttcggattgatcctgtgttggtcggggactataatcttcttaatttaacttggttcaggtcattggctccagctccagctccagcattcacaatggcacctagggcctctccatctacagcatctacctttccaagacagagtgagggtccaagcaaaaatagacatgcaagcctgatcacagtggttattatatgtgttggttctctaattggagtcttgctgattgttttaacaatatgcttctgcacatttaggaaagggaaaaagagagtgcctcatgttgaaactcccaagcaaaggacagcagatgcagtttctacagtggagtcccttcctcgccccaccagcacaaggttcctttcatacgaagaactgaaagtggcaacaaataacttcgagccttcaagtgtgcttggagaaggtggttttggccgtgtcttcaagggggtactgggtgatggcactgctgtcgctataaagaagcttactaacggagggcaccaaggagataaggagtttttagttgaagtggaaatgctgagcaggttgcaccaccggaatcttgtgaaactgattggttattacagcagccgtgaatcatcacagaaccttctttgttatgagcttgttcccaatggaagcctagaggcttggcttcatggtacacaaggtgctagccgccccttggactgggacgccaggatgaggatagcacttgatgctgccaggggattagcatacctccatgaggattcgcagccttgcgcgccggaaggtcggacgaactatctttctactcgtgttatgggaactttcgggtatgttgcaccggagtacgccatgacaggacacttgcttgtaaaaagtgatgtatatagctatggagttgttctacttgaactactaactgggaggaggcccgttgatatgtcacagccctctgggcaggaaaacctagtgacttgggcacggccaattctccgagaccaagatagattaggagagctagctgatcccaggcttggcggccagtacccgaaagatgattttgtgcgggtgtgcacaatcgcagcagcctgcgtttcgccagaggcgaaccagaggccaacaatgggcgaggtggtgcagtcactcaagatggtgcagcgctctgtggagttccaggaatctgtgccaacacctcccgctcgccccaacgtccggcaatcgtcgacgacctatgagtctgatggcacctcgtccatgttctcttcgggccccttctcaggcctcagccccttcgagaccgaaaccattccaaggactgcggttttctcagaagatctccatgaaggtcgatgactggtggggggtggctgccttgccatcgccgagccgagccgtttctctagagcctgtagccatgtagtcaagcattcaaaggctggtggtccaattggcctggccagccattgggaggaaaggggtacctgtaaattccatttttctgcgccgtctcaaaagactactactagattattacaacccacaaggacgttctctggctttgtatggaagaaatggttttgttcgaagttgctgctgtcctcagtccatagctcctgaattacgcagacagacagtcctaactcctacatgcagccaaacgcccgttgtgtgggtggacatgtttgtagggtttctcagctgcatgcccctactggcctccaaccgcgttctcccgcggtcaagcaccctcacg

SEQ ID NO: 34123 - DNA, 2874 bp, Zea Mays
gccgattctcgccccggccgtagacaaaacgagcgagcattgacttttgagggcccgagagcccacgtcggtcgtctttcaacctcgagtaaaaccaccacagtggactggactggacaggacacacaccgatcccttctgaaaaatccccctcccctccccgaggttgcagcggcgagggaggggagagataataataatcgcaggagggaaaagcagcagcgcaggcgcaaaaagcaaatcaaagccacaccaccaccaccaccggcagctgccgagagccgcgcccgcgcccgaacacaagggagagcggccggagaggaaagccaaatccatccactccaccccgtacgccgccgccgtccctgtccctcccctcttcccgcgcgcatgggccccaaatcgccagcgccgcgacgagcgcgcctgcccccgcggcggcggtagcagcagcagcagctgctgctgtgtgcttcgcgtcttcgccggggatggcgcggctcgggcgagcgggctgccgctccggtccagcccgagcttttttttcaggaattcctgaagacacattgagaaattttatgtccaatgtcttgcctgctgtattgatcctggagtttctcagtgggaccaatttgattgttcaaacgtttgctctagaagtagtcgcccctgccatgcctccattccaagatctatcacgtcctccagtgcagcataccagacacttagcaacagctgctcctgctcacgtagatgctgaccctccggatgcagcttcaaattctagcgcagctcctttgggattagtgcagcctccagtgtctcctcacagtggttgttgtgcaccgaacatggtacaaaaacgagggacccgggactgccattgtgtttatccagtgagaattgagctcttccttcgtaatgtttccttgacttcaaactggagcaacaaatttcttcaagaacttgcttctcagctcaacctgcgcgttaatcagtttgagattgtaaatttttatgttgttggagcttctgggctaaatatcacaatggatatagctccctacactggaattagctttgctgctgatcaagtcaaggcaatgaattattcacttactctgcatacagttcggattgatcctgtgttggtcggggactataatcttcttaatttaacttggttcaggtcattggctccagctccagctccagcattcacaatggcacctagggcctctccatctacagcatctacctttccaagacagagtgagggtccaagcaaaaatagacatgcaagcctgatcacagtggttattatatgtgttggttctctaattggagtcttgctgattgttttaacaatatgcttctgcacatttaggaaagggaaaaagagagtgcctcatgttgaaactcccaagcaaaggacagcagatgcagtttctacagtggagtcccttcctcgccccaccagcacaaggttcctttcatacgaagaactgaaagtggcaacaaataacttcgagccttcaagtgtgcttggagaaggtggttttggccgtgtcttcaagggggtactgggtgatggcactgctgtcgctataaagaagcttactaacggagggcaccaaggagataaggagtttttagttgaagtggaaatgctgagcaggttgcaccaccggaatcttgtgaaactgattggttattacagcagccgtgaatcatcacagaaccttctttgttatgagcttgttcccaatggaagcctagaggcttggcttcatggtacacaaggtgctagccgccccttggactgggacgccaggatgaggatagcacttgatgctgccaggggattagcatacctccatgaggattcgcagccttgcgcgccggaaggtcggacgaactatctttctactcgtgttatgggaactttcgggtatgttgcaccggagtacgccatgacaggacacttgcttgtaaaaagtgatgtatatagctatggagttgttctacttgaactactaactgggaggaggcccgttgatatgtcacagccctctgggcaggaaaacctagtgacttgggcacggccaattctccgagaccaagatagattaggagagctagctgatcccaggcttggcggccagtacccgaaagatgattttgtgcgggtgtgcacaatcgcagcagcctgcgtttcgccagaggcgaaccagaggccaacaatgggcgaggtggtgcagtcactcaagatggtgcagcgctctgtggagttccaggaatctgtgccaacacctcccgctcgccccaacgtccggcaatcgtcgacgacctatgagtctgatggcacctcgtccatgttctcttcgggccccttctcaggcctcagccccttcgagaccgaaaccattccaaggactgcggttttctcagaagatctccatgaaggtcgatgactggtggggggtggctgccttgccatcgccgagccgagccgtttctctagagcctgtagccatgtagtcaagcattcaaaggctggtggtccaattggcctggccagccattgggaggaaaggggtacctgtaaattccatttttctgcgccgtctcaaaagactactactagattattacaacccacaaggacgttctctggctttgtatggaagaaatggttttgttcgaagttgctgctgtcctcagtccatagctcctgaattacgcagacagacagtcctaactcctacatgcagccaaacgcccgttgtgtgggtggacatgtttgtagggtttctcagctgcatgcccctactggcctccaaccgcgttctcccgcggtcaagcaccctcacg

SEQ ID NO: 34124 - DNA, 799 bp, Zea Mays
gccatcaccgcggaagaaagaggtgggagcggggttggacgtagggaagccagacggtgcggattggtccatcaatgagtgagtgcagagatggacacatcaagccctgcagcacttgtcaatgcaaagattatgaacatgtttgttgggcaaagagtgcgcacagttgttcaagtccaacacaatgatggtggaatgcttgtcgggcagtcccctgatgggcatcaattgagtatcaaaagcgccatggatgtccctgtatcacactttatggaagtttatggaattgctgaaaacagccagaccatccgcgctgaagtttgcacagattttggtcctgactttgatcccgagacttttaatcaattgtgcaacctggcgagtaacaagttcaagcacatgttcctgtagaggtcatcatcaagtggaggaccttcggccaactgaagcttgtttgaaatcgatatgattcacctctaaatgttctttcactcaccccagtactctgttgtcagtattggactccttttagcatgtattaatctaagcaacataagactacgaaggcaagcaaaatatatcgtgtagttgaagaacgtatggtcttttctacttttaggcaatccaaagctaagcttgttatgttgctgtcacttacatttggaccctgagaagttgctacaatggctaatgcagcttgatgagaggaaagagttctaatgtgataattacatgccccatctgaaaattctagctttgattttatgtctgcaagatccaccgtagtcaacctgaaacc

SEQ ID NO: 34125 - DNA, 1014 bp, Zea Mays
gggacactcatgtttgaaccgtacggattcagcttttgtacaaggttgatgctgttgtgtacttggtggatgctgttgacaaggaacgttttgccgagtcgaagaaggagcttgatgcgcttcttgcagatgactcccttgcaaacgttcctttcctcatactgggcaacaagattgacatcccatacgcggcttcagaggaggagctgaggtactacctcggcctgagcaacttcacaaccgggaagggcaacgtgaacttggccgactccaatgtccggcccctggagatcttcatgtgcagtgtggtgcgcaagatgggctatggcgaaggcttcaaatggatgtctcagtacatcaagtgagtcgctgctgtcctcttttgtccatggcgctgctgctttcgcaggagggttgaaatcaagtctggtcgtgacatggcagctgcatggaaaggtttatggtagctagtgataggcaaagcttgtaagtcggtgttaatcctagatatgtgatgtggggtctactttctcttctgattgtttcttggggtggtctaaacggttaaaaaaaatgcgacttcttcgggtcagctagaagttatgtaatcacgttacatgaagcagcgcattgttcgccagctgctttggtgtggtggacttctgtcggtaatggtgagcttgcggtttctaaaagtatgcgtgtagagtaattgtgtatctacagattccaaaccttgcatttgctgttgactgaggtagcccggaaatgataaaacatcctggtgaaagttgcattgctttcatgttgcgttttcgttggaacgaagcagcacaccaacccgaacgctgctattcatttcaatttgaacatttaaaagcaccttgggcttcgtttggctaaccgtgtattgtacacgcattgttagagcatctgagtcctaaacggagttgtaggacatcaaaaacttgctttaatagggttctattttacaaaaaaaaaatatataggaaa

SEQ ID NO: 34126 - DNA, 1458 bp, Zea Mays
gaccgcttgtgatctgatctgacggtagaggtaagttgttctagaacaagtagacgccaccgaagaatctagaatacagcacgcagggcacaaggagaagaagaggggaagaaatattcttcccgtcgaaagacggagagaggaaaagggacaagggcaaggcaagagagaggcgtcgtcgtttgatctgctgccggagtgcgaagaggaagaggaagaggagcgccggagttgtaaagatgttcctggtggactggttctatggggtgctggcatcgcttgggctgtggcagaaggaggctaagatcctcttccttggcctcgacaacgccggcaagaccaccctcctccacatgctgaaggacgagcaccagccgacgcagtaccccacgtcagaagagttgagcatcggcaggatcaagttcaaggcgttcgaccttgggggccaccagatcgcccgccgcgtctggaaggactactacgccaaggttgatgctgttgtgtacttggtggatgctgttgacaaggaacgttttgccgagtcgaagaaggagcttgatgcgcttcttgcagatgactcccttgcaaacgttcctttcctcatactgggcaacaagattgacatcccatacgcggcttcagaggaggagctgaggtactacctcggcctgagcaacttcacaaccgggaagggcaacgtgaacttggccgactccaatgtccggcccctggagatcttcatgtgcagtgtggtgcgcaagatgggctatggcgaaggcttcaaatggatgtctcagtacatcaagtgagtcgctgctgtcctcttttgtccatggcgctgctgctttcgcaggagggttgaaatcaagtctggtcgtgacatggcagctgcatggaaaggtttatggtagctagtgataggcaaagcttgtaagtcggtgttaatcctagatatgtgatgtggggtctactttctcttctgattgtttcttggggtggtctaaacggttaaaaaaaatgcgacttcttcgggtcagctagaagttatgtaatcacgttacatgaagcagcgcattgttcgccagctgctttggtgtggtggacttctgtcggtaatggtgagcttgcggtttctaaaagtatgcgtgtagagtaattgtgtatctacagattccaaaccttgcatttgctgttgactgaggtagcccggaaatgataaaacatcctggtgaaagttgcattgctttcatgttgcgttttcgttggaacgaagcagcacaccaacccgaacgctgctattcatttcaatttgaacatttaaaagcaccttgggcttcgtttggctaaccgtgtattgtacacgcattgttagagcatctgagtcctaaacggagttgtaggacatcaaaaacttgctttaatagggttctattttacaaaaaaaaaatatataggaaa

SEQ ID NO: 34127 - DNA, 3225 bp, Zea Mays
gttagctgccagatgcttattgcaaatgatagagggaaaatgaacagttgtctaagtatggggatactaaatcagctcgaagtattatgctggttgagctaaaaaaacttattgaagcaaacccccttttccgggaaaaacttgtcttccctactcttaaggcatcacgcctccgaactctaatcaatcaaagcttgaattggcagcatcagctttgtaagaaccctcgtccaaatccagatatcaaaactttattcaccgaccatacatgttctccacccaatggagctcgtgcatcgccggtatctgtaccactggcagctgttccaaaggctggtgctgcatatccaccactcacagctcatactccgttccaacctccacctggtccatctttagctggttggatggcaaatgcagccgcctcttcatctgttcagtctgctgttgtagcagcagcatcaatacctgttccacccaatcaagagtctgagcaactaatgaagcgcttgaggcctggtggacatggcattgatgaggccacatatcctgctcccacccctcaacctgcatggtcagtggatgatcttccaaggacagttgcttgttcattgtcacatggatctaatgtaactagcatggattttcatccaactcggcatacactgcttctagtgggatctgctaatggtgaatttacactttatgagatcggtctgcgtgaaacattactttcaaagcccttcaaaattcgggatataaatgcatgttcaccacaatttcagaatgctgttgtcaaagattcctccatatccattaatcaagttacctggagccctgatggagaaatgattggcgttgcattcacgaaacatttgatccatctgcatggataccaaccaccaaatgagacacgacaccttctagagattgaggctcattctggaggtgtaaatgatatagcattctcccgaccaaataagcaactttgtgtggtcacttgtggagatgataaactaataaaggtatgggatatgcatggacataaattattcacatttgaagggcatgaggcacctgtgtattctatatgtccgcatcacaaagagagtattcagttcatcttctcaacttcccttgatggaaaaattaaggcctggctttatgacaatatgggatctagggtggactacgatgctcctggcaagtggtgtactactatgctatatagtgctgatggaactaggttgttctcatgtggaactagcaaagagggagactcctatttggttgagtggaatgaaagtgaaggatctatcaagaggacatattctggattccgtaaaaggtcagctggtgttgctggtgtagtgcagtttgatacagctcagaatcacattctggctgctggtgaagataaccatattaaattttgggatgttgacaataataacatgctgatctgcaccgatgctgaaggaggcctcccagctcttcctcgcttgaggtttaataaagaaggcaatcttcttgctgttactacagcagacaatggttttaagatacttgcaaatgctgatggacttagaactctacgcgcattagggagccggcctccttttgaagcatttaggccgcaatacgaagcttcttctatgaaggtctcaggtgctcctgttgttgctagcatctctcctaacataggccgaatggatcacttggataggaattctcctgcaaagccatctcctatactgaatggtggggatacagcatcaaggagcatagatataaagccaagaatctcagaagaaaagcctgataaagcaaaaccttgggaactaatggaagttctaaatccccagcaatgccatgtagcaacaatgccagaaactccagaccaagccagaaaggttgtccgacttctgtacacaaattctggtgttgggttgctagcactagggtctaacgccattcaaaggctatggaaatggagtcgaaacgaacaaaatccgagtggaaaagccacagctagtgttgtgccacaccattggcagccaaatagtggtcttgtcatgacaaatgatacagcagataccaatccagaggaggcagttccatgcattgcactctcaaagaatgattcctatgtgatgtctgcttgtggtgggaaggtttctttgtttaacatgatgacattcaaggtgatgacaacattcatgccacctccaccagcatcaacatttttagcatttcaccctcaagacaataacatcatagcaataggaatggaagattcaaccatccacatatacaatgtcagggtagatgaggtaaaaactagactcaaaggacatcaaaggaggataactgggttggcattctccaccaaccttggcatacttgtttcttcaggcgctgatgcacagtggataccccaggacacattgtcagcttccatatcgcatgcatcatactcatgtaacagccagctagtttttgctgccttcactgatggtaacttaggtgtttttgatgcggagaacttgagattaagatgtcgaattgcaccatcggtgataaacagatcaatccgtagtgtcattgagcttactcagggcttcaggcagctggggtgcctattctgcctctgcaatccacctgttcaccctcttgtcgtcgccgcacatccccacgagccaaaccaatttgcggtcgggctgtcagatgggtccgtcaaagtgctggagccattggagtccgaagggaaatggggagcgcccgctccggcagacaatggcatcattcccaatggcaagacgccagcttcgtcggctactagcaaccctgctgcggatcaaatccaaagatagattgtattccctaagcttttctttttctgcaaactttctaattacactgacttatttgtatgtggatgccgttaggatattatcgtcatttgttgtaaaaaggacagaataggttttatgttcaggtgtggttaactttcaggtactaccctagttatcctgttcatggaagattatgtttgcgatacggggtaatagtgtctataaagtatgtcgcctaaggttttctcaggtttagctcgatagctcaaatgatgtaagctatatatttcttcatgaatgtaaagcaatacatagtttttgctcaagatctatttttacctggttttacatagtttttgctcaagatcta

SEQ ID NO: 34128 - DNA, 3664 bp, Zea Mays
gttaccttgggttggcttgagcaagagtcagggttcttcttcaatatgaagtacttcgaggagaaggtccatgctggggagtgggatgaggtggagagatacttgtcaggattcaccaaggtagatgacaataggtattcgatgaagatcttctttgagatcaggaagcagaagtatttggaagcgcttgataggcatgatagagcaaaggctgtagatattcttgtcaaggatcttaaagtcttctcgacattcaatgaggagttgtataaggagataacacaacttctcactcttgagaattttagggaaaatgaacagttgtctaagtatggggatactaaatcagctcgaagtattatgctggttgagctaaaaaaacttattgaagcaaacccccttttccgggaaaaacttgtcttccctactcttaaggcatcacgcctccgaactctaatcaatcaaagcttgaattggcagcatcagctttgtaagaaccctcgtccaaatccagatatcaaaactttattcaccgaccatacatgttctccacccaatggagctcgtgcatcgccggtatctgtaccactggcagctgttccaaaggctggtgctgcatatccaccactcacagctcatactccgttccaacctccacctggtccatctttagctggttggatggcaaatgcagccgcctcttcatctgttcagtctgctgttgtagcagcagcatcaatacctgttccacccaatcaagctgtctccatgttgaaacgcccagctctaacagactatcaaagtgcagagtctgagcaactaatgaagcgcttgaggcctggtggacatggcattgatgaggccacatatcctgctcccacccctcaacctgcatggtcagtggatgatcttccaaggacagttgcttgttcattgtcacatggatctaatgtaactagcatggattttcatccaactcggcatacactgcttctagtgggatctgctaatggtgaatttacactttatgagatcggtctgcgtgaaacattactttcaaagcccttcaaaattcgggatataaatgcatgttcaccacaatttcagaatgctgttgtcaaagattcctccatatccattaatcaagttacctggagccctgatggagaaatgattggcgttgcattcacgaaacatttgatccatctgcatggataccaaccaccaaatgagacacgacaccttctagagattgaggctcattctggaggtgtaaatgatatagcattctcccgaccaaataagcaactttgtgtggtcacttgtggagatgataaactaataaaggtatgggatatgcatggacataaattattcacatttgaagggcatgaggcacctgtgtattctatatgtccgcatcacaaagagagtattcagttcatcttctcaacttcccttgatggaaaaattaaggcctggctttatgacaatatgggatctagggtggactacgatgctcctggcaagtggtgtactactatgctatatagtgctgatggaactaggttgttctcatgtggaactagcaaagagggagactcctatttggttgagtggaatgaaagtgaaggatctatcaagaggacatattctggattccgtaaaaggtcagctggtgttgctggtgtagtgcagtttgatacagctcagaatcacattctggctgctggtgaagataaccatattaaattttgggatgttgacaataataacatgctgatctgcaccgatgctgaaggaggcctcccagctcttcctcgcttgaggtttaataaagaaggcaatcttcttgctgttactacagcagacaatggttttaagatacttgcaaatgctgatggacttagaactctacgcgcattagggagccggcctccttttgaagcatttaggccgcaatacgaagcttcttctatgaaggtctcaggtgctcctgttgttgctagcatctctcctaacataggccgaatggatcacttggataggaattctcctgcaaagccatctcctatactgaatggtggggatacagcatcaaggagcatagatataaagccaagaatctcagaagaaaagcctgataaagcaaaaccttgggaactaatggaagttctaaatccccagcaatgccatgtagcaacaatgccagaaactccagaccaagccagaaaggttgtccgacttctgtacacaaattctggtgttgggttgctagcactagggtctaacgccattcaaaggctatggaaatggagtcgaaacgaacaaaatccgagtggaaaagccacagctagtgttgtgccacaccattggcagccaaatagtggtcttgtcatgacaaatgatacagcagataccaatccagaggaggcagttccatgcattgcactctcaaagaatgattcctatgtgatgtctgcttgtggtgggaaggtttctttgtttaacatgatgacattcaaggtgatgacaacattcatgccacctccaccagcatcaacatttttagcatttcaccctcaagacaataacatcatagcaataggaatggaagattcaaccatccacatatacaatgtcagggtagatgaggtaaaaactagactcaaaggacatcaaaggaggataactgggttggcattctccaccaaccttggcatacttgtttcttcaggcgctgatgcacagctctgtgtgtggaccaatgacacctgggaaaaaaagagaacagtctcgatacaaatgccagctggaaaaactccttcaggagatacacgggtccagtttagttctgatcaaagtcacttgctagtagtacatgagactcaactagccatatatgacgcatcaaaaatggagaggatctatcagtggataccccaggacacattgtcagcttccatatcgcatgcatcatactcatgtaacagccagctagtttttgctgccttcactgatggtaacttaggtgtttttgatgcggagaacttgagattaagatgtcgaattgcaccatcggtgataaacagcaatccacctgttcaccctcttgtcgtcgccgcacatccccacgagccaaaccaatttgcggtcgggctgtcagatgggtccgtcaaagtgctggagccattggagtccgaagggaaatggggagcgcccgctccggcagacaatggcatcattcccaatggcaagacgccagcttcgtcggctactagcaaccctgctgcggatcaaatccaaagatagattgtattccctaagcttttctttttctgcaaactttctaattacactgacttatttgtatgtggatgccgttaggatattatcgtcatttgttgtaaaaaggacagaataggttttatgttcaggtgtggttaactttcaggtactaccctagttatcctgttcatggaagattatgtttgcgatacggggtaatagtgtctataaagtatgtcgcctaaggttttctcaggtttagctcgatagctcaaatgatgtaagctatatatttcttcatgaatgtaaagcaatacatagtttttgctcaagatctatttttacctggttttacatagtttttgctcaagatcta

SEQ ID NO: 34129 - DNA, 3750 bp, Zea Mays
ctctctttgcgcggccggtggttaccttgggttggcttgagcaagagtcagggttcttcttcaatatgaagtacttcgaggagaaggtccatgctggggagtgggatgaggtggagagatacttgtcaggattcaccaaggtagatgacaataggtattcgatgaagatcttctttgagatcaggaagcagaagtatttggaagcgcttgataggcatgatagagcaaaggctgtagatattcttgtcaaggatcttaaagtcttctcgacattcaatgaggagttgtataaggagataacacaacttctcactcttgagaattttagggaaaatgaacagttgtctaagtatggggatactaaatcagctcgaagtattatgctggttgagctaaaaaaacttattgaagcaaacccccttttccgggaaaaacttgtcttccctactcttaaggcatcacgcctccgaactctaatcaatcaaagcttgaattggcagcatcagctttgtaagaaccctcgtccaaatccagatatcaaaactttattcaccgaccatacatgttctccacccaatggagctcgtgcatcgccggtatctgtaccactggcagctgttccaaaggctggtgctgcatatccaccactcacagctcatactccgttccaacctccacctggtccatctttagctggttggatggcaaatgcagccgcctcttcatctgttcagtctgctgttgtagcagcagcatcaatacctgttccacccaatcaagctgtctccatgttgaaacgcccagctctaacagactatcaaagtgcagagtctgagcaactaatgaagcgcttgaggcctggtggacatggcattgatgaggccacatatcctgctcccacccctcaacctgcatggtcagtggatgatcttccaaggacagttgcttgttcattgtcacatggatctaatgtaactagcatggattttcatccaactcggcatacactgcttctagtgggatctgctaatggtgaatttacactttatgagatcggtctgcgtgaaacattactttcaaagcccttcaaaattcgggatataaatgcatgttcaccacaatttcagaatgctgttgtcaaagattcctccatatccattaatcaagttacctggagccctgatggagaaatgattggcgttgcattcacgaaacatttgatccatctgcatggataccaaccaccaaatgagacacgacaccttctagagattgaggctcattctggaggtgtaaatgatatagcattctcccgaccaaataagcaactttgtgtggtcacttgtggagatgataaactaataaaggtatgggatatgcatggacataaattattcacatttgaagggcatgaggcacctgtgtattctatatgtccgcatcacaaagagagtattcagttcatcttctcaacttcccttgatggaaaaattaaggcctggctttatgacaatatgggatctagggtggactacgatgctcctggcaagtggtgtactactatgctatatagtgctgatggaactaggttgttctcatgtggaactagcaaagagggagactcctatttggttgagtggaatgaaagtgaaggatctatcaagaggacatattctggattccgtaaaaggtcagctggtgttgctggtgtagtgcagtttgatacagctcagaatcacattctggctgctggtgaagataaccatattaaattttgggatgttgacaataataacatgctgatctgcaccgatgctgaaggaggcctcccagctcttcctcgcttgaggtttaataaagaaggcaatcttcttgctgttactacagcagacaatggttttaagatacttgcaaatgctgatggacttagaactctacgcgcattagggagccggcctccttttgaagcatttaggccgcaatacgaagcttcttctatgaaggtctcaggtgctcctgttgttgctagcatctctcctaacataggccgaatggatcacttggataggaattctcctgcaaagccatctcctatactgaatggtggggatacagcatcaaggagcatagatataaagccaagaatctcagaagaaaagcctgataaagcaaaaccttgggaactaatggaagttctaaatccccagcaatgccatgtagcaacaatgccagaaactccagaccaagccagaaaggttgtccgacttctgtacacaaattctggtgttgggttgctagcactagggtctaacgccattcaaaggctatggaaatggagtcgaaacgaacaaaatccgagtggaaaagccacagctagtgttgtgccacaccattggcagccaaatagtggtcttgtcatgacaaatgatacagcagataccaatccagaggaggcagttccatgcattgcactctcaaagaatgattcctatgtgatgtctgcttgtggtgggaaggtttctttgtttaacatgatgacattcaaggtgatgacaacattcatgccacctccaccagcatcaacatttttagcatttcaccctcaagacaataacatcatagcaataggaatggaagattcaaccatccacatatacaatgtcagggtagatgaggtaaaaactagactcaaaggacatcaaaggaggataactgggttggcattctccaccaaccttggcatacttgtttcttcaggcgctgatgcacagctctgtgtgtggaccaatgacacctgggaaaaaaagagaacagtctcgatacaaatgccagctggaaaaactccttcaggagatacacgggtccagtttagttctgatcaaagtcacttgctagtagtacatgagactcaactagccatatatgacgcatcaaaaatggagaggatctatcagtggataccccaggacacattgtcagcttccatatcgcatgcatcatactcatgtaacagccagctagtttttgctgccttcactgatggtaacttaggtgtttttgatgcggagaacttgagattaagatgtcgaattgcaccatcggtgataaacagatcaatccgtagtgtcattgagcttactcagggcttcaggcagctggggtgcctattctgcctctgcaatccacctgttcaccctcttgtcgtcgccgcacatccccacgagccaaaccaatttgcggtcgggctgtcagatgggtccgtcaaagtgctggagccattggagtccgaagggaaatggggagcgcccgctccggcagacaatggcatcattcccaatggcaagacgccagcttcgtcggctactagcaaccctgctgcggatcaaatccaaagatagattgtattccctaagcttttctttttctgcaaactttctaattacactgacttatttgtatgtggatgccgttaggatattatcgtcatttgttgtaaaaaggacagaataggttttatgttcaggtgtggttaactttcaggtactaccctagttatcctgttcatggaagattatgtttgcgatacggggtaatagtgtctataaagtatgtcgcctaaggttttctcaggtttagctcgatagctcaaatgatgtaagctatatatttcttcatgaatgtaaagcaatacatagtttttgctcaagatctatttttacctggttttacatagtttttgctcaagatcta

SEQ ID NO: 34130 - DNA, 4609 bp, Zea Mays
tagttaggacatgtacaattttattagatgctttttaaagagtctttagagacttaagtaaaaaaataaagaggcaaactcttcacgtatcttcacaatttttttatatttattgtcttttaattatatttatgatccagaggtttaaaactatggtatagtcacttagcatcgtgttgtattagaaaatcgttgtagtgtctctaggatgtacctgccctcatctccttcagtcggtgccgtgcgccactgttttcccactggcacgctgctgatccgagaagacgcgcgatggatgtaaactgccttcctgcagtccgcaaccaaccacgcatggaaacgcaagccagtctcgtgtcgtctcgtctcggcagccccagcaccgcccttcccctgtctcgcgaggcgatgtctcgcgcgcacgtcgccctcacaaccggacgccagctcacgaatatccatccgatttaatcccagccctttcgattccgccgcactcgacctatcatataagtacgtgcagatatcaataagcttacccacttatcaataaggacatgtgcttctcacagataagccagtgctgggtggcgtggggagagagaaaagggcgagaggtctgcaacgcatcgaagaaagcgagaccatagcttctctctctcccccaaccttctcttccacatctccgcttctctctcgcctccgcttcgcttcgcgagagacgggccgacgacggaaccctaggattcgcgcccgcctgagcggccaagccaccaggaccgcgccctccggacccgggggcgccagacaagctccggggcgcgcggatcgaccactggccggcttaccgccgccgctgccatgtcgtcgctcagccgcgagctcgtcttcctcatcctgcagttcctcgacgaggagaagttcaaggagaccgtgcacaagcttgagcaagagtcagggttcttcttcaatatgaagtacttcgaggagaaggtccatgctggggagtgggatgaggtggagagatacttgtcaggattcaccaaggtagatgacaataggtattcgatgaagatcttctttgagatcaggaagcagaagtatttggaagcgcttgataggcatgatagagcaaaggctgtagatattcttgtcaaggatcttaaagtcttctcgacattcaatgaggagttgtataaggagataacacaacttctcactcttgagaattttagggaaaatgaacagttgtctaagtatggggatactaaatcagctcgaagtattatgctggttgagctaaaaaaacttattgaagcaaacccccttttccgggaaaaacttgtcttccctactcttaaggcatcacgcctccgaactctaatcaatcaaagcttgaattggcagcatcagctttgtaagaaccctcgtccaaatccagatatcaaaactttattcaccgaccatacatgttctccacccaatggagctcgtgcatcgccggtatctgtaccactggcagctgttccaaaggctggtgctgcatatccaccactcacagctcatactccgttccaacctccacctggtccatctttagctggttggatggcaaatgcagccgcctcttcatctgttcagtctgctgttgtagcagcagcatcaatacctgttccacccaatcaagagtctgagcaactaatgaagcgcttgaggcctggtggacatggcattgatgaggccacatatcctgctcccacccctcaacctgcatggtcagtggatgatcttccaaggacagttgcttgttcattgtcacatggatctaatgtaactagcatggattttcatccaactcggcatacactgcttctagtgggatctgctaatggtgaatttacactttatgagatcggtctgcgtgaaacattactttcaaagcccttcaaaattcgggatataaatgcatgttcaccacaatttcagaatgctgttgtcaaagattcctccatatccattaatcaagttacctggagccctgatggagaaatgattggcgttgcattcacgaaacatttgatccatctgcatggataccaaccaccaaatgagacacgacaccttctagagattgaggctcattctggaggtgtaaatgatatagcattctcccgaccaaataagcaactttgtgtggtcacttgtggagatgataaactaataaaggtatgggatatgcatggacataaattattcacatttgaagggcatgaggcacctgtgtattctatatgtccgcatcacaaagagagtattcagttcatcttctcaacttcccttgatggaaaaattaaggcctggctttatgacaatatgggatctagggtggactacgatgctcctggcaagtggtgtactactatgctatatagtgctgatggaactaggttgttctcatgtggaactagcaaagagggagactcctatttggttgagtggaatgaaagtgaaggatctatcaagaggacatattctggattccgtaaaaggtcagctggtgttgctggtgtagtgcagtttgatacagctcagaatcacattctggctgctggtgaagataaccatattaaattttgggatgttgacaataataacatgctgatctgcaccgatgctgaaggaggcctcccagctcttcctcgcttgaggtttaataaagaaggcaatcttcttgctgttactacagcagacaatggttttaagatacttgcaaatgctgatggacttagaactctacgcgcattagggagccggcctccttttgaagcatttaggccgcaatacgaagcttcttctatgaaggtctcaggtgctcctgttgttgctagcatctctcctaacataggccgaatggatcacttggataggaattctcctgcaaagccatctcctatactgaatggtggggatacagcatcaaggagcatagatataaagccaagaatctcagaagaaaagcctgataaagcaaaaccttgggaactaatggaagttctaaatccccagcaatgccatgtagcaacaatgccagaaactccagaccaagccagaaaggttgtccgacttctgtacacaaattctggtgttgggttgctagcactagggtctaacgccattcaaaggctatggaaatggagtcgaaacgaacaaaatccgagtggaaaagccacagctagtgttgtgccacaccattggcagccaaatagtggtcttgtcatgacaaatgatacagcagataccaatccagaggaggcagttccatgcattgcactctcaaagaatgattcctatgtgatgtctgcttgtggtgggaaggtttctttgtttaacatgatgacattcaaggtgatgacaacattcatgccacctccaccagcatcaacatttttagcatttcaccctcaagacaataacatcatagcaataggaatggaagattcaaccatccacatatacaatgtcagggtagatgaggtaaaaactagactcaaaggacatcaaaggaggataactgggttggcattctccaccaaccttggcatacttgtttcttcaggcgctgatgcacagctctgtgtgtggaccaatgacacctgggaaaaaaagagaacagtctcgatacaaatgccagctggaaaaactccttcaggagatacacgggtccagtttagttctgatcaaagtcacttgctagtagtacatgagactcaactagccatatatgacgcatcaaaaatggagaggatctatcagtggataccccaggacacattgtcagcttccatatcgcatgcatcatactcatgtaacagccagctagtttttgctgccttcactgatggtaacttaggtgtttttgatgcggagaacttgagattaagatgtcgaattgcaccatcggtgataaacagatcaatccgtagtgtcattgagcttactcagggcttcaggcagctggggtgcctattctgcctctgcaatccacctgttcaccctcttgtcgtcgccgcacatccccacgagccaaaccaatttgcggtcgggctgtcagatgggtccgtcaaagtgctggagccattggagtccgaagggaaatggggagcgcccgctccggcagacaatggcatcattcccaatggcaagacgccagcttcgtcggctactagcaaccctgctgcggatcaaatccaaagatagattgtattccctaagcttttctttttctgcaaactttctaattacactgacttatttgtatgtggatgccgttaggatattatcgtcatttgttgtaaaaaggacagaataggttttatgttcaggtgtggttaactttcaggtactaccctagttatcctgttcatggaagattatgtttgcgatacggggtaatagtgtctataaagtatgtcgcctaaggttttctcaggtttagctcgatagctcaaatgatgtaagctatatatttcttcatgaatgtaaagcaatacatagtttttgctcaagatctatttttacctggttttacatagtttttgctcaagatcta

SEQ ID NO: 34131 - DNA, 4360 bp, Zea Mays
tagttaggacatgtacaattttattagatgctttttaaagagtctttagagacttaagtaaaaaaataaagaggcaaactcttcacgtatcttcacaatttttttatatttattgtcttttaattatatttatgatccagaggtttaaaactatggtatagtcacttagcatcgtgttgtattagaaaatcgttgtagtgtctctaggatgtacctgccctcatctccttcagtcggtgccgtgcgccactgttttcccactggcacgctgctgatccgagaagacgcgcgatggatgtaaactgccttcctgcagtccgcaaccaaccacgcatggaaacgcaagccagtctcgtgtcgtctcgtctcggcagccccagcaccgcccttcccctgtctcgcgaggcgatgtctcgcgcgcacgtcgccctcacaaccggacgccagctcacgaatatccatccgatttaatcccagccctttcgattccgccgcactcgacctatcatataagtacgtgcagatatcaataagcttacccacttatcaataaggacatgtgcttctcacagataagccagtgctgggtggcgtggggagagagaaaagggcgagaggtctgcaacgcatcgaagaaagcgagaccatagcttctctctctcccccaaccttctcttccacatctccgcttctctctcgcctccgcttcgcttcgcgagagacgggccgacgacggaaccctaggattcgcgcccgcctgagcggccaagccaccaggaccgcgccctccggacccgggggcgccagacaagctccggggcgcgcggatcgaccactggccggcttaccgccgccgctgccatgtcgtcgctcagccgcgagctcgtcttcctcatcctgcagttcctcgacgaggagaagttcaaggagaccgtgcacaagcttgagcaagagtcagggttcttcttcaatatgaagtacttcgaggagaaggtccatgctggggagtgggatgaggtggagagatacttgtcaggattcaccaaggtagatgacaataggtattcgatgaagatcttctttgagatcaggaagcagaagtatttggaagcgcttgataggcatgatagagcaaaggctgtagatattcttgtcaaggatcttaaagtcttctcgacattcaatgaggagttgtataaggagataacacaacttctcactcttgagaattttagggaaaatgaacagttgtctaagtatggggatactaaatcagctcgaagtattatgctggttgagctaaaaaaacttattgaagcaaacccccttttccgggaaaaacttgtcttccctactcttaaggcatcacgcctccgaactctaatcaatcaaagcttgaattggcagcatcagctttgtaagaaccctcgtccaaatccagatatcaaaactttattcaccgaccatacatgttctccacccaatggagctcgtgcatcgccggtatctgtaccactggcagctgttccaaaggctggtgctgcatatccaccactcacagctcatactccgttccaacctccacctggtccatctttagctggttggatggcaaatgcagccgcctcttcatctgttcagtctgctgttgtagcagcagcatcaatacctgttccacccaatcaagagtctgagcaactaatgaagcgcttgaggcctggtggacatggcattgatgaggccacatatcctgctcccacccctcaacctgcatggtcagtggatgatcttccaaggacagttgcttgttcattgtcacatggatctaatgtaactagcatggattttcatccaactcggcatacactgcttctagtgggatctgctaatggtgaatttacactttatgagatcggtctgcgtgaaacattactttcaaagcccttcaaaattcgggatataaatgcatgttcaccacaatttcagaatgctgttgtcaaagattcctccatatccattaatcaagttacctggagccctgatggagaaatgattggcgttgcattcacgaaacatttgatccatctgcatggataccaaccaccaaatgagacacgacaccttctagagattgaggctcattctggaggtgtaaatgatatagcattctcccgaccaaataagcaactttgtgtggtcacttgtggagatgataaactaataaaggtatgggatatgcatggacataaattattcacatttgaagggcatgaggcacctgtgtattctatatgtccgcatcacaaagagagtattcagttcatcttctcaacttcccttgatggaaaaattaaggcctggctttatgacaatatgggatctagggtggactacgatgctcctggcaagtggtgtactactatgctatatagtgctgatggaactaggttgttctcatgtggaactagcaaagagggagactcctatttggttgagtggaatgaaagtgaaggatctatcaagaggacatattctggattccgtaaaaggtcagctggtgttgctggtgtagtgcagtttgatacagctcagaatcacattctggctgctggtgaagataaccatattaaattttgggatgttgacaataataacatgctgatctgcaccgatgctgaaggaggcctcccagctcttcctcgcttgaggtttaataaagaaggcaatcttcttgctgttactacagcagacaatggttttaagatacttgcaaatgctgatggacttagaactctacgcgcattagggagccggcctccttttgaagcatttaggccgcaatacgaagcttcttctatgaaggtctcaggtgctcctgttgttgctagcatctctcctaacataggccgaatggatcacttggataggaattctcctgcaaagccatctcctatactgaatggtggggatacagcatcaaggagcatagatataaagccaagaatctcagaagaaaagcctgataaagcaaaaccttgggaactaatggaagttctaaatccccagcaatgccatgtagcaacaatgccagaaactccagaccaagccagaaaggttgtccgacttctgtacacaaattctggtgttgggttgctagcactagggtctaacgccattcaaaggctatggaaatggagtcgaaacgaacaaaatccgagtggaaaagccacagctagtgttgtgccacaccattggcagccaaatagtggtcttgtcatgacaaatgatacagcagataccaatccagaggaggcagttccatgcattgcactctcaaagaatgattcctatgtgatgtctgcttgtggtgggaaggtttctttgtttaacatgatgacattcaaggtgatgacaacattcatgccacctccaccagcatcaacatttttagcatttcaccctcaagacaataacatcatagcaataggaatggaagattcaaccatccacatatacaatgtcagggtagatgaggtaaaaactagactcaaaggacatcaaaggaggataactgggttggcattctccaccaaccttggcatacttgtttcttcaggcgctgatgcacagtggataccccaggacacattgtcagcttccatatcgcatgcatcatactcatgtaacagccagctagtttttgctgccttcactgatggtaacttaggtgtttttgatgcggagaacttgagattaagatgtcgaattgcaccatcggtgataaacagcaatccacctgttcaccctcttgtcgtcgccgcacatccccacgagccaaaccaatttgcggtcgggctgtcagatgggtccgtcaaagtgctggagccattggagtccgaagggaaatggggagcgcccgctccggcagacaatggcatcattcccaatggcaagacgccagcttcgtcggctactagcaaccctgctgcggatcaaatccaaagatagattgtattccctaagcttttctttttctgcaaactttctaattacactgacttatttgtatgtggatgccgttaggatattatcgtcatttgttgtaaaaaggacagaataggttttatgttcaggtgtggttaactttcaggtactaccctagttatcctgttcatggaagattatgtttgcgatacggggtaatagtgtctataaagtatgtcgcctaaggttttctcaggtttagctcgatagctcaaatgatgtaagctatatatttcttcatgaatgtaaagcaatacatagtttttgctcaagatctatttttacctggttttacatagtttttgctcaagatcta

SEQ ID NO: 34132 - DNA, 4543 bp, Zea Mays
tagttaggacatgtacaattttattagatgctttttaaagagtctttagagacttaagtaaaaaaataaagaggcaaactcttcacgtatcttcacaatttttttatatttattgtcttttaattatatttatgatccagaggtttaaaactatggtatagtcacttagcatcgtgttgtattagaaaatcgttgtagtgtctctaggatgtacctgccctcatctccttcagtcggtgccgtgcgccactgttttcccactggcacgctgctgatccgagaagacgcgcgatggatgtaaactgccttcctgcagtccgcaaccaaccacgcatggaaacgcaagccagtctcgtgtcgtctcgtctcggcagccccagcaccgcccttcccctgtctcgcgaggcgatgtctcgcgcgcacgtcgccctcacaaccggacgccagctcacgaatatccatccgatttaatcccagccctttcgattccgccgcactcgacctatcatataagtacgtgcagatatcaataagcttacccacttatcaataaggacatgtgcttctcacagataagccagtgctgggtggcgtggggagagagaaaagggcgagaggtctgcaacgcatcgaagaaagcgagaccatagcttctctctctcccccaaccttctcttccacatctccgcttctctctcgcctccgcttcgcttcgcgagagacgggccgacgacggaaccctaggattcgcgcccgcctgagcggccaagccaccaggaccgcgccctccggacccgggggcgccagacaagctccggggcgcgcggatcgaccactggccggcttaccgccgccgctgccatgtcgtcgctcagccgcgagctcgtcttcctcatcctgcagttcctcgacgaggagaagttcaaggagaccgtgcacaagcttgagcaagagtcagggttcttcttcaatatgaagtacttcgaggagaaggtccatgctggggagtgggatgaggtggagagatacttgtcaggattcaccaaggtagatgacaataggtattcgatgaagatcttctttgagatcaggaagcagaagtatttggaagcgcttgataggcatgatagagcaaaggctgtagatattcttgtcaaggatcttaaagtcttctcgacattcaatgaggagttgtataaggagataacacaacttctcactcttgagaattttagggaaaatgaacagttgtctaagtatggggatactaaatcagctcgaagtattatgctggttgagctaaaaaaacttattgaagcaaacccccttttccgggaaaaacttgtcttccctactcttaaggcatcacgcctccgaactctaatcaatcaaagcttgaattggcagcatcagctttgtaagaaccctcgtccaaatccagatatcaaaactttattcaccgaccatacatgttctccacccaatggagctcgtgcatcgccggtatctgtaccactggcagctgttccaaaggctggtgctgcatatccaccactcacagctcatactccgttccaacctccacctggtccatctttagctggttggatggcaaatgcagccgcctcttcatctgttcagtctgctgttgtagcagcagcatcaatacctgttccacccaatcaagagtctgagcaactaatgaagcgcttgaggcctggtggacatggcattgatgaggccacatatcctgctcccacccctcaacctgcatggtcagtggatgatcttccaaggacagttgcttgttcattgtcacatggatctaatgtaactagcatggattttcatccaactcggcatacactgcttctagtgggatctgctaatggtgaatttacactttatgagatcggtctgcgtgaaacattactttcaaagcccttcaaaattcgggatataaatgcatgttcaccacaatttcagaatgctgttgtcaaagattcctccatatccattaatcaagttacctggagccctgatggagaaatgattggcgttgcattcacgaaacatttgatccatctgcatggataccaaccaccaaatgagacacgacaccttctagagattgaggctcattctggaggtgtaaatgatatagcattctcccgaccaaataagcaactttgtgtggtcacttgtggagatgataaactaataaaggtatgggatatgcatggacataaattattcacatttgaagggcatgaggcacctgtgtattctatatgtccgcatcacaaagagagtattcagttcatcttctcaacttcccttgatggaaaaattaaggcctggctttatgacaatatgggatctagggtggactacgatgctcctggcaagtggtgtactactatgctatatagtgctgatggaactaggttgttctcatgtggaactagcaaagagggagactcctatttggttgagtggaatgaaagtgaaggatctatcaagaggacatattctggattccgtaaaaggtcagctggtgttgctggtgtagtgcagtttgatacagctcagaatcacattctggctgctggtgaagataaccatattaaattttgggatgttgacaataataacatgctgatctgcaccgatgctgaaggaggcctcccagctcttcctcgcttgaggtttaataaagaaggcaatcttcttgctgttactacagcagacaatggttttaagatacttgcaaatgctgatggacttagaactctacgcgcattagggagccggcctccttttgaagcatttaggccgcaatacgaagcttcttctatgaaggtctcaggtgctcctgttgttgctagcatctctcctaacataggccgaatggatcacttggataggaattctcctgcaaagccatctcctatactgaatggtggggatacagcatcaaggagcatagatataaagccaagaatctcagaagaaaagcctgataaagcaaaaccttgggaactaatggaagttctaaatccccagcaatgccatgtagcaacaatgccagaaactccagaccaagccagaaaggttgtccgacttctgtacacaaattctggtgttgggttgctagcactagggtctaacgccattcaaaggctatggaaatggagtcgaaacgaacaaaatccgagtggaaaagccacagctagtgttgtgccacaccattggcagccaaatagtggtcttgtcatgacaaatgatacagcagataccaatccagaggaggcagttccatgcattgcactctcaaagaatgattcctatgtgatgtctgcttgtggtgggaaggtttctttgtttaacatgatgacattcaaggtgatgacaacattcatgccacctccaccagcatcaacatttttagcatttcaccctcaagacaataacatcatagcaataggaatggaagattcaaccatccacatatacaatgtcagggtagatgaggtaaaaactagactcaaaggacatcaaaggaggataactgggttggcattctccaccaaccttggcatacttgtttcttcaggcgctgatgcacagctctgtgtgtggaccaatgacacctgggaaaaaaagagaacagtctcgatacaaatgccagctggaaaaactccttcaggagatacacgggtccagtttagttctgatcaaagtcacttgctagtagtacatgagactcaactagccatatatgacgcatcaaaaatggagaggatctatcagtggataccccaggacacattgtcagcttccatatcgcatgcatcatactcatgtaacagccagctagtttttgctgccttcactgatggtaacttaggtgtttttgatgcggagaacttgagattaagatgtcgaattgcaccatcggtgataaacagcaatccacctgttcaccctcttgtcgtcgccgcacatccccacgagccaaaccaatttgcggtcgggctgtcagatgggtccgtcaaagtgctggagccattggagtccgaagggaaatggggagcgcccgctccggcagacaatggcatcattcccaatggcaagacgccagcttcgtcggctactagcaaccctgctgcggatcaaatccaaagatagattgtattccctaagcttttctttttctgcaaactttctaattacactgacttatttgtatgtggatgccgttaggatattatcgtcatttgttgtaaaaaggacagaataggttttatgttcaggtgtggttaactttcaggtactaccctagttatcctgttcatggaagattatgtttgcgatacggggtaatagtgtctataaagtatgtcgcctaaggttttctcaggtttagctcgatagctcaaatgatgtaagctatatatttcttcatgaatgtaaagcaatacatagtttttgctcaagatctatttttacctggttttacatagtttttgctcaagatcta

SEQ ID NO: 34133 - DNA, 812 bp, Zea Mays
tgatttcgcaccctctaagcatctgctctttttcttacggacaaagagaaatcgatccaaaggccgcggcgcaacatggcgaagatcaagccgaaggccttgctcgcgcaaagcaaggtgaagaaggtccccggccaaatcagcgtggccacgatcgtcacctacatgatcctcggcgtcctggttgtgtcctccgtttacgctgcctacaggtactgctgggcaggcacaggagcagcggaggcagtgggcgcccaggggaactgatcccccttccgactgcgtggctgatctcgctgttgttgtatcatccggttggggtaaaatttttggttgttgctgtctagcaaatggggttcatgggacatggataggttgtatgttgatacggttacaccgtagccgatgatatgtatgttgaatttcttcccttttattatcctttgatgatccgattgcctctgctcctggaactgctttactttgaagtctgtgcctgtgacgttagcccagaagtcagaaccgcacagcacaggcatctttttgtttatacttgaacctgaaaggcctttctttccatcaagaggggtagagtttgtctgtctgtttttcgtacagcaagcagggaatcggcaacaacaggttgaaatacgctgcgacgacatacagcatatttattaggatgagattagcctttttgttttttgcatggtggaaatggaaagaaaaatgaacgaatgtttctggtaccttttgaagcctgaaagagtgaactgtagtgtgccaagaaaaagaaaaaaaaaaggctatcg

SEQ ID NO: 34134 - DNA, 820 bp, Zea Mays
cttcgcttagataaaccgctcgttctcacctgcgggatcttttacttcgttgggggacctcgattccgaggccgcggcgcaacatggcgaagatcaagccgaaggccttgctcgcgcaaagcaaggtgaagaaggtccccggccaaatcagcgtggccacgatcgtcacctacatgatcctcggcgtcctggttgtgtcctccgtttacgctgcctacaggtactgctgggcaggcacaggagcagcggaggcagtgggcgcccaggggaactgatcccccttccgactgcgtggctgatctcgctgttgttgtatcatccggttggggtaaaatttttggttgttgctgtctagcaaatggggttcatgggacatggataggttgtatgttgatacggttacaccgtagccgatgatatgtatgttgaatttcttcccttttattatcctttgatgatccgattgcctctgctcctggaactgctttactttgaagtctgtgcctgtgacgttagcccagaagtcagaaccgcacagcacaggcatctttttgtttatacttgaacctgaaaggcctttctttccatcaagaggggtagagtttgtctgtctgtttttcgtacagcaagcagggaatcggcaacaacaggttgaaatacgctgcgacgacatacagcatatttattaggatgagattagcctttttgttttttgcatggtggaaatggaaagaaaaatgaacgaatgtttctggtaccttttgaagcctgaaagagtgaactgtagtgtgccaagaaaaagaaaaaaaaaaggctatcg

SEQ ID NO: 34135 - DNA, 1196 bp, Zea Mays
ggcgcgcgtgacccacgaagcaatttcaaacccagccagaatcaggagcaccgcgtacgcgacgtcgcggtcgcggcccagcttccagcgcccgacccggcgggcaagacataaaacacggcaacacataacacaactagtgaaggatacatcagacaagcttaaacaagctagcgaggcggatcatcgcgttgaagtcagcgctaccaaaaagattgctgatgcaaagctagctaaagatttccaagcagtcctaaaagaattccagaaagctcaacgattagcagtagagagagaagctgcatatgcaccttttattactcaagcgggcctgccacagagctacaactcaagtgaagtgaacaatggtgctgataagttggcagagcagcgcacgcagcttctagaatctagaaggcaggagttggtcttcttggacaatgaaatagtgttcaatgaggccatcattgaggagagggatcagggaatacaagagattcaacaccaaatcactgaagtaaatgaaatcttcaaagatcttgctgtgctagtccatgatcaaggagcaatgatagatgacattgattcccatatagagaatgctgttgtagcgacttcgcaggctaaaggtcagctttcaaaagctgccaagactcagaagtcgaactcttcgctgatatgcttgttactggttatcttcggcgtggtcctgctcatagtgataatagtacttgcagcataaaagcttggaaggcagctgaggttccaatgatcgagcttattgcgatgaattccttattattattttttttgctgtgcagccaggaatggatcctggcatccgcctggatgtatccaggcggtgattggtgatgtgcttgtggtatggctgtgtatttggtgatgatgtatctggaatgcatgggtggtttcacataaaagtatactctttcctgccagtgtagttcctcttgtctcatatgcacgctttgtttatatattgtaatgtatgagtgcgtgctgtagaacaaggttggattatctgtggtatgaatttcctcgattccatgagaaacgcttttctatatgtgaacttcgcttcctcttttcttcttgggcaatgggcaccatgttgttaggtggagacggaggtccatcattgttttcttcttgcttattattatgtggtccatcat

SEQ ID NO: 34136 - DNA, 1190 bp, Zea Mays
ggcgcgcgtgacccacgaagcaatttcaaacccagccagaatcaggagcaccgcgtacgcgacgtcgcggtcgcggcccagcttccagcgcccgacccggcgggcaagacataaaacacggcaacacataacacaactagtgaaggatacatcagacaagcttaaacaagctagcgaggcggatcatcgcgttgaagctaccaaaaagattgctgatgcaaagctagctaaagatttccaagcagtcctaaaagaattccagaaagctcaacgattagcagtagagagagaagctgcatatgcaccttttattactcaagcgggcctgccacagagctacaactcaagtgaagtgaacaatggtgctgataagttggcagagcagcgcacgcagcttctagaatctagaaggcaggagttggtcttcttggacaatgaaatagtgttcaatgaggccatcattgaggagagggatcagggaatacaagagattcaacaccaaatcactgaagtaaatgaaatcttcaaagatcttgctgtgctagtccatgatcaaggagcaatgatagatgacattgattcccatatagagaatgctgttgtagcgacttcgcaggctaaaggtcagctttcaaaagctgccaagactcagaagtcgaactcttcgctgatatgcttgttactggttatcttcggcgtggtcctgctcatagtgataatagtacttgcagcataaaagcttggaaggcagctgaggttccaatgatcgagcttattgcgatgaattccttattattattttttttgctgtgcagccaggaatggatcctggcatccgcctggatgtatccaggcggtgattggtgatgtgcttgtggtatggctgtgtatttggtgatgatgtatctggaatgcatgggtggtttcacataaaagtatactctttcctgccagtgtagttcctcttgtctcatatgcacgctttgtttatatattgtaatgtatgagtgcgtgctgtagaacaaggttggattatctgtggtatgaatttcctcgattccatgagaaacgcttttctatatgtgaacttcgcttcctcttttcttcttgggcaatgggcaccatgttgttaggtggagacggaggtccatcattgttttcttcttgcttattattatgtggtccatcat

SEQ ID NO: 34137 - DNA, 1759 bp, Zea Mays
ggcgcgcgtgacccacgaagcaatttcaaacccagccagaatcaggagcaccgcgtacgcgacgtcgcggtcgcggcccagcttccagcgcccgacccggcgggcaaggcaaggcaacgaaccaacctggattactggattgtggcttggaagcttgccgcgagcccgcgacgacagaccttctttcgtcccgtcctttcccctgcgcgccgcgagtgaattccggaatccccaatctatccgacgccacacgaaacgaaacacaagagaagagaatagagagaaggtcggagggctagacccggtcccccaattccaattcgcccctctcgcggccggcctcgcgagacgccgattcggatcccatctcctgctcagagcctcgattcgaccggcgggggcgacgattcgaccgggtcggtagccaggcagaggcagcggaaggagaggatgagcttccaggacctggaggcggggcacgtccggggggcgccgctcggcggcggccggaggaacggcaggggccccgcgggggcggggggcgccggcgccggcgcgtcgcaggccgtggcgtcgggcgtcttccagatcaacaccgcggttgccacgttccagcgcctcgtcaacacgctcggcacgcccaaggatacccccgacctccgcgacaggatacataaaacacggcaacacataacacaactagtgaaggatacatcagacaagcttaaacaagctagcgaggcggatcatcgcgttgaagtcagcgctaccaaaaagattgctgatgcaaagctagctaaagatttccaagcagtcctaaaagaattccagaaagctcaacgattagcagtagagagagaagctgcatatgcaccttttattactcaagcgggcctgccacagagctacaactcaagtgaagtgaacaatggtgctgataagttggcagagcagcgcacgcagcttctagaatctagaaggcaggagttggtcttcttggacaatgaaatagtgttcaatgaggccatcattgaggagagggatcagggaatacaagagattcaacaccaaatcactgaagtaaatgaaatcttcaaagatcttgctgtgctagtccatgatcaaggagcaatgatagatgacattgattcccatatagagaatgctgttgtagcgacttcgcaggctaaaggtcagctttcaaaagctgccaagactcagaagtcgaactcttcgctgatatgcttgttactggttatcttcggcgtggtcctgctcatagtgataatagtacttgcagcataaaagcttggaaggcagctgaggttccaatgatcgagcttattgcgatgaattccttattattattttttttgctgtgcagccaggaatggatcctggcatccgcctggatgtatccaggcggtgattggtgatgtgcttgtggtatggctgtgtatttggtgatgatgtatctggaatgcatgggtggtttcacataaaagtatactctttcctgccagtgtagttcctcttgtctcatatgcacgctttgtttatatattgtaatgtatgagtgcgtgctgtagaacaaggttggattatctgtggtatgaatttcctcgattccatgagaaacgcttttctatatgtgaacttcgcttcctcttttcttcttgggcaatgggcaccatgttgttaggtggagacggaggtccatcattgttttcttcttgcttattattatgtggtccatcat

SEQ ID NO: 34138 - DNA, 1665 bp, Zea Mays
ggcgcgcgtgacccacgaagcaatttcaaacccagccagaatcaggagcaccgcgtacgcgacgtcgcggtcgcggcccagcttccagcgcccgacccggcgggcaaggcaaggcaacgaaccaacctggattactggattgtggcttggaagcttgccgcgagcccgcgacgacagaccttctttcgtcccgtcctttcccctgcgcgccgcgagtgaattccggaatccccaatctatccgacgccacacgaaacgaaacacaagagaagagaatagagagaaggtcggagggctagacccggtcccccaattccaattcgcccctctcgcggccggcctcgcgagacgccgattcggatcccatctcctgctcagagcctcgattcgaccggcgggggcgacgattcgaccgggtcggtagccaggcagaggcagcggaaggagaggatgagcttccaggacctggaggcggggcacgtccggggggcgccgctcggcggcggccggaggaacggcaggggccccgcgggggcggggggcgccggcgccggcgcgtcgcaggccgtggcgtcgggcgtcttccagatcaacaccgcggttgccacgttccagcgcctcgtcaacacgctcggcacgcccaaggatacccccgacctccgcgacaggatgctaccaaaaagattgctgatgcaaagctagctaaagatttccaagcagtcctaaaagaattccagaaagctcaacgattagcagtagagagagaagctgcatatgcaccttttattactcaagcgggcctgccacagagctacaactcaagtgaagtgaacaatggtgctgataagttggcagagcagcgcacgcagcttctagaatctagaaggcaggagttggtcttcttggacaatgaaatagtgttcaatgaggccatcattgaggagagggatcagggaatacaagagattcaacaccaaatcactgaagtaaatgaaatcttcaaagatcttgctgtgctagtccatgatcaaggagcaatgatagatgacattgattcccatatagagaatgctgttgtagcgacttcgcaggctaaaggtcagctttcaaaagctgccaagactcagaagtcgaactcttcgctgatatgcttgttactggttatcttcggcgtggtcctgctcatagtgataatagtacttgcagcataaaagcttggaaggcagctgaggttccaatgatcgagcttattgcgatgaattccttattattattttttttgctgtgcagccaggaatggatcctggcatccgcctggatgtatccaggcggtgattggtgatgtgcttgtggtatggctgtgtatttggtgatgatgtatctggaatgcatgggtggtttcacataaaagtatactctttcctgccagtgtagttcctcttgtctcatatgcacgctttgtttatatattgtaatgtatgagtgcgtgctgtagaacaaggttggattatctgtggtatgaatttcctcgattccatgagaaacgcttttctatatgtgaacttcgcttcctcttttcttcttgggcaatgggcaccatgttgttaggtggagacggaggtccatcattgttttcttcttgcttattattatgtggtccatcat

SEQ ID NO: 34139 - DNA, 1153 bp, Zea Mays
ggcgcgcgtgacccacgaagcaatttcaaacccagccagaatcaggagcaccgcgtacgcgacgtcgcggtcgcggcccagcttccagcgcccgacccggcgggcaagacataaaacacggcaacacataacacaactagtgaaggatacatcagacaagcttaaacaagctagcgaggcggatcatcgcgttgaagtcagcgctaccaaaaagattgctgatgcaaagctagctaaagatttccaagcagtcctaaaagaattccagaaagctcaacgattagcagtagagagagaagctgcatatgcaccttttattactcaagcgggcctgccacagagctacaactcaagtgaagtgaacaatggtgctgataagttggcagagcagcgcacgcagcttctagaatctagaaggcaggagttggtcttcttggacaatgaaatagtgttcaatgaggccatcattgaggagagggatcagggaatacaagagattcaacaccaaatcactgaagtaaatgaaatcttcaaagatcttgctgtgctagtccatgatcaaggagcaatgatagatgacattgattcccatatagagaatgctgttgtagcgacttcgcaggctaaaggtcagctttcaaaagctgccaagactcagaagtcgaactcttcgctgtgataatagtacttgcagcataaaagcttggaaggcagctgaggttccaatgatcgagcttattgcgatgaattccttattattattttttttgctgtgcagccaggaatggatcctggcatccgcctggatgtatccaggcggtgattggtgatgtgcttgtggtatggctgtgtatttggtgatgatgtatctggaatgcatgggtggtttcacataaaagtatactctttcctgccagtgtagttcctcttgtctcatatgcacgctttgtttatatattgtaatgtatgagtgcgtgctgtagaacaaggttggattatctgtggtatgaatttcctcgattccatgagaaacgcttttctatatgtgaacttcgcttcctcttttcttcttgggcaatgggcaccatgttgttaggtggagacggaggtccatcattgttttcttcttgcttattattatgtggtccatcat

SEQ ID NO: 34140 - DNA, 1488 bp, Zea Mays
ggcgcgcgtgacccacgaagcaatttcaaacccagccagaatcaggagcaccgcgtacgcgacgtcgcggtcgcggcccagcttccagcgcccgacccggcgggcaagacataaaacacggcaacacataacacaactagtgaaggatacatcagacaagcttaaacaagctagcgaggcggatcatcgcgttgaagtcagcgctaccaaaaagattgctgatgcaaagctagctaaagatttccaagcagtcctaaaagaattccagaaagctcaacgattagcagtagagagagaagctgcatatgcaccttttattactcaagcgggcctgccacagagctacaactcaagtgaagtgaacaatggtgctgataagttggcagagcagcgcacgcagcttctagaatctagaaggcaggagttggtcttcttggacaatgaaatagtgttcaatgaggccatcattgaggagagggatcagggaatacaagagattcaacaccaaatcactgaagtaaatgaaatcttcaaagatcttgctgtgctagtccatgatcaaggagcaatgatagatgacattgattcccatatagagaatgctgttgtagcgacttcgcaggctaaaggtcagctttcaaaagctgccaagactcagaagtcgaactcttcgctatatgcttgttactggttatcttcggcgtggtcctgctcatagtgataatagtacttgcagcataaaagcttggaaggcagctgaggttccaatgatcgagcttattgcgatgaattccttattattattttttttgctgtgcagccaggaatggatcctggcatccgcctggatgtatccaggcggtgattggtgatgtgcttgtggtatggctgtgtatttggtgatgatgtatctggaatgcatgggtggtttcacataaggccccgttcggtttggcctgaacgacctggaatacagcatattccagctgaaattatgtcacttggattaaaactggatcaatcctaaatatctgttcggatagatttaaccctgaacgaaaccagagcgttttcagccttttaacctctcttccactcggattggagccacacctatgaacacctggaatcaaaccagaccaggatttagtaaataaccagaatccactccatcccggcgtggaacggttcctgagcaggaactgatcttggactggcgaacggcccctaaaagtatactctttcctgccagtgtagttcctcttgtctcatatgcacgctttgtttatatattgtaatgtatgagtgcgtgctgtagaacaaggttggattatctgtggtatgaatttcctcgattccatgagaaacgcttttctatatgtgaacttcgcttcctcttttcttcttgggcaatgggcaccatgttgttaggtggagacggaggtccatcattgttttcttcttgcttattattatgtggtccatcat

SEQ ID NO: 34141 - DNA, 1916 bp, Zea Mays
ggcgcgcgtgacccacgaagcaatttcaaacccagccagaatcaggagcaccgcgtacgcgacgtcgcggtcgcggcccagcttccagcgcccgacccggcgggcaaggcaaggcaacgaaccaacctggattactggattgtggcttggaagcttgccgcgagcccgcgacgacagaccttctttcgtcccgtcctttcccctgcgcgccgcgagtgaattccggaatccccaatctatccgacgccacacgaaacgaaacacaagagaagagaatagagagaaggtcggagggctagacccggtcccccaattccaattcgcccctctcgcggccggcctcgcgagacgccgattcggatcccatctcctgctcagagcctcgattcgaccggcgggggcgacgattcgaccgggtcggtagccaggccgtggcgtcgggcgtcttccagatcaacaccgcggttgccacgttccagcgcctcgtcaacacgctcggcacgcccaaggatacccccgacctccgcgacaggatacataaaacacggcaacacataacacaactagtgaaggatacatcagacaagcttaaacaagctagcgaggcggatcatcgcgttgaagtcagcgctaccaaaaagattgctgatgcaaagctagctaaagatttccaagcagtcctaaaagaattccagaaagctcaacgattagcagtagagagagaagctgcatatgcaccttttattactcaagcgggcctgccacagagctacaactcaagtgaagtgaacaatggtgctgataagttggcagagcagcgcacgcagcttctagaatctagaaggcaggagttggtcttcttggacaatgaaatagtgttcaatgaggccatcattgaggagagggatcagggaatacaagagattcaacaccaaatcactgaagtaaatgaaatcttcaaagatcttgctgtgctagtccatgatcaaggagcaatgatagatgacattgattcccatatagagaatgctgttgtagcgacttcgcaggctaaaggtcagctttcaaaagctgccaagactcagaagtcgaactcttcgctgatatgcttgttactggttatcttcggcgtggtcctgctcatagtgataatagtacttgcagcataaaagcttggaaggcagctgaggttccaatgatcgagcttattgcgatgaattccttattattattttttttgctgtgcagccaggaatggatcctggcatccgcctggatgtatccaggcggtgattggtgatgtgcttgtggtatggctgtgtatttggtgatgatgtatctggaatgcatgggtggtttcacataaggccccgttcggtttggcctgaacgacctggaatacagcatattccagctgaaattatgtcacttggattaaaactggatcaatcctaaatatctgttcggatagatttaaccctgaacgaaaccagagcgttttcagccttttaacctctcttccactcggattggagccacacctatgaacacctggaatcaaaccagaccaggatttagtaaataaccagaatccactccatcccggcgtggaacggttcctgagcaggaactgatcttggactggcgaacggcccctaaaagtatactctttcctgccagtgtagttcctcttgtctcatatgcacgctttgtttatatattgtaatgtatgagtgcgtgctgtagaacaaggttggattatctgtggtatgaatttcctcgattccatgagaaacgcttttctatatgtgaacttcgcttcctcttttcttcttgggcaatgggcaccatgttgttaggtggagacggaggtccatcattgttttcttcttgcttattattatgtggtccatcat

SEQ ID NO: 34142 - DNA, 1879 bp, Zea Mays
gttactctgaattaagcagcatctctctattcttaccagaaaagaaattttagaggataacatgagttttcttttctcttgttagacaggctcatgtttccatactcactaaaaggaagagtgtagtctcttgtgcagttgcttgtcaaacttgaagagatatatgcaaagagattgttatgaattcagagttttctgcaaaaccacttttcctgtgtccttaaagcaggttatggtgctctcttcaatccttacatgttttgtttcctttttcttttgataatcttatgtaatttatatatacttttctatctctgtcgtaacttgtatttgggaagtgccacttttaaaacaaagaaaaccaagaaaacttatcagatagtactgaaaattgtggctgccttttcaaccaataatacatgtaaaccaagaacaagcttgtcaatttattaattttgtgacatctatctttaacctgctttgtggttctccatctattttttatggtaacttgattgtactccttctgcacatctgtccatatatggtttcgcttagcaaattaaactaaaatcttatttattggttatggcatcctcctgtttaatactggtatggatgtatatatatcatatgtgatctagaatgcatgtctgagcatattggtttggaaattccatattgtctctaacttgtcctaatagtattcagttagaaaaaaatgtgtgccatatatatgaaaggaacacatgtgggaaggttcatgtttatgtaatgacccatgctgtccagatcattgcacattggatcaaaatttagctcggtaattctccacattagtagttttagaggccagtcagtctagcaccaacagccaatacaccaagcagaatcaaagttgtcccagttcagtggtattcgtcaattaaaagcatcgatgaattagcaataattactctaggaagggatgagttagaattttgaatcagacaacagggatgatggaaacagatcgcagacaagagctcactcgactcacaatctatttatccaagaattcttttttgtgtttcttattttcatatggttaagtacctttgtgtttctctaaaatgggttcaggttctttcttctagcccatgctgcagtctatccttttttgttttctttttgttatttgaaaacaacagacaagaacagtttgtcttgtctaccaccgtgactttttctactgaaacattattaggtgcattcactgttggtgtgcggtttgccaataatgtgcatggagggatacagtttattgacggggcaagaatgagttcttgccagtgaggtgttccaattgaagtcatccagagagctgacattgttttggaggacattcattccaagaaacctacaaggcgtgtgatcagtgagaaattaccaacaacagacaagaggagtaccaagtgtatgacttggtgtgcaatgatatttaacgacaaagaatatctattctgatgttacatatagactgatggaaaatatgatgccaagaaagatgaccctctaggtttacaacatcttgcactgtgtcatgcgtgttaccggccaaacgacaacacaatggagtacggcgacggcaagaactacctctgcaggaaccggttgaacgagtactttgacgacgcgtgggtggagcagacctggtgggcggacaaatgagactgcgtcgtcgtccagcacgagcacccctcgcgcgacgtcgactacgacgatgaagatctggctgtgcctgtaaccccatgccaatccaaggacgacgagcaccaacgggaccagaactatcaaaaactgcatagcttgaaatttccagccatgttctgccacctat

SEQ ID NO: 34143 - DNA, 2168 bp, Zea Mays
gttactctgaattaagcagcatctctctattcttaccagaaaagaaattttagaggataacatgagttttcttttctcttgttagacaggctcatgtttccatactcactaaaaggaagagtgtagtctcttgtgcagttgcttgtcaaacttgaagagatatatgcaaagagattgttatgaattcagagttttctgcaaaaccacttttcctgtgtccttaaagcaggttatggtgctctcttcaatccttacatgttttgtttcctttttcttttgataatcttatgtaatttatatatacttttctatctctgtcgtaacttgtatttgggaagtgccacttttaaaacaaagaaaaccaagaaaacttatcagatagtactgaaaattgtggctgccttttcaaccaataatacatgtaaaccaagaacaagcttgtcaatttattaattttgtgacatctatctttaacctgctttgtggttctccatctattttttatggtaacttgattgtactccttctgcacatctgtccatatatggtttcgcttagcaaattaaactaaaatcttatttattggttatggcatcctcctgtttaatactggtatggatgtatatatatcatatgtgatctagaatgcatgtctgagcatattggtttggaaattccatattgtctctaacttgtcctaatagtattcagttagaaaaaaatgtgtgccatatatatgaaaggaacacatgtgggaaggttcatgtttatgtaatgacccatgctgtccagatcattgcacattggatcaaaatttagctcggtaattctccacattagtagttttagaggccagtcagtctagcaccaacagccaatacaccaagcagaatcaaagttgtcccagttcagtggtattcgtcaattaaaagcatcgatgaattagcaataattactctaggaagggatgagttagaattttgaatcagacaacagggatgatggaaacagatcgcagacaagagctcactcgactcacaatctatttatccaagaattcttttttgtgtttcttattttcatatggttaagtacctttgtgtttctctaaaatgggttcaggttctttcttctagcccatgctgcagtctatccttttttgttttctttttgttatttgaaaacaacagacaagaacagtttgtcttgtctaccaccgtgactttttctactgaaacattattaggtgcattcactgttggtgtgcggtttgccaataatgtgcatggagggatacagtttattgacggggcaagaatgagttcttgccagtgaggtgttccaattgaagtcatccagagagctgacattgttttggaggacattcattccaagaaacctacaaggcgtgtgatcagtgagaaattaccaacaacagacaagaggagtaccaagtgtatgacttggtgtgcaatgatatttaacgacaaagaatatctattctgatgttacatatagactgatggaaaatatgatgccaagaaagatgaccctctaggtttacaacatcttgcactgtgtcatgcgtgttaccggccaaacgacaacacaatggagtacggcgacggcaagaactacctctgcaggaaccggttgaacgagtactttgacgacgcgtgggtggagcagacctggtgggcggacaaatgagactgcgtcgtcgtccagcacgagcacccctcgcgcgacgtcgactacgacgatgaagatctggctgtgcctgtaaccccatgccaatccaaggacgacgagcaccaacgggaccaggcgagcggcgaccaggggacaactgtaggcctccccctctttctcgcctccactcacccgccaccacccccaacggcgagggagtgagagatcgacaacatctcagggcctagcagggcagctgcattgcgctatggcggccatggccgatctgtacgacgaggataagggcccatcgctaaagagccagcagtcgcgccctggcctccacctcaagcccaccattgagatctttaattattagatcttcatgcttattttgattatacactaccttggttaattttcgatcatctccatgggtacattttttcttagttgcttaaactagcactatttcg

SEQ ID NO: 34144 - DNA, 3303 bp, Zea Mays
ctattatttgggctcttccaaattttttttcgtgatgttcggaatatcgtcattccgaaaatcggtgcgtccggtgattatttaaaattcatcgctcgtacgggtacgaattcggaagctcaacccaatcggacgattttatcccgaacaaattaattttgaactcgacaactaaaatgctcggggtaaaataattcgaatcgtgtgaaatcttgcgcgaggctacgatccaatttatccgtccgcaccctgttttgggcgacgaaatcgcgtatacatggtagatcgggtttcagttcggtcgaatcacgccgaacaaattagtcagaactcgtcgactacggttgtcgatgcaaataattcggttcccattcgtcaaccgtgaaatcgtatatgaggatccaaaaggtgagcctcgactcgctgataaattatctatggccgtgaaatcagatgttcagaccgtagataaatttatcagatttttaaattgaatcaactgtcacaattactgccgacccgttttacattgctaaaaatcgtaattgtaaaaatatctgcgatgctttgttaaaaaaaaaataagaaaatgaatcttaaaaaaaaaagaagaaagagaaaaaacatcacgttcctatcgcatggcagatgaagatttttttttctatccctgatttttctcacggctaccgctttccctctgatatttcaatcgttggccatatctcttccctctccttgatttttcgagctgcattctctctgatattcttcaacgagctcagatcttttttgccgctaaccttatcttccagccatcgttataagcatggatattttttttcttcttcactgaacgtggacagcactgagccatcgtgtctcctccgtgctgctcgccgggcgctgtatggagcatccttatcccttcaccgtcgtactcagattctttttatctgctgtcgtcttcctgcaagctccattcttgcgtgcgcccagcccgagtctttctcttcctggccgcactgaagtcctgcttcgtgggagtctggagcagccgtggacgcgcccgcgccgtccctgctcggattcctgtcagccactgcccagctccatctcatggtactctgtctgctcggttccatggcgcgccacgaccccgccatggaagtttccttgccgcgccagctcgatttcatggcgcgcccttttcagtcggcctctgctcctcctctgccggtcgcccctctctgcttgccctccagttccatctttggtcgtgcacggacgcagccgggaagcgctggtggctgcgggcgcgatggtcgtggacgggcaagccgtcgtgtgcccttggtctctgctttgaattccccggcaccgtcagcctctcctgcagtcgctgagcgtcgctcgctcgctgttgctgatgctccctgctgctgctccatccaagccgcatctgggtttcttccccatcgatcgagttcggtctctccaacacatgtcggtcttcaatctaccatgtcgcgccctgacctcaatctcgccgatgtcctccctgccatgtctgttgccgaccatcgatctccatcgtgctgacgctcggtcttcaccttgacgtcgatctgcatcaaggatttggactgcgtgttggacctcacctaccatcgtcgcagcagtagcccgacaccatcgaccttccagtttgtgcccctcgaccccgctctgctcttgtgtcgtgcgcgcgctttctctagctgcacgtcgggtgtgtactcatcttccgtcgtgtccacctactcgtcaaattggggagccagcagccccttgttcctcgtcgtcaatccacgtcacgtccgcgacgtgctcgtcgaccccgacgatctatcttttaattacgcgctacttgtgttgagctctgaagccccgtcgagcttttcccctgaaagtcgccttcgagcacaacccctggcaagtgttcgctgggaggtctgaaccaatactcatcatcgatctgcgattatcaaatcattctggtcacggtaagctgataatttatttagaatagtccgatcattgaataaattaatgtgttagtgcgatgctcattaggtgctcgataaattgcgtgagtcacgaaactctcgtcgacttcgcagttcttgcgattatcgagctagattcagctatggcgaattatttcgctattccggtcacttagctgaattagtggaccgagtagaattttggtagacatgtgtgatgataaaatattttaatcatttataaagatgtagtataatttataaggcaagggattagttcagaatttaattaattaactgataaattgtgattaggctaattgtatttcatgtgtatagtttgttgttcgtgatgtttgcgataatttcaagaagcgtaattattgcgcttaattgtacgacgataattagtatctccgtatgaaattgttcaacgcctcgccgctaggagttaattcgctatcgcatagtactatttaggtttgtaatattcctgtttatatgcattcatgtgcatcgtgcatctcaattaggtacgataattgatcgcgtaatgcggaagacgagccaagtcgaccccaagcgcggactactccgcatggagatgctgatgaacgaacctgcctgatcaagtgctaggataaggatgatcgtcaagtggtcgcctaacaaacactaacctagtgttactcaggcaagccccggtgcatgcaaccccttccttatgtttttaaatacttttcgcacactttaagtctagtgaaatgtgcattaggtttataggagttgcttgaaaccctttgatgcattgccttccttgatatccatacctgttatagatacttctttggaagtatcaaactttgatttacaaaaatgcttagccctgcttagatcttgtggatagaggttgtcttttgcgttaaggccttgctcaggggttatcctgaggaaagatgacttctacctgcaaggttatattttcattgggagcatggtgggatcttactgcaaagttccctatgatgctcttttcatcctaaggaaaacaaacaatcctaagggtggaaatacttaaatcgggacttgggttaggaacgggtgatgttctacccaggttgattaaggattgaacgtgtatgtaggtgtgctgaccgcggaccctttaactggtcacatgcctcgtcatgggtaagccttgcctcgggcagactaaggccagaataagataacacgaaatgggcgtggagcggtg

SEQ ID NO: 34145 - DNA, 488 bp, Zea Mays
aaacatcctatgtccctcctacgaccaagaaacaaactggtcatgctacggatgtgaccaaacccttgtctgcttccaaagttcaccaaaacggttcctatttcgatgcgcacaaacaaattgcttttgtaatatggatgtatgcatatttaccggtgggtgagggcatcggctggatctggacgaggctcggcggtgggcgtcttcctctgcatcttcttcatagcgtcggcggaggggtcatcgtgttcttcggaggaggggcagcgacgttcgaggagcacgcgtgtgccggatcgatggacgagctggacgtggcctcgggctccgtgtcttcttgctcggcgtcggtggtgggtgaaggcgacagctagatctggagaaggattaggtgagacacggaaatagggagcggacgagacgaggcaagacggggtttgtgtgtccgaccttctgacgcgtgtttttcctgcccgtgaaaaccgttc

SEQ ID NO: 34146 - DNA, 2646 bp, Zea Mays
gttaaaactcactttctccgttgccgccacgcgctcactccgccactcccactcccccctccgccgctccacttctcctccgtcgcgaaaaccctagaaactaccgaccccctcggcccgccgtcatgtcgtccccgccgccggctgtcgcgtcgcctgcctctgagcaagccaaatcgaagaagaagaagcataaatcgaagaacgacaccgttgccgctgacccgccgtcgcttgctgaggccgaggagaaaactgatggctacctcatcaagccgcagtcccttgtaccttccctcgacacctccacctggccgctcctcctcaagaactacgaccgcctcaacgtccgcaccggccactacaccccgctaccctccggccactcgccgctcaagcgccccctcgccgagcatctccgttacggcgtcatcaacctcgacaagccgtcgaacccgtcctcccacgaggtggtcgcctggatcaagcgcatcctccgcgccgagaagaccggtcacagcggcacgctcgaccccaaggtcacaggcaatctcatcgtctgcatcgaccgcgccacgcgcctcgtcaagtcgcagcagggcgccggcaaggagtacgtctgcgtcgcccgcttccacgccgccgtgccggacaccgcgcgagtggcccgagcgctagaggcgctcactggcgccgtgttccagcgcccaccgcttatctctgcagtcaagcgccagctcagggtgcgaacaatctacgagagcaagctcctggagcacgatcccgagcgtcaccttgccgtgttctggatctcctgcgaggcaggtacctacgtccggactctctgtgtgcaccttgggctgctccttggtgttggtgcgcatatgcaggaactgcgccgtgtcaggtcggggatcctcggggagcaggacaacatggtcaccatgcacgatgtgatggacgcgatgtggtcgctcgacaactacaaggatgagtcatacttgaggcgtgtcgtgatgccactagaggttgtcacgtcgtacgccacttgaattccagctgtttctaaggaccaatattcttgttcctcgcatgattgttcatttggactgtaagtattggtaaaatggtaactatgtgtatttggggttttgttgagatgtgataagggcaaaattgtgttgctaaccacacgttgctttctagttagtatcgtgcttgctcattcttttctttatcaggatgaggttaggcataacttgtgaactggttatcagactggcacttggctccaaccatcaagatgccagggtggtacttcatattcttaagtgaacatacaatgcactcaagtattttgagctaacacagtggtgttttgggtctgcatccccgagggatcctctcaactgggactttaatggttaaattcagttccggagaatgttcaaagtgcatgatgggtttattgaggcaattgtccctgccaggatcaaaccctagctgttgtagagcgccctttgctctatcaggaatcggaggaattgaggttagccctagctgtcggaggactttaatggttaaattcagttccggagaatgttcagaaagtgcaggaaaaccctcaaagaaatctaaaaaagtttggaggagataggctaaaagagccttatctggtatcgtttggaccgcaacggactggtctggtggtgcaccgaataagatcaatcgcctccaacagttgacatctccgcgtgcaggcgagtcaacagataggctcggtctggtggcacaatggaccgatctggtgcccgccagatgaagaaggcacacaattagatctagattgggggcacatggacctaatccggtgcgccgcaaacgacctaaatctacatttttacaaggaggcaacgactccttagcgtcatggggctataaatagagcccccctaggcgcctcaaaccagtacctaagtactctaagagcacaacaacacttcgacactttgcagtatagcgttctaagaccaactccagcagactccctctccgtatccctaaaacgcgtggccaacacattctctctcctctccgtctccgtttccagcaacactccccatcccactccgcatgcagtctatgacacctggggcccgcgagcagccgcgcgcgcacgcagagagctgcggagaggagagagaaagcgtggaaatggggagtgcagggacacggcgtctattttgcggagacggatgcggagcctgctggagagcgcaatagtgcctcagaccgtgcaaaatgcggatgcggagtgggatggggagtgttgctggagttggtctaatgatttagtgagatttaagtgacaatactgagctgttcttgtgtctttgtgcaatcgtgatgttccttcttgcgtgtgttgctgtgatttgctcttgtatgcgtactttttttctctccactttactattttgtaaggctgtaagagactccagtttgtggagattccttgcaaaccggaacacacttgttataaggaagtattgtggcactcaagtttgatgtacatgatcacttgaaaggggctgagtgcaacccttgtccaaaagagtacaccacaacgtggatgtaggatttgtt

SEQ ID NO: 34147 - DNA, 995 bp, Zea Mays
ctgacgtatggtacccggtacttttttctctagatttggcgtcgcgagactcctcgcgcttctcgccgagagaaaactagggttttgctcctggaatctcctcccccgcagccgccgcccgaccgtgcgccaacgatacatccttctccctcctccgatccggcctttttgatccccggatcccgtacaatatgcttcccctctcgctcctcaagaccgcccaggggcaccccatgctcgtggagctgaagaatggtgagacatacaacgggcatctggtcaattgcgacacgtggatgaacatccatcttagggaggttatttgcacctcaaaggacggtgacaagttttggaggatgccagagtgttacattcgcgggaacaccattaagtatcttcgagttcctgatgaggtgattgacaaggttcaggaggaaacttctaaaagccgatcagataggaagccaccaggtgttggccgtggaagaggaaggggggacgtcggtgctaaacctggaggcagaggcattggacgtggccaagatgatggaggtgggggccgtggtcgtggctgaagctggtcgacacaagggagaatgccgctttttgaggcctgtaattgtgttgcatagattgcttaggacatgatgaatgaaccaagttggctggttgtattggggcacaaaccagaatggttcctgtgatctagacaccgaggatgcggcggcaaccaggcttgttgctattccccaaaactgtttggttgatatcttgagtatgatccaatttgttcatttgcttagagttatcccggttagatgactaattgattgatgttgcccattattttgctagtggcgcacgttgtgctgagtatgagcattttcagcgtgagatgttcgaatacgatagaatgtttttttatatataattttcaatttagcaagctgtggtttcaacattcaaaggtcagggaaagccaaagctatcaaaac

SEQ ID NO: 34148 - DNA, 1004 bp, Zea Mays
ctgacgtatggtacccggtacttttttctctagatttggcgtcgcgagactcctcgcgcttctcgccgagagaaaactagggttttgctcctggaatctcctcccccgcagccgccgcccgaccgtgcgccaacgatacatccttctccctcctccgatccggcctttttgatccccggatcccgtacaatatgcttcccctctcgctcctcaagaccgcccaggggcaccccatgctcgtggagctgaagaatggtgagacatacaacgggcatctggtcaattgcgacacgtggatgaacatccatcttagggaggttatttgcacctcaaaggacggtgacaagttttggaggatgccagagtgttacattcgcgggaacaccattaagtatcttcgagttcctgatgaggtgattgacaaggttcaggaggaaacttctaaaagccgatcagataggaagccaccaggtgttggccgtggaagaggaaggggggacgtcggtgctaaacctggaggcagaggcattggacgtggccaagatgatggaggtagaggcagtgggggccgtggtcgtggctgaagctggtcgacacaagggagaatgccgctttttgaggcctgtaattgtgttgcatagattgcttaggacatgatgaatgaaccaagttggctggttgtattggggcacaaaccagaatggttcctgtgatctagacaccgaggatgcggcggcaaccaggcttgttgctattccccaaaactgtttggttgatatcttgagtatgatccaatttgttcatttgcttagagttatcccggttagatgactaattgattgatgttgcccattattttgctagtggcgcacgttgtgctgagtatgagcattttcagcgtgagatgttcgaatacgatagaatgtttttttatatataattttcaatttagcaagctgtggtttcaacattcaaaggtcagggaaagccaaagctatcaaaac

SEQ ID NO: 34149 - DNA, 2175 bp, Zea Mays
gctgtctcccgcggcacggggctccagcgccgaacggaaaaccccaccccaccaccactggctactcccgatccccagtccccatccctctcctcgcaaaaggccaccgcgacgcgaccgcgtactgggggcgagacgccagtgcaggcaggcaggcagaagaggagtcgccaggaagcaaccgcgagggagctgcaagcgagcacagcagcagcgcagaaaaaaaattctggaataatttttcttccctttggctccgtgaggttccggtgctcgctcgctcgcctgagcttcgatcgagcccggtcggcgaggcggactgcgcctactacctccgcacgggcgcctgcggctacggggagcgctgccgctacaaccacccccgcgatcggccggccccggttaatggagttggaaagaccgcagttacagtggagtacccagagcgtcctggacagcctctctgtgagtactatgcaaagaatggcacctgtaaatttggttccaattgcaagtttgatcatcccagggagggtggttttgtacctgtcacattgaacagcggtggattccccctgcgtctgggtgaaaaggaatgttcctattacatgaaaactggacattgcaagtttggagctacatgtaaattccatcacccagaacttggtttccttacggagacgcctggcatgtacccaccagttcaaccaccacctatttcctcctcgcatccatatccacatcttgccaattggcaaatggggaggcctcctgttgtgccagggtcatttttaccaggctcgtatccaccaatggtgcttccacatacagttataccaatgcagggatggaacccttatgttccacctatgaaccaagttacaccagctggaggacagcaagctgttccagtaggggcatcttatggtttgtcgcaccaggggcctacctctgccatgacttatggcagtcattatgcgcaattatattcttcatctgggacttcaagcagcaacatacaagaatatgcctttccagagcgaccggggcagcctgaatgtgaacattacatgaagactggaacctgtaaatatggggcagcctgcaaatatcatcatcctcaatacttcagtggaccaaagtctaactgcatactgagccctctgggtctccccctccgtcctggttctcagccatgtgcttactatgcacaccatgggtattgcaagtttgggccgacatgcaagtttgatcacccgatgggtactccaaactatagtatttcaacatcttcacttactgatgtgccaatcgctccatatcctcagagtttccctgttactcctatgccttcatatctgccatcttctgatctgcgtccacaatacactcaagtcaaggattcctctgctaatccaccaccatcgcctggaactacttatggtcctgttgggtctatatcaaaggtttatgctccccacacgcttatccgatccccggcttctgcagctgctggcatgcaagcgtcctaatgagacacggttgagagcattagtcctctctgtcatgaagatagttcttgggcaatcttctcaggtttttctaccattggcggaatgaggtctcgattcttttttgctccagttcgacttcccagcaattgtgaataaaggctgcagctgacatagaaaagtctcaataaatgcaaagataggaattggcaagctcattcacttgccatttttctgtccatctcggaaatgagaggagaaaattctgattgtagtaggatccagagctacgttattatcctgtataagatgcaccgatgcaagggattcgtatctgaaagctgatgggttctgtagctcaaaaccttttgtttatctcaccatcatatatatagagagggcagatcaccctaggtgatgattatccacgctggaatggtttaacaaatcttcaataattgttaaaccattcgtgctttttgttaaaccatctcaggatgggtgatcatcacctaggtgacgaatagccatatatatgaatatgagcagcagctatgacttcacaacatgtatatctacctatatatatgaactgggaacacggcatgttgtagcgagacgctttggaacccttgattgaatcatctgaaaccattcgctggtc

SEQ ID NO: 34150 - DNA, 2170 bp, Zea Mays
gagactgcgagacacaggcagcggaaaaatagagacaaagaaggggcaggagcagtgacctgccacaccagaggaaacgagagagagaaaaacagcccgatctcctcctcccactccgatcgccctaccgatcgccgcctcgtgaagcttccctgttccctccccgccgcccgcgacgccatggagccgccgcacaccgaggaggccgccgctgctgcagcaggaggagcagagggcggcagcgcaagcccgggcaccggcctcgaagggccgatgctgaggctggggctggacggcggcggggagggggaggacggggagctgggggctggggaggaggcggacacgtggcttccagagcggcctggcgaggcggactgtggctactacctccgcacgggcgcctgcggcttcggggagcgctgccgctacaaccaccctcgcgatcgtggcggcactgagtttggtggaggtgccaagaatggagcagcacaatactttccagaacgacaagggcaacctgtatgtgagggtgagaaagaatgctcctactatatgaagactgggcaatgcaagtttggttctacatgtaaatttcatcatccagaatttggtggtattccggtaacccctggcatatatccagcattacaatcagcatctgtgccctccccccttacatatgcttcaaattggcaaatgggaaggtcacccgcagttcctggatcatatatagcaggctcatacactccaatggtgctcccatctggaatggttccattgcaaggatggagcccttatccggcaccggtaaatcatgtagcatcaggtggagcacaacaaactattcaagctggaccattatatggtataggacaccatggatcttccactgcaattgcttatggtggtacatacttgccatactcttcctcaactggacaatcgagcaataatcatcaagaacatggatttcctgagagaccagggcagcctgagtgtcaatattatatgaggactggagattgcaaattcggaactacatgtaaatataaccatcctcaagattggagcacttctaagtccaattacatgttcagtcatctctgccttccgcttcgtccgggtgctcagccttgcacgtactatgcccaaaatggatattgcagatatggaattgcatgcaaatatgatcacccaatgggtacactaggctacagttcatctgctttacccctatctgacatgccaattgctccctaccctatgggcttctctgttgcgacgttggctccatctccatcttccccagaatatatctcaaccaaagatccatctatcaaccaagtagcatcaccagtggcggcacctgaacctgttggagcaatcttgccaaaaggggtattccctccggataccattatgcgaactcagacttctacaagtgttggcagttcaagccctggtggtggtcgctgatttttctgagctggtgggagtgatcctatcagcacaatttttttctgtcacttgacacaggtacctttagcctccgattgtatttttcatcatctcgttaaaacatactgctgccgacaaatgattattatcttgctttattgatatcagttctgataggcctttacaatgtgaataagaagctgtggcctctgtagagaagccgtggcgagggtggttttctctaccatcagaataagagagcattgatcggttacaagcaagctcgattcacctgcaattttttgcgttgttccgttcgtgtccaaaacgggaaaaggaaggtttttttttttggatgtcaggttctatagcatgttgggcgcggttgtgaggctccaggtccattccctcggtaaataattctggggcaagaaagttttcgttgttatcaagaaaattttcacacgcagagttactgggttcctccgcctttcaattttttttgttctatgtatattgttatatatatagtacacacatatatatcttcatcagacttgagacatgtaattacgtatatatagatgtttatattgggagcaaggcgcattgtaatggaccgaaaaatgctgaattgaagagatcttgctgtcgatactgaaatggctgcatcgatgaggccaacttgacactttatggtggggtcctc

SEQ ID NO: 34151 - DNA, 2103 bp, Zea Mays
gagactgcgagacacaggcagcggaaaaatagagacaaagaaggggcaggagcagtgacctgccacaccagaggaaacgagagagagaaaaacagcccgatctcctcctcccactccgatcgccctaccgatcgccgcctcgtgaagcttccctgttccctccccgccgcccgcgacgccatggagccgccgcacaccgaggaggccgccgctgctgcagcaggaggagcagagggcggcagcgcaagcccgggcaccggcctcgaagggccgatgctgaggctggggctggacggcggcggggagggggaggacggggagctgggggctggggaggaggcggacacgtggcttccagagcggcctggcgaggcggactgtggctactacctccgcacgggcgcctgcggcttcggggagcgctgccgctacaaccaccctcgcgatcgtggcggcactgagtttggtggaggtgccaagaatggagcagcacaatactttccagaacgacaagggcaacctgtatgtgagtattatttgaagactgggacttgtaaatttggttccaattgcaaatatcaccatcctaagcaagatggatctgtgcaatctgttatattaaacaacaatggattccctctacgcccgggtgagaaagaatgctcctactatatgaagactgggcaatgcaagtttggttctacatgtaaatttcatcatccagaatttggtggtattccgttcctggatcatatatagcaggctcatacactccaatggtgctcccatctggaatggttccattgcaaggatggagcccttatccggcaccggtaaatcatgtagcatcaggtggagcacaacaaactattcaagctggaccattatatggtataggacaccatggatcttccactgcaattgcttatggtggtacatacttgccatactcttcctcaactggacaatcgagcaataatcatcaagaacatggatttcctgagagaccagggcagcctgagtgtcaatattatatgaggactggagattgcaaattcggaactacatgtaaatataaccatcctcaagattggagcacttctaagtccaattacatgttcagtcatctctgccttccgcttcgtccgggtgctcagccttgcacgtactatgcccaaaatggatattgcagatatggaattgcatgcaaatatgatcacccaatgggtacactaggctacagttcatctgctttacccctatctgacatgccaattgctccctaccctatgggcttctctgttgcgacgttggctccatctccatcttccccagaatatatctcaaccaaagatccatctatcaaccaagtagcatcaccagtggcggcacctgaacctgttggagcaatcttgccaaaaggggtattccctccggataccattatgcgaactcagacttctacaagtgttggcagttcaagccctggtggtggtcgctgatttttctgagctggtgggagtgatcctatcagcacaatttttttctgtcacttgacacagttctgataggcctttacaatgtgaataagaagctgtggcctctgtagagaagccgtggcgagggtggttttctctaccatcagaataagagagcattgatcggttacaagcaagctcgattcacctgcaattttttgcgttgttccgttcgtgtccaaaacgggaaaaggaaggtttttttttttggatgtcaggttctatagcatgttgggcgcggttgtgaggctccaggtccattccctcggtaaataattctggggcaagaaagttttcgttgttatcaagaaaattttcacacgcagagttactgggttcctccgcctttcaattttttttgttctatgtatattgttatatatatagtacacacatatatatcttcatcagacttgagacatgtaattacgtatatatagatgtttatattgggagcaaggcgcattgtaatggaccgaaaaatgctgaattgaagagatcttgctgtcgatactgaaatggctgcatcgatgaggccaacttgacactttatggtggggtcctc

SEQ ID NO: 34152 - DNA, 2188 bp, Zea Mays
gagactgcgagacacaggcagcggaaaaatagagacaaagaaggggcaggagcagtgacctgccacaccagaggaaacgagagagagaaaaacagcccgatctcctcctcccactccgatcgccctaccgatcgccgcctcgtgaagcttccctgttccctccccgccgcccgcgacgccatggagccgccgcacaccgaggaggccgccgctgctgcagcaggaggagcagagggcggcagcgcaagcccgggcaccggcctcgaagggccgatgctgaggctggggctggacggcggcggggagggggaggacggggagctgggggctggggaggaggcggacacgtggcttccagagcggcctggcgaggcggactgtggctactacctccgcacgggcgcctgcggcttcggggagcgctgccgctacaaccaccctcgcgatcgtggcggcactgagtttggtggaggtgccaagaatggagcagcacaatactttccagaacgacaagggcaaccttattatttgaagactgggacttgtaaatttggttccaattgcaaatatcaccatcctaagcaagatggatctgtgcaatctgttatattaaacaacaatggattccctctacgcccgggtgagaaagaatgctcctactatatgaagactgggcaatgcaagtttggttctacatgtaaatttcatcatccagaatttggtggtattccggtaacccctggcatatatccagcattacaatcagcatctgtgccctccccccttacatatgcttcaaattggcaaatgggaaggtcacccgcagttcctggatcatatatagcaggctcatacactccaatggtgctcccatctggaatggttccattgcaaggatggagcccttatccggcaccggtaaatcatgtagcatcaggtggagcacaacaaactattcaagctggaccattatatggtataggacaccatggatcttccactgcaattgcttatggtggtacatacttgccatactcttcctcaactggacaatcgagcaataatcatcaagaacatggatttcctgagagaccagggcagcctgagtgtcaatattatatgaggactggagattgcaaattcggaactacatgtaaatataaccatcctcaagattggagcacttctaagtccaattacatgttcagtcatctctgccttccgcttcgtccgggtgctcagccttgcacgtactatgcccaaaatggatattgcagatatggaattgcatgcaaatatgatcacccaatgggtacactaggctacagttcatctgctttacccctatctgacatgccaattgctccctaccctatgggcttctctgttgcgacgttggctccatctccatcttccccagaatatatctcaaccaaagatccatctatcaaccaagtagcatcaccagtggcggcacctgaacctgttggagcaatcttgccaaaaggggtattccctccggataccattatgcgaactcagacttctacaagtgttggcagttcaagccctggtggtggtcgctgatttttctgagctggtgggagtgatcctatcagcacaatttttttctgtcacttgacacagttctgataggcctttacaatgtgaataagaagctgtggcctctgtagagaagccgtggcgagggtggttttctctaccatcagaataagagagcattgatcggttacaagcaagctcgattcacctgcaattttttgcgttgttccgttcgtgtccaaaacgggaaaaggaaggtttttttttttggatgtcaggttctatagcatgttgggcgcggttgtgaggctccaggtccattccctcggtaaataattctggggcaagaaagttttcgttgttatcaagaaaattttcacacgcagagttactgggttcctccgcctttcaattttttttgttctatgtatattgttatatatatagtacacacatatatatcttcatcagacttgagacatgtaattacgtatatatagatgtttatattgggagcaaggcgcattgtaatggaccgaaaaatgctgaattgaagagatcttgctgtcgatactgaaatggctgcatcgatgaggccaacttgacactttatggtggggtcctc

SEQ ID NO: 34153 - DNA, 4976 bp, Zea Mays
cgcctccgcacgcacggacaccgggacacgggcggttcattgcttcaaatcgttgcctgacccaggcaaaaatctcagacgttggatttcggttgcctgatcacttggcatccaaacaggccctactagccgagcgagcggccgtctcaaaaatcccgcccactctctctctctctcaccaggcacccccattccctccccgtcttcctcccccatttctaccacggcctcggcatcccaagtctcaaacgtcaaacccttacctcatcagcgacgagaggggagccccgcctccgcctcctgcttctctactatgaacaacttccatgtctacgaggccatcggccgcggcaagcactcgacggtgtataaggggcggaagaagaagaccatcgagtacttcgctgttaagagcgtcgacaagttgcagagctccaaggtcctcaacgaggttcggatgctccattccttagaccatgccaatgtcctgaaattttactcttggtatgagacaaccgtacatttctggttagtgttggagtattgcgttggtggagacctgaagggcttgcttgaacaggataaaaagcttcctgaaaattctatacatgacctggcttacgatctcgtcaaagcacttcagttcttgcattctcaaggaattgtatattgtgatctgaagccatcaaacattctgcttgatgaatttggatgcatgaagctgtgtgattttggattagcaaggcgcttaaaagacattgagaaaaccaatcctggagatgtgccacaacccatgaggggaacaccatgctatatggctcctgagttatttcgagatggaggagttcactcatatgcttctgatttctgggcacttggatgtgttttgtatgaatgctatacaggaaggcccccttttgtaggtagagaatttacgcagttggtcaaatctgtaatttctgatcctacaccacctttacctgataatccatcaaggtccttgcaaaatttgattgattgcttactcatgaaagatccggcagaaagattacagtggtctgaattgtgtgaacacaacttctggagaacaagtatcctgatgattcctttacctcctcagcctgcttttgacaacatgattgaactttctgctacaccatatctagctgagagaaatggtgacaaaccttccagacagttgacaccacctaaacatcgtgaaaatattggccttcggaagaaggatgaaaattctactaagccatccatgacacctgttaaaaatgtgcaaagtggcaagaaaaatagtgcaaaaccaaaagctgtgggtttcaaaggggtaaatatcctccgaatgtctcgcattgctaaattgaatttgcaaagggaaagggataaggagaactacaggcgtccgcccacagaaacaactgaaaatgagactgaagttaatatagaaaataatgacatggaacttgattttggtgaaaatccagagggtgatgcacctgatgacaccgatggatcagataatcctggatctgcaggaaatgaaaatcctcaaagcactgacgctaatgaagagaattatatggaaaatcaggttgacatgcttacagatgagggatcagttaagcctgatatcatggtggaaactgagcagaattcttgttcagataacctggatgtggcggcaagtccacctagtagcatgcgaaaagcacatcgtgcaaaggtaactccatgtcctgcaactggttctgagccatctaacatctttgaagcattctggcatccaacagatcttgcagttaaaccagttatgcctattaggaaagcagataaagctgtggacatgatccccacacttccttttgaagctcttacagcaggtgattatactaagttaccaaaggaacagatgaatgcattcaacagtcagatacttcagagtttaagtggaacttatcaggtttcacaaaaacaaaatactatcagatacctggagatgttaagcatgaactcagatgctgcgaacaaaataactaatggaccaattatgttgctactaataaaaatgcttcgactgtcaaaaacttcagtcttgcgtgtccaaattgcctcactcatggggttgctgatacgctattccactgctcttgatgtggagctggcaagttcaggaatttttaatgcactatcagatgggttaagggataaacatgataaactcaggcgattctgtatggcaacactaggagagttattattctatatttctacccagtctgatcaagataacaaggaaatcaatacccaagagtctcctttgaagggtaacaggcctgcaacatcttggcaggttcctagtgctgtaattgcactggtgtcatctatcttgcgaaagggcgaagatgatctagatcagctatatgccttacggacaattgataatatatgtagccaaggaactgaatggacatcccgttttgcatctcaggatgtgattggacatctgtgctacatctataaagcaactggaaagcaagagagtacaaggctcattgcaggatcttgtttggcccgcctctcccgcttcagtccatcatgcattcatttaattctggaaaagatatcattcagggatattgcatccacacttatcaagggaaatggacgtgaacagcagattaatctcaatattctcaattcggcattagttaacagtcacactgtgacaagcatgaaccggtatattctttcattatcagatgacaaacaattggtccctgggctcatttctctgatagaacagggaactgatgttctgcgtgggaaggcctttttgtttgttgctctgctttgcaagaatagtcgaaggtggcttcctcatttcttttgcaatgcaaaattaatatcagctgttgatagatttggaaaagagaaggagggtttcattcatcaatgtacagaagcatttgtgcagttggttgcttctttggtccctggtatccttgaaactgtctccagtgatatacagcagattatgtgtggcaaacgccatggacctgttactgctttagctgggcgagctcatccaaagagcacaattcatctgttccctgtcattcttcgtcttctgggaagtgcatctttcaagcacagagttgtgacaggccatgtattgcttcagttggcaaatcttattaagattttggaggcaccgtttcaggctagggatgatttccaaatgacattgttgcgagttctagaagctgctacagaggagccttctgttatacttgatgaacacacaatattcacaagtcgtatcattccaagcttatctgtcttgtacaacggcaataaagatggtgatgctagatttctgtgtttgaagatactctcagatgtcatgattgtgatcttcagtgactcttcattaacttctgacgaacaaatattaactgatttgaaatcaatctctcagaggcattttctgccactgtacccttcttttgcagaggatgaagatcccatacccatatttgctcaaaaactgctagtaatgctaatggaacatggttatataaaagtctctgatattctacacaaagcaacagtatcccaatgctttgattttttgctaggagatctgtcaaatgcaaatgtaagcaatgtcaagctttgctttgccctggcatctgcacctgagatgaacacccatattctttctcagcttcaagttgttagaaggatagggaacctacttgagtttgtcgctgcaaaagacatggatgattttcttgaaccaaccctggagttttgcagagctttcattattcgtggcactggcagcaacagaagtggtgtcgccctctccgaaaacccagcacttcttgttgacagtgccttcagcatgagtattgctgttgatcaacaaacttgtgtcacggatatatgcgactttggtggcaacatgggtacttttcttgagctagttggcaattcagatccacagataagtaatttagcgtcagactgtgtagtgttgttatccaaggcagcacctcgagaggctacagtgggcttgttgacaaatcttcctaaattaagcactgccatggacttgctgaagcatgagagctccctacgtctgattcgcttattatacggcctagccttctcatgcagacaatacttggcccagggaatgatcctgtcaatatcagtgtcagctttgatgcgagttgaagcacttgtttcagttttcaagggctccaatgatagccttcttgctgatgctgcttcttatttgagcgccgaactgcagcgcttacctcgctgtggttgaagctgcaacttgtccaaggaggcaaggatgcacttgtttttgctgtggttgaagctgcaacatgagctgagcaagtgagcaggacatcaagtacaggtactttatatcagtgactgatctcagttgccacaattgctaagtggtagtttcgctcgtaaatgtgcagccagggtgttttatgctatcatttatgtccagttcggggctgctgtatatggtgcttttgaaccatatttggaaggtggctagaaggaaagaacactttgtttcctcgcgactttggttggcaattaccccagtttcatgtaattctgtaatacctgtaatttctctgagaatactgtagttcaatatcatgtgtaaataaatcatctataaatgcatgtgaagttcatgtacagtagctgttaaagagttattgtaagtctttgtttggatactctattattcacatgaatctacatgtattgaggtgtattagggtataatcaatacatatggattgaggtgaatactagagtatgcaaacaaatcataactcatgaatcttggtactattgtgtagtttttactttttacaaatggtgataacgttctgtgcaaataactggctattttatcg

SEQ ID NO: 34154 - DNA, 717 bp, Zea Mays
aaaatatttaaatttattttataaactacagttctatattagaactggaatctggagcacactattaatattggctgaaatgcaacgttgacgtggacacactgtgagagcagatttgctcctgactttaatattggctgaaatgcaaaatgttgacgcggatgcatgagagaagctccggctttaatatcagaaataggcagcctgcggcgaatcggtcgcacgtgacgtgtcccgtgccagccgtacgccgaagggcgacgagacgaggatgaacaagaaccgctcaagccagccggtatgtcgacacccgagccgtacccgtacgtgcgcacgtgagcgcatccgaggccgcaccgcacgggccaggcaaaagaaagaacgacgccgcctaactgccgtcgatcagcataagggacggtcttcggcggccaccgcgcgcgccgccgcagcggtccaggtccagctcctcctgctcctccggtccggcgcggtcggccctggtgtaaaatccgtagcagatccgtccgtgatcggcggcagatttcctttggacgtctggctggcctctccgaactagaggaatactgaagattcccgtcggccattttaattcccgtcggccagagcaaaggccgacgagaattagttaactcccgtcggctataaagcagccgacgggacttaagttaactcccgtcggccctaaggctagcc

SEQ ID NO: 34155 - DNA, 3953 bp, Zea Mays
ctcttcgttagggtttcgcgcctcttctcaccgtctgcctactactagggatagacctccggcaaggcctccctcgcgccggcggcgtcagcagcggatatgggtgttccggcgttctaccgatggctggcggagaagtacccgatggtggtggtggacgtggtggaggaggagcccgtagagatcgagggcgtcaaggtgcccgtcgacacctccaagcccaaccccaacagcctcgagttcgacaacctctacctcgatatgaacggaatcatacacccctgcttccacccggaggacaggccctccccaacaacatttggtgaggttttccagtgcatgtttgattatatcgacagactattcgtcatggttcgcccccggaggcttttgtacatggccattgatggtgttgctcctcgtgctaagatgaaccagcagcgctcaagacgattcagggctgcaaaagatgcagctgatgcggctgcagaagaagaacggttacgtgaagagtttgaaagggaaggcagaaagcttcctccaaagcagcaatcacaaacatgtgattcaaatgttattactccagggactgaatttatggctgttttatcagttgctttgcagtattacatccatcgtagattgaattatgatcctggatggaaacaaattaaagttattttgtctgatgccaatgttcctggtgaaggggaacataaaatcatgtcatatattcgtggccaacggaatctgtctggttttaacccaaatacgcgccattgcctgtatggcctggacgcagatctgatcatgctagctttggcgacacatgaagtacacttctcaatactgagagaggtagtttatacacctggacagcaggataaatgcttcttgtgtggtcaggtgggacatctagcagcaaactgtgaaggaaaggtgaaaagaaaagctggggagtttgatgagaagggtggtgctattgttcccaagaagccctatcagttcttgaatatatggaccctgcgggaatatttagaatacgagttcagaatgccaaacccacctttcaagattgattttgaacgcattgttgatgatttcatcttcatgtgcttctttgttggcaacgattttcttccacatatgccgacgctagagatccgtgagtgtacaagaaggaatttccctcaatgggtggatatttaactgattcttgcacgagttgagcacttcattcaagcagttggttcatatgaggacaaaatatttcagaaaagagcacgtttgcatcagcgtcaagcggaaaggataaaacgggaaaaagctcaagcaaagcggggtgatgatctggatccccatgttagggatgaccttattgtacctattcaacgttttcaagggtctcgcctagcctctggggctgtacctgtgccatatgagcagaatggatcccataaagacaataaagaaaggaatagtcgagctcggaaagctgcacgagtatcaacgtcaggttccagcattgcctcagccttagttgaagctgaaaatgacctcgaagcccaagaatgtgaaaacaaagaagaactgaagtcaatgcttaaagatgcacttcgcgagaaatctgatatttttaattctgacaatccagaggaggataaggtgaaacttggagaaccaggatggagggaaaggtactatgaagagaaatttggggcaagaacacccgagcagattgaagaaatacgcagagatgttgttctcaaatacacagaaggattgtgttgggtaatgcactactattatgaaggggtatgctcatggcaatggttctacccttatcattatgctccgtttgcttcggatctaagtggattgggccaacttaatattaaatttgaacttgggacaccattcaaaccttttgatcaacttatgggtgttttcccagctgcaagtgcccatgcgctaccgctacagtatcgacgattgatgaccgatccaaattcaccaataattgatttttatcctacagattttgaagtagatatgaatgggaagagatattcttggcaagggattgcaaaactaccgtttattgatgaagatcgtttgttggctgagataaaaaaagttgagcatactttgacgcctgaagaagcaaggagaaacagtatcatgtgtgatatgctttttgtgaatgggtcacatccactttcgccttatatctactctctcaacagcaaatttgggcatctgcctgacaaaaggagaaatgaaattaaagaaaaacttgatccttctgctaggttaactaagctcaatattgttgttgttcgacaaagtttaacacctgctattattttgtacagtggaggaatgaatggatacataacactttgcagtggggatccatgccctcctatctttaggtctcctgtggacgggctggaggatattatggacaatcaagtgatatgttcaatctacaatcttccagaccatcataagcacatagcccagccgccagttggtgttatcatgcccaagaagattgttgaagccggtgatctgaaaccacctccagtgctgtggcatgaagatagtggcaggcggcctcatgataatagcaacaggcaaaacccatctggtgccatatcaggccgtcaacttggagaggcagctcaccgacttgtcataaacagcttaaatgctcagggtagggggcaacatagtggcacatcaatgccatatcgaactataatgaatggcttgcatcatctggatgtagcgtcccctgtcagcaatcaaggcatgcgtccacaagtggggcagtctgccggacctcctggttggtatgttcctaggggtagtgtatcaaatggtcaaccaccagcttatgcatcatcaggatcaggtcattatcagtatgaaagttcggggcattcacaatatgaacaaggtaaccatggaaggcaacaatctcacccatatgcaagagatggcttccatgatacacgaggaagggttccacctgcatatgggtaccagcagagcaacatgtatccatcgggtcctggattgtatgggcaacctccatcagcatatcctggggttcatggtggaggctaccaaccccctccatatggcggaggccagcagtggcagcaacaatcatatagttcgtatgccgtgcgaggcccctacggaggcaggccaccacccacaagggctgattcagggtcacagcaaccacagaaccgttatggtgctttagacagaagtaacaaccggaggccttcatctggatacagaagataatagtttgtgacccagtttatgttataactcaaagtttgttatcagtaaagcttcgagtaactcagctaaagcataggcggaatagtctgctaagtcttgtgaccttcaagcagttagggggtggccatcaaagatattgggaggcaaaatttgtatgctagtgcagactttcaggtactagcggttttgatcgccattgaagcagctaggtttgcggcatctcagaggttttgtgaagcaagatttgtatactactgttatcaacgggccatcaggtactggtggctggtcgccattctttatctgtagctgccatttgtttagaagatgtcataaacggccctggggtttaaataggtcccattgagaatatttttgaaggacgtttactctgagacttgacaagttttgggggcattttgatatcagataaatgtatgcaggagtgcagttttgatgatgtgtgtattccaagtcattaattaaagtgtgacgtgtctattgccaggcgaggaaggaaacgttacgctttgcacttatcccgttccaaattacaagtgatttcaagaaaaaaaattcagctttcttggagagtcctaaattactacctccattctcaaatattattt

SEQ ID NO: 34156 - DNA, 4055 bp, Zea Mays
ctcttcgttagggtttcgcgcctcttctcaccgtctgcctactactagggatagacctccggcaaggcctccctcgcgccggcggcgtcagcagcggatatgggtgttccggcgttctaccgatggctggcggagaagtacccgatggtggtggtggacgtggtggaggaggagcccgtagagatcgagggcgtcaaggtgcccgtcgacacctccaagcccaaccccaacagcctcgagttcgacaacctctacctcgatatgaacggaatcatacacccctgcttccacccggaggacaggccctccccaacaacatttggtgaggttttccagtgcatgtttgattatatcgacagactattcgtcatggttcgcccccggaggcttttgtacatggccattgatggtgttgctcctcgtgctaagatgaaccagcagcgctcaagacgattcagggctgcaaaagatgcagctgatgcggctgcagaagaagaacggttacgtgaagagtttgaaagggaaggcagaaagcttcctccaaagcagcaatcacaaacatgtgattcaaatgttattactccagggactgaatttatggctgttttatcagttgctttgcagtattacatccatcgtagattgaattatgatcctggatggaaacaaattaaagggaacataaaatcatgtcatatattcgtggccaacggaatctgtctggttttaacccaaatacgcgccattgcctgtatggcctggacgcagatctgatcatgctagctttggcgacacatgaagtacacttctcaatactgagagaggtagtttatacacctggacagcaggataaatgcttcttgtgtggtcaggtgggacatctagcagcaaactgtgaaggaaaggtgaaaagaaaagctggggagtttgatgagaagggtggtgctattgttcccaagaagccctatcagttcttgaatatatggaccctgcgggaatatttagaatacgagttcagaatgccaaacccacctttcaagattgattttgaacgcattgttgatgatttcatcttcatgtgcttctttgttggcaacgattttcttccacatatgccgacgctagagatccgtgagggagctattaatttgctaatggcagtgtacaagaaggaatttccctcaatgggtggatatttaactgattcttgcacgcctgatctgagcagagttgagcacttcattcaagcagttggttcatatgaggacaaaatatttcagaaaagagcacgtttgcatcagcgtcaagcggaaaggataaaacgggaaaaagctcaagcaaagcggggtgatgatctggatccccatgttagggatgaccttattgtacctattcaacgttttcaagggtctcgcctagcctctggggctgtacctgtgccatatgagcagaatggatcccataaagacaataaagaaaggaatagtcgagctcggaaagctgcacgagtatcaacgtcaggttccagcattgcctcagccttagttgaagctgaaaatgacctcgaagcccaagaatgtgaaaacaaagaagaactgaagtcaatgcttaaagatgcacttcgcgagaaatctgatatttttaattctgacaatccagaggaggataaggtgaaacttggagaaccaggatggagggaaaggtactatgaagagaaatttggggcaagaacacccgagcagattgaagaaatacgcagagatgttgttctcaaatacacagaaggattgtgttgggtaatgcactactattatgaaggggtatgctcatggcaatggttctacccttatcattatgctccgtttgcttcggatctaagtggattgggccaacttaatattaaatttgaacttgggacaccattcaaaccttttgatcaacttatgggtgttttcccagctgcaagtgcccatgcgctaccgctacagtatcgacgattgatgaccgatccaaattcaccaataattgatttttatcctacagattttgaagtagatatgaatgggaagagatattcttggcaagggattgcaaaactaccgtttattgatgaagatcgtttgttggctgagataaaaaaagttgagcatactttgacggtatggtgatgaaacaatttgccattcatttatgcattacaaggcacaacaaataagaatcttctaaggtttgctttgtttttgtctttctgtgtagcctgaagaagcaaggagaaacagtatcatgtgtgatatgctttttgtgaatgggtcacatccactttcgccttatatctactctctcaacagcaaatttgggcatctgcctgacaaaaggagaaatgaaattaaagaaaaacttgatccttctgctaggttaactaagctcaatattgttgttgttcgacaaagtttaacacctgctattattttgtacagtggaggaatgaatggatacataacactttgcagtggggatccatgccctcctatctttaggtctcctgtggacgggctggaggatattatggacaatcaagtgatatgttcaatctacaatcttccagaccatcataagcacatagcccagccgccagttggtgttatcatgcccaagaagattgttgaagccggtgatctgaaaccacctccagtgctgtggcatgaagatagtggcaggcggcctcatgataatagcaacaggcaaaacccatctggtgccatatcaggccgtcaacttggagaggcagctcaccgacttgtcataaacagcttaaatgctcagggtagggggcaacatagtggcacatcaatgccatatcgaactataatgaatggcttgcatcatctggatgtagcgtcccctgtcagcaatcaaggcatgcgtccacaagtggggcagtctgccggacctcctggttggtatgttcctaggggtagtgtatcaaatggtcaaccaccagcttatgcatcatcaggatcaggtcattatcagtatgaaagttcggggcattcacaatatgaacaaggtaaccatggaaggcaacaatctcacccatatgcaagagatggcttccatgatacacgaggaagggttccacctgcatatgggtaccagcagagcaacatgtatccatcgggtcctggattgtatgggcaacctccatcagcatatcctggggttcatggtggaggctaccaaccccctccatatggcggaggccagcagtggcagcaacaatcatatagttcgtatgccgtgcgaggcccctacggaggcaggccaccacccacaagggctgattcagggtcacagcaaccacagaaccgttatggtgctttagacagaagtaacaaccggaggccttcatctggatacagaagataatagtttgtgacccagtttatgttataactcaaagtttgttatcagtaaagcttcgagtaactcagctaaagcataggcggaatagtctgctaagtcttgtgaccttcaagcagttagggggtggccatcaaagatattgggaggcaaaatttgtatgctagtgcagactttcaggtactagcggttttgatcgccattgaagcagctaggtttgcggcatctcagaggttttgtgaagcaagatttgtatactactgttatcaacgggccatcaggtactggtggctggtcgccattctttatctgtagctgccatttgtttagaagatgtcataaacggccctggggtttaaataggtcccattgagaatatttttgaaggacgtttactctgagacttgacaagttttgggggcattttgatatcagataaatgtatgcaggagtgcagttttgatgatgtgtgtattccaagtcattaattaaagtgtgacgtgtctattgccaggcgaggaaggaaacgttacgctttgcacttatcccgttccaaattacaagtgatttcaagaaaaaaaattcagctttcttggagagtcctaaattactacctccattctcaaatattattt

SEQ ID NO: 34157 - DNA, 3743 bp, Zea Mays
ccggacctcttcgttagggtttcgcgcctcttctcaccgtctgcctactactagggatagacctccggcaaggcctccctcgcgccggcggcgtcagcagcggatatgggtgttccggcgttctaccgatggctggcggagaagtacccgatggtggtggtggacgtggtggaggaggagcccgtagagatcgagggcgtcaaggtgcccgtcgacacctccaagcccaaccccaacagcctcgagttcgacaacctctacctcgatatgaacggaatcatacacccctgcttccacccggaggacaggccctccccaacaacatttggtgaggttttccagtgcatgtttgattatatcgacagactattcgtcatggttcgcccccggaggcttttgtacatggccattgatggtgttgctcctcgtgctaagatgaaccagcagcgctcaagacgattcagggctgcaaaagatgcagctgatgcggctgcagaagaagaacggttacgtgaagagtttgaaagggaaggcagaaagcttcctccaaagcagcaatcacaaacatgtgattcaaatgttattactccagggactgaatttatggctgttttatcagttgctttgcagtattacatccatcgtagattgaattatgatcctggatggaaacaaattaaagggaacataaaatcatgtcatatattcgtggccaacggaatctgtctggttttaacccaaatacgcgccattgcctgtatggcctggacgcagatctgatcatgctagctttggcgacacatgaagtacacttctcaatactgagagaggtagtttatacacctggacagcaggataaatgcttcttgtgtggtcaggtgggacatctagcagcaaactgtgaaggaaaggtgaaaagaaaagctggggagtttgatgagaagggtggtgctattgttcccaagaagccctatcagttcttgaatatatggaccctgcgggaatatttagaatacgagttcagaatgccaaacccacctttcaagattgattttgaacgcattgttgatgatttcatcttcatgtgcttctttgttggcaacgattttcttccacatatgccgacgctagagatccgtgagggagctattaatttgctaatggcagtgtacaagaaggaatttccctcaatgggtggatatttaactgattcttgcacgcctgatctgagcagagttgagcacttcattcaagcagttggttcatatgaggacaaaatatttcagaaaagagcacgtttgcatcagcgtcaagcggaaaggataaaacgggaaaaagctcaagcaaagcggggtgatgatctggatccccatgttagggatgaccttattgtacctattcaacgttttcaagggtctcgcctagcctctggggctgtacctgtgccatatgagcagaatggatcccataaagacaataaagaaaggaatagtcgagctcggaaagctgcacgagtatcaacgtcaggttccagcattgcctcagccttagttgaagctgaaaatgacctcgaagcccaagaatgtgaaaacaaagaagaactgaagtcaatgcttaaagatgcacttcgcgagaaatctgatatttttaattctgacaatccagaggaggataaggtgaaacttggagaaccaggatggagggaaaggtactatgaagagaaatttggggcaagaacacccgagcagattgaagaaatacgcagagatgttgttctcaaatacacagaaggattgtgttgggtaatgcactactattatgaaggggtatgctcatggcaatggttctacccttatcattatgctccgtttgcttcggatctaagtggattgggccaacttaatattaaatttgaacttgggacaccattcaaaccttttgatcaacttatgggtgttttcccagctgcaagtgcccatgcgctaccgctacagtatcgacgattgatgaccgatccaaattcaccaataattgatttttatcctacagattttgaagtagatatgaatgggaagagatattcttggcaagggattgcaaaactaccgtttattgatgaagatcgtttgttggctgagataaaaaaagttgagcatactttgacgtggaggaatgaatggatacataacactttgcagtggggatccatgccctcctatctttaggtctcctgtggacgggctggaggatattatggacaatcaagtgatatgttcaatctacaatcttccagaccatcataagcacatagcccagccgccagttggtgttatcatgcccaagaagattgttgaagccggtgatctgaaaccacctccagtgctgtggcatgaagatagtggcaggcggcctcatgataatagcaacaggcaaaacccatctggtgccatatcaggccgtcaacttggagaggcagctcaccgacttgtcataaacagcttaaatgctcagggtagggggcaacatagtggcacatcaatgccatatcgaactataatgaatggcttgcatcatctggatgtagcgtcccctgtcagcaatcaaggcatgcgtccacaagtggggcagtctgccggacctcctggttggtatgttcctaggggtagtgtatcaaatggtcaaccaccagcttatgcatcatcaggatcaggtcattatcagtatgaaagttcggggcattcacaatatgaacaaggtaaccatggaaggcaacaatctcacccatatgcaagagatggcttccatgatacacgaggaagggttccacctgcatatgggtaccagcagagcaacatgtatccatcgggtcctggattgtatgggcaacctccatcagcatatcctggggttcatggtggaggctaccaaccccctccatatggcggaggccagcagtggcagcaacaatcatatagttcgtatgccgtgcgaggcccctacggaggcaggccaccacccacaagggctgattcagggtcacagcaaccacagaaccgttatggtgctttagacagaagtaacaaccggaggccttcatctggatacagaagataatagtttgtgacccagtttatgttataactcaaagtttgttatcagtaaagcttcgagtaactcagctaaagcataggcggaatagtctgctaagtcttgtgaccttcaagcagttagggggtggccatcaaagatattgggaggcaaaatttgtatgctagtgcagactttcaggtactagcggttttgatcgccattgaagcagctaggtttgcggcatctcagaggttttgtgaagcaagatttgtatactactgttatcaacgggccatcaggtactggtggctggtcgccattctttatctgtagctgccatttgtttagaagatgtcataaacggccctggggtttaaataggtcccattgagaatatttttgaaggacgtttactctgagacttgacaagttttgggggcattttgatatcagataaatgtatgcaggagtgcagttttgatgatgtgtgtattccaagtcattaattaaagtgtgacgtgtctattgccaggcgaggaaggaaacgttacgctttgcacttatcccgttccaaattacaagtgatttcaagaaaaaaaattcagctttcttggagagtcctaaattactacctccattctcaaatattattt

SEQ ID NO: 34158 - DNA, 4007 bp, Zea Mays
ccggacctcttcgttagggtttcgcgcctcttctcaccgtctgcctactactagggatagacctccggcaaggcctccctcgcgccggcggcgtcagcagcggatatgggtgttccggcgttctaccgatggctggcggagaagtacccgatggtggtggtggacgtggtggaggaggagcccgtagagatcgagggcgtcaaggtgcccgtcgacacctccaagcccaaccccaacagcctcgagttcgacaacctctacctcgatatgaacggaatcatacacccctgcttccacccggaggacaggccctccccaacaacatttggtgaggttttccagtgcatgtttgattatatcgacagactattcgtcatggttcgcccccggaggcttttgtacatggccattgatggtgttgctcctcgtgctaagatgaaccagcagcgctcaagacgattcagggctgcaaaagatgcagctgatgcggctgcagaagaagaacggttacgtgaagagtttgaaagggaaggcagaaagcttcctccaaagcagcaatcacaaacatgtgattcaaatgttattactccagggactgaatttatggctgttttatcagttgctttgcagtattacatccatcgtagattgaattatgatcctggatggaaacaaattaaagttattttgtctgatgccaatgttcctggtgaaggggaacataaaatcatgtcatatattcgtggccaacggaatctgtctggttttaacccaaatacgcgccattgcctgtatggcctggacgcagatctgatcatgctagctttggcgacacatgaagtacacttctcaatactgagagaggtagtttatacacctggacagcaggataaatgcttcttgtgtggtcaggtgggacatctagcagcaaactgtgaaggaaaggtgaaaagaaaagctggggagtttgatgagaagggtggtgctattgttcccaagaagccctatcagttcttgaatatatggaccctgcgggaatatttagaatacgagttcagaatgccaaacccacctttcaagattgattttgaacgcattgttgatgatttcatcttcatgtgcttctttgttggcaacgattttcttccacatatgccgacgctagagatccgtgagtgtacaagaaggaatttccctcaatgggtggatatttaactgattcttgcacgcctgatctgagcagagttgagcacttcattcaagcagttggttcatatgaggacaaaatatttcagaaaagagcacgtttgcatcagcgtcaagcggaaaggataaaacgggaaaaagctcaagcaaagcggggtgatgatctggatccccatgttagggatgaccttattgtacctattcaacgttttcaagggtctcgcctagcctctggggctgtacctgtgccatatgagcagaatggatcccataaagacaataaagaaaggaatagtcgagctcggaaagctgcacgagtatcaacgtcaggttccagcattgcctcagccttagttgaagctgaaaatgacctcgaagcccaagaatgtgaaaacaaagaagaactgaagtcaatgcttaaagatgcacttcgcgagaaatctgatatttttaattctgacaatccagaggaggataaggtgaaacttggagaaccaggatggagggaaaggtactatgaagagaaatttggggcaagaacacccgagcagattgaagaaatacgcagagatgttgttctcaaatacacagaaggattgtgttgggtaatgcactactattatgaaggggtatgctcatggcaatggttctacccttatcattatgctccgtttgcttcggatctaagtggattgggccaacttaatattaaatttgaacttgggacaccattcaaaccttttgatcaacttatgggtgttttcccagctgcaagtgcccatgcgctaccgctacagtatcgacgattgatgaccgatccaaattcaccaataattgatttttatcctacagattttgaagtagatatgaatgggaagagatattcttggcaagggattgcaaaactaccgtttattgatgaagatcgtttgttggctgagataaaaaaagttgagcatactttgacggtatggtgatgaaacaatttgccattcatttatgcattacaaggcacaacaaataagaatcttctaaggtttgctttgtttttgtctttctgtgtagcctgaagaagcaaggagaaacagtatcatgtgtgatatgctttttgtgaatgggtcacatccactttcgccttatatctactctctcaacagcaaatttgggcatctgcctgacaaaaggagaaatgaaattaaagaaaaacttgatccttctgctagtggaggaatgaatggatacataacactttgcagtggggatccatgccctcctatctttaggtctcctgtggacgggctggaggatattatggacaatcaagtgatatgttcaatctacaatcttccagaccatcataagcacatagcccagccgccagttggtgttatcatgcccaagaagattgttgaagccggtgatctgaaaccacctccagtgctgtggcatgaagatagtggcaggcggcctcatgataatagcaacaggcaaaacccatctggtgccatatcaggccgtcaacttggagaggcagctcaccgacttgtcataaacagcttaaatgctcagggtagggggcaacatagtggcacatcaatgccatatcgaactataatgaatggcttgcatcatctggatgtagcgtcccctgtcagcaatcaaggcatgcgtccacaagtggggcagtctgccggacctcctggttggtatgttcctaggggtagtgtatcaaatggtcaaccaccagcttatgcatcatcaggatcaggtcattatcagtatgaaagttcggggcattcacaatatgaacaaggtaaccatggaaggcaacaatctcacccatatgcaagagatggcttccatgatacacgaggaagggttccacctgcatatgggtaccagcagagcaacatgtatccatcgggtcctggattgtatgggcaacctccatcagcatatcctggggttcatggtggaggctaccaaccccctccatatggcggaggccagcagtggcagcaacaatcatatagttcgtatgccgtgcgaggcccctacggaggcaggccaccacccacaagggctgattcagggtcacagcaaccacagaaccgttatggtgctttagacagaagtaacaaccggaggccttcatctggatacagaagataatagtttgtgacccagtttatgttataactcaaagtttgttatcagtaaagcttcgagtaactcagctaaagcataggcggaatagtctgctaagtcttgtgaccttcaagcagttagggggtggccatcaaagatattgggaggcaaaatttgtatgctagtgcagactttcaggtactagcggttttgatcgccattgaagcagctaggtttgcggcatctcagaggttttgtgaagcaagatttgtatactactgttatcaacgggccatcaggtactggtggctggtcgccattctttatctgtagctgccatttgtttagaagatgtcataaacggccctggggtttaaataggtcccattgagaatatttttgaaggacgtttactctgagacttgacaagttttgggggcattttgatatcagataaatgtatgcaggagtgcagttttgatgatgtgtgtattccaagtcattaattaaagtgtgacgtgtctattgccaggcgaggaaggaaacgttacgctttgcacttatcccgttccaaattacaagtgatttcaagaaaaaaaattcagctttcttggagagtcctaaattactacctccattctcaaatattattt

SEQ ID NO: 34159 - DNA, 4100 bp, Zea Mays
gaccggacctcttcgttagggtttcgcgcctcttctcaccgtctgcctactactagggatagacctccggcaaggcctccctcgcgccggcggcgtcagcagcggatatgggtgttccggcgttctaccgatggctggcggagaagtacccgatggtggtggtggacgtggtggaggaggagcccgtagagatcgagggcgtcaaggtgcccgtcgacacctccaagcccaaccccaacagcctcgagttcgacaacctctacctcgatatgaacggaatcatacacccctgcttccacccggaggacaggccctccccaacaacatttggtgaggttttccagtgcatgtttgattatatcgacagactattcgtcatggttcgcccccggaggcttttgtacatggccattgatggtgttgctcctcgtgctaagatgaaccagcagcgctcaagacgattcagggctgcaaaagatgcagctgatgcggctgcagaagaagaacggttacgtgaagagtttgaaagggaaggcagaaagcttcctccaaagcagcaatcacaaacatgtgattcaaatgttattactccagggactgaatttatggctgttttatcagttgctttgcagtattacatccatcgtagattgaattatgatcctggatggaaacaaattaaagttattttgtctgatgccaatgttcctggtgaaggggaacataaaatcatgtcatatattcgtggccaacggaatctgtctggttttaacccaaatacgcgccattgcctgtatggcctggacgcagatctgatcatgctagctttggcgacacatgaagtacacttctcaatactgagagaggtagtttatacacctggacagcaggataaatgcttcttgtgtggtcaggtgggacatctagcagcaaactgtgaaggaaaggtgaaaagaaaagctggggagtttgatgagaagggtggtgctattgttcccaagaagccctatcagttcttgaatatatggaccctgcgggaatatttagaatacgagttcagaatgccaaacccacctttcaagattgattttgaacgcattgttgatgatttcatcttcatgtgcttctttgttggcaacgattttcttccacatatgccgacgctagagatccgtgagggagctattaatttgctaatggcagtgtacaagaaggaatttccctcaatgggtggatatttaactgattcttgcacgagttgagcacttcattcaagcagttggttcatatgaggacaaaatatttcagaaaagagcacgtttgcatcagcgtcaagcggaaaggataaaacgggaaaaagctcaagcaaagcggggtgatgatctggatccccatgttagggatgaccttattgtacctattcaacgttttcaagggtctcgcctagcctctggggctgtacctgtgccatatgagcagaatggatcccataaagacaataaagaaaggaatagtcgagctcggaaagctgcacgagtatcaacgtcaggttccagcattgcctcagccttagttgaagctgaaaatgacctcgaagcccaagaatgtgaaaacaaagaagaactgaagtcaatgcttaaagatgcacttcgcgagaaatctgatatttttaattctgacaatccagaggaggataaggtgaaacttggagaaccaggatggagggaaaggtactatgaagagaaatttggggcaagaacacccgagcagattgaagaaatacgcagagatgttgttctcaaatacacagaaggattgtgttgggtaatgcactactattatgaaggggtatgctcatggcaatggtaatttagctgctcaagttagccaaatatatcaaattatgcagaggttctacccttatcattatgctccgtttgcttcggatctaagtggattgggccaacttaatattaaatttgaacttgggacaccattcaaaccttttgatcaacttatgggtgttttcccagctgcaagtgcccatgcgctaccgctacagtatcgacgattgatgaccgatccaaattcaccaataattgatttttatcctacagattttgaagtagatatgaatgggaagagatattcttggcaagggattgcaaaactaccgtttattgatgaagatcgtttgttggctgagataaaaaaagttgagcatactttgacgcctgaagaagcaaggagaaacagtatcatgtgtgatatgctttttgtgaatgggtcacatccactttcgccttatatctactctctcaacagcaaatttgggcatctgcctgacaaaaggagaaatgaaattaaagaaaaacttgatccttctgctaggttaactaagctcaatattgttgttgttcgacaagtaatattattttgttaaatgtacatgtattgatgtttctgtactgacactttcttttgttgtgtggaccgggggggggggggggggttagtaaaagagcattgaaccagtttgtctgctagttaaattgagaaaatgtggctgatttccacatgtggtctcctgtggacgggctggaggatattatggacaatcaagtgatatgttcaatctacaatcttccagaccatcataagcacatagcccagccgccagttggtgttatcatgcccaagaagattgttgaagccggtgatctgaaaccacctccagtgctgtggcatgaagatagtggcaggcggcctcatgataatagcaacaggcaaaacccatctggtgccatatcaggccgtcaacttggagaggcagctcaccgacttgtcataaacagcttaaatgctcagggtagggggcaacatagtggcacatcaatgccatatcgaactataatgaatggcttgcatcatctggatgtagcgtcccctgtcagcaatcaaggcatgcgtccacaagtggggcagtctgccggacctcctggttggtatgttcctaggggtagtgtatcaaatggtcaaccaccagcttatgcatcatcaggatcaggtcattatcagtatgaaagttcggggcattcacaatatgaacaaggtaaccatggaaggcaacaatctcacccatatgcaagagatggcttccatgatacacgaggaagggttccacctgcatatgggtaccagcagagcaacatgtatccatcgggtcctggattgtatgggcaacctccatcagcatatcctggggttcatggtggaggctaccaaccccctccatatggcggaggccagcagtggcagcaacaatcatatagttcgtatgccgtgcgaggcccctacggaggcaggccaccacccacaagggctgattcagggtcacagcaaccacagaaccgttatggtgctttagacagaagtaacaaccggaggccttcatctggatacagaagataatagtttgtgacccagtttatgttataactcaaagtttgttatcagtaaagcttcgagtaactcagctaaagcataggcggaatagtctgctaagtcttgtgaccttcaagcagttagggggtggccatcaaagatattgggaggcaaaatttgtatgctagtgcagactttcaggtactagcggttttgatcgccattgaagcagctaggtttgcggcatctcagaggttttgtgaagcaagatttgtatactactgttatcaacgggccatcaggtactggtggctggtcgccattctttatctgtagctgccatttgtttagaagatgtcataaacggccctggggtttaaataggtcccattgagaatatttttgaaggacgtttactctgagacttgacaagttttgggggcattttgatatcagataaatgtatgcaggagtgcagttttgatgatgtgtgtattccaagtcattaattaaagtgtgacgtgtctattgccaggcgaggaaggaaacgttacgctttgcacttatcccgttccaaattacaagtgatttcaagaaaaaaaattcagctttcttggagagtcctaaattactacctccattctcaaatattattt

SEQ ID NO: 34160 - DNA, 4101 bp, Zea Mays
tcgacagtgaccggacctcttcgttagggtttcgcgcctcttctcaccgtctgcctactactagggatagacctccggcaaggcctccctcgcgccggcggcgtcagcagcggatatgggtgttccggcgttctaccgatggctggcggagaagtacccgatggtggtggtggacgtggtggaggaggagcccgtagagatcgagggcgtcaaggtgcccgtcgacacctccaagcccaaccccaacagcctcgagttcgacaacctctacctcgatatgaacggaatcatacacccctgcttccacccggaggacaggccctccccaacaacatttggtgaggttttccagtgcatgtttgattatatcgacagactattcgtcatggttcgcccccggaggcttttgtacatggccattgatggtgttgctcctcgtgctaagatgaaccagcagcgctcaagacgattcagggctgcaaaagatgcagctgatgcggctgcagaagaagaacggttacgtgaagagtttgaaagggaaggcagaaagcttcctccaaagcagcaatcacaaacatgtgattcaaatgttattactccagggactgaatttatggctgttttatcagttgctttgcagtattacatccatcgtagattgaattatgatcctggatggaaacaaattaaagttattttgtctgatgccaatgttcctggtgaaggggaacataaaatcatgtcatatattcgtggccaacggaatctgtctggttttaacccaaatacgcgccattgcctgtatggcctggacgcagatctgatcatgctagctttggcgacacatgaagtgggacatctagcagcaaactgtgaaggaaaggtgaaaagaaaagctggggagtttgatgagaagggtggtgctattgttcccaagaagccctatcagttcttgaatatatggaccctgcgggaatatttagaatacgagttcagaatgccaaacccacctttcaagattgattttgaacgcattgttgatgatttcatcttcatgtgcttctttgttggcaacgattttcttccacatatgccgacgctagagatccgtgagggagctattaatttgctaatggcagtgtacaagaaggaatttccctcaatgggtggatatttaactgattcttgcacgcctgatctgagcagagttgagcacttcattcaagcagttggttcatatgaggacaaaatatttcagaaaagagcacgtttgcatcagcgtcaagcggaaaggataaaacgggaaaaagctcaagcaaagcggggtgatgatctggatccccatgttagggatgaccttattgtacctattcaacgttttcaagggtctcgcctagcctctggggctgtacctgtgccatatgagcagaatggatcccataaagacaataaagaaaggaatagtcgagctcggaaagctgcacgagtatcaacgtcaggttccagcattgcctcagccttagttgaagctgaaaatgacctcgaagcccaagaatgtgaaaacaaagaagaactgaagtcaatgcttaaagatgcacttcgcgagaaatctgatatttttaattctgacaatccagaggaggataaggtgaaacttggagaaccaggatggagggaaaggtactatgaagagaaatttggggcaagaacacccgagcagattgaagaaatacgcagagatgttgttctcaaatacacagaaggattgtgttgggtaatgcactactattatgaaggggtatgctcatggcaatggttctacccttatcattatgctccgtttgcttcggatctaagtggattgggccaacttaatattaaatttgaacttgggacaccattcaaaccttttgatcaacttatgggtgttttcccagctgcaagtgcccatgcgctaccgctacagtatcgacgattgatgaccgatccaaattcaccaataattgatttttatcctacagattttgaagtagatatgaatgggaagagatattcttggcaagggattgcaaaactaccgtttattgatgaagatcgtttgttggctgagataaaaaaagttgagcatactttgacggtatggtgatgaaacaatttgccattcatttatgcattacaaggcacaacaaataagaatcttctaaggtttgctttgtttttgtctttctgtgtagcctgaagaagcaaggagaaacagtatcatgtgtgatatgctttttgtgaatgggtcacatccactttcgccttatatctactctctcaacagcaaatttgggcatctgcctgacaaaaggagaaatgaaattaaagaaaaacttgatccttctgctaggttaactaagctcaatattgttgttgttcgacaagtaatattattttgttaaatgtacatgtattgatgtttctgtactgacactttcttttgttgtgtggaccgggggggggggggggggttagtaaaagagcattgaaccagtttgtctgctagttaaattgagaaaatgtggctgatttccacatgtggtctcctgtggacgggctggaggatattatggacaatcaagtgatatgttcaatctacaatcttccagaccatcataagcacatagcccagccgccagttggtgttatcatgcccaagaagattgttgaagccggtgatctgaaaccacctccagtgctgtggcatgaagatagtggcaggcggcctcatgataatagcaacaggcaaaacccatctggtgccatatcaggccgtcaacttggagaggcagctcaccgacttgtcataaacagcttaaatgctcagggtagggggcaacatagtggcacatcaatgccatatcgaactataatgaatggcttgcatcatctggatgtagcgtcccctgtcagcaatcaaggcatgcgtccacaagtggggcagtctgccggacctcctggttggtatgttcctaggggtagtgtatcaaatggtcaaccaccagcttatgcatcatcaggatcaggtcattatcagtatgaaagttcggggcattcacaatatgaacaaggtaaccatggaaggcaacaatctcacccatatgcaagagatggcttccatgatacacgaggaagggttccacctgcatatgggtaccagcagagcaacatgtatccatcgggtcctggattgtatgggcaacctccatcagcatatcctggggttcatggtggaggctaccaaccccctccatatggcggaggccagcagtggcagcaacaatcatatagttcgtatgccgtgcgaggcccctacggaggcaggccaccacccacaagggctgattcagggtcacagcaaccacagaaccgttatggtgctttagacagaagtaacaaccggaggccttcatctggatacagaagataatagtttgtgacccagtttatgttataactcaaagtttgttatcagtaaagcttcgagtaactcagctaaagcataggcggaatagtctgctaagtcttgtgaccttcaagcagttagggggtggccatcaaagatattgggaggcaaaatttgtatgctagtgcagactttcaggtactagcggttttgatcgccattgaagcagctaggtttgcggcatctcagaggttttgtgaagcaagatttgtatactactgttatcaacgggccatcaggtactggtggctggtcgccattctttatctgtagctgccatttgtttagaagatgtcataaacggccctggggtttaaataggtcccattgagaatatttttgaaggacgtttactctgagacttgacaagttttgggggcattttgatatcagataaatgtatgcaggagtgcagttttgatgatgtgtgtattccaagtcattaattaaagtgtgacgtgtctattgccaggcgaggaaggaaacgttacgctttgcacttatcccgttccaaattacaagtgatttcaagaaaaaaaattcagctttcttggagagtcctaaattactacctccattctcaaatattattt

SEQ ID NO: 34161 - DNA, 1905 bp, Zea Mays
agtccgtctcgacagtgaccggacctcttcgttagggtttcgcgcctcttctcaccgtctgcctactactagggatagacctccggcaaggcctccctcgcgccggcggcgtcagcagcggatatgggtgttccggcgttctaccgatggctggcggagaagtacccgatggtggtggtggacgtggtggaggaggagcccgtagagatcgagggcgtcaaggtgcccgtcgacacctccaagcccaaccccaacagcctcgagttcgacaacctctacctcgatatgaacggaatcatacacccctgcttccacccggaggacaggtggaggaatgaatggatacataacactttgcagtggggatccatgccctcctatctttaggtctcctgtggacgggctggaggatattatggacaatcaagtgatatgttcaatctacaatcttccagaccatcataagcacatagcccagccgccagttggtgttatcatgcccaagaagattgttgaagccggtgatctgaaaccacctccagtgctgtggcatgaagatagtggcaggcggcctcatgataatagcaacaggcaaaacccatctggtgccatatcaggccgtcaacttggagaggcagctcaccgacttgtcataaacagcttaaatgctcagggtagggggcaacatagtggcacatcaatgccatatcgaactataatgaatggcttgcatcatctggatgtagcgtcccctgtcagcaatcaaggcatgcgtccacaagtggggcagtctgccggacctcctggttggtatgttcctaggggtagtgtatcaaatggtcaaccaccagcttatgcatcatcaggatcaggtcattatcagtatgaaagttcggggcattcacaatatgaacaaggtaaccatggaaggcaacaatctcacccatatgcaagagatggcttccatgatacacgaggaagggttccacctgcatatgggtaccagcagagcaacatgtatccatcgggtcctggattgtatgggcaacctccatcagcatatcctggggttcatggtggaggctaccaaccccctccatatggcggaggccagcagtggcagcaacaatcatatagttcgtatgccgtgcgaggcccctacggaggcaggccaccacccacaagggctgattcagggtcacagcaaccacagaaccgttatggtgctttagacagaagtaacaaccggaggccttcatctggatacagaagataatagtttgtgacccagtttatgttataactcaaagtttgttatcagtaaagcttcgagtaactcagctaaagcataggcggaatagtctgctaagtcttgtgaccttcaagcagttagggggtggccatcaaagatattgggaggcaaaatttgtatgctagtgcagactttcaggtactagcggttttgatcgccattgaagcagctaggtttgcggcatctcagaggttttgtgaagcaagatttgtatactactgttatcaacgggccatcaggtactggtggctggtcgccattctttatctgtagctgccatttgtttagaagatgtcataaacggccctggggtttaaataggtcccattgagaatatttttgaaggacgtttactctgagacttgacaagttttgggggcattttgatatcagataaatgtatgcaggagtgcagttttgatgatgtgtgtattccaagtcattaattaaagtgtgacgtgtctattgccaggcgaggaaggaaacgttacgctttgcacttatcccgttccaaattacaagtgatttcaagaaaaaaaattcagctttcttggagagtcctaaattactacctccattctcaaatattattt

SEQ ID NO: 34162 - DNA, 3902 bp, Zea Mays
agtccgtctcgacagtgaccggacctcttcgttagggtttcgcgcctcttctcaccgtctgcctactactagggatagacctccggcaaggcctccctcgcgccggcggcgtcagcagcggatatgggtgttccggcgttctaccgatggctggcggagaagtacccgatggtggtggtggacgtggtggaggaggagcccgtagagatcgagggcgtcaaggtgcccgtcgacacctccaagcccaaccccaacagcctcgagttcgacaacctctacctcgatatgaacggaatcatacacccctgcttccacccggaggacaggccctccccaacaacatttggtgaggttttccagtgcatgtttgattatatcgacagactattcgtcatggttcgcccccggaggcttttgtacatggccattgatggtgttgctcctcgtgctaagatgaaccagcagcgctcaagacgattcagggctgcaaaagatgcagctgatgcggctgcagaagaagaacggttacgtgaagagtttgaaagggaaggcagaaagcttcctccaaagcagcaatcacaaacatgtgattcaaatgttattactccagggactgaatttatggctgttttatcagttgctttgcagtattacatccatcgtagattgaattatgatcctggatggaaacaaattaaagggaacataaaatcatgtcatatattcgtggccaacggaatctgtctggttttaacccaaatacgcgccattgcctgtatggcctggacgcagatctgatcatgctagctttggcgacacatgaagtacacttctcaatactgagagaggtagtttatacacctggacagcaggataaatgcttcttgtgtggtcaggtgggacatctagcagcaaactgtgaaggaaaggtgaaaagaaaagctggggagtttgatgagaagggtggtgctattgttcccaagaagccctatcagttcttgaatatatggaccctgcgggaatatttagaatacgagttcagaatgccaaacccacctttcaagattgattttgaacgcattgttgatgatttcatcttcatgtgcttctttgttggcaacgattttcttccacatatgccgacgctagagatccgtgagggagctattaatttgctaatggcagtgtacaagaaggaatttccctcaatgggtggatatttaactgattcttgcacgcctgatctgagcagagttgagcacttcattcaagcagttggttcatatgaggacaaaatatttcagaaaagagcacgtttgcatcagcgtcaagcggaaaggataaaacgggaaaaagctcaagcaaagcggggtgatgatctggatccccatgttagggatgaccttattgtacctattcaacgttttcaagggtctcgcctagcctctggggctgtacctgtgccatatgagcagaatggatcccataaagacaataaagaaaggaatagtcgagctcggaaagctgcacgagtatcaacgtcaggttccagcattgcctcagccttagttgaagctgaaaatgacctcgaagcccaagaatgtgaaaacaaagaagaactgaagtcaatgcttaaagatgcacttcgcgagaaatctgatatttttaattctgacaatccagaggaggataaggtgaaacttggagaaccaggatggagggaaaggtactatgaagagaaatttggggcaagaacacccgagcagattgaagaaatacgcagagatgttgttctcaaatacacagaaggattgtgttgggtaatgcactactattatgaaggggttctacccttatcattatgctccgtttgcttcggatctaagtggattgggccaacttaatattaaatttgaacttgggacaccattcaaaccttttgatcaacttatgggtgttttcccagctgcaagtgcccatgcgctaccgctacagtatcgacgattgatgaccgatccaaattcaccaataattgatttttatcctacagattttgaagtagatatgaatgggaagagatattcttggcaagggattgcaaaactaccgtttattgatgaagatcgtttgttggctgagataaaaaaagttgagcatactttgacgcctgaagaagcaaggagaaacagtatcatgtgtgatatgctttttgtgaatgggtcacatccactttcgccttatatctactctctcaacagcaaatttgggcatctgcctgacaaaaggagaaatgaaattaaagaaaaacttgatccttctgctagtggaggaatgaatggatacataacactttgcagtggggatccatgccctcctatctttaggtctcctgtggacgggctggaggatattatggacaatcaagtgatatgttcaatctacaatcttccagaccatcataagcacatagcccagccgccagttggtgttatcatgcccaagaagattgttgaagccggtgatctgaaaccacctccagtgctgtggcatgaagatagtggcaggcggcctcatgataatagcaacaggcaaaacccatctggtgccatatcaggccgtcaacttggagaggcagctcaccgacttgtcataaacagcttaaatgctcagggtagggggcaacatagtggcacatcaatgccatatcgaactataatgaatggcttgcatcatctggatgtagcgtcccctgtcagcaatcaaggcatgcgtccacaagtggggcagtctgccggacctcctggttggtatgttcctaggggtagtgtatcaaatggtcaaccaccagcttatgcatcatcaggatcaggtcattatcagtatgaaagttcggggcattcacaatatgaacaaggtaaccatggaaggcaacaatctcacccatatgcaagagatggcttccatgatacacgaggaagggttccacctgcatatgggtaccagcagagcaacatgtatccatcgggtcctggattgtatgggcaacctccatcagcatatcctggggttcatggtggaggctaccaaccccctccatatggcggaggccagcagtggcagcaacaatcatatagttcgtatgccgtgcgaggcccctacggaggcaggccaccacccacaagggctgattcagggtcacagcaaccacagaaccgttatggtgctttagacagaagtaacaaccggaggccttcatctggatacagaagataatagtttgtgacccagtttatgttataactcaaagtttgttatcagtaaagcttcgagtaactcagctaaagcataggcggaatagtctgctaagtcttgtgaccttcaagcagttagggggtggccatcaaagatattgggaggcaaaatttgtatgctagtgcagactttcaggtactagcggttttgatcgccattgaagcagctaggtttgcggcatctcagaggttttgtgaagcaagatttgtatactactgttatcaacgggccatcaggtactggtggctggtcgccattctttatctgtagctgccatttgtttagaagatgtcataaacggccctggggtttaaataggtcccattgagaatatttttgaaggacgtttactctgagacttgacaagttttgggggcattttgatatcagataaatgtatgcaggagtgcagttttgatgatgtgtgtattccaagtcattaattaaagtgtgacgtgtctattgccaggcgaggaaggaaacgttacgctttgcacttatcccgttccaaattacaagtgatttcaagaaaaaaaattcagctttcttggagagtcctaaattactacctccattctcaaatattattt

SEQ ID NO: 34163 - DNA, 4039 bp, Zea Mays
gcccgacagatgagtccgtctcgacagtgaccggacctcttcgttagggtttcgcgcctcttctcaccgtctgcctactactagggatagacctccggcaaggcctccctcgcgccggcggcgtcagcagcggatatgggtgttccggcgttctaccgatggctggcggagaagtacccgatggtggtggtggacgtggtggaggaggagcccgtagagatcgagggcgtcaaggtgcccgtcgacacctccaagcccaaccccaacagcctcgagttcgacaacctctacctcgatatgaacggaatcatacacccctgcttccacccggaggacaggccctccccaacaacatttggtgaggttttccagtgcatgtttgattatatcgacagactattcgtcatggttcgcccccggaggcttttgtacatggccattgatggtgttgctcctcgtgctaagatgaaccagcagcgctcaagacgattcagggctgcaaaagatgcagctgatgcggctgcagaagaagaacggttacgtgaagagtttgaaagggaaggcagaaagcttcctccaaagcagcaatcacaaacatgtgattcaaatgttattactccagggactgaatttatggctgttttatcagttgctttgcagtattacatccatcgtagattgaattatgatcctggatggaaacaaattaaagttattttgtctgatgccaatgttcctggtgaaggggaacataaaatcatgtcatatattcgtggccaacggaatctgtctggttttaacccaaatacgcgccattgcctgtatggcctggacgcagatctgatcatgctagctttggcgacacatgaagtacacttctcaatactgagagaggtagtttatacacctggacagcaggataaatgcttcttgtgtggtcaggtgggacatctagcagcaaactgtgaaggaaaggtgaaaagaaaagctggggagtttgatgagaagggtggtgctattgttcccaagaagccctatcagttcttgaatatatggaccctgcgggaatatttagaatacgagttcagaatgccaaacccacctttcaagattgattttgaacgcattgttgatgatttcatcttcatgtgcttctttgttggcaacgattttcttccacatatgccgacgctagagatccgtgagggagctattaatttgctaatggcagtgtacaagaaggaatttccctcaatgggtggatatttaactgattcttgcacgcctgatctgagcagagttgagcacttcattcaagcagttggttcatatgaggacaaaatatttcagaaaagagcacgtttgcatcagcgtcaagcggaaaggataaaacgggaaaaagctcaagcaaagcggggtgatgatctggatccccatgttagggatgaccttattgtacctattcaacgttttcaagggtctcgcctagcctctggggctgtacctgtgccatatgagcagaatggatcccataaagacaataaagaaaggaatagtcgagctcggaaagctgcacgagtatcaacgtcaggttccagcattgcctcagccttagttgaagctgaaaatgacctcgaagcccaagaatgtgaaaacaaagaagaactgaagtcaatgcttaaagatgcacttcgcgagaaatctgatatttttaattctgacaatccagaggaggataaggtgaaacttggagaaccaggatggagggaaaggtactatgaagagaaatttggggcaagaacacccgagcagattgaagaaatacgcagagatgttgttctcaaatacacagaaggattgtgttgggtaatgcactactattatgaaggggtatgctcatggcaatggttctacccttatcattatgctccgtttgcttcggatctaagtggattgggccaacttaatattaaatttgaacttgggacaccattcaaaccttttgatcaacttatgggtgttttcccagctgcaagtgcccatgcgctaccgctacagtatcgacgattgatgaccgatccaaattcaccaataattgatttttatcctacagattttgaagtagatatgaatgggaagagatattcttggcaagggattgcaaaactaccgtttattgatgaagatcgtttgttggctgagataaaaaaagttgagcatactttgacggtatggtgatgaaacaatttgccattcatttatgcattacaaggcacaacaaataagaatcttctaaggtttgctttgtttttgtctttctgtgtagcctgaagaagcaaggagaaacagtatcatgtgtgatatgctttttgtgaatgggtcacatccactttcgccttatatctactctctcaacagcaaatttgggcatctgcctgacaaaaggagaaatgaaattaaagaaaaacttgatccttctgctagtggaggaatgaatggatacataacactttgcagtggggatccatgccctcctatctttaggtctcctgtggacgggctggaggatattatggacaatcaagtgataccatcataagcacatagcccagccgccagttggtgttatcatgcccaagaagattgttgaagccggtgatctgaaaccacctccagtgctgtggcatgaagatagtggcaggcggcctcatgataatagcaacaggcaaaacccatctggtgccatatcaggccgtcaacttggagaggcagctcaccgacttgtcataaacagcttaaatgctcagggtagggggcaacatagtggcacatcaatgccatatcgaactataatgaatggcttgcatcatctggatgtagcgtcccctgtcagcaatcaaggcatgcgtccacaagtggggcagtctgccggacctcctggttggtatgttcctaggggtagtgtatcaaatggtcaaccaccagcttatgcatcatcaggatcaggtcattatcagtatgaaagttcggggcattcacaatatgaacaaggtaaccatggaaggcaacaatctcacccatatgcaagagatggcttccatgatacacgaggaagggttccacctgcatatgggtaccagcagagcaacatgtatccatcgggtcctggattgtatgggcaacctccatcagcatatcctggggttcatggtggaggctaccaaccccctccatatggcggaggccagcagtggcagcaacaatcatatagttcgtatgccgtgcgaggcccctacggaggcaggccaccacccacaagggctgattcagggtcacagcaaccacagaaccgttatggtgctttagacagaagtaacaaccggaggccttcatctggatacagaagataatagtttgtgacccagtttatgttataactcaaagtttgttatcagtaaagcttcgagtaactcagctaaagcataggcggaatagtctgctaagtcttgtgaccttcaagcagttagggggtggccatcaaagatattgggaggcaaaatttgtatgctagtgcagactttcaggtactagcggttttgatcgccattgaagcagctaggtttgcggcatctcagaggttttgtgaagcaagatttgtatactactgttatcaacgggccatcaggtactggtggctggtcgccattctttatctgtagctgccatttgtttagaagatgtcataaacggccctggggtttaaataggtcccattgagaatatttttgaaggacgtttactctgagacttgacaagttttgggggcattttgatatcagataaatgtatgcaggagtgcagttttgatgatgtgtgtattccaagtcattaattaaagtgtgacgtgtctattgccaggcgaggaaggaaacgttacgctttgcacttatcccgttccaaattacaagtgatttcaagaaaaaaaattcagctttcttggagagtcctaaattactacctccattctcaaatattattt

SEQ ID NO: 34164 - DNA, 3936 bp, Zea Mays
gactggcccgacagatgagtccgtctcgacagtgaccggacctcttcgttagggtttcgcgcctcttctcaccgtctgcctactactagggatagacctccggcaaggcctccctcgcgccggcggcgtcagcagcggatatgggtgttccggcgttctaccgatggctggcggagaagtacccgatggtggtggtggacgtggtggaggaggagcccgtagagatcgagggcgtcaaggtgcccgtcgacacctccaagcccaaccccaacagcctcgagttcgacaacctctacctcgatatgaacggaatcatacacccctgcttccacccggaggacaggccctccccaacaacatttggtgaggttttccagtgcatgtttgattatatcgacagactattcgtcatggttcgcccccggaggcttttgtacatggccattgatggtgttgctcctcgtgctaagatgaaccagcagcgctcaagacgattcagggctgcaaaagatgcagctgatgcggctgcagaagaagaacggttacgtgaagagtttgaaagggaaggcagaaagcttcctccaaagcagcaatcacaaacatgtgattcaaatgttattactccagggactgaatttatggctgttttatcagttgctttgcagtattacatccatcgtagattgaattatgatcctggatggaaacaaattaaagggaacataaaatcatgtcatatattcgtggccaacggaatctgtctggttttaacccaaatacgcgccattgcctgtatggcctggacgcagatctgatcatgctagctttggcgacacatgaagtacacttctcaatactgagagaggtagtttatacacctggacagcaggataaatgcttcttgtgtggtcaggtgggacatctagcagcaaactgtgaaggaaaggtgaaaagaaaagctggggagtttgatgagaagggtggtgctattgttcccaagaagccctatcagttcttgaatatatggaccctgcgggaatatttagaatacgagttcagaatgccaaacccacctttcaagattgattttgaacgcattgttgatgatttcatcttcatgtgcttctttgttggcaacgattttcttccacatatgccgacgctagagatccgtgagggagctattaatttgctaatggcagtgtacaagaaggaatttccctcaatgggtggatatttaactgattcttgcacgcctgatctgagcagagttgagcacttcattcaagcagttggttcatatgaggacaaaatatttcagaaaagagcacgtttgcatcagcgtcaagcggaaaggataaaacgggaaaaagctcaagcaaagcggggtgatgatctggatccccatgttagggatgaccttattgtacctattcaacgttttcaagggtctcgcctagcctctggggctgtacctgtgccatatgagcagaatggatcccataaagacaataaagaaaggaatagtcgagctcggaaagctgcacgagtatcaacgtcaggttccagcattgcctcagccttagttgaagctgaaaatgacctcgaagcccaagaatgtgaaaacaaagaagaactgaagtcaatgcttaaagatgcacttcgcgagaaatctgatatttttaattctgacaatccagaggaggataaggtgaaacttggagaaccaggatggagggaaaggtactatgaagagaaatttggggcaagaacacccgagcagattgaagaaatacgcagagatgttgttctcaaatacacagaaggattgtgttgggtaatgcactactattatgaaggggtatgctcatggcaatggttctacccttatcattatgctccgtttgcttcggatctaagtggattgggccaacttaatattaaatttgaacttgggacaccattcaaaccttttgatcaacttatgggtgttttcccagctgcaagtgcccatgcgctaccgctacagtatcgacgattgatgaccgatccaaattcaccaataattgatttttatcctacagattttgaagtagatatgaatgggaagagatattcttggcaagggattgcaaaactaccgtttattgatgaagatcgtttgttggctgagataaaaaaagttgagcatactttgacgcctgaagaagcaaggagaaacagtatcatgtgtgatatgctttttgtgaatgggtcacatccactttcgccttatatctactctctcaacagcaaatttgggcatctgcctgacaaaaggagaaatgaaattaaagaaaaacttgatccttctgctagtggaggaatgaatggatacataacactttgcagtggggatccatgccctcctatctttaggtctcctgtggacgggctggaggatattatggacaatcaagtgatatgttcaatctacaatcttccagaccatcataagcacatagcccagccgccagttggtgttatcatgcccaagaagattgttgaagccggtgatctgaaaccacctccagtgctgtggcatgaagatagtggcaggcggcctcatgataatagcaacaggcaaaacccatctggtgccatatcaggccgtcaacttggagaggcagctcaccgacttgtcataaacagcttaaatgctcagggtagggggcaacatagtggcacatcaatgccatatcgaactataatgaatggcttgcatcatctggatgtagcgtcccctgtcagcaatcaaggcatgcgtccacaagtggggcagtctgccggacctcctggttggtatgttcctaggggtagtgtatcaaatggtcaaccaccagcttatgcatcatcaggatcaggtcattatcagtatgaaagttcggggcattcacaatatgaacaaggtaaccatggaaggcaacaatctcacccatatgcaagagatggcttccatgatacacgaggaagggttccacctgcatatgggtaccagcagagcaacatgtatccatcgggtcctggattgtatgggcaacctccatcagcatatcctggggttcatggtggaggctaccaaccccctccatatggcggaggccagcagtggcagcaacaatcatatagttcgtatgccgtgcgaggcccctacggaggcaggccaccacccacaagggctgattcagggtcacagcaaccacagaaccgttatggtgctttagacagaagtaacaaccggaggccttcatctggatacagaagataatagtttgtgacccagtttatgttataactcaaagtttgttatcagtaaagcttcgagtaactcagctaaagcataggcggaatagtctgctaagtcttgtgaccttcaagcagttagggggtggccatcaaagatattgggaggcaaaatttgtatgctagtgcagactttcaggtactagcggttttgatcgccattgaagcagctaggtttgcggcatctcagaggttttgtgaagcaagatttgtatactactgttatcaacgggccatcaggtactggtggctggtcgccattctttatctgtagctgccatttgtttagaagatgtcataaacggccctggggtttaaataggtcccattgagaatatttttgaaggacgtttactctgagacttgacaagttttgggggcattttgatatcagataaatgtatgcaggagtgcagttttgatgatgtgtgtattccaagtcattaattaaagtgtgacgtgtctattgccaggcgaggaaggaaacgttacgctttgcacttatcccgttccaaattacaagtgatttcaagaaaaaaaattcagctttcttggagagtcctaaattactacctccattctcaaatattattt

SEQ ID NO: 34165 - DNA, 4006 bp, Zea Mays
ctcgactggcccgacagatgagtccgtctcgacagtgaccggacctcttcgttagggtttcgcgcctcttctcaccgtctgcctactactagggatagacctccggcaaggcctccctcgcgccggcggcgtcagcagcggatatgggtgttccggcgttctaccgatggctggcggagaagtacccgatggtggtggtggacgtggtggaggaggagcccgtagagatcgagggcgtcaaggtgcccgtcgacacctccaagcccaaccccaacagcctcgagttcgacaacctctacctcgatatgaacggaatcatacacccctgcttccacccggaggacaggccctccccaacaacatttggtgaggttttccagtgcatgtttgattatatcgacagactattcgtcatggttcgcccccggaggcttttgtacatggccattgatggtgttgctcctcgtgctaagatgaaccagcagcgctcaagacgattcagggctgcaaaagatgcagctgatgcggctgcagaagaagaacggttacgtgaagagtttgaaagggaaggcagaaagcttcctccaaagcagcaatcacaaacatgtgattcaaatgttattactccagggactgaatttatggctgttttatcagttgctttgcagtattacatccatcgtagattgaattatgatcctggatggaaacaaattaaagttattttgtctgatgccaatgttcctggtgaaggggaacataaaatcatgtcatatattcgtggccaacggaatctgtctggttttaacccaaatacgcgccattgcctgtatggcctggacgcagatctgatcatgctagctttggcgacacatgaagtacacttctcaatactgagagaggtagtttatacacctggacagcaggataaatgcttcttgtgtggtcaggtgggacatctagcagcaaactgtgaaggaaaggtgaaaagaaaagctggggagtttgatgagaagggtggtgctattgttcccaagaagccctatcagttcttgaatatatggaccctgcgggaatatttagaatacgagttcagaatgccaaacccacctttcaagattgattttgaacgcattgttgatgatttcatcttcatgtgcttctttgttggcaacgattttcttccacatatgccgacgctagagatccgtgagggagctattaatttgctaatggcagtgtacaagaaggaatttccctcaatgggtggatatttaactgattcttgcacgcctgatctgagcagagttgagcacttcattcaagcagttggttcatatgaggacaaaatatttcagaaaagagcacgtttgcatcagcgtcaagcggaaaggataaaacgggaaaaagctcaagcaaagcggggtgatgatctggatccccatgttagggatgaccttattgtacctattcaacgttttcaagggtctcgcctagcctctggggctgtacctgtgccatatgagcagaatggatcccataaagacaataaagaaaggaatagtcgagctcggaaagctgcacgagtatcaacgtcaggttccagcattgcctcagccttagttgaagctgaaaatgacctcgaagcccaagaatgtgaaaacaaagaagaactgaagtcaatgcttaaagatgcacttcgcgagaaatctgatatttttaattctgacaatccagaggaggataaggtgaaacttggagaaccaggatggagggaaaggtactatgaagagaaatttggggcaagaacacccgagcagattgaagaaatacgcagagatgttgttctcaaatacacagaaggattgtgttgggtaatgcactactattatgaaggggtatgctcatggcaatggttctacccttatcattatgctccgtttgcttcggatctaagtggattgggccaacttaatattaaatttgaacttgggacaccattcaaaccttttgatcaacttatgggtgttttcccagctgcaagtgcccatgcgctaccgctacagtatcgacgattgatgaccgatccaaattcaccaataattgatttttatcctacagattttgaagtagatatgaatgggaagagatattcttggcaagggattgcaaaactaccgtttattgatgaagatcgtttgttggctgagataaaaaaagttgagcatactttgacgcctgaagaagcaaggagaaacagtatcatgtgtgatatgctttttgtgaatgggtcacatccactttcgccttatatctactctctcaacagcaaatttgggcatctgcctgacaaaaggagaaatgaaattaaagaaaaacttgatccttctgctagtaaaagagcattgaaccagtttgtctgctagttaaattgagaaaatgtggctgatttccacatgtgtggggatccatgccctcctatctttaggtctcctgtggacgggctggaggatattatggacaatcaagtgatatgttcaatctacaatcttccagaccatcataagcacatagcccagccgccagttggtgttatcatgcccaagaagattgttgaagccggtgatctgaaaccacctccagtgctgtggcatgaagatagtggcaggcggcctcatgataatagcaacaggcaaaacccatctggtgccatatcaggccgtcaacttggagaggcagctcaccgacttgtcataaacagcttaaatgctcagggtagggggcaacatagtggcacatcaatgccatatcgaactataatgaatggcttgcatcatctggatgtagcgtcccctgtcagcaatcaaggcatgcgtccacaagtggggcagtctgccggacctcctggttggtatgttcctaggggtagtgtatcaaatggtcaaccaccagcttatgcatcatcaggatcaggtcattatcagtatgaaagttcggggcattcacaatatgaacaaggtaaccatggaaggcaacaatctcacccatatgcaagagatggcttccatgatacacgaggaagggttccacctgcatatgggtaccagcagagcaacatgtatccatcgggtcctggattgtatgggcaacctccatcagcatatcctggggttcatggtggaggctaccaaccccctccatatggcggaggccagcagtggcagcaacaatcatatagttcgtatgccgtgcgaggcccctacggaggcaggccaccacccacaagggctgattcagggtcacagcaaccacagaaccgttatggtgctttagacagaagtaacaaccggaggccttcatctggatacagaagataatagtttgtgacccagtttatgttataactcaaagtttgttatcagtaaagcttcgagtaactcagctaaagcataggcggaatagtctgctaagtcttgtgaccttcaagcagttagggggtggccatcaaagatattgggaggcaaaatttgtatgctagtgcagactttcaggtactagcggttttgatcgccattgaagcagctaggtttgcggcatctcagaggttttgtgaagcaagatttgtatactactgttatcaacgggccatcaggtactggtggctggtcgccattctttatctgtagctgccatttgtttagaagatgtcataaacggccctggggtttaaataggtcccattgagaatatttttgaaggacgtttactctgagacttgacaagttttgggggcattttgatatcagataaatgtatgcaggagtgcagttttgatgatgtgtgtattccaagtcattaattaaagtgtgacgtgtctattgccaggcgaggaaggaaacgttacgctttgcacttatcccgttccaaattacaagtgatttcaagaaaaaaaattcagctttcttggagagtcctaaattactacctccattctcaaatattattt

SEQ ID NO: 34166 - DNA, 4109 bp, Zea Mays
cgttgctcgactggcccgacagatgagtccgtctcgacagtgaccggacctcttcgttagggtttcgcgcctcttctcaccgtctgcctactactagggatagacctccggcaaggcctccctcgcgccggcggcgtcagcagcggatatgggtgttccggcgttctaccgatggctggcggagaagtacccgatggtggtggtggacgtggtggaggaggagcccgtagagatcgagggcgtcaaggtgcccgtcgacacctccaagcccaaccccaacagcctcgagttcgacaacctctacctcgatatgaacggaatcatacacccctgcttccacccggaggacaggccctccccaacaacatttggtgaggttttccagtgcatgtttgattatatcgacagactattcgtcatggttcgcccccggaggcttttgtacatggccattgatggtgttgctcctcgtgctaagatgaaccagcagcgctcaagacgattcagggctgcaaaagatgcagctgatgcggctgcagaagaagaacggttacgtgaagagtttgaaagggaaggcagaaagcttcctccaaagcagcaatcacaaacatgtgattcaaatgttattactccagggactgaatttatggctgttttatcagttgctttgcagtattacatccatcgtagattgaattatgatcctggatggaaacaaattaaagttattttgtctgatgccaatgttcctggtgaaggggaacataaaatcatgtcatatattcgtggccaacggaatctgtctggttttaacccaaatacgcgccattgcctgtatggcctggacgcagatctgatcatgctagctttggcgacacatgaagtacacttctcaatactgagagaggtagtttatacacctggacagcaggataaatgcttcttgtgtggtcaggtgggacatctagcagcaaactgtgaaggaaaggtgaaaagaaaagctggggagtttgatgagaagggtggtgctattgttcccaagaagccctatcagttcttgaatatatggaccctgcgggaatatttagaatacgagttcagaatgccaaacccacctttcaagattgattttgaacgcattgttgatgatttcatcttcatgtgcttctttgttggcaacgattttcttccacatatgccgacgctagagatccgtgagggagctattaatttgctaatggcagtgtacaagaaggaatttccctcaatgggtggatatttaactgattcttgcacgcctgatctgagcagagttgagcacttcattcaagcagttggttcatatgaggacaaaatatttcagaaaagagcacgtttgcatcagcgtcaagcggaaaggataaaacgggaaaaagctcaagcaaagcggggtgatgatctggatccccatgttagggatgaccttattgtacctattcaacgttttcaagggtctcgcctagcctctggggctgtacctgtgccatatgagcagaatggatcccataaagacaataaagaaaggaatagtcgagctcggaaagctgcacgagtatcaacgtcaggttccagcattgcctcagccttagttgaagctgaaaatgacctcgaagcccaagaatgtgaaaacaaagaagaactgaagtcaatgcttaaagatgcacttcgcgagaaatctgatatttttaattctgacaatccagaggaggataaggtgaaacttggagaaccaggatggagggaaaggtactatgaagagaaatttggggcaagaacacccgagcagattgaagaaatacgcagagatgttgttctcaaatacacagaaggattgtgttgggtaatgcactactattatgaaggggtatgctcatggcaatggttctacccttatcattatgctccgtttgcttcggatctaagtggattgggccaacttaatattaaatttgaacttgggacaccattcaaaccttttgatcaacttatgggtgttttcccagctgcaagtgcccatgcgctaccgctacagtatcgacgattgatgaccgatccaaattcaccaataattgatttttatcctacagattttgaagtagatatgaatgggaagagatattcttggcaagggattgcaaaactaccgtttattgatgaagatcgtttgttggctgagataaaaaaagttgagcatactttgacgcctgaagaagcaaggagaaacagtatcatgtgtgatatgctttttgtgaatgggtcacatccactttcgccttatatctactctctcaacagcaaatttgggcatctgcctgacaaaaggagaaatgaaattaaagaaaaacttgatccttctgctaggttaactaagctcaatattgttgttgttcgacaagtaatattattttgttaaatgtacatgtattgatgtttctgtactgacactttcttttgttgtgtggaccgggggggggggggggggttagtaaaagagcattgaaccagtttgtctgctagttaaattgagaaaatgtggctgatttccacatgtggtctcctgtggacgggctggaggatattatggacaatcaagtgatatgttcaatctacaatcttccagaccatcataagcacatagcccagccgccagttggtgttatcatgcccaagaagattgttgaagccggtgatctgaaaccacctccagtgctgtggcatgaagatagtggcaggcggcctcatgataatagcaacaggcaaaacccatctggtgccatatcaggccgtcaacttggagaggcagctcaccgacttgtcataaacagcttaaatgctcagggtagggggcaacatagtggcacatcaatgccatatcgaactataatgaatggcttgcatcatctggatgtagcgtcccctgtcagcaatcaaggcatgcgtccacaagtggggcagtctgccggacctcctggttggtatgttcctaggggtagtgtatcaaatggtcaaccaccagcttatgcatcatcaggatcaggtcattatcagtatgaaagttcggggcattcacaatatgaacaaggtaaccatggaaggcaacaatctcacccatatgcaagagatggcttccatgatacacgaggaagggttccacctgcatatgggtaccagcagagcaacatgtatccatcgggtcctggattgtatgggcaacctccatcagcatatcctggggttcatggtggaggctaccaaccccctccatatggcggaggccagcagtggcagcaacaatcatatagttcgtatgccgtgcgaggcccctacggaggcaggccaccacccacaagggctgattcagggtcacagcaaccacagaaccgttatggtgctttagacagaagtaacaaccggaggccttcatctggatacagaagataatagtttgtgacccagtttatgttataactcaaagtttgttatcagtaaagcttcgagtaactcagctaaagcataggcggaatagtctgctaagtcttgtgaccttcaagcagttagggggtggccatcaaagatattgggaggcaaaatttgtatgctagtgcagactttcaggtactagcggttttgatcgccattgaagcagctaggtttgcggcatctcagaggttttgtgaagcaagatttgtatactactgttatcaacgggccatcaggtactggtggctggtcgccattctttatctgtagctgccatttgtttagaagatgtcataaacggccctggggtttaaataggtcccattgagaatatttttgaaggacgtttactctgagacttgacaagttttgggggcattttgatatcagataaatgtatgcaggagtgcagttttgatgatgtgtgtattccaagtcattaattaaagtgtgacgtgtctattgccaggcgaggaaggaaacgttacgctttgcacttatcccgttccaaattacaagtgatttcaagaaaaaaaattcagctttcttggagagtcctaaattactacctccattctcaaatattattt

SEQ ID NO: 34167 - DNA, 3849 bp, Zea Mays
cgttgctcgactggcccgacagatgagtccgtctcgacagtgaccggacctcttcgttagggtttcgcgcctcttctcaccgtctgcctactactagggatagacctccggcaaggcctccctcgcgccggcggcgtcagcagcggatatgggtgttccggcgttctaccgatggctggcggagaagtacccgatggtggtggtggacgtggtggaggaggagcccgtagagatcgagggcgtcaaggtgcccgtcgacacctccaagcccaaccccaacagcctcgagttcgacaacctctacctcgatatgaacggaatcatacacccctgcttccacccggaggacaggccctccccaacaacatttggtgaggttttccagtgcatgtttgattatatcgacagactattcgtcatggttcgcccccggaggcttttgtacatggccattgatggtgttgctcctcgtgctaagatgaaccagcagcgctcaagacgattcagggctgcaaaagatgcagctgatgcggctgcagaagaagaacggttacgtgaagagtttgaaagggaaggcagaaagcttcctccaaagcagcaatcacaaacatgtgattcaaatgttattactccagggactgaatttatggctgttttatcagttgctttgcagtattacatccatcgtagattgaattatgatcctggatggaaacaaattaaagttattttgtctgatgccaatgttcctggtgaaggggaacataaaatcatgtcatatattcgtggccaacggaatctgtctggttttaacccaaatacgcgccattgcctgtatggcctggacgcagatctgatcatgctagctttggcgacacatgaagtacacttctcaatactgagagaggtagtttatacacctggacagcaggataaatgcttcttgtgtggtcaggtgggacatctagcagcaaactgtgaaggaaaggtgaaaagaaaagctggggagtttgatgagaagggtggtgctattgttcccaagaagccctatcagttcttgaatatatggaccctgcgggaatatttagaatacgagttcagaatgccaaacccacctttcaagattgattttgaacgcattgttgatgatttcatcttcatgtgcttctttgttggcaacgattttcttccacatatgccgacgctagagatccgtgagggagctattaatttgctaatggcagtgtacaagaaggaatttccctcaatgggtggatatttaactgattcttgcacgcctgatctgagcagagttgagcacttcattcaagcagttggttcatatgaggacaaaatatttcagaaaagagcacgtttgcatcagcgtcaagcggaaaggataaaacgggaaaaagctcaagcaaagcggggtgatgatctggatccccatgttagggatgaccttattgtacctattcaacgttttcaagggtctcgcctagcctctggggctgtacctgtgccatatgagcagaatggatcccataaagacaataaagaaaggaatagtcgagctcggaaagctgcacgagtatcaacgtcaggttccagcattgcctcagccttagttgaagctgaaaatgacctcgaagcccaagaatgtgaaaacaaagaagaactgaagtcaatgcttaaagatgcacttcgcgagaaatctgatatttttaattctgacaatccagaggaggataaggtgaaacttggagaaccaggatggagggaaaggtactatgaagagaaatttggggcaagaacacccgagcagattgaagaaatacgcagagatgttgttctcaaatacacagaaggattgtgttgggtaatgcactactattatgaaggggtatgctcatggcaatggttctacccttatcattatgctccgtttgcttcggatctaagtggattgggccaacttaatattaaatttgaacttgggacaccattcaaaccttttgatcaacttatgggtgttttcccagctgcaagtgcccatgcgctaccgctacagtatcgacgattgatgaccgatccaaattcaccaataattgatttttatcctacagattttgaagtagatatgaatgggaagagatattcttggcaagggattgcaaaactaccgtttattgatgaagatcgtttgttggctgagataaaaaaagttgagcatactttgacgcctgaagaagcaaggagaaacagtatcattggaggaatgaatggatacataacactttgcagtggggatccatgccctcctatctttaggtctcctgtggacgggctggaggatattatggacaatcaagtgatatgttcaatctacaatcttccagaccatcataagcacatagcccagccgccagttggtgttatcatgcccaagaagattgttgaagccggtgatctgaaaccacctccagtgctgtggcatgaagatagtggcaggcggcctcatgataatagcaacaggcaaaacccatctggtgccatatcaggccgtcaacttggagaggcagctcaccgacttgtcataaacagcttaaatgctcagggtagggggcaacatagtggcacatcaatgccatatcgaactataatgaatggcttgcatcatctggatgtagcgtcccctgtcagcaatcaaggcatgcgtccacaagtggggcagtctgccggacctcctggttggtatgttcctaggggtagtgtatcaaatggtcaaccaccagcttatgcatcatcaggatcaggtcattatcagtatgaaagttcggggcattcacaatatgaacaaggtaaccatggaaggcaacaatctcacccatatgcaagagatggcttccatgatacacgaggaagggttccacctgcatatgggtaccagcagagcaacatgtatccatcgggtcctggattgtatgggcaacctccatcagcatatcctggggttcatggtggaggctaccaaccccctccatatggcggaggccagcagtggcagcaacaatcatatagttcgtatgccgtgcgaggcccctacggaggcaggccaccacccacaagggctgattcagggtcacagcaaccacagaaccgttatggtgctttagacagaagtaacaaccggaggccttcatctggatacagaagataatagtttgtgacccagtttatgttataactcaaagtttgttatcagtaaagcttcgagtaactcagctaaagcataggcggaatagtctgctaagtcttgtgaccttcaagcagttagggggtggccatcaaagatattgggaggcaaaatttgtatgctagtgcagactttcaggtactagcggttttgatcgccattgaagcagctaggtttgcggcatctcagaggttttgtgaagcaagatttgtatactactgttatcaacgggccatcaggtactggtggctggtcgccattctttatctgtagctgccatttgtttagaagatgtcataaacggccctggggtttaaataggtcccattgagaatatttttgaaggacgtttactctgagacttgacaagttttgggggcattttgatatcagataaatgtatgcaggagtgcagttttgatgatgtgtgtattccaagtcattaattaaagtgtgacgtgtctattgccaggcgaggaaggaaacgttacgctttgcacttatcccgttccaaattacaagtgatttcaagaaaaaaaattcagctttcttggagagtcctaaattactacctccattctcaaatattattt

SEQ ID NO: 34168 - DNA, 3978 bp, Zea Mays
ttttcgttgctcgactggcccgacagatgagtccgtctcgacagtgaccggacctcttcgttagggtttcgcgcctcttctcaccgtctgcctactactagggatagacctccggcaaggcctccctcgcgccggcggcgtcagcagcggatatgggtgttccggcgttctaccgatggctggcggagaagtacccgatggtggtggtggacgtggtggaggaggagcccgtagagatcgagggcgtcaaggtgcccgtcgacacctccaagcccaaccccaacagcctcgagttcgacaacctctacctcgatatgaacggaatcatacacccctgcttccacccggaggacaggccctccccaacaacatttggtgaggttttccagtgcatgtttgattatatcgacagactattcgtcatggttcgcccccggaggcttttgtacatggccattgatggtgttgctcctcgtgctaagatgaaccagcagcgctcaagacgattcagggctgcaaaagatgcagctgatgcggctgcagaagaagaacggttacgtgaagagtttgaaagggaaggcagaaagcttcctccaaagcagcaatcacaaacatgtgattcaaatgttattactccagggactgaatttatggctgttttatcagttgctttgcagtattacatccatcgtagattgaattatgatcctggatggaaacaaattaaagttattttgtctgatgccaatgttcctggtgaaggggaacataaaatcatgtcatatattcgtggccaacggaatctgtctggttttaacccaaatacgcgccattgcctgtatggcctggacgcagatctgatcatgctagctttggcgacacatgaagtacacttctcaatactgagagaggtagtttatacacctggacagcaggataaatgcttcttgtgtggtcaggtgggacatctagcagcaaactgtgaaggaaaggtgaaaagaaaagctggggagtttgatgagaagggtggtgctattgttcccaagaagccctatcagttcttgaatatatggaccctgcgggaatatttagaatacgagttcagaatgccaaacccacctttcaagattgattttgaacgcattgttgatgatttcatcttcatgtgcttctttgttggcaacgattttcttccacatatgccgacgctagagatccgtgagggagctattaatttgctaatggcagtgtacaagaaggaatttccctcaatgggtggatatttaactgattcttgcacgcctgatctgagcagagttgagcacttcattcaagcagttggttcatatgaggacaaaatatttcagaaaagagcacgtttgcatcagcgtcaagcggaaaggataaaacgggaaaaagctcaagcaaagcggggtgatgatctggatccccatgttagggatgaccttattgtacctattcaacgttttcaagggtctcgcctagcctctggggctgtacctgtgccatatgagcagaatggatcccataaagacaataaagaaaggaatagtcgagctcggaaagctgcacgagtatcaacgtcaggttccagcattgcctcagccttagttgaagctgaaaatgacctcgaagcccaagaatgtgaaaacaaagaagaactgaagtcaatgcttaaagatgcacttcgcgagaaatctgatatttttaattctgacaatccagaggaggataaggtgaaacttggagaaccaggatggagggaaaggtactatgaagagaaatttggggcaagaacacccgagcagattgaagaaatacgcagagatgttgttctcaaatacacagaaggattgtgttgggtaatgcactactattatgaaggggtatgctcatggcaatggttctacccttatcattatgctccgtttgcttcggatctaagtggattgggccaacttaatattaaatttgaacttgggacaccattcaaaccttttgatcaacttatgggtgttttcccagctgcaagtgcccatgcgctaccgctacagtatcgacgattgatgaccgatccaaattcaccaataattgatttttatcctacagattttgaagtagatatgaatgggaagagatattcttggggattgcaaaactaccgtttattgatgaagatcgtttgttggctgagataaaaaaagttgagcatactttgacgcctgaagaagcaaggagaaacagtatcatgtgtgatatgctttttgtgaatgggtcacatccactttcgccttatatctactctctcaacagcaaatttgggcatctgcctgacaaaaggagaaatgaaattaaagaaaaacttgatccttctgctagtggaggaatgaatggatacataacactttgcagtggggatccatgccctcctatctttaggtctcctgtggacgggctggaggatattatggacaatcaagtgatatgttcaatctacaatcttccagaccatcataagcacatagcccagccgccagttggtgttatcatgcccaagaagattgttgaagccggtgatctgaaaccacctccagtgctgtggcatgaagatagtggcaggcggcctcatgataatagcaacaggcaaaacccatctggtgccatatcaggccgtcaacttggagaggcagctcaccgacttgtcataaacagcttaaatgctcagggtagggggcaacatagtggcacatcaatgccatatcgaactataatgaatggcttgcatcatctggatgtagcgtcccctgtcagcaatcaaggcatgcgtccacaagtggggcagtctgccggacctcctggttggtatgttcctaggggtagtgtatcaaatggtcaaccaccagcttatgcatcatcaggatcaggtcattatcagtatgaaagttcggggcattcacaatatgaacaaggtaaccatggaaggcaacaatctcacccatatgcaagagatggcttccatgatacacgaggaagggttccacctgcatatgggtaccagcagagcaacatgtatccatcgggtcctggattgtatgggcaacctccatcagcatatcctggggttcatggtggaggctaccaaccccctccatatggcggaggccagcagtggcagcaacaatcatatagttcgtatgccgtgcgaggcccctacggaggcaggccaccacccacaagggctgattcagggtcacagcaaccacagaaccgttatggtgctttagacagaagtaacaaccggaggccttcatctggatacagaagataatagtttgtgacccagtttatgttataactcaaagtttgttatcagtaaagcttcgagtaactcagctaaagcataggcggaatagtctgctaagtcttgtgaccttcaagcagttagggggtggccatcaaagatattgggaggcaaaatttgtatgctagtgcagactttcaggtactagcggttttgatcgccattgaagcagctaggtttgcggcatctcagaggttttgtgaagcaagatttgtatactactgttatcaacgggccatcaggtactggtggctggtcgccattctttatctgtagctgccatttgtttagaagatgtcataaacggccctggggtttaaataggtcccattgagaatatttttgaaggacgtttactctgagacttgacaagttttgggggcattttgatatcagataaatgtatgcaggagtgcagttttgatgatgtgtgtattccaagtcattaattaaagtgtgacgtgtctattgccaggcgaggaaggaaacgttacgctttgcacttatcccgttccaaattacaagtgatttcaagaaaaaaaattcagctttcttggagagtcctaaattactacctccattctcaaatattattt

SEQ ID NO: 34169 - DNA, 3984 bp, Zea Mays
atttttcgttgctcgactggcccgacagatgagtccgtctcgacagtgaccggacctcttcgttagggtttcgcgcctcttctcaccgtctgcctactactagggatagacctccggcaaggcctccctcgcgccggcggcgtcagcagcggatatgggtgttccggcgttctaccgatggctggcggagaagtacccgatggtggtggtggacgtggtggaggaggagcccgtagagatcgagggcgtcaaggtgcccgtcgacacctccaagcccaaccccaacagcctcgagttcgacaacctctacctcgatatgaacggaatcatacacccctgcttccacccggaggacaggccctccccaacaacatttggtgaggttttccagtgcatgtttgattatatcgacagactattcgtcatggttcgcccccggaggcttttgtacatggccattgatggtgttgctcctcgtgctaagatgaaccagcagcgctcaagacgattcagggctgcaaaagatgcagctgatgcggctgcagaagaagaacggttacgtgaagagtttgaaagggaaggcagaaagcttcctccaaagcagcaatcacaaacatgtgattcaaatgttattactccagggactgaatttatggctgttttatcagttgctttgcagtattacatccatcgtagattgaattatgatcctggatggaaacaaattaaagttattttgtctgatgccaatgttcctggtgaaggggaacataaaatcatgtcatatattcgtggccaacggaatctgtctggttttaacccaaatacgcgccattgcctgtatggcctggacgcagatctgatcatgctagctttggcgacacatgaagtacacttctcaatactgagagaggtagtttatacacctggacagcaggataaatgcttcttgtgtggtcaggtgggacatctagcagcaaactgtgaaggaaaggtgaaaagaaaagctggggagtttgatgagaagggtggtgctattgttcccaagaagccctatcagttcttgaatatatggaccctgcgggaatatttagaatacgagttcagaatgccaaacccacctttcaagattgattttgaacgcattgttgatgatttcatcttcatgtgcttctttgttggcaacgattttcttccacatatgccgacgctagagatccgtgagggagctattaatttgctaatggcagtgtacaagaaggaatttccctcaatgggtggatatttaactgattcttgcacgcctgatctgagcagagttgagcacttcattcaagcagttggttcatatgaggacaaaatatttcagaaaagagcacgtttgcatcagcgtcaagcggaaaggataaaacgggaaaaagctcaagcaaagcggggtgatgatctggatccccatgttagggatgaccttattgtacctattcaacgttttcaagggtctcgcctagcctctggggctgtacctgtgccatatgagcagaatggatcccataaagacaataaagaaaggaatagtcgagctcggaaagctgcacgagtatcaacgtcaggttccagcattgcctcagccttagttgaagctgaaaatgacctcgaagcccaagaatgtgaaaacaaagaagaactgaagtcaatgcttaaagatgcacttcgcgagaaatctgatatttttaattctgacaatccagaggaggataaggtgaaacttggagaaccaggatggagggaaaggtactatgaagagaaatttggggcaagaacacccgagcagattgaagaaatacgcagagatgttgttctcaaatacacagaaggattgtgttgggtaatgcactactattatgaaggggtatgctcatggcaatggttctacccttatcattatgctccgtttgcttcggatctaagtggattgggccaacttaatattaaatttgaacttgggacaccattcaaaccttttgatcaacttatgggtgttttcccagctgcaagtgcccatgcgctaccgctacagtatcgacgattgatgaccgatccaaattcaccaataattgatttttatcctacagattttgaagtagatatgaatgggaagagatattcttggcaagggattgcaaaactaccgtttattgatgaagatcgtttgttggctgagataaaaaaagttgagcatactttgacgcctgaagaagcaaggagaaacagtatcatgtgtgatatgctttttgtgaatgggtcacatccactttcgccttatatctactctctcaacagcaaatttgggcatctgcctgacaaaaggagaaatgaaattaaagaaaaacttgatccttctgctagtggaggaatgaatggatacataacactttgcagtggggatccatgccctcctatctttaggtctcctgtggacgggctggaggatattatggacaatcaagtgatatgttcaatctacaatcttccagaccatcataagcacatagcccagccgccagttggtgttatcatgcccaagaagattgttgaagccggtgatctgaaaccacctccagtgctgtggcatgaagatagtggcaggcggcctcatgataatagcaacaggcaaaacccatctggtgccatatcaggccgtcaacttggagaggcagctcaccgacttgtcataaacagcttaaatgctcagggtagggggcaacatagtggcacatcaatgccatatcgaactataatgaatggcttgcatcatctggatgtagcgtcccctgtcagcaatcaaggcatgcgtccacaagtggggcagtctgccggacctcctggttggtatgttcctaggggtagtgtatcaaatggtcaaccaccagcttatgcatcatcaggatcaggtcattatcagtatgaaagttcggggcattcacaatatgaacaaggtaaccatggaaggcaacaatctcacccatatgcaagagatggcttccatgatacacgaggaagggttccacctgcatatgggtaccagcagagcaacatgtatccatcgggtcctggattgtatgggcaacctccatcagcatatcctggggttcatggtggaggctaccaaccccctccatatggcggaggccagcagtggcagcaacaatcatatagttcgtatgccgtgcgaggcccctacggaggcaggccaccacccacaagggctgattcagggtcacagcaaccacagaaccgttatggtgctttagacagaagtaacaaccggaggccttcatctggatacagaagataatagtttgtgacccagtttatgttataactcaaagtttgttatcagtaaagcttcgagtaactcagctaaagcataggcggaatagtctgctaagtcttgtgaccttcaagcagttagggggtggccatcaaagatattgggaggcaaaatttgtatgctagtgcagactttcaggtactagcggttttgatcgccattgaagcagctaggtttgcggcatctcagaggttttgtgaagcaagatttgtatactactgttatcaacgggccatcaggtactggtggctggtcgccattctttatctgtagctgccatttgtttagaagatgtcataaacggccctggggtttaaataggtcccattgagaatatttttgaaggacgtttactctgagacttgacaagttttgggggcattttgatatcagataaatgtatgcaggagtgcagttttgatgatgtgtgtattccaagtcattaattaaagtgtgacgtgtctattgccaggcgaggaaggaaacgttacgctttgcacttatcccgttccaaattacaagtgatttcaagaaaaaaaattcagctttcttggagagtcctaaattactacctccattctcaaatattattt

SEQ ID NO: 34170 - DNA, 4064 bp, Zea Mays
aaaaaactcgatggacagacgtcatagacagatttttcgttgctcgactggcccgacagatgagtccgtctcgacagtgaccggacctcttcgttagggtttcgcgcctcttctcaccgtctgcctactactagggatagacctccggcaaggcctccctcgcgccggcggcgtcagcagcggatatgggtgttccggcgttctaccgatggctggcggagaagtacccgatggtggtggtggacgtggtggaggaggagcccgtagagatcgagggcgtcaaggtgcccgtcgacacctccaagcccaaccccaacagcctcgagttcgacaacctctacctcgatatgaacggaatcatacacccctgcttccacccggaggacaggccctccccaacaacatttggtgaggttttccagtgcatgtttgattatatcgacagactattcgtcatggttcgcccccggaggcttttgtacatggccattgatggtgttgctcctcgtgctaagatgaaccagcagcgctcaagacgattcagggctgcaaaagatgcagctgatgcggctgcagaagaagaacggttacgtgaagagtttgaaagggaaggcagaaagcttcctccaaagcagcaatcacaaacatgtgattcaaatgttattactccagggactgaatttatggctgttttatcagttgctttgcagtattacatccatcgtagattgaattatgatcctggatggaaacaaattaaagggaacataaaatcatgtcatatattcgtggccaacggaatctgtctggttttaacccaaatacgcgccattgcctgtatggcctggacgcagatctgatcatgctagctttggcgacacatgaagtacacttctcaatactgagagaggtagtttatacacctggacagcaggataaatgcttcttgtgtggtcaggtgggacatctagcagcaaactgtgaaggaaaggtgaaaagaaaagctggggagtttgatgagaagggtggtgctattgttcccaagaagccctatcagttcttgaatatatggaccctgcgggaatatttagaatacgagttcagaatgccaaacccacctttcaagattgattttgaacgcattgttgatgatttcatcttcatgtgcttctttgttggcaacgattttcttccacatatgccgacgctagagatccgtgagggagctattaatttgctaatggcagtgtacaagaaggaatttccctcaatgggtggatatttaactgattcttgcacgagttgagcacttcattcaagcagttggttcatatgaggacaaaatatttcagaaaagagcacgtttgcatcagcgtcaagcggaaaggataaaacgggaaaaagctcaagcaaagcggggtgatgatctggatccccatgttagggatgaccttattgtacctattcaacgttttcaagggtctcgcctagcctctggggctgtacctgtgccatatgagcagaatggatcccataaagacaataaagaaaggaatagtcgagctcggaaagctgcacgagtatcaacgtcaggttccagcattgcctcagccttagttgaagctgaaaatgacctcgaagcccaagaatgtgaaaacaaagaagaactgaagtcaatgcttaaagatgcacttcgcgagaaatctgatatttttaattctgacaatccagaggaggataaggtgaaacttggagaaccaggatggagggaaaggtactatgaagagaaatttggggcaagaacacccgagcagattgaagaaatacgcagagatgttgttctcaaatacacagaaggattgtgttgggtaatgcactactattatgaaggggtatgctcatggcaatggttctacccttatcattatgctccgtttgcttcggatctaagtggattgggccaacttaatattaaatttgaacttgggacaccattcaaaccttttgatcaacttatgggtgttttcccagctgcaagtgcccatgcgctaccgctacagtatcgacgattgatgaccgatccaaattcaccaataattgatttttatcctacagattttgaagtagatatgaatgggaagagatattcttggcaagggattgcaaaactaccgtttattgatgaagatcgtttgttggctgagataaaaaaagttgagcatactttgacggtatggtgatgaaacaatttgccattcatttatgcattacaaggcacaacaaataagaatcttctaaggtttgctttgtttttgtctttctgtgtagcctgaagaagcaaggagaaacagtatcatgtgtgatatgctttttgtgaatgggtcacatccactttcgccttatatctactctctcaacagcaaatttgggcatctgcctgacaaaaggagaaatgaaattaaagaaaaacttgatccttctgctagtggaggaatgaatggatacataacactttgcagtggggatccatgccctcctatctttaggtctcctgtggacgggctggaggatattatggacaatcaagtgatatgttcaatctacaatcttccagaccatcataagcacatagcccagccgccagttggtgttatcatgcccaagaagattgttgaagccggtgatctgaaaccacctccagtgctgtggcatgaagatagtggcaggcggcctcatgataatagcaacaggcaaaacccatctggtgccatatcaggccgtcaacttggagaggcagctcaccgacttgtcataaacagcttaaatgctcagggtagggggcaacatagtggcacatcaatgccatatcgaactataatgaatggcttgcatcatctggatgtagcgtcccctgtcagcaatcaaggcatgcgtccacaagtggggcagtctgccggacctcctggttggtatgttcctaggggtagtgtatcaaatggtcaaccaccagcttatgcatcatcaggatcaggtcattatcagtatgaaagttcggggcattcacaatatgaacaaggtaaccatggaaggcaacaatctcacccatatgcaagagatggcttccatgatacacgaggaagggttccacctgcatatgggtaccagcagagcaacatgtatccatcgggtcctggattgtatgggcaacctccatcagcatatcctggggttcatggtggaggctaccaaccccctccatatggcggaggccagcagtggcagcaacaatcatatagttcgtatgccgtgcgaggcccctacggaggcaggccaccacccacaagggctgattcagggtcacagcaaccacagaaccgttatggtgctttagacagaagtaacaaccggaggccttcatctggatacagaagataatagtttgtgacccagtttatgttataactcaaagtttgttatcagtaaagcttcgagtaactcagctaaagcataggcggaatagtctgctaagtcttgtgaccttcaagcagttagggggtggccatcaaagatattgggaggcaaaatttgtatgctagtgcagactttcaggtactagcggttttgatcgccattgaagcagctaggtttgcggcatctcagaggttttgtgaagcaagatttgtatactactgttatcaacgggccatcaggtactggtggctggtcgccattctttatctgtagctgccatttgtttagaagatgtcataaacggccctggggtttaaataggtcccattgagaatatttttgaaggacgtttactctgagacttgacaagttttgggggcattttgatatcagataaatgtatgcaggagtgcagttttgatgatgtgtgtattccaagtcattaattaaagtgtgacgtgtctattgccaggcgaggaaggaaacgttacgctttgcacttatcccgttccaaattacaagtgatttcaagaaaaaaaattcagctttcttggagagtcctaaattactacctccattctcaaatattattt

SEQ ID NO: 34171 - DNA, 4078 bp, Zea Mays
aaaaaactcgatggacagacgtcatagacagatttttcgttgctcgactggcccgacagatgagtccgtctcgacagtgaccggacctcttcgttagggtttcgcgcctcttctcaccgtctgcctactactagggatagacctccggcaaggcctccctcgcgccggcggcgtcagcagcggatatgggtgttccggcgttctaccgatggctggcggagaagtacccgatggtggtggtggacgtggtggaggaggagcccgtagagatcgagggcgtcaaggtgcccgtcgacacctccaagcccaaccccaacagcctcgagttcgacaacctctacctcgatatgaacggaatcatacacccctgcttccacccggaggacaggccctccccaacaacatttggtgaggttttccagtgcatgtttgattatatcgacagactattcgtcatggttcgcccccggaggcttttgtacatggccattgatggtgttgctcctcgtgctaagatgaaccagcagcgctcaagacgattcagggctgcaaaagatgcagctgatgcggctgcagaagaagaacggttacgtgaagagtttgaaagggaaggcagaaagcttcctccaaagcagcaatcacaaacatgtgattcaaatgttattactccagggactgaatttatggctgttttatcagttgctttgcagtattacatccatcgtagattgaattatgatcctggatggaaacaaattaaagttattttgtctgatgccaatgttcctggtgaaggggaacataaaatcatgtcatatattcgtggccaacggaatctgtctggttttaacccaaatacgcgccattgcctgtatggcctggacgcagatctgatcatgctagctttggcgacacatgaagtacacttctcaatactgagagaggtagtttatacacctggacagcaggataaatgcttcttgtgtggtcaggtgggacatctagcagcaaactgtgaaggaaaggtgaaaagaaaagctggggagtttgatgagaagggtggtgctattgttcccaagaagccctatcagttcttgaatatatggaccctgcgggaatatttagaatacgagttcagaatgccaaacccacctttcaagattgattttgaacgcattgttgatgatttcatcttcatgtgcttctttgttggcaacgattttcttccacatatgccgacgctagagatccgtgagggagctattaatttgctaatggcagtgtacaagaaggaatttccctcaatgggtggatatttaactgattcttgcacgcctgatctgagcagagttgagcacttcattcaagcagttggttcatatgaggacaaaatatttcagaaaagagcacgtttgcatcagcgtcaagcggaaaggataaaacgggaaaaagctcaagcaaagcggggtgatgatctggatccccatgttagggatgaccttattgtacctattcaacgttttcaagggtctcgcctagcctctggggctgtacctgtgccatatgagcagaatggatcccataaagacaataaagaaaggaatagtcgagctcggaaagctgcacgagtatcaacgtcaggttccagcattgcctcagccttagttgaagctgaaaatgacctcgaagcccaagaatgtgaaaacaaagaagaactgaagtcaatgcttaaagatgcacttcgcgagaaatctgatatttttaattctgacaatccagaggaggataaggtgaaacttggagaaccaggatggagggaaaggtactatgaagagaaatttggggcaagaacacccgagcagattgaagaaatacgcagagatgttgttctcaaatacacagaaggattgtgttgggtaatgcactactattatgaaggggtatgctcatggcaatggttctacccttatcattatgctccgtttgcttcggatctaagtggattgggccaacttaatattaaatttgaacttgggacaccattcaaaccttttgatcaacttatgggtgttttcccagctgcaagtgcccatgcgctaccgctacagtatcgacgattgatgaccgatccaaattcaccaataattgatttttatcctacagattttgaagtagatatgaatgggaagagatattcttggcaagggattgcaaaactaccgtttattgatgaagatcgtttgttggctgagataaaaaaagttgagcatactttgacgcctgaagaagcaaggagaaacagtatcatgtgtgatatgctttttgtgaatgggtcacatccactttcgccttatatctactctctcaacagcaaatttgggcatctgcctgacaaaaggagaaatgaaattaaagaaaaacttgatccttctgctaggttaactaagctcaatattgttgttgttcgacaaagtttaacacctgctattattttgtacagtggaggaatgaatggatacataacactttgcagtggggatccatgccctcctatctttaggtctcctgtggacgggctggaggatattatggacaatcaagtgatatgttcaatctacaatcttccagaccatcataagcacatagcccagccgccagttggtgttatcatgcccaagaagattgttgaagccggtgatctgaaaccacctccagtgctgtggcatgaagatagtggcaggcggcctcatgataatagcaacaggcaaaacccatctggtgccatatcaggccgtcaacttggagaggcagctcaccgacttgtcataaacagcttaaatgctcagggtagggggcaacatagtggcacatcaatgccatatcgaactataatgaatggcttgcatcatctggatgtagcgtcccctgtcagcaatcaaggcatgcgtccacaagtggggcagtctgccggacctcctggttggtatgttcctaggggtagtgtatcaaatggtcaaccaccagcttatgcatcatcaggatcaggtcattatcagtatgaaagttcggggcattcacaatatgaacaaggtaaccatggaaggcaacaatctcacccatatgcaagagatggcttccatgatacacgaggaagggttccacctgcatatgggtaccagcagagcaacatgtatccatcgggtcctggattgtatgggcaacctccatcagcatatcctggggttcatggtggaggctaccaaccccctccatatggcggaggccagcagtggcagcaacaatcatatagttcgtatgccgtgcgaggcccctacggaggcaggccaccacccacaagggctgattcagggtcacagcaaccacagaaccgttatggtgctttagacagaagtaacaaccggaggccttcatctggatacagaagataatagtttgtgacccagtttatgttataactcaaagtttgttatcagtaaagcttcgagtaactcagctaaagcataggcggaatagtctgctaagtcttgtgaccttcaagcagttagggggtggccatcaaagatattgggaggcaaaatttgtatgctagtgcagactttcaggtactagcggttttgatcgccattgaagcagctaggtttgcggcatctcagaggttttgtgaagcaagatttgtatactactgttatcaacgggccatcaggtactggtggctggtcgccattctttatctgtagctgccatttgtttagaagatgtcataaacggccctggggtttaaataggtcccattgagaatatttttgaaggacgtttactctgagacttgacaagttttgggggcattttgatatcagataaatgtatgcaggagtgcagttttgatgatgtgtgtattccaagtcattaattaaagtgtgacgtgtctattgccaggcgaggaaggaaacgttacgctttgcacttatcccgttccaaattacaagtgatttcaagaaaaaaaattcagctttcttggagagtcctaaattactacctccattctcaaatattattt

SEQ ID NO: 34172 - DNA, 2770 bp, Zea Mays
gcggtgatgcaaagcggggtgatgatctggatccccatgttagggatgaccttattgtacctattcaacgttttcaagggtctcgcctagcctctggggctgtacctgtgccatatgagcagaatggatcccataaagacaataaagaaaggaatagtcgagctcggaaagctgcacgagtatcaacgtcaggttccagcattgcctcagccttagttgaagctgaaaatgacctcgaagcccaagaatgtgaaaacaaagaagaactgaagtcaatgcttaaagatgcacttcgcgagaaatctgatatttttaattctgacaatccagaggaggataaggtgaaacttggagaaccaggatggagggaaaggtactatgaagagaaatttggggcaagaacacccgagcagattgaagaaatacgcagagatgttgttctcaaatacacagaaggattgtgttgggtaatgcactactattatgaaggggtatgctcatggcaatggtaatttagctgctcaagttagccaaatatatcaaattatgcagaggttctacccttatcattatgctccgtttgcttcggatctaagtggattgggccaacttaatattaaatttgaacttgggacaccattcaaaccttttgatcaacttatgggtgttttcccagctgcaagtgcccatgcgctaccgctacagtatcgacgattgatgaccgatccaaattcaccaataattgatttttatcctacagattttgaagtagatatgaatgggaagagatattcttggcaagggattgcaaaactaccgtttattgatgaagatcgtttgttggctgagataaaaaaagttgagcatactttgacgcctgaagaagcaaggagaaacagtatcatgtgtgatatgctttttgtgaatgggtcacatccactttcgccttatatctactctctcaacagcaaatttgggcatctgcctgacaaaaggagaaatgaaattaaagaaaaacttgatccttctgctaggttaactaagctcaatattgttgttgttcgacaagtaatattattttgttaaatgtacatgtattgatgtttctgtactgacactttcttttgttgtgtggaccgggggggggggggggggttagtaaaagagcattgaaccagtttgtctgctagttaaattgagaaaatgtggctgatttccacatgtgtggggatccatgccctcctatctttaggtctcctgtggacgggctggaggatattatggacaatcaagtgatatgttcaatctacaatcttccagaccatcataagcacatagcccagccgccagttggtgttatcatgcccaagaagattgttgaagccggtgatctgaaaccacctccagtgctgtggcatgaagatagtggcaggcggcctcatgataatagcaacaggcaaaacccatctggtgccatatcaggccgtcaacttggagaggcagctcaccgacttgtcataaacagcttaaatgctcagggtagggggcaacatagtggcacatcaatgccatatcgaactataatgaatggcttgcatcatctggatgtagcgtcccctgtcagcaatcaaggcatgcgtccacaagtggggcagtctgccggacctcctggttggtatgttcctaggggtagtgtatcaaatggtcaaccaccagcttatgcatcatcaggatcaggtcattatcagtatgaaagttcggggcattcacaatatgaacaaggtaaccatggaaggcaacaatctcacccatatgcaagagatggcttccatgatacacgaggaagggttccacctgcatatgggtaccagcagagcaacatgtatccatcgggtcctggattgtatgggcaacctccatcagcatatcctggggttcatggtggaggctaccaaccccctccatatggcggaggccagcagtggcagcaacaatcatatagttcgtatgccgtgcgaggcccctacggaggcaggccaccacccacaagggctgattcagggtcacagcaaccacagaaccgttatggtgctttagacagaagtaacaaccggaggccttcatctggatacagaagataatagtttgtgacccagtttatgttataactcaaagtttgttatcagtaaagcttcgagtaactcagctaaagcataggcggaatagtctgctaagtcttgtgaccttcaagcagttagggggtggccatcaaagatattgggaggcaaaatttgtatgctagtgcagactttcaggtactagcggttttgatcgccattgaagcagctaggtttgcggcatctcagaggttttgtgaagcaagatttgtatactactgttatcaacgggccatcaggtactggtggctggtcgccattctttatctgtagctgccatttgtttagaagatgtcataaacggccctggggtttaaataggtcccattgagaatatttttgaaggacgtttactctgagacttgacaagttttgggggcattttgatatcagataaatgtatgcaggagtgcagttttgatgatgtgtgtattccaagtcattaattaaagtgtgacgtgtctattgccaggcgaggaaggaaacgttacgctttgcacttatcccgttccaaattacaagtgatttcaagaaaaaaaattcagctttcttggagagtcctaaattactacctccattctcaaatattattt

SEQ ID NO: 34173 - DNA, 3473 bp, Zea Mays
cagtaagttccatgaccagttattccaactattctacgtatagctgaagcagccagaagagttcctgagggtagcatgatgccatccatggcggatcctactgtcgaggctccgaatgctgaagccaacaggaggcaataacctgcaggtgatagggacctgggaactccaagctgctcttaagcaatgtatgggggtgctctccggaggcagctcccgcatccagcgtttcccttcgtattatgctctgcgaacatttgaccgagcatgggagtgcaggaggtatcaccagcagataaaggaaccgggccagaatgatagagtagccatactggttcatctgctggctttgcataatacccgaacatggatggcaaatcagggaacatagtgcagagtctgcctgatacgctgtcatccctcatggggctcaacaagtacctcgcacccagaaccagctatatcgaatcggtgtctcacatcatcgaggagttgtcaccaaccaaaccgaagatgaaagtaatggttcacacggctcaaaatatttgttctgatgatacagattcagatgctgaagctgcaaaggttcaagaggaactggttttgctggatggtaaactaaagcagataacgctgcagaggaggcagtcactaaataactatttggatctgaaagggaatataagggtgttctgtcgtgtgaggccttttcaccatgaagaaaattatcaatccagaactctgtacaccctggatgagagtaatatattcctaaaagttgctgagaccaagataaagcaatacaagtttgacaaggttttcaaccaatgctcaacacaaggtgatgtatttgctgaagtggaaccagtgataaaatcagctttagatggctataatgtttgtatatttgcctatggtcagacaggtagtggaaaaacttataccatggcaagcctacagatctaggtgtcataccacgtgggattcaagcactgtttgatcgaacttcagagagcaacagaaggtttctgttcactttcagtatgctcgagatatatatgggaaatttgcgagacctgctagttccaagaggcaaggcacaaggttttaagaaggtaccaagcctttccattaaaacagatccagatggcggcatcgagattgaaaacctagtggcagttactgtcagtagttttcatgaagtgaaaagactatatgaagtggggacccactttagatcaacagcttccactatggctaattctacatcaagcagatctcactgtttgattcgtatttcattgacctcatttgacgcaccagagaggaaaagagcaagaaacaaattatggatgattgatctaggtggaagtgaaaggcttgtaaagacaaaggcaactgggaaaaggctcaaggaaggcaaagccataaatctgtcgctgtcagccctagcggatgtcatagatgcactacagaccaaaaaatcccacatcccttataggaatagcaagctcacacaaattcttaaagattctataggatgtgagtccaaaacgcttatgcttgttcatatccgtccaaatgaggatgatttgtgtgagagcatctgtaccttgggttttgcgacaagagtcagaagtattcgcctggaaaatgaagaaccacaagaagtaaaagcaagaaaggaacatttattaatggaattagaaaaggagatcagtgatctagaacaagaatgtgaaggtattgttagaaagattaagaagctcaaggagacaatggagcattttaaagggcatcagccatctgctgaagcaaattttgacatttcacatccatccagtgaagagctgaaaactgtcatgccaaagaatacaaaggattcaaagaatcggagagatgtttcttccaggttacccaggtttatgaagccaacagcgtctagccagcacaggatagacttaaataaacaaatacctgttagtaacaagacaaaaccaccagtgccaccaaagagaaggccttcctcagtttatgctgagtctgtaaggctgccagtaaatgctgcaacttggcagtcagaatgtagttctgaatgcagtatctccatgacaagtgacatgaactggataccaagtatacaagatgggacagaatgcagccaggatacatcagaatatgagaccaaacaagtgattttctcagaacatgagaaaccacctcagagtcaagtgatttcatttgaagaatcaggggagatgcaggataaaaccaaggaaatgggcatcatagacattgacagctggattcatcaacagatcattgaaaacactggcatatgtcagtgtcacactgaaaggacgctagatgttattgaagtaaatgaatatgaaacttacaattctaatactgcttcaccagttcagaaggaatttactaatggttccaaaccctcactggatgaagatagcaacctgaacctttgtccccccacgcaaaacacagaagatagcaaggaaaccagggctgttaatcaattcacaaaaacagaattatacactcctccattaaaagaactttgcggcagtgccaaaattaaggaacataagaatgaaaagcttgggcgtcatggaagttgcagaagatcactgcaggaagagctcggcaattgcaagccagagcagccagacaaggaaccaaaagctgatccaaacatgcaacctgaaattgaattccatgacaacaaacaccatataggtaagttgacaaaattcattcaagctcttcgaacagcatggattggtgctcttcttggactaggcaccatgaaccttggattagagcaagacttcttcaagagcttaacactctgatttaactagaacttcaccatttcaaaaggatttaacgaagctgtatacagtttcagtaagagtatctacttcaggaatcaatgggcactgtatatataaggctgcaatgaaatgtaagctgccaatatgccagtggcagatgaattgctagtctgaaatggtttctttggttataaatggatagtttcaagacaagtgggaaaatgggaagaaatgtgatatatgacaaattttgaattaacattatcaatttatcataaatgataaatgattgttacagtatgcagagaagctattgcaatatctgaactgagggagagttatttacatctccaggccatttcagtcgattgagcactatatatgccaaacataacatgtcacagcaatgactcttactatgatatctttcatatagcaacttttgagctaaagctgtaaagtagtggcgtattttcttccaaatatatgcaaaaggagaagcatgtagactggggtgccaaccataagtttatatcaagtcacgaggccctgcagctgattttcatacctgtaaggtccatatacttcaataaaattaaatcttttgttcaaaagtaa

SEQ ID NO: 34174 - DNA, 3435 bp, Zea Mays
cagtaagttccatgaccagttattccaactattctacgtatagctgaagcagccagaagagttcctgagggtagcatgatgccatccatggcggatcctactgtcgaggctccgaatgctgaagccaacaggaggcaataacctgcaggtgatagggacctgggaactccaagctgctcttaagcaatgtatgggggtgctctccggaggcagctcccgcatccagcgtttcccttcgtattatgctctgcgaacatttgaccgagcatgggagtgcaggaggtatcaccagcagataaaggaaccgggccagaatgatagagtagccatactggttcatctgctggctttgcataatacccgaacatggatggcaaatcagggaacatagtgcagagtctgcctgatacgctgtcatccctcatggggctcaacaagtacctcgcacccagaaccagctatatcgaatcggtgtctcacatcatcgaggagttgtcaccaaccaaaccgaagatgaaagtaatggttcacacggctcaaaatatttgttctgatgatacagattcagatgctgaagctgcaaaggttcaagaggaactggttttgctggatggtaaactaaagcagataacgctgcagaggaggcagtcactaaataactatttggatctgaaagggaatataagggtgttctgtcgtgtgaggccttttcaccatgaagaaaattatcaatccagaactctgtacaccctggatgagagtaatatattcctaaaagttgctgagaccaagataaagcaatacaagtttgacaaggttttcaaccaatgctcaacacaaggtgatgtatttgctgaagtggaaccagtgataaaatcagctttagatggctataatgtttgtatatttgcctatggtcagacaggtagtggaaaaacttataccatggcaagcctacagatctaggtgtcataccacgtgggattcaagcactgtttgatcgaacttcagagagcaacagaaggtttctgttcactttcagtatgctcgagatatatatgggaaatttgcgagacctgctagttccaagaggcaaggcacaaggttttaagaaggtaccaagcctttccattaaaacagatccagatggcggcatcgagattgaaaacctagtggcagttactgtcagtagttttcatgaagtgaaaagactatatgaagtggggacccactttagatcaacagcttccactatggctaattctacatcaagcagatctcactgtttgattcgtatttcattgacctcatttgacgcaccagagaggaaaagagcaagaaacaaattatggatgattgatctaggtggaagtgaaaggcttgtaaagacaaaggcaactgggaaaaggctcaaggaaggcaaagccataaatctgtcgctgtcagccctagcggatgtcatagatgcactacagaccaaaaaatcccacatcccttataggatgtgagtccaaaacgcttatgcttgttcatatccgtccaaatgaggatgatttgtgtgagagcatctgtaccttgggttttgcgacaagagtcagaagtattcgcctggaaaatgaagaaccacaagaagtaaaagcaagaaaggaacatttattaatggaattagaaaaggagatcagtgatctagaacaagaatgtgaaggtattgttagaaagattaagaagctcaaggagacaatggagcattttaaagggcatcagccatctgctgaagcaaattttgacatttcacatccatccagtgaagagctgaaaactgtcatgccaaagaatacaaaggattcaaagaatcggagagatgtttcttccaggttacccaggtttatgaagccaacagcgtctagccagcacaggatagacttaaataaacaaatacctgttagtaacaagacaaaaccaccagtgccaccaaagagaaggccttcctcagtttatgctgagtctgtaaggctgccagtaaatgctgcaacttggcagtcagaatgtagttctgaatgcagtatctccatgacaagtgacatgaactggataccaagtatacaagatgggacagaatgcagccaggatacatcagaatatgagaccaaacaagtgattttctcagaacatgagaaaccacctcagagtcaagtgatttcatttgaagaatcaggggagatgcaggataaaaccaaggaaatgggcatcatagacattgacagctggattcatcaacagatcattgaaaacactggcatatgtcagtgtcacactgaaaggacgctagatgttattgaagtaaatgaatatgaaacttacaattctaatactgcttcaccagttcagaaggaatttactaatggttccaaaccctcactggatgaagatagcaacctgaacctttgtccccccacgcaaaacacagaagatagcaaggaaaccagggctgttaatcaattcacaaaaacagaattatacactcctccattaaaagaactttgcggcagtgccaaaattaaggaacataagaatgaaaagcttgggcgtcatggaagttgcagaagatcactgcaggaagagctcggcaattgcaagccagagcagccagacaaggaaccaaaagctgatccaaacatgcaacctgaaattgaattccatgacaacaaacaccatataggtaagttgacaaaattcattcaagctcttcgaacagcatggattggtgctcttcttggactaggcaccatgaaccttggattagagcaagacttcttcaagagcttaacactctgatttaactagaacttcaccatttcaaaaggatttaacgaagctgtatacagtttcagtaagagtatctacttcaggaatcaatgggcactgtatatataaggctgcaatgaaatgtaagctgccaatatgccagtggcagatgaattgctagtctgaaatggtttctttggttataaatggatagtttcaagacaagtgggaaaatgggaagaaatgtgatatatgacaaattttgaattaacattatcaatttatcataaatgataaatgattgttacagtatgcagagaagctattgcaatatctgaactgagggagagttatttacatctccaggccatttcagtcgattgagcactatatatgccaaacataacatgtcacagcaatgactcttactatgatatctttcatatagcaacttttgagctaaagctgtaaagtagtggcgtattttcttccaaatatatgcaaaaggagaagcatgtagactggggtgccaaccataagtttatatcaagtcacgaggccctgcagctgattttcatacctgtaaggtccatatacttcaataaaattaaatcttttgttcaaaagtaa

SEQ ID NO: 34175 - DNA, 3506 bp, Zea Mays
cagtaagttccatgaccagttattccaactattctacgtatagctgaagcagccagaagagttcctgagggtagcatgatgccatccatggcggatcctactgtcgaggctccgaatgctgaagccaacaggaggcaataacctgcaggttgcatactctcatgtgctttgctctcagccccttcagttcactgcttttgtgtgggttggggactgtttcctctgacggggacacggccgcggcgatggatatgaggcacagaatccgcagtctttgaaggtgatagggacctgggaactccaagctgctcttaagcaatgtatgggggtgctctccggaggcagctcccgcatccagcgtttcccttcgtattatgctctgcgaacatttgaccgagcatgggagtgcagggaacatagtgcagagtctgcctgatacgctgtcatccctcatggggctcaacaagtacctcgcacccagaaccagctatatcgaatcggtgtctcacatcatcgaggagttgtcaccaaccaaaccgaagatgaaagtaatggttcacacggctcaaaatatttgttctgatgatacagattcagatgctgaagctgcaaaggttcaagaggaactggttttgctggatggtaaactaaagcagataacgctgcagaggaggcagtcactaaataactatttggatctgaaagggaatataagggtgttctgtcgtgtgaggccttttcaccatgaagaaaattatcaatccagaactctgtacaccctggatgagagtaatatattcctaaaagttgctgagaccaagataaagcaatacaagtttgacaaggttttcaaccaatgctcaacacaaggtgatgtatttgctgaagtggaaccagtgataaaatcagctttagatggctataatgtttgtatatttgcctatggtcagacaggtagtggaaaaacttataccatggaaggcaagcctacagatctaggtgtcataccacgtgggattcaagcactgtttgatcgaacttcagagagcaacagaaggtttctgttcactttcagtatgctcgagatatatatgggaaatttgcgagacctgctagttccaagaggcaaggcacaaggttttaagaaggtaccaagcctttccattaaaacagatccagatggcggcatcgagattgaaaacctagtggcagttactgtcagtagttttcatgaagtgaaaagactatatgaagtggggacccactttagatcaacagcttccactatggctaattctacatcaagcagatctcactgtttgattcgtatttcattgacctcatttgacgcaccagagaggaaaagagcaagaaacaaattatggatgattgatctaggtggaagtgaaaggcttgtaaagacaaaggcaactgggaaaaggctcaaggaaggcaaagccataaatctgtcgctgtcagccctagcggatgtcatagatgcactacagaccaaaaaatcccacatcccttataggaatagcaagctcacacaaattcttaaagattctataggatgtgagtccaaaacgcttatgcttgttcatatccgtccaaatgaggatgatttgtgtgagagcatctgtaccttgggttttgcgacaagagtcagaagtattcgcctggaaaatgaagaaccacaagaagtaaaagcaagaaaggaacatttattaatggaattagaaaaggagatcagtgatctagaacaagaatgtgaaggtattgttagaaagattaagaagctcaaggagacaatggagcattttaaagggcatcagccatctgctgaagcaaattttgacatttcacatccatccagtgaagagctgaaaactgtcatgccaaagaatacaaaggattcaaagaatcggagagatgtttcttccaggttacccaggtttatgaagccaacagcgtctagccagcacaggatagacttaaataaacaaatacctgttagtaacaagacaaaaccaccagtgccaccaaagagaaggccttcctcagtttatgctgagtctgtaaggctgccagtaaatgctgcaacttggcagtcagaatgtagttctgaatgcagtatctccatgacaagtgacatgaactggataccaagtatacaagatgggacagaatgcagccaggatacatcagaatatgagaccaaacaagtgattttctcagaacatgagaaaccacctcagagtcaagtgatttcatttgaagaatcaggggagatgcaggataaaaccaaggaaatgggcatcatagacattgacagctggattcatcaacagatcattgaaaacactggcatatgtcagtgtcacactgaaaggacgctagatgttattgaagtaaatgaatatgaaacttacaattctaatactgcttcaccagttcagaaggaatttactaatggttccaaaccctcactggatgaagatagcaacctgaacctttgtccccccacgcaaaacacagaagatagcaaggaaaccagggctgttaatcaattcacaaaaacagaattatacactcctccattaaaagaactttgcggcagtgccaaaattaaggaacataagaatgaaaagcttgggcgtcatggaagttgcagaagatcactgcaggaagagctcggcaattgcaagccagagcagccagacaaggaaccaaaagctgatccaaacatgcaacctgaaattgaattccatgacaacaaacaccatataggtaagttgacaaaattcattcaagctcttcgaacagcatggattggtgctcttcttggactaggcaccatgaaccttggattagagcaagacttcttcaagagcttaacactctgatttaactagaacttcaccatttcaaaaggatttaacgaagctgtatacagtttcagtaagagtatctacttcaggaatcaatgggcactgtatatataaggctgcaatgaaatgtaagctgccaatatgccagtggcagatgaattgctagtctgaaatggtttctttggttataaatggatagtttcaagacaagtgggaaaatgggaagaaatgtgatatatgacaaattttgaattaacattatcaatttatcataaatgataaatgattgttacagtatgcagagaagctattgcaatatctgaactgagggagagttatttacatctccaggccatttcagtcgattgagcactatatatgccaaacataacatgtcacagcaatgactcttactatgatatctttcatatagcaacttttgagctaaagctgtaaagtagtggcgtattttcttccaaatatatgcaaaaggagaagcatgtagactggggtgccaaccataagtttatatcaagtcacgaggccctgcagctgattttcatacctgtaaggtccatatacttcaataaaattaaatcttttgttcaaaagtaa

SEQ ID NO: 34176 - DNA, 3492 bp, Zea Mays
cagaatcctatgtatatagctcgttccctctttgtctttaaacatagccgaaacagtaagttccatgaccagttattccaactattctacgtatagctgaagcagccagaagagttcctgagggtagcatgatgccatccatggcggatcctactgtcgaggctccgaatgctgaagccaacaggaggcaataacctgcaggtgatagggacctgggaactccaagctgctcttaagcaatgtatgggggtgctctccggaggcagctcccgcatccagcgtttcccttcgtattatgctctgcgaacatttgaccgagcatgggagtgcaggaggtatcaccagcagataaaggaaccgggccagaatgatagagtagccatactggttcatctgctggctttgcataatacccgaacatggatggcaaatcagggaacatagtgcagagtctgcctgatacgctgtcatccctcatggggctcaacaagtacctcgcacccagaaccagctatatcgaatcggtgtctcacatcatcgaggagttgtcaccaaccaaaccgaagatgaaagtaatggttcacacggctcaaaatatttgttctgatgatacagattcagatgctgaagctgcaaaggttcaagaggaactggttttgctggatggtaaactaaagcagataacgctgcagaggaggcagtcactaaataactatttggatctgaaagggaatataagggtgttctgtcgtgtgaggccttttcaccatgaagaaaattatcaatccagaactctgtacaccctggatgagagtaatatattcctaaaagttgctgagaccaagataaagcaatacaagtttgacaaggttttcaaccaatgctcaacacaaggtgatgtatttgctgaagtggaaccagtgataaaatcagctttagatggctataatgtttgtatatttgcctatggtcagacaggtagtggaaaaacttataccatggaaggcaagcctacagatctaggtgtcataccacgtgggattcaagcactgtttgatcgaacttcagagagcaacagaaggtttctgttcactttcagtatgctcgagatatatatgggaaatttgcgagacctgctagttccaagaggcaaggcacaaggttttaagaaggtaccaagcctttccattaaaacagatccagatggcggcatcgagattgaaaacctagtggcagttactgtcagtagttttcatgaagtgaaaagactatatgaagtggggacccactttagatcaacagcttccactatggctaattctacatcaagcagatctcactgtttgattcgtatttcattgacctcatttgacgcaccagagaggaaaagagcaagaaacaaattatggatgattgatctaggtggaagtgaaaggcttgtaaagacaaaggcaactgggaaaaggctcaaggaaggcaaagccataaatctgtcgctgtcagccctagcggatgtcatagatgcactacagaccaaaaaatcccacatcccttataggatgtgagtccaaaacgcttatgcttgttcatatccgtccaaatgaggatgatttgtgtgagagcatctgtaccttgggttttgcgacaagagtcagaagtattcgcctggaaaatgaagaaccacaagaagtaaaagcaagaaaggaacatttattaatggaattagaaaaggagatcagtgatctagaacaagaatgtgaaggtattgttagaaagattaagaagctcaaggagacaatggagcattttaaagggcatcagccatctgctgaagcaaattttgacatttcacatccatccagtgaagagctgaaaactgtcatgccaaagaatacaaaggattcaaagaatcggagagatgtttcttccaggttacccaggtttatgaagccaacagcgtctagccagcacaggatagacttaaataaacaaatacctgttagtaacaagacaaaaccaccagtgccaccaaagagaaggccttcctcagtttatgctgagtctgtaaggctgccagtaaatgctgcaacttggcagtcagaatgtagttctgaatgcagtatctccatgacaagtgacatgaactggataccaagtatacaagatgggacagaatgcagccaggatacatcagaatatgagaccaaacaagtgattttctcagaacatgagaaaccacctcagagtcaagtgatttcatttgaagaatcaggggagatgcaggataaaaccaaggaaatgggcatcatagacattgacagctggattcatcaacagatcattgaaaacactggcatatgtcagtgtcacactgaaaggacgctagatgttattgaagtaaatgaatatgaaacttacaattctaatactgcttcaccagttcagaaggaatttactaatggttccaaaccctcactggatgaagatagcaacctgaacctttgtccccccacgcaaaacacagaagatagcaaggaaaccagggctgttaatcaattcacaaaaacagaattatacactcctccattaaaagaactttgcggcagtgccaaaattaaggaacataagaatgaaaagcttgggcgtcatggaagttgcagaagatcactgcaggaagagctcggcaattgcaagccagagcagccagacaaggaaccaaaagctgatccaaacatgcaacctgaaattgaattccatgacaacaaacaccatataggtaagttgacaaaattcattcaagctcttcgaacagcatggattggtgctcttcttggactaggcaccatgaaccttggattagagcaagacttcttcaagagcttaacactctgatttaactagaacttcaccatttcaaaaggatttaacgaagctgtatacagtttcagtaagagtatctacttcaggaatcaatgggcactgtatatataaggctgcaatgaaatgtaagctgccaatatgccagtggcagatgaattgctagtctgaaatggtttctttggttataaatggatagtttcaagacaagtgggaaaatgggaagaaatgtgatatatgacaaattttgaattaacattatcaatttatcataaatgataaatgattgttacagtatgcagagaagctattgcaatatctgaactgagggagagttatttacatctccaggccatttcagtcgattgagcactatatatgccaaacataacatgtcacagcaatgactcttactatgatatctttcatatagcaacttttgagctaaagctgtaaagtagtggcgtattttcttccaaatatatgcaaaaggagaagcatgtagactggggtgccaaccataagtttatatcaagtcacgaggccctgcagctgattttcatacctgtaaggtccatatacttcaataaaattaaatcttttgttcaaaagtaa

SEQ ID NO: 34177 - DNA, 3579 bp, Zea Mays
ctccctccatctctctcacactcacctctctctctctctctgacacaaacaccgagggagtagtgactactactgtcctcagacctgttgtggacttgtggcactgactggctgagtttgatctcccttgaccacagaatcctatctgaagcagccagaagagttcctgagggtagcatgatgccatccatggcggatcctactgtcgaggctccgaatgctgaagccaacaggaggcaataacctgcaggtgatagggacctgggaactccaagctgctcttaagcaatgtatgggggtgctctccggaggcagctcccgcatccagcgtttcccttcgtattatgctctgcgaacatttgaccgagcatgggagtgcaggaggtatcaccagcagataaaggaaccgggccagaatgatagagtagccatactggttcatctgctggctttgcataatacccgaacatggatggcaaatcagggaacatagtgcagagtctgcctgatacgctgtcatccctcatggggctcaacaagtacctcgcacccagaaccagctatatcgaatcggtgtctcacatcatcgaggagttgtcaccaaccaaaccgaagatgaaagtaatggttcacacggctcaaaatatttgttctgatgatacagattcagatgctgaagctgcaaaggttcaagaggaactggttttgctggatggtaaactaaagcagataacgctgcagaggaggcagtcactaaataactatttggatctgaaagggaatataagggtgttctgtcgtgtgaggccttttcaccatgaagaaaattatcaatccagaactctgtacaccctggatgagagtaatatattcctaaaagttgctgagaccaagataaagcaatacaagtttgacaaggttttcaaccaatgctcaacacaaggtgatgtatttgctgaagtggaaccagtgataaaatcagctttagatggctataatgtttgtatatttgcctatggtcagacaggtagtggaaaaacttataccatggaaggcaagcctacagatctaggtgtcataccacgtgggattcaagcactgtttgatcgaacttcagagagcaacagaaggtttctgttcactttcagtatgctcgagatatatatgggaaatttgcgagacctgctagttccaagaggcaaggcacaaggttttaagaaggtaccaagcctttccattaaaacagatccagatggcggcatcgagattgaaaacctagtggcagttactgtcagtagttttcatgaagtgaaaagactatatgaagtggggacccactttagatcaacagcttccactatggctaattctacatcaagcagatctcactgtttgattcgtatttcattgacctcatttgacgcaccagagaggaaaagagcaagaaacaaattatggatgattgatctaggtggaagtgaaaggcttgtaaagacaaaggcaactgggaaaaggctcaaggaaggcaaagccataaatctgtcgctgtcagccctagcggatgtcatagatgcactacagaccaaaaaatcccacatcccttataggaatagcaagctcacacaaattcttaaagattctataggatgtgagtccaaaacgcttatgcttgttcatatccgtccaaatgaggatgatttgtgtgagagcatctgtaccttgggttttgcgacaagagtcagaagtattcgcctggaaaatgaagaaccacaagaagtaaaagcaagaaaggaacatttattaatggaattagaaaaggagatcagtgatctagaacaagaatgtgaaggtattgttagaaagattaagaagctcaaggagacaatggagcattttaaagggcatcagccatctgctgaagcaaattttgacatttcacatccatccagtgaagagctgaaaactgtcatgccaaagaatacaaaggattcaaagaatcggagagatgtttcttccaggttacccaggtttatgaagccaacagcgtctagccagcacaggatagacttaaataaacaaatacctgttagtaacaagacaaaaccaccagtgccaccaaagagaaggccttcctcagtttatgctgagtctgtaaggctgccagtaaatgctgcaacttggcagtcagaatgtagttctgaatgcagtatctccatgacaagtgacatgaactggataccaagtatacaagatgggacagaatgcagccaggatacatcagaatatgagaccaaacaagtgattttctcagaacatgagaaaccacctcagagtcaagtgatttcatttgaagaatcaggggagatgcaggataaaaccaaggaaatgggcatcatagacattgacagctggattcatcaacagatcattgaaaacactggcatatgtcagtgtcacactgaaaggacgctagatgttattgaagtaaatgaatatgaaacttacaattctaatactgcttcaccagttcagaaggaatttactaatggttccaaaccctcactggatgaagatagcaacctgaacctttgtccccccacgcaaaacacagaagatagcaaggaaaccagggctgttaatcaattcacaaaaacagaattatacactcctccattaaaagaactttgcggcagtgccaaaattaaggaacataagaatgaaaagcttgggcgtcatggaagttgcagaagatcactgcaggaagagctcggcaattgcaagccagagcagccagacaaggaaccaaaagctgatccaaacatgcaacctgaaattgaattccatgacaacaaacaccatataggtaagttgacaaaattcattcaagctcttcgaacagcatggattggtgctcttcttggactaggcaccatgaaccttggattagagcaagacttcttcaagagcttaacactctgatttaactagaacttcaccatttcaaaaggatttaacgaagctgtatacagtttcagtaagagtatctacttcaggaatcaatgggcactgtatatataaggctgcaatgaaatgtaagctgccaatatgccagtggcagatgaattgctagtctgaaatggtttctttggttataaatggatagtttcaagacaagtgggaaaatgggaagaaatgtgatatatgacaaattttgaattaacattatcaatttatcataaatgataaatgattgttacagtatgcagagaagctattgcaatatctgaactgagggagagttatttacatctccaggccatttcagtcgattgagcactatatatgccaaacataacatgtcacagcaatgactcttactatgatatctttcatatagcaacttttgagctaaagctgtaaagtagtggcgtattttcttccaaatatatgcaaaaggagaagcatgtagactggggtgccaaccataagtttatatcaagtcacgaggccctgcagctgattttcatacctgtaaggtccatatacttcaataaaattaaatcttttgttcaaaagtaa

SEQ ID NO: 34178 - DNA, 1608 bp, Zea Mays
ggctgatttcatagtgaccattagtggaggcagcacaagctggatgcctttgtcctctgccgtgttactaaaagaaatgactggtcattagataatgataatgaggtgggcaacaggagctctcatctggaacaaccagatgctgctacatcagttgtcagcactgtaaagccagaagatgttgctgcctcagtcatctgtccagaagaatcgaaccatgcaactacaccaattggcagtgctgaactatctaatgatgttgctcaggcagctatcactcctgcagctatcactcctgattcaacaactccaaatggtggtaatgaactggaaacatggctgcaagaactgttggatccttcacctccatttaaccttgtagctgatactggttctgctgacgtgtgtccgactgaacaatatgctgaatcatcaaatttgcagaatcctggttccatggctccgaatatcagaccaggccatgctagccctatccaggatggaacagatgccacagactacctattcacagatgatcttcccgaggatctttacagtatgttgtatcctggtactgaccagttcaatgatagcatatttttggaacaaactggccaggaaggtaataacaatcagacaaactacatgatggggattggttcatatgttcttccaaacaactttgagaatgaaactccgaatgccgaattgcagttagatcatgaaaataacaagatggatatgtcaaatgaaaataatgacaccggaattacaatacgaaggcgcagagcaactgcgcctcccgctaacatttcactagcagctggcaagattaaaatgcaggttggaattaagaggatggttacgagtaattcagaatctatcaaccagactatgaagtttacagataacagtggtcgtcgtcttgatctcaggactgatgttgagcaccagaagaaaaatgcaaacaatgtcatttctgccaagcagtctgatgcagccaatcatgaagcccacagcaaccaaggttatctcgagggcttcaaaagatgttcatcagctggattcagggcatacatatttgttgccctttttgtggttggagttgctgctctagtgctgcattatcaccgctccaatgccaacctatgaatttgaatcatggaacatcagcatgcttgattgtagctctagtggtcagtggcagcattggcttcgtccttggagtagttcgctagctttgcttgcattggaaatggaatagaaatcgagttcctcagcttatctcactgggattactggaaatacatttttgcgaccactgattcccagttatctccactttttttttgtggtgctgtacatattaattttttttctctcttcttttgatcgtctagttgctaccaacgggtgcctatcgaaaatcgaaaaagaaaaaaagtgggaaaagggttggtcgtatgaacaaaaaagatgtagcttcagactgttactactatccttagctttgtaaatctgaaccatgtttgtacagtacactacatagtggagcggccactgcattgtctgcattctcttttattatagcatctttttgaacaagtg

SEQ ID NO: 34179 - DNA, 2153 bp, Zea Mays
ctggtgctggtgccctggtcggtgtgcggtgtttttgttgggcgtttatctgttctacgcgtccctggcgctcggggtgcgactgcgcggcgtgtgcggtggtgcggccacgatggtggtggattcgcttaggacattgtaaaatggaagtactgcgtgatatgcacctgccaccaggatttggattccatccttctgatatagaacttgtttctcactatctcaagaggaaaatacttggtcagaaaattgaatatgatcttataccagaggtggatatatacaagcatgaaccatgggatttacctgcaaagtgcaatcttccaatcaaggacaacaagtggcatttctttgcctctcgtgacaggaagtaccctactggctctaggtcaaacagagcaacactagctggttactggaaatcaactgggaaggaccgagccataaagctgaacaagctaactctaggaacaaaaaagacgttagtttttcatgaaggccgaccaccctctggcagacgcactgagtggattatgcatgagtactacatcgacgagaatggatgtaaagtcagccctgatatgaaggatgcctttgtcctctgccgtgttactaaaagaaatgactggtcattagataatgataatgaggtgggcaacaggagctctcatctggaacaaccagatgctgctacatcagttgtcagcactgtaaagccagaagatgttgctgcctcagtcatctgtccagaagaatcgaaccatgcaactacaccaattggcagtgctgaactatctaatgatgttgctcaggcagctatcactcctgcagctatcactcctgattcaacaactccaaatggtggtaatgaactggaaacatggctgcaagaactgttggatccttcacctccatttaaccttgtagctgatactggttctgctgacgtgtgtccgactgaacaatatgctgaatcatcaaatttgcagaatcctggttccatggctccgaatatcagaccaggccatgctagccctatccaggatggaacagatgccacagactacctattcacagatgatcttcccgaggatctttacagtatgttgtatcctggtactgaccagttcaatgatagcatatttttggaacaaactggccaggaaggtaataacaatcagacaaactacatgatggggattggttcatatgttcttccaaacaactttgagaatgaaactccgaatgccgaattgcagttagatcatgaaaataacaagatggatatgtcaaatgaaaataatgacaccggaattacaatacgaaggcgcagagcaactgcgcctcccgctaacatttcactagcagctggcaagattaaaatgcaggttggaattaagaggatggttacgagtaattcagaatctatcaaccagactatgaagtttacagataacagtggtcgtcgtcttgatctcaggactgatgttgagcaccagaagaaaaatgcaaacaatgtcatttctgccaagcagtctgatgcagccaatcatgaagcccacagcaaccaaggttatctcgagggcttcaaaagatgttcatcagctggattcagggcatacatatttgttgccctttttgtggttggagttgctgctctagtgctgcattatcaccgctccaatgccaacctatgaatttgaatcatggaacatcagcatgcttgattgtagctctagtggtcagtggcagcattggcttcgtccttggagtagttcgctagctttgcttgcattggaaatggaatagaaatcgagttcctcagcttatctcactgggattactggaaatacatttttgcgaccactgattcccagttatctccactttttttttgtggtgctgtacatattaattttttttctctcttcttttgatcgtctagttgctaccaacgggtgcctatcgaaaatcgaaaaagaaaaaaagtgggaaaagggttggtcgtatgaacaaaaaagatgtagcttcagactgttactactatccttagctttgtaaatctgaaccatgtttgtacagtacactacatagtggagcggccactgcattgtctgcattctcttttattatagcatctttttgaacaagtg

SEQ ID NO: 34180 - DNA, 1027 bp, Zea Mays
tcagccacttacacgagggcccgcctaccataggtcggttcacccatgctgactagggaaactagctatttccagaaggtctagtttgtatgaacttataagggactatggccaggcagcaaatgatctccgtaggttgattgctcttcttgagaaacaactgcaagaagatatgaccatgccagtagagaggtctgagagtattcgtaacaatctgaatcgagccaatcttcggttttcttctttggagcgggatgccagaaaaggggcttcattaaatatgtatttgatattaggaattgagtcttcttcctctgctgtggatataaagaaggcctaccgcaaagcagcactaagacatcatccagacaaagccagtaactttcttgtcagaagtgaaaatatcagtgatgctgtatggagagatataacaaatgaaatacgcagggatgctgattatttattcaaaataattgggaaggcatatgctatgctttcagaccctacaacgagaagggaatgataacctggaggtggagtgatagaaaagcagtgcacatgtaacatgagcagcgggagcaatgaaaatgatgacaggacctcttagtgagagcatttaatcatgaagttggtaccgcacaaagctaccatactggagaggtcctatgtgaaattttgtgtgctctcaccaacgatatgatgccactggtgttgtccaatacctaatcacaaatgtcagtcggaacatgtcccacttttctgactgagtgctaataccgttacccccggggagcagtggatctttgtgttcatgcctgatcactgtttcgtgttctctgatgttccatttggatatgcagattgcatgagtctgagcacccgtgcaaaaggctagtttttttgtttgtgaagttgatgtcaatatatcaggtgctgtgcatagtagcttggagcagttcgagtggaatcaacaagagtggatagtgtaaatagaggtacacgtttcttgtacaccccctcactccac

SEQ ID NO: 34181 - DNA, 1223 bp, Zea Mays
ctacccatgcattttcagcattctctttgccctgcgatgttgttatatatcatgctgctggcaatgaagcattccaatctggtaaatatttggaggctgtggaacattatactgctgctttgatgagcaatagcgagtccctacgctttttagcagtctgcttttgtaaccgtgcagcagcatatcaagcaatgggtcaaattttagatgcaattgcagattgttcactggctatagcccttgatgcagattatgctaaggctatttccagaaggtctagtttgtatgaacttataagggactatggccaggcagcaaatgatctccgtaggttgattgctcttcttgagaaacaactgcaagaagatatgaccatgccagtagagaggtctgagagtattcgtaacaatctgaatcgagccaatcttcggttttcttctttggagcgggatgccagaaaaggggcttcattaaatatgtatttgatattaggaattgagtcttcttcctctgctgtggatataaagaaggcctaccgcaaagcagcactaagacatcatccagacaaagccagtaactttcttgtcagaagtgaaaatatcagtgatgctgtatggagagatataacaaatgaaatacgcagggatgctgattatttattcaaaataattgggaaggcatatgctatgctttcagaccctacaacgagaagggaatgataacctggaggtggagtgatagaaaagcagtgcacatgtaacatgagcagcgggagcaatgaaaatgatgacaggacctcttagtgagagcatttaatcatgaagttggtaccgcacaaagctaccatactggagaggtcctatgtgaaattttgtgtgctctcaccaacgatatgatgccactggtgttgtccaatacctaatcacaaatgtcagtcggaacatgtcccacttttctgactgagtgctaataccgttacccccggggagcagtggatctttgtgttcatgcctgatcactgtttcgtgttctctgatgttccatttggatatgcagattgcatgagtctgagcacccgtgcaaaaggctagtttttttgtttgtgaagttgatgtcaatatatcaggtgctgtgcatagtagcttggagcagttcgagtggaatcaacaagagtggatagtgtaaatagaggtacacgtttcttgtacaccccctcactccac

SEQ ID NO: 34182 - DNA, 3651 bp, Zea Mays
cccgctcccccggcgtgccgccgctgtaattcttcctcctccacccagagctgcacgtccgcgccttgccaccgatggatcccgcgcccgatcagctctctatctccgcctctgccccgttccccaccatcccggctgcctcaagccccaggccccgcgccgcgaggacgcggcgccatgccgcgcccttccggtcggaccaccccaccgccgggagctggcgctccgggatcgatctcccgcgccgtccttcggcctccgccttttcccagcaggagcgttatccttccgtggcctcctggagcgcctctcgcgacgccaactttgtgttcgggagcggcgtggccggtgcgccggagatgaggaggagcttctcgtctggatccggtgaggcatcgttggctgaactttcgtacgcagttcacaggttcgcgttggacggttctggcaggccaagcgacattgacgctcccggaggagaaggtacgcttccagtgacagactccggtggtcgctttggggcccgtggatgcagttccactttgtatgagggcttctctctggattctattcaccatcagactgagcacctcgatgaagaacgtggagtcccgtctcaaaccatacaatgcgagagtgtggggatgcgatcattagcttcaccaacccgcactgatgagaatgctcccattgaatttgcaaagagaggggacagcttgcccattcaagattctgtggatcaaagtagaaattctggacatgatgctaatgcccaccatgatttctttgtttttggtggacatgctgggtccaatagcttcgctaccaatgcaactcaaactaataccagtaaggtacattcagctgataaagaaactgtaacatgtaactctgaacagctaaatacttcagtttctaaagatggaaattgcatcaagttcattttgcaggatgcaaagcatgtgtttggttcaagtgacaatgatcttccaggttcggaaccttgtgaaatttctaccacggtggaaacaccggatactataacctctagctttggatctgaagatgggatcgtgacggtttcttccataaaggtgccttgcaatattgaagtagtaccagcctcagaacttgttgaatgtcagccatttgatgagaaatctttcacctttgacgaccaaaatgtaccatataggaacaaaggaggggttaagggtatgggcatgaacagaggagcttttatgccaaataagtcctcagcaaaccaagcttcttttgaatcagtctcaagaagcgggcattgttctaaaaaagtgtctcctgaagaaaagttaaatttgaaagaagccagtagctctttgcaaacaacagaaagtgggcatgctgaagcagagtttacgtctgcagcaaatacggaacattctggtcaatccgatttcatattttctgcatcaactttccatcaaagcatgttgcacccgcaaagacgacataacaagaaaaaaagtggaggaatgggtaatcatgctagctctattcaaagtctcccttcatccgccattggactcgcatgctcagaagtctcaggaagtcagcaatgtgtggatttagctgccaagtggactgaatacaacaaaatagaacctaacagggttgcaatcagcagaggagccagatgctcaacatcagaaaactttggagaccatgacaattgtgaaacatggcgattaaggggaaaccaagcatatgcagaaggattgttaactaaggctgaagaatgctatacccatgggattgattctttttctccaaatgaagtttcaagaaaagcattaatgctgtgctacagcaatcgagcagctactcggatgtctctgggtaagatgagagatgccctatctgattgtcaagaagccattgatattgattccagttttctcaaggcacacgccagagccgccaactgcctacttgccctgggggatgttgaagaagcacaaaaggcttttgagatgtgtttaaagtctaatcatctatcaagcttggaccataaaattgtagaagaggcttctgatggtctacaaaaagctaagaaaatatctggtttaattagtcattctgaggagtatcttataaagaaagcatttgacaagatacccagtgccttacaaatgatctctgatgctttgtccataagtatttattcagataagttaatggagatgaaagcagaagcactgttactgttgcagcgatatgaagaagtaattcggttttgcgaagaaactctttatgtagcagaaagaaatagtgtgtgtttgtgtcttgacaagcagtcagaaagcaataacatggtcaacaatacttgctttgtgaaattgtggcgttatcatcttattgctaagtcatatttcttccttggaaagcttgaagaggctaaccagttcttaaagaagaatgatcaaataaaagtcatggggtgcaggtgtgggaatcaatctcaggactcaattttatcattctccatggctatctctgaactattgcggcttaaagctgctggcaatgaagcattccaatctggtaaatatttggaggctgtggaacattatactgctgctttgatgagcaatagcgagtccctacgctttttagcagtctgcttttgtaaccgtgcagcagcatatcaagcaatgggtcaaattttagatgcaattgcagattgttcactggctatagcccttgatgcagattatgctaaggctatttccagaaggtctagtttgtatgaacttataagggactatggccaggcagcaaatgatctccgtaggttgattgctcttcttgagaaacaactgcaagaagatatgaccatgccagtagagaggtctgagagtattcgtaacaatctgaatcgagccaatcttcggttttcttctttggagcgggatgccagaaaaggggcttcattaaatatgtatttgatattaggaattgagtcttcttcctctgctgtggatataaagaaggcctaccgcaaagcagcactaagacatcatccagacaaaggatgctgattatttattcaaaataattgggaaggcatatgctatgctttcagaccctacaacgagaagggaatgataacctggaggtggagtgatagaaaagcagtgcacatgtaacatgagcagcgggagcaatgaaaatgatgacaggacctcttagtgagagcatttaatcatgaagttggtaccgcacaaagctaccatactggagaggtcctatgtgaaattttgtgtgctctcaccaacgatatgatgccactggtgttgtccaatacctaatcacaaatgtcagtcggaacatgtcccacttttctgactgagtgctaataccgttacccccggggagcagtggatctttgtgttcatgcctgatcactgtttcgtgttctctgatgttccatttggatatgcagattgcatgagtctgagcacccgtgcaaaaggctagtttttttgtttgtgaagttgatgtcaatatatcaggtgctgtgcatagtagcttggagcagttcgagtggaatcaacaagagtggatagtgtaaatagaggtacacgtttcttgtacaccccctcactccac

SEQ ID NO: 34183 - DNA, 3737 bp, Zea Mays
gtcagcccagccggagaacgccgcccgctcccccggcgtgccgccgctgtaattcttcctcctccacccagagctgcacgtccgcgccttgccaccgatggatcccgcgcccgatcagctctctatctccgcctctgccccgttccccaccatcccggctgcctcaagccccaggccccgcgccgcgaggacgcggcgccatgccgcgcccttccggtcggaccaccccaccgccgggagctggcgctccgggatcgatctcccgcgccgtccttcggcctccgccttttcccagcaggagcgttatccttccgtggcctcctggagcgcctctcgcgacgccaactttgtgttcgggagcggcgtggccggtgcgccggagatgaggaggagcttctcgtctggatccggtgaggcatcgttggctgaactttcgtacgcagttcacaggttcgcgttggacggttctggcaggccaagcgacattgacgctcccggaggagaaggtacgcttccagtgacagactccggtggtcgctttggggcccgtggatgcagttccactttgtatgagggcttctctctggattctattcaccatcagactgagcacctcgatgaagaacgtggagtcccgtctcaaaccatacaatgcgagagtgtggggatgcgatcattagcttcaccaacccgcactgatgagaatgctcccattgaatttgcaaagagaggggacagcttgcccattcaagattctgtggatcaaagtagaaattctggacatgatgctaatgcccaccatgatttctttgtttttggtggacatgctgggtccaatagcttcgctaccaatgcaactcaaactaataccagtaaggtacattcagctgataaagaaactgtaacatgtaactctgaacagctaaatacttcagtttctaaagatggaaattgcatcaagttcattttgcaggatgcaaagcatgtgtttggttcaagtgacaatgatcttccaggttcggaaccttgtgaaatttctaccacggtggaaacaccggatactataacctctagctttggatctgaagatgggatcgtgacggtttcttccataaaggtgccttgcaatattgaagtagtaccagcctcagaacttgttgaatgtcagccatttgatgagaaatctttcacctttgacgaccaaaatgtaccatataggaacaaaggaggggttaagggtatgggcatgaacagaggagcttttatgccaaataagtcctcagcaaaccaagcttcttttgaatcagtctcaagaagcgggcattgttctaaaaaagtgtctcctgaagaaaagttaaatttgaaagaagccagtagctctttgcaaacaacagaaagtgggcatgctgaagcagagtttacgtctgcagcaaatacggaacattctggtcaatccgatttcatattttctgcatcaactttccatcaaagcatgttgcacccgcaaagacgacataacaagaaaaaaagtggaggaatgggtaatcatgctagctctattcaaagtctcccttcatccgccattggactcgcatgctcagaagtctcaggaagtcagcaatgtgtggatttagctgccaagtggactgaatacaacaaaatagaacctaacagggttgcaatcagcagaggagccagatgctcaacatcagaaaactttggagaccatgacaattgtgaaacatggcgattaaggggaaaccaagcatatgcagaaggattgttaactaaggctgaagaatgctatacccatgggattgattctttttctccaaatgaagtttcaagaaaagcattaatgctgtgctacagcaatcgagcagctactcggatgtctctgggtaagatgagagatgccctatctgattgtcaagaagccattgatattgattccagttttctcaaggcacacgccagagccgccaactgcctacttgccctgggggatgttgaagaagcacaaaaggcttttgagatgtgtttaaagtctaatcatctatcaagcttggaccataaaattgtagaagaggcttctgatggtctacaaaaagctaagaaaatatctggtttaattagtcattctgaggagtatcttataaagaaagcatttgacaagatacccagtgccttacaaatgatctctgatgctttgtccataagtatttattcagataagttaatggagatgaaagcagaagcactgttactgttgcagcgatatgaagaagtaattcggttttgcgaagaaactctttatgtagcagaaagaaatagtgtgtgtttgtgtcttgacaagcagtcagaaagcaataacatggtcaacaatacttgctttgtgaaattgtggcgttatcatcttattgctaagtcatatttcttccttggaaagcttgaagaggctaaccagttcttaaagaagaatgatcaaataaaagtcatggggtgcaggtgtgggaatcaatctcaggactcaattttatcattctccatggctatctctgaactattgcggcttaaagctgctggcaatgaagcattccaatctggtaaatatttggaggctgtggaacattatactgctgctttgatgagcaatagcgagtccctacgctttttagcagtctgcttttgtaaccgtgcagcagcatatcaagcaatgggtcaaattttagatgcaattgcagattgttcactggctatagcccttgatgcagattatgctaagaaggtctagtttgtatgaacttataagggactatggccaggcagcaaatgatctccgtaggttgattgctcttcttgagaaacaactgcaagaagatatgaccatgccagtagagaggtctgagagtattcgtaacaatctgaatcgagccaatcttcggttttcttctttggagcgggatgccagaaaaggggcttcattaaatatgtatttgatattaggaattgagtcttcttcctctgctgtggatataaagaaggcctaccgcaaagcagcactaagacatcatccagacaaagccagtaactttcttgtcagaagtgaaaatatcagtgatgctgtatggagagatataacaaatgaaatacgcagggatgctgattatttattcaaaataattgggaaggcatatgctatgctttcagaccctacaacgagaagggaatgataacctggaggtggagtgatagaaaagcagtgcacatgtaacatgagcagcgggagcaatgaaaatgatgacaggacctcttagtgagagcatttaatcatgaagttggtaccgcacaaagctaccatactggagaggtcctatgtgaaattttgtgtgctctcaccaacgatatgatgccactggtgttgtccaatacctaatcacaaatgtcagtcggaacatgtcccacttttctgactgagtgctaataccgttacccccggggagcagtggatctttgtgttcatgcctgatcactgtttcgtgttctctgatgttccatttggatatgcagattgcatgagtctgagcacccgtgcaaaaggctagtttttttgtttgtgaagttgatgtcaatatatcaggtgctgtgcatagtagcttggagcagttcgagtggaatcaacaagagtggatagtgtaaatagaggtacacgtttcttgtacaccccctcactccac

SEQ ID NO: 34184 - DNA, 3639 bp, Zea Mays
ccaccggtcagcccagccggagaacgccgcccgctcccccggcgtgccgccgctgtaattcttcctcctccacccagagctgcacgtccgcgccttgccaccgatggatcccgcgcccgatcagctctctatctccgcctctgccccgttccccaccatcccggctgcctcaagccccaggccccgcgccgcgaggacgcggcgccatgccgcgcccttccggtcggaccaccccaccgccgggagctggcgctccgggatcgatctcccgcgccgtccttcggcctccgccttttcccagcaggagcgttatccttccgtggcctcctggagcgcctctcgcgacgccaactttgtgttcgggagcggcgtggccggtgcgccggagatgaggaggagcttctcgtctggatccggtgaggcatcgttggctgaactttcgtacgcagttcacaggttcgcgttggacggttctggcaggccaagcgacattgacgctcccggaggagaaggtacgcttccagtgacagactccggtggtcgctttggggcccgtggatgcagttccactttgtatgagggcttctctctggattctattcaccatcagactgagcacctcgatgaagaacgtggagtcccgtctcaaaccatacaatgcgagagtgtggggatgcgatcattagcttcaccaacccgcactgatgagaatgctcccattgaatttgcaaagagaggggacagcttgcccattcaagattctgtggatcaaagtagaaattctggacatgatgctaatgcccaccatgatttctttgtttttggtggacatgctgggtccaatagcttcgctaccaatgcaactcaaactaataccagtaaggtacattcagctgataaagaaactgtaacatgtaactctgaacagctaaatacttcagtttctaaagatggaaattgcatcaagttcattttgcaggatgcaaagcatgtgtttggttcaagtgacaatgatcttccaggttcggaaccttgtgaaatttctaccacggtggaaacaccggatactataacctctagctttggatctgaagatgggatcgtgacggtttcttccataaaggtgccttgcaatattgaagtagtaccagcctcagaacttgttgaatgtcagccatttgatgagaaatctttcacctttgacgaccaaaatgtaccatataggaacaaaggaggggttaagggtatgggcatgaacagaggagcttttatgccaaataagtcctcagcaaaccaagcttcttttgaatcagtctcaagaagcgggcattgttctaaaaaagtgtctcctgaagaaaagttaaatttgaaagaagccagtagctctttgcaaacaacagaaagtgggcatgctgaagcagagtttacgtctgcagcaaatacggaacattctggtcaatccgatttcatattttctgcatcaactttccatcaaagcatgttgcacccgcaaagacgacataacaagaaaaaaagtggaggaatgggtaatcatgctagctctattcaaagtctcccttcatccgccattggactcgcatgctcagaagtctcaggaagtcagcaatgtgtggatttagctgccaagtggactgaatacaacaaaatagaacctaacagggttgcaatcagcagaggagccagatgctcaacatcagaaaactttggagaccatgacaattgtgaaacatggcgattaaggggaaaccaagcatatgcagaaggattgttaactaaggctgaagaatgctatacccatgggattgattctttttctccaaatgaagtttcaagaaaagcattaatgctgtgctacagcaatcgagcagctactcggatgtctctgggtaagatgagagatgccctatctgattgtcaagaagccattgatattgattccagttttctcaaggcacacgccagagccgccaactgcctacttgccctgggggatgttgaagaagcacaaaaggcttttgagatgtgtttaaagtctaatcatctatcaagcttggaccataaaattgtagaagaggcttctgatggtctacaaaaagctaagataagttaatggagatgaaagcagaagcactgttactgttgcagcgatatgaagaagtaattcggttttgcgaagaaactctttatgtagcagaaagaaatagtgtgtgtttgtgtcttgacaagcagtcagaaagcaataacatggtcaacaatacttgctttgtgaaattgtggcgttatcatcttattgctaagtcatatttcttccttggaaagcttgaagaggctaaccagttcttaaagaagaatgatcaaataaaagtcatggggtgcaggtgtgggaatcaatctcaggactcaattttatcattctccatggctatctctgaactattgcggcttaaagctgctggcaatgaagcattccaatctggtaaatatttggaggctgtggaacattatactgctgctttgatgagcaatagcgagtccctacgctttttagcagtctgcttttgtaaccgtgcagcagcatatcaagcaatgggtcaaattttagatgcaattgcagattgttcactggctatagcccttgatgcagattatgctaaggctatttccagaaggtctagtttgtatgaacttataagggactatggccaggcagcaaatgatctccgtaggttgattgctcttcttgagaaacaactgcaagaagatatgaccatgccagtagagaggtctgagagtattcgtaacaatctgaatcgagccaatcttcggttttcttctttggagcgggatgccagaaaaggggcttcattaaatatgtatttgatattaggaattgagtcttcttcctctgctgtggatataaagaaggcctaccgcaaagcagcactaagacatcatccagacaaagccagtaactttcttgtcagaagtgaaaatatcagtgatgctgtatggagagatataacaaatgaaatacgcagggatgctgattatttattcaaaataattgggaaggcatatgctatgctttcagaccctacaacgagaagggaatgataacctggaggtggagtgatagaaaagcagtgcacatgtaacatgagcagcgggagcaatgaaaatgatgacaggacctcttagtgagagcatttaatcatgaagttggtaccgcacaaagctaccatactggagaggtcctatgtgaaattttgtgtgctctcaccaacgatatgatgccactggtgttgtccaatacctaatcacaaatgtcagtcggaacatgtcccacttttctgactgagtgctaataccgttacccccggggagcagtggatctttgtgttcatgcctgatcactgtttcgtgttctctgatgttccatttggatatgcagattgcatgagtctgagcacccgtgcaaaaggctagtttttttgtttgtgaagttgatgtcaatatatcaggtgctgtgcatagtagcttggagcagttcgagtggaatcaacaagagtggatagtgtaaatagaggtacacgtttcttgtacaccccctcactccac

SEQ ID NO: 34185 - DNA, 3728 bp, Zea Mays
tcctacaatgacccaccggtcagcccagccggagaacgccgcccgctcccccggcgtgccgccgctgtaattcttcctcctccacccagagctgcacgtccgcgccttgccaccgatggatcccgcgcccgatcagctctctatctccgcctctgccccgttccccaccatcccggctgcctcaagccccaggccccgcgccgcgaggacgcggcgccatgccgcgcccttccggtcggaccaccccaccgccgggagctggcgctccgggatcgatctcccgcgccgtccttcggcctccgccttttcccagcaggagcgttatccttccgtggcctcctggagcgcctctcgcgacgccaactttgtgttcgggagcggcgtggccggtgcgccggagatgaggaggagcttctcgtctggatccggtgaggcatcgttggctgaactttcgtacgcagttcacaggttcgcgttggacggttctggcaggccaagcgacattgacgctcccggaggagaaggtacgcttccagtgacagactccggtggtcgctttggggcccgtggatgcagttccactttgtatgagggcttctctctggattctattcaccatcagactgagcacctcgatgaagaacgtggagtcccgtctcaaaccatacaatgcgagagtgtggggatgcgatcattagcttcaccaacccgcactgatgagaatgctcccattgaatttgcaaagagaggggacagcttgcccattcaagattctgtggatcaaagtagaaattctggacatgatgctaatgcccaccatgatttctttgtttttggtggacatgctgggtccaatagcttcgctaccaatgcaactcaaactaataccagtaaggtacattcagctgataaagaaactgtaacatgtaactctgaacagctaaatacttcagtttctaaagatggaaattgcatcaagttcattttgcaggatgcaaagcatgtgtttggttcaagtgacaatgatcttccaggttcggaaccttgtgaaatttctaccacggtggaaacaccggatactataacctctagctttggatctgaagatgggatcgtgacggtttcttccataaaggtgccttgcaatattgaagtagtaccagcctcagaacttgttgaatgtcagccatttgatgagaaatctttcacctttgacgaccaaaatgtaccatataggaacaaaggaggggttaagggtatgggcatgaacagaggagcttttatgccaaataagtcctcagcaaaccaagcttcttttgaatcagtctcaagaagcgggcattgttctaaaaaagtgtctcctgaagaaaagttaaatttgaaagaagccagtagctctttgcaaacaacagaaagtgggcatgctgaagcagagtttacgtctgcagcaaatacggaacattctggtcaatccgatttcatattttctgcatcaactttccatcaaagcatgttgcacccgcaaagacgacataacaagaaaaaaagtggaggaatgggtaatcatgctagctctattcaaagtctcccttcatccgccattggactcgcatgctcagaagtctcaggaagtcagcaatgtgtggatttagctgccaagtggactgaatacaacaaaatagaacctaacagggttgcaatcagcagaggagccagatgctcaacatcagaaaactttggagaccatgacaattgtgaaacatggcgattaaggggaaaccaagcatatgcagaaggattgttaactaaggctgaagaatgctatacccatgggattgattctttttctccaaatgaagtttcaagaaaagcattaatgctgtgctacagcaatcgagcagctactcggatgtctctgggtaagatgagagatgccctatctgattgtcaagaagccattgatattgattccagttttctcaaggcacacgccagagccgccaactgcctacttgccctgggggatgttgaagaagcacaaaaggcttttgagatgtgtttaaagtctaatcatctatcaagcttggaccataaaattgtagaagaggcttctgatggtctacaaaaagctaagaaaatatctggtttaattagtcattctgaggagtatcttataaagaaagcatttgacaagatacccagtgccttacaaatgatctctgatgctttgtccataagtatttattcagataagttaatggagatgaaagcagaagcactgttactggtctgtatttacgttgcagcgatatgaagaagtaattcggttttgcgaagaaactctttatgtagcagaaagaaatagtgtgtgtttgtgtcttgacaagcagtcagaaagcaataacatggtcaacaatacttgctttgtgaaattgtggcgttatcatcttattgctaagtcatatttcttccttggaaagcttgaagaggctaaccagttcttaaagaagaatgatcaaataaaagtcatggggtgcaggtgtgggaatcaatctcaggactcaattttatcattctccatggctatctctgaactattgcggcttaaagctgctggcaatgaagcattccaatctggtaaatatttggaggctgtggaacattatactgctgctttgatgagcaatagcgagtccctacgctttttagcagtctgcttttgtaaccgtgcagcagcatatcaagcaatgggtcaaattttagatgcaattgcagattgttcactggctatagcccttgatgcagattatgctaaggcagcaaatgatctccgtaggttgattgctcttcttgagaaacaactgcaagaagatatgaccatgccagtagagaggtctgagagtattcgtaacaatctgaatcgagccaatcttcggttttcttctttggagcgggatgccagaaaaggggcttcattaaatatgtatttgatattaggaattgagtcttcttcctctgctgtggatataaagaaggcctaccgcaaagcagcactaagacatcatccagacaaagccagtaactttcttgtcagaagtgaaaatatcagtgatgctgtatggagagatataacaaatgaaatacgcagggatgctgattatttattcaaaataattgggaaggcatatgctatgctttcagaccctacaacgagaagggaatgataacctggaggtggagtgatagaaaagcagtgcacatgtaacatgagcagcgggagcaatgaaaatgatgacaggacctcttagtgagagcatttaatcatgaagttggtaccgcacaaagctaccatactggagaggtcctatgtgaaattttgtgtgctctcaccaacgatatgatgccactggtgttgtccaatacctaatcacaaatgtcagtcggaacatgtcccacttttctgactgagtgctaataccgttacccccggggagcagtggatctttgtgttcatgcctgatcactgtttcgtgttctctgatgttccatttggatatgcagattgcatgagtctgagcacccgtgcaaaaggctagtttttttgtttgtgaagttgatgtcaatatatcaggtgctgtgcatagtagcttggagcagttcgagtggaatcaacaagagtggatagtgtaaatagaggtacacgtttcttgtacaccccctcactccac

SEQ ID NO: 34186 - DNA, 3563 bp, Zea Mays
gttcctacaatgacccaccggtcagcccagccggagaacgccgcccgctcccccggcgtgccgccgctgtaattcttcctcctccacccagagctgcacgtccgcgccttgccaccgatggatcccgcgcccgatcagctctctatctccgcctctgccccgttccccaccatcccggctgcctcaagccccaggccccgcgccgcgaggacgcggcgccatgccgcgcccttccggtcggaccaccccaccgccgggagctggcgctccgggatcgatctcccgcgccgtccttcggcctccgccttttcccagcaggagcgttatccttccgtggcctcctggagcgcctctcgcgacgccaactttgtgttcgggagcggcgtggccggtgcgccggagatgaggaggagcttctcgtctggatccggtgaggcatcgttggctgaactttcgtacgcagttcacaggttcgcgttggacggttctggcaggccaagcgacattgacgctcccggaggagaaggtacgcttccagtgacagactccggtggtcgctttggggcccgtggatgcagttccactttgtatgagggcttctctctggattctattcaccatcagactgagcacctcgatgaagaacgtggagtcccgtctcaaaccatacaatgcgagagtgtggggatgcgatcattagcttcaccaacccgcactgatgagaatgctcccattgaatttgcaaagagaggggacagcttgcccattcaagattctgtggatcaaagtagaaattctggacatgatgctaatgcccaccatgatttctttgtttttggtggacatgctgggtccaatagcttcgctaccaatgcaactcaaactaataccagtaaggtacattcagctgataaagaaactgtaacatgtaactctgaacagctaaatacttcagtttctaaagatggaaattgcatcaagttcattttgcaggatgcaaagcatgtgtttggttcaagtgacaatgatcttccaggttcggaaccttgtgaaatttctaccacggtggaaacaccggatactataacctctagctttggatctgaagatgggatcgtgacggtttcttccataaaggtgccttgcaatattgaagtagtaccagcctcagaacttgttgaatgtcagccatttgatgagaaatctttcacctttgacgaccaaaatgtaccatataggaacaaaggaggggttaagggtatgggcatgaacagaggagcttttatgccaaataagtcctcagcaaaccaagcttcttttgaatcagtctcaagaagcgggcattgttctaaaaaagtgtctcctgaagaaaagttaaatttgaaagaagccagtagctctttgcaaacaacagaaagtgggcatgctgaagcagagtttacgtctgcagcaaatacggaacattctggtcaatccgatttcatattttctgcatcaactttccatcaaagcatgttgcacccgcaaagacgacataacaagaaaaaaagtggaggaatgggtaatcatgctagctctattcaaagtctcccttcatccgccattggactcgcatgctcagaagtctcaggaagtcagcaatgtgtggatttagctgccaagtggactgaatacaacaaaatagaacctaacagggttgcaatcagcagaggagccagatgctcaacatcagaaaactttggagaccatgacaattgtgaaacatggcgattaaggggaaaccaagcatatgcagaaggattgttaactaaggctgaagaatgctatacccatgggattgattctttttctccaaatgaagtttcaagaaaagcattaatgctgtgctacagcaatcgagcagctactcggatgtctctgggtaagatgagagatgccctatctgattgtcaagaagccattgatattgattccagttttctcaaggcacacgccagagccgccaactgcctacttgccctgggggatgttgaagaagcacaaaaggcttttgagatgtgtttaaagtctaatcatctatcaagcttggaccataaaattgtagaagaggcttctgatggtctacaaaaagctaagaaaatatctggtttaattagtcattctgaggagtatcttataaagaaagcatttgacaagatacccagtgccttacaaatgatctctgatgctttgtccataagtatttattcagataagttaatggagatgaaagcagaagcactgttactgttgcagcgatatgaagaagtaattcggttttgcgaagaaactctttatgtagcagaaagaaatagtgtgtgtttgtgtcttgacaagcagtcagaaagcaataacatggtcaacaatacttgctttgtgaaattgtggcgttatcatcttattgctaagtcatatttcttccttggaaagcttgaagaggctaaccagttcttaaagaagaatgatcaaataaaagtcatggggtgcagaacactggctaggtgtgggaatcaatctcaggactcaattttatcattctccatggctatctctgaactattgcggcttaaagctgctggcaatgaagcattccaatctggtaaatatttggaggctgtggaacattatactgctgctttgatgagcaatagcgagtccctacgctttttagcagtctgcttttgtaaccgtgcagcagcatatcaagcaatgggtcaaattttagatgcaattgcagattgttcactggctatagcccttgatgcagattatgctaaggctatttccagaaggtctagtttgtatgaacttataagggactatggccaggcagcaaatgatctccgtaggttgattgctcttcttgagaaacaactgcaagaagatatgaccatgccagtagagaggtctgagagtattcgtaacaatctgaatcgagccaatcttcggttttcttctttggagcgggatgccagaaaaggggcttcattaaatatgtatttgatattagaagggaatgataacctggaggtggagtgatagaaaagcagtgcacatgtaacatgagcagcgggagcaatgaaaatgatgacaggacctcttagtgagagcatttaatcatgaagttggtaccgcacaaagctaccatactggagaggtcctatgtgaaattttgtgtgctctcaccaacgatatgatgccactggtgttgtccaatacctaatcacaaatgtcagtcggaacatgtcccacttttctgactgagtgctaataccgttacccccggggagcagtggatctttgtgttcatgcctgatcactgtttcgtgttctctgatgttccatttggatatgcagattgcatgagtctgagcacccgtgcaaaaggctagtttttttgtttgtgaagttgatgtcaatatatcaggtgctgtgcatagtagcttggagcagttcgagtggaatcaacaagagtggatagtgtaaatagaggtacacgtttcttgtacaccccctcactccac

SEQ ID NO: 34187 - DNA, 3711 bp, Zea Mays
ctctctctgttcctacaatgacccaccggtcagcccagccggagaacgccgcccgctcccccggcgtgccgccgctgtaattcttcctcctccacccagagctgcacgtccgcgccttgccaccgatggatcccgcgcccgatcagctctctatctccgcctctgccccgttccccaccatcccggctgcctcaagccccaggccccgcgccgcgaggacgcggcgccatgccgcgcccttccggtcggaccaccccaccgccgggagctggcgctccgggatcgatctcccgcgccgtccttcggcctccgccttttcccagcaggagcgttatccttccgtggcctcctggagcgcctctcgcgacgccaactttgtgttcgggagcggcgtggccggtgcgccggagatgaggaggagcttctcgtctggatccggtgaggcatcgttggctgaactttcgtacgcagttcacaggttcgcgttggacggttctggcaggccaagcgacattgacgctcccggaggagaaggtacgcttccagtgacagactccggtggtcgctttggggcccgtggatgcagttccactttgtatgagggcttctctctggattctattcaccatcagactgagcacctcgatgaagaacgtggagtcccgtctcaaaccatacaatgcgagagtgtggggatgcgatcattagcttcaccaacccgcactgatgagaatgctcccattgaatttgcaaagagaggggacagcttgcccattcaagattctgtggatcaaagtagaaattctggacatgatgctaatgcccaccatgatttctttgtttttggtggacatgctgggtccaatagcttcgctaccaatgcaactcaaactaataccagtaaggtacattcagctgataaagaaactgtaacatgtaactctgaacagctaaatacttcagtttctaaagatggaaattgcatcaagttcattttgcaggatgcaaagcatgtgtttggttcaagtgacaatgatcttccaggttcggaaccttgtgaaatttctaccacggtggaaacaccggatactataacctctagctttggatctgaagatgggatcgtgacggtttcttccataaaggtgccttgcaatattgaagtagtaccagcctcagaacttgttgaatgtcagccatttgatgagaaatctttcacctttgacgaccaaaatgtaccatataggaacaaaggaggggttaagggtatgggcatgaacagaggagcttttatgccaaataagtcctcagcaaaccaagcttcttttgaatcagtctcaagaagcgggcattgttctaaaaaagtgtctcctgaagaaaagttaaatttgaaagaagccagtagctctttgcaaacaacagaaagtgggcatgctgaagcagagtttacgtctgcagcaaatacggaacattctggtcaatccgatttcatattttctgcatcaactttccatcaaagcatgttgcacccgcaaagacgacataacaagaaaaaaagtggaggaatgggtaatcatgctagctctattcaaagtctcccttcatccgccattggactcgcatgctcagaagtctcaggaagtcagcaatgtgtggatttagctgccaagtggactgaatacaacaaaatagaacctaacagggttgcaatcagcagaggagccagatgctcaacatcagaaaactttggagaccatgacaattgtgaaacatggcgattaaggggaaaccaagcatatgcagaaggattgttaactaaggctgaagaatgctatacccatgggattgattctttttctccaaatgaagtttcaagaaaagcattaatgctgtgctacagcaatcgagcagctactcggatgtctctgggtaagatgagagatgccctatctgattgtcaagaagccattgatattgattccagttttctcaaggcacacgccagagccgccaactgcctacttgccctgggggatgttgaagaagcacaaaaggcttttgagatgtgtttaaagtctaatcatctatcaagcttggaccataaaattgtagaagaggcttctgatggtctacaaaaagctaagaaaatatctggtttaattagtcattctgaggagtatcttataaagaaagcatttgacaagatacccagtgccttacaaatgatctctgatgctttgtccataagtatttattcagataagttaatggagatgaaagcagaagcactgttactgttgcagcgatatgaagaagtaattcggttttgcgaagaaactctttatgtagcagaaagaaatagtgtgtgtttgtgtcttgacaagcagtcagaaagcaataacatggtcaacaatacttgctttgtgaaattgtggcgttatcatcttattgctaagtcatatttcttccttggaaagcttgaagaggctaaccagttcttaaagaagaatgatcaaataaaagtcatggggtgcaggtgtgggaatcaatctcaggactcaattttatcattctccatggctatctctgaactattgcggcttaaagctgctggcaatgaagcattccaatctggtaaatatttggaggctgtggaacattatactgctgctttgatgagcaatagcgagtccctacgctttttagcagtctgcttttgtaaccgtgcagcagcatatcaagcaatgggtcaaattttagatgcaattgcagattgttcactggctatagcccttgatgcagattatgctaaggctatttccagaaggtctagtttgtatgaacttataagggactatggccaggcagcaaatgatctccgtaggttgattgctcttcttgagaaacaactgcaagaagatatgaccatgccagtagagaggtctgagagtattcgtaacaatctgaatcgagccaatcttcggttttcttctttggagcgggatgccagaaaaggggcttcattaaatatgtatttgatatttagttatgccacaggccagtaactttcttgtcagaagtgaaaatatcagtgatgctgtatggagagatataacaaatgaaatacgcagggatgctgattatttattcaaaataattgggaaggcatatgctatgctttcagaccctacaacgagaagggaatgataacctggaggtggagtgatagaaaagcagtgcacatgtaacatgagcagcgggagcaatgaaaatgatgacaggacctcttagtgagagcatttaatcatgaagttggtaccgcacaaagctaccatactggagaggtcctatgtgaaattttgtgtgctctcaccaacgatatgatgccactggtgttgtccaatacctaatcacaaatgtcagtcggaacatgtcccacttttctgactgagtgctaataccgttacccccggggagcagtggatctttgtgttcatgcctgatcactgtttcgtgttctctgatgttccatttggatatgcagattgcatgagtctgagcacccgtgcaaaaggctagtttttttgtttgtgaagttgatgtcaatatatcaggtgctgtgcatagtagcttggagcagttcgagtggaatcaacaagagtggatagtgtaaatagaggtacacgtttcttgtacaccccctcactccac

SEQ ID NO: 34188 - DNA, 3706 bp, Zea Mays
cccacccaccgcttctctctctgttcctacaatgacccaccggtcagcccagccggagaacgccgcccgctcccccggcgtgccgccgctgtaattcttcctcctccacccagagctgcacgtccgcgccttgccaccgatggatcccgcgcccgatcagctctctatctccgcctctgccccgttccccaccatcccggctgcctcaagccccaggccccgcgccgcgaggacgcggcgccatgccgcgcccttccggtcggaccaccccaccgccgggagctggcgctccgggatcgatctcccgcgccgtccttcggcctccgccttttcccagcaggagcgttatccttccgtggcctcctggagcgcctctcgcgacgccaactttgtgttcgggagcggcgtggccggtgcgccggagatgaggaggagcttctcgtctggatccggtgaggcatcgttggctgaactttcgtacgcagttcacaggttcgcgttggacggttctggcaggccaagcgacattgacgctcccggaggagaaggtacgcttccagtgacagactccggtggtcgctttggggcccgtggatgcagttccactttgtatgagggcttctctctggattctattcaccatcagactgagcacctcgatgaagaacgtggagtcccgtctcaaaccatacaatgcgagagtgtggggatgcgatcattagcttcaccaacccgcactgatgagaatgctcccattgaatttgcaaagagaggggacagcttgcccattcaagattctgtggatcaaagtagaaattctggacatgatgctaatgcccaccatgatttctttgtttttggtggacatgctgggtccaatagcttcgctaccaatgcaactcaaactaataccagtaaggatgcaaagcatgtgtttggttcaagtgacaatgatcttccaggttcggaaccttgtgaaatttctaccacggtggaaacaccggatactataacctctagctttggatctgaagatgggatcgtgacggtttcttccataaaggtgccttgcaatattgaagtagtaccagcctcagaacttgttgaatgtcagccatttgatgagaaatctttcacctttgacgaccaaaatgtaccatataggaacaaaggaggggttaagggtatgggcatgaacagaggagcttttatgccaaataagtcctcagcaaaccaagcttcttttgaatcagtctcaagaagcgggcattgttctaaaaaagtgtctcctgaagaaaagttaaatttgaaagaagccagtagctctttgcaaacaacagaaagtgggcatgctgaagcagagtttacgtctgcagcaaatacggaacattctggtcaatccgatttcatattttctgcatcaactttccatcaaagcatgttgcacccgcaaagacgacataacaagaaaaaaagtggaggaatgggtaatcatgctagctctattcaaagtctcccttcatccgccattggactcgcatgctcagaagtctcaggaagtcagcaatgtgtggatttagctgccaagtggactgaatacaacaaaatagaacctaacagggttgcaatcagcagaggagccagatgctcaacatcagaaaactttggagaccatgacaattgtgaaacatggcgattaaggggaaaccaagcatatgcagaaggattgttaactaaggctgaagaatgctatacccatgggattgattctttttctccaaatgaagtttcaagaaaagcattaatgctgtgctacagcaatcgagcagctactcggatgtctctgggtaagatgagagatgccctatctgattgtcaagaagccattgatattgattccagttttctcaaggcacacgccagagccgccaactgcctacttgccctgggggatgttgaagaagcacaaaaggcttttgagatgtgtttaaagtctaatcatctatcaagcttggaccataaaattgtagaagaggcttctgatggtctacaaaaagctaagaaaatatctggtttaattagtcattctgaggagtatcttataaagaaagcatttgacaagatacccagtgccttacaaatgatctctgatgctttgtccataagtatttattcagataagttaatggagatgaaagcagaagcactgttactgttgcagcgatatgaagaagtaattcggttttgcgaagaaactctttatgtagcagaaagaaatagtgtgtgtttgtgtcttgacaagcagtcagaaagcaataacatggtcaacaatacttgctttgtgaaattgtggcgttatcatcttattgctaagtcatatttcttccttggaaagcttgaagaggctaaccagttcttaaagaagaatgatcaaataaaagtcatggggtgcagaacactggctaggtgtgggaatcaatctcaggactcaattttatcattctccatggctatctctgaactattgcggcttaaagctgctggcaatgaagcattccaatctggtaaatatttggaggctgtggaacattatactgctgctttgatgagcaatagcgagtccctacgctttttagcagtctgcttttgtaaccgtgcagcagcatatcaagcaatgggtcaaattttagatgcaattgcagattgttcactggctatagcccttgatgcagattatgctaaggctatttccagaaggtctagtttgtatgaacttataagggactatggccaggcagcaaatgatctccgtaggttgattgctcttcttgagaaacaactgcaagaagatatgaccatgccagtagagaggtctgagagtattcgtaacaatctgaatcgagccaatcttcggttttcttctttggagcgggatgccagaaaaggggcttcattaaatatgtatttgatattaggaattgagtcttcttcctctgctgtggatataaagaaggcctaccgcaaagcagcactaagacatcatccagacaaagccagtaactttcttgtcagaagtgaaaatatcagtgatgctgtatggagagatataacaaatgaaatacgcagggatgctgattatttattcaaaataattgggaaggcatatgctatgctttcagaccctacaacgagaagggaatgataacctggaggtggagtgatagaaaagcagtgcacatgtaacatgagcagcgggagcaatgaaaatgatgacaggacctcttagtgagagcatttaatcatgaagttggtaccgcacaaagctaccatactggagaggtcctatgtgaaattttgtgtgctctcaccaacgatatgatgccactggtgttgtccaatacctaatcacaaatgtcagtcggaacatgtcccacttttctgactgagtgctaataccgttacccccggggagcagtggatctttgtgttcatgcctgatcactgtttcgtgttctctgatgttccatttggatatgcagattgcatgagtctgagcacccgtgcaaaaggctagtttttttgtttgtgaagttgatgtcaatatatcaggtgctgtgcatagtagcttggagcagttcgagtggaatcaacaagagtggatagtgtaaatagaggtacacgtttcttgtacaccccctcactccac

SEQ ID NO: 34189 - DNA, 3837 bp, Zea Mays
caattctccccaccccgacggccccacccaccgcttctctctctgttcctacaatgacccaccggtcagcccagccggagaacgccgcccgctcccccggcgtgccgccgctgtaattcttcctcctccacccagagctgcacgtccgcgccttgccaccgatggatcccgcgcccgatcagctctctatctccgcctctgccccgttccccaccatcccggctgcctcaagccccaggccccgcgccgcgaggacgcggcgccatgccgcgcccttccggtcggaccaccccaccgccgggagctggcgctccgggatcgatctcccgcgccgtccttcggcctccgccttttcccagcaggagcgttatccttccgtggcctcctggagcgcctctcgcgacgccaactttgtgttcgggagcggcgtggccggtgcgccggagatgaggaggagcttctcgtctggatccggtgaggcatcgttggctgaactttcgtacgcagttcacaggttcgcgttggacggttctggcaggccaagcgacattgacgctcccggaggagaaggtacgcttccagtgacagactccggtggtcgctttggggcccgtggatgcagttccactttgtatgagggcttctctctggattctattcaccatcagactgagcacctcgatgaagaacgtggagtcccgtctcaaaccatacaatgcgagagtgtggggatgcgatcattagcttcaccaacccgcactgatgagaatgctcccattgaatttgcaaagagaggggacagcttgcccattcaagattctgtggatcaaagtagaaattctggacatgatgctaatgcccaccatgatttctttgtttttggtggacatgctgggtccaatagcttcgctaccaatgcaactcaaactaataccagtaaggtacattcagctgataaagaaactgtaacatgtaactctgaacagctaaatacttcagtttctaaagatggaaattgcatcaagttcattttgcaggatgcaaagcatgtgtttggttcaagtgacaatgatcttccaggttcggaaccttgtgaaatttctaccacggtggaaacaccggatactataacctctagctttggatctgaagatgggatcgtgacggtttcttccataaaggtgccttgcaatattgaagtagtaccagcctcagaacttgttgaatgtcagccatttgatgagaaatctttcacctttgacgaccaaaatgtaccatataggaacaaaggaggggttaagggtatgggcatgaacagaggagcttttatgccaaataagtcctcagcaaaccaagcttcttttgaatcagtctcaagaagcgggcattgttctaaaaaagtgtctcctgaagaaaagttaaatttgaaagaagccagtagctctttgcaaacaacagaaagtgggcatgctgaagcagagtttacgtctgcagcaaatacggaacattctggtcaatccgatttcatattttctgcatcaactttccatcaaagcatgttgcacccgcaaagacgacataacaagaaaaaaagtggaggaatgggtaatcatgctagctctattcaaagtctcccttcatccgccattggactcgcatgctcagaagtctcaggaagtcagcaatgtgtggatttagctgccaagtggactgaatacaacaaaatagaacctaacagggttgcaatcagcagaggagccagatgctcaacatcagaaaactttggagaccatgacaattgtgaaacatggcgattaaggggaaaccaagcatatgcagaaggattgttaactaaggctgaagaatgctatacccatgggattgattctttttctccaaatgaagtttcaagaaaagcattaatgctgtgctacagcaatcgagcagctactcggatgtctctgggtaagatgagagatgccctatctgattgtcaagaagccattgatattgattccagttttctcaaggcacacgccagagccgccaactgcctacttgccctgggggatgttgaagaagcacaaaaggcttttgagatgtgtttaaagtctaatcatctatcaagcttggaccataaaattgtagaagaggcttctgatggtctacaaaaagctaagaaaatatctggtttaattagtcattctgaggagtatcttataaagaaagcatttgacaagatacccagtgccttacaaatgatctctgatgctttgtccataagtatttattcagataagttaatggagatgaaagcagaagcactgttactggtctgtatttacgttgcagcgatatgaagaagtaattcggttttgcgaagaaactctttatgtagcagaaagaaatagtgtgtgtttgtgtcttgacaagcagtcagaaagcaataacatggtcaacaatacttgctttgtgaaattgtggcgttatcatcttattgctaagtcatatttcttccttggaaagcttgaagaggctaaccagttcttaaagaagaatgatcaaataaaagtcatggggtgcagaacactggctaggtgtgggaatcaatctcaggactcaattttatcattctccatggctatctctgaactattgcggcttaaagctgctggcaatgaagcattccaatctggtaaatatttggaggctgtggaacattatactgctgctttgatgagcaatagcgagtccctacgctttttagcagtctgcttttgtaaccgtgcagcagcatatcaagcaatgggtcaaattttagatgcaattgcagattgttcactggctatagcccttgatgcagattatgctaaggctatttccagaaggtctagtttgtatgaacttataagggactatggccaggcagcaaatgatctccgtaggttgattgctcttcttgagaaacaactgcaagaagatatgaccatgccagtagagaggtctgagagtattcgtaacaatctgaatcgagccaatcttcggttttcttctttggagcgggatgccagaaaaggggcttcattaaatatgtatttgatattaggaattgagtcttcttcctctgctgtggatataaagaaggcctaccgcaaagcagcactaagacatcatccagacaaagccagtaactttcttgtcagaagtgaaaatatcagtgatgctgtatggagagatataacaaatgaaatacgcagggatgctgattatttattcaaaataattgggaaggcatatgctatgctttcagaccctacaacgagaagggaatgataacctggaggtggagtgatagaaaagcagtgcacatgtaacatgagcagcgggagcaatgaaaatgatgacaggacctcttagtgagagcatttaatcatgaagttggtaccgcacaaagctaccatactggagaggtcctatgtgaaattttgtgtgctctcaccaacgatatgatgccactggtgttgtccaatacctaatcacaaatgtcagtcggaacatgtcccacttttctgactgagtgctaataccgttacccccggggagcagtggatctttgtgttcatgcctgatcactgtttcgtgttctctgatgttccatttggatatgcagattgcatgagtctgagcacccgtgcaaaaggctagtttttttgtttgtgaagttgatgtcaatatatcaggtgctgtgcatagtagcttggagcagttcgagtggaatcaacaagagtggatagtgtaaatagaggtacacgtttcttgtacaccccctcactccac

SEQ ID NO: 34190 - DNA, 3730 bp, Zea Mays
atcaattctccccaccccgacggccccacccaccgcttctctctctgttcctacaatgacccaccggtcagcccagccggagaacgccgcccgctcccccggcgtgccgccgctgtaattcttcctcctccacccagagctgcacgtccgcgccttgccaccgatggatcccgcgcccgatcagctctctatctccgcctctgccccgttccccaccatcccggctgcctcaagccccaggccccgcgccgcgaggacgcggcgccatgccgcgcccttccggtcggaccaccccaccgccgggagctggcgctccgggatcgatctcccgcgccgtccttcggcctccgccttttcccagcaggagcgttatccttccgtggcctcctggagcgcctctcgcgacgccaactttgtgttcgggagcggcgtggccggtgcgccggagatgaggaggagcttctcgtctggatccggtgaggcatcgttggctgaactttcgtacgcagttcacaggttcgcgttggacggttctggcaggccaagcgacattgacgctcccggaggagaaggtacgcttccagtgacagactccggtggtcgctttggggcccgtggatgcagttccactttgtatgagggcttctctctggattctattcaccatcagactgagcacctcgatgaagaacgtggagtcccgtctcaaaccatacaatgcgagagtgtggggatgcgatcattagcttcaccaacccgcactgatgagaatgctcccattgaatttgcaaagagaggggacagcttgcccattcaagattctgtggatcaaagtagaaattctggacatgatgctaatgcccaccatgatttctttgtttttggtggacatgctgggtccaatagcttcgctaccaatgcaactcaaactaataccagtaagttcattttgcaggatgcaaagcatgtgtttggttcaagtgacaatgatcttccaggttcggaaccttgtgaaatttctaccacggtggaaacaccggatactataacctctagctttggatctgaagatgggatcgtgacggtttcttccataaaggtgccttgcaatattgaagtagtaccagcctcagaacttgttgaatgtcagccatttgatgagaaatctttcacctttgacgaccaaaatgtaccatataggaacaaaggaggggttaagggtatgggcatgaacagaggagcttttatgccaaataagtcctcagcaaaccaagcttcttttgaatcagtctcaagaagcgggcattgttctaaaaaagtgtctcctgaagaaaagttaaatttgaaagaagccagtagctctttgcaaacaacagaaagtgggcatgctgaagcagagtttacgtctgcagcaaatacggaacattctggtcaatccgatttcatattttctgcatcaactttccatcaaagcatgttgcacccgcaaagacgacataacaagaaaaaaagtggaggaatgggtaatcatgctagctctattcaaagtctcccttcatccgccattggactcgcatgctcagaagtctcaggaagtcagcaatgtgtggatttagctgccaagtggactgaatacaacaaaatagaacctaacagggttgcaatcagcagaggagccagatgctcaacatcagaaaactttggagaccatgacaattgtgaaacatggcgattaaggggaaaccaagcatatgcagaaggattgttaactaaggctgaagaatgctatacccatgggattgattctttttctccaaatgaagtttcaagaaaagcattaatgctgtgctacagcaatcgagcagctactcggatgtctctgggtaagatgagagatgccctatctgattgtcaagaagccattgatattgattccagttttctcaaggcacacgccagagccgccaactgcctacttgccctgggggatgttgaagaagcacaaaaggcttttgagatgtgtttaaagtctaatcatctatcaagcttggaccataaaattgtagaagaggcttctgatggtctacaaaaagctaagaaaatatctggtttaattagtcattctgaggagtatcttataaagaaagcatttgacaagatacccagtgccttacaaatgatctctgatgctttgtccataagtatttattcagataagttaatggagatgaaagcagaagcactgttactgttgcagcgatatgaagaagtaattcggttttgcgaagaaactctttatgtagcagaaagaaatagtgtgtgtttgtgtcttgacaagcagtcagaaagcaataacatggtcaacaatacttgctttgtgaaattgtggcgttatcatcttattgctaagtcatatttcttccttggaaagcttgaagaggctaaccagttcttaaagaagaatgatcaaataaaagtcatggggtgcaggtgtgggaatcaatctcaggactcaattttatcattctccatggctatctctgaactattgcggcttaaagctgctggcaatgaagcattccaatctggtaaatatttggaggctgtggaacattatactgctgctttgatgagcaatagcgagtccctacgctttttagcagtctgcttttgtaaccgtgcagcagcatatcaagcaatgggtcaaattttagatgcaattgcagattgttcactggctatagcccttgatgcagattatgctaaggctatttccagaaggtctagtttgtatgaacttataagggactatggccaggcagcaaatgatctccgtaggttgattgctcttcttgagaaacaactgcaagaagatatgaccatgccagtagagaggtctgagagtattcgtaacaatctgaatcgagccaatcttcggttttcttctttggagcgggatgccagaaaaggggcttcattaaatatgtatttgatattaggaattgagtcttcttcctctgctgtggatataaagaaggcctaccgcaaagcagcactaagacatcatccagacaaagccagtaactttcttgtcagaagtgaaaatatcagtgatgctgtatggagagatataacaaatgaaatacgcagggatgctgattatttattcaaaataattgggaaggcatatgctatgctttcagaccctacaacgagaagggaatgataacctggaggtggagtgatagaaaagcagtgcacatgtaacatgagcagcgggagcaatgaaaatgatgacaggacctcttagtgagagcatttaatcatgaagttggtaccgcacaaagctaccatactggagaggtcctatgtgaaattttgtgtgctctcaccaacgatatgatgccactggtgttgtccaatacctaatcacaaatgtcagtcggaacatgtcccacttttctgactgagtgctaataccgttacccccggggagcagtggatctttgtgttcatgcctgatcactgtttcgtgttctctgatgttccatttggatatgcagattgcatgagtctgagcacccgtgcaaaaggctagtttttttgtttgtgaagttgatgtcaatatatcaggtgctgtgcatagtagcttggagcagttcgagtggaatcaacaagagtggatagtgtaaatagaggtacacgtttcttgtacaccccctcactccac

SEQ ID NO: 34191 - DNA, 3769 bp, Zea Mays
atcaattctccccaccccgacggccccacccaccgcttctctctctgttcctacaatgacccaccggtcagcccagccggagaacgccgcccgctcccccggcgtgccgccgctgtaattcttcctcctccacccagagctgcacgtccgcgccttgccaccgatggatcccgcgcccgatcagctctctatctccgcctctgccccgttccccaccatcccggctgcctcaagccccaggccccgcgccgcgaggacgcggcgccatgccgcgcccttccggtcggaccaccccaccgccgggagctggcgctccgggatcgatctcccgcgccgtccttcggcctccgccttttcccagcaggagcgttatccttccgtggcctcctggagcgcctctcgcgacgccaactttgtgttcgggagcggcgtggccggtgcgccggagatgaggaggagcttctcgtctggatccggtgaggcatcgttggctgaactttcgtacgcagttcacaggttcgcgttggacggttctggcaggccaagcgacattgacgctcccggaggagaaggtacgcttccagtgacagactccggtggtcgctttggggcccgtggatgcagttccactttgtatgagggcttctctctggattctattcaccatcagactgagcacctcgatgaagaacgtggagtcccgtctcaaaccatacaatgcgagagtgtggggatgcgatcattagcttcaccaacccgcactgatgagaatgctcccattgaatttgcaaagagaggggacagcttgcccattcaagattctgtggatcaaagtagaaattctggacatgatgctaatgcccaccatgatttctttgtttttggtggacatgctgggtccaatagcttcgctaccaatgcaactcaaactaataccagtaagctaaatacttcagtttctaaagatggaaattgcatcaagttcattttgcaggatgcaaagcatgtgtttggttcaagtgacaatgatcttccaggttcggaaccttgtgaaatttctaccacggtggaaacaccggatactataacctctagctttggatctgaagatgggatcgtgacggtttcttccataaaggtgccttgcaatattgaagtagtaccagcctcagaacttgttgaatgtcagccatttgatgagaaatctttcacctttgacgaccaaaatgtaccatataggaacaaaggaggggttaagggtatgggcatgaacagaggagcttttatgccaaataagtcctcagcaaaccaagcttcttttgaatcagtctcaagaagcgggcattgttctaaaaaagtgtctcctgaagaaaagttaaatttgaaagaagccagtagctctttgcaaacaacagaaagtgggcatgctgaagcagagtttacgtctgcagcaaatacggaacattctggtcaatccgatttcatattttctgcatcaactttccatcaaagcatgttgcacccgcaaagacgacataacaagaaaaaaagtggaggaatgggtaatcatgctagctctattcaaagtctcccttcatccgccattggactcgcatgctcagaagtctcaggaagtcagcaatgtgtggatttagctgccaagtggactgaatacaacaaaatagaacctaacagggttgcaatcagcagaggagccagatgctcaacatcagaaaactttggagaccatgacaattgtgaaacatggcgattaaggggaaaccaagcatatgcagaaggattgttaactaaggctgaagaatgctatacccatgggattgattctttttctccaaatgaagtttcaagaaaagcattaatgctgtgctacagcaatcgagcagctactcggatgtctctgggtaagatgagagatgccctatctgattgtcaagaagccattgatattgattccagttttctcaaggcacacgccagagccgccaactgcctacttgccctgggggatgttgaagaagcacaaaaggcttttgagatgtgtttaaagtctaatcatctatcaagcttggaccataaaattgtagaagaggcttctgatggtctacaaaaagctaagaaaatatctggtttaattagtcattctgaggagtatcttataaagaaagcatttgacaagatacccagtgccttacaaatgatctctgatgctttgtccataagtatttattcagataagttaatggagatgaaagcagaagcactgttactgttgcagcgatatgaagaagtaattcggttttgcgaagaaactctttatgtagcagaaagaaatagtgtgtgtttgtgtcttgacaagcagtcagaaagcaataacatggtcaacaatacttgctttgtgaaattgtggcgttatcatcttattgctaagtcatatttcttccttggaaagcttgaagaggctaaccagttcttaaagaagaatgatcaaataaaagtcatggggtgcaggtgtgggaatcaatctcaggactcaattttatcattctccatggctatctctgaactattgcggcttaaagctgctggcaatgaagcattccaatctggtaaatatttggaggctgtggaacattatactgctgctttgatgagcaatagcgagtccctacgctttttagcagtctgcttttgtaaccgtgcagcagcatatcaagcaatgggtcaaattttagatgcaattgcagattgttcactggctatagcccttgatgcagattatgctaaggctatttccagaaggtctagtttgtatgaacttataagggactatggccaggcagcaaatgatctccgtaggttgattgctcttcttgagaaacaactgcaagaagatatgaccatgccagtagagaggtctgagagtattcgtaacaatctgaatcgagccaatcttcggttttcttctttggagcgggatgccagaaaaggggcttcattaaatatgtatttgatattaggaattgagtcttcttcctctgctgtggatataaagaaggcctaccgcaaagcagcactaagacatcatccagacaaagccagtaactttcttgtcagaagtgaaaatatcagtgatgctgtatggagagatataacaaatgaaatacgcagggatgctgattatttattcaaaataattgggaaggcatatgctatgctttcagaccctacaacgagaagggaatgataacctggaggtggagtgatagaaaagcagtgcacatgtaacatgagcagcgggagcaatgaaaatgatgacaggacctcttagtgagagcatttaatcatgaagttggtaccgcacaaagctaccatactggagaggtcctatgtgaaattttgtgtgctctcaccaacgatatgatgccactggtgttgtccaatacctaatcacaaatgtcagtcggaacatgtcccacttttctgactgagtgctaataccgttacccccggggagcagtggatctttgtgttcatgcctgatcactgtttcgtgttctctgatgttccatttggatatgcagattgcatgagtctgagcacccgtgcaaaaggctagtttttttgtttgtgaagttgatgtcaatatatcaggtgctgtgcatagtagcttggagcagttcgagtggaatcaacaagagtggatagtgtaaatagaggtacacgtttcttgtacaccccctcactccac

SEQ ID NO: 34192 - DNA, 3718 bp, Zea Mays
atcaattctccccaccccgacggccccacccaccgcttctctctctgttcctacaatgacccaccggtcagcccagccggagaacgccgcccgctcccccggcgtgccgccgctgtaattcttcctcctccacccagagctgcacgtccgcgccttgccaccgatggatcccgcgcccgatcagctctctatctccgcctctgccccgttccccaccatcccggctgcctcaagccccaggccccgcgccgcgaggacgcggcgccatgccgcgcccttccggtcggaccaccccaccgccgggagctggcgctccgggatcgatctcccgcgccgtccttcggcctccgccttttcccagcaggagcgttatccttccgtggcctcctggagcgcctctcgcgacgccaactttgtgttcgggagcggcgtggccggtgcgccggagatgaggaggagcttctcgtctggatccggtgaggcatcgttggctgaactttcgtacgcagttcacaggttcgcgttggacggttctggcaggccaagcgacattgacgctcccggaggagaaggtacgcttccagtgacagactccggtggtcgctttggggcccgtggatgcagttccactttgtatgagggcttctctctggattctattcaccatcagactgagcacctcgatgaagaacgtggagtcccgtctcaaaccatacaatgcgagagtgtggggatgcgatcattagcttcaccaacccgcactgatgagaatgctcccattgaatttgcaaagagaggggacagcttgcccattcaagattctgtggatcaaagtagaaattctggacatgatgctaatgcccaccatgatttctttgtttttggtggacatgctgggtccaatagcttcgctaccaatgcaactcaaactaataccagtaaggatgcaaagcatgtgtttggttcaagtgacaatgatcttccaggttcggaaccttgtgaaatttctaccacggtggaaacaccggatactataacctctagctttggatctgaagatgggatcgtgacggtttcttccataaaggtgccttgcaatattgaagtagtaccagcctcagaacttgttgaatgtcagccatttgatgagaaatctttcacctttgacgaccaaaatgtaccatataggaacaaaggaggggttaagggtatgggcatgaacagaggagcttttatgccaaataagtcctcagcaaaccaagcttcttttgaatcagtctcaagaagcgggcattgttctaaaaaagtgtctcctgaagaaaagttaaatttgaaagaagccagtagctctttgcaaacaacagaaagtgggcatgctgaagcagagtttacgtctgcagcaaatacggaacattctggtcaatccgatttcatattttctgcatcaactttccatcaaagcatgttgcacccgcaaagacgacataacaagaaaaaaagtggaggaatgggtaatcatgctagctctattcaaagtctcccttcatccgccattggactcgcatgctcagaagtctcaggaagtcagcaatgtgtggatttagctgccaagtggactgaatacaacaaaatagaacctaacagggttgcaatcagcagaggagccagatgctcaacatcagaaaactttggagaccatgacaattgtgaaacatggcgattaaggggaaaccaagcatatgcagaaggattgttaactaaggctgaagaatgctatacccatgggattgattctttttctccaaatgaagtttcaagaaaagcattaatgctgtgctacagcaatcgagcagctactcggatgtctctgggtaagatgagagatgccctatctgattgtcaagaagccattgatattgattccagttttctcaaggcacacgccagagccgccaactgcctacttgccctgggggatgttgaagaagcacaaaaggcttttgagatgtgtttaaagtctaatcatctatcaagcttggaccataaaattgtagaagaggcttctgatggtctacaaaaagctaagaaaatatctggtttaattagtcattctgaggagtatcttataaagaaagcatttgacaagatacccagtgccttacaaatgatctctgatgctttgtccataagtatttattcagataagttaatggagatgaaagcagaagcactgttactgttgcagcgatatgaagaagtaattcggttttgcgaagaaactctttatgtagcagaaagaaatagtgtgtgtttgtgtcttgacaagcagtcagaaagcaataacatggtcaacaatacttgctttgtgaaattgtggcgttatcatcttattgctaagtcatatttcttccttggaaagcttgaagaggctaaccagttcttaaagaagaatgatcaaataaaagtcatggggtgcaggtgtgggaatcaatctcaggactcaattttatcattctccatggctatctctgaactattgcggcttaaagctgctggcaatgaagcattccaatctggtaaatatttggaggctgtggaacattatactgctgctttgatgagcaatagcgagtccctacgctttttagcagtctgcttttgtaaccgtgcagcagcatatcaagcaatgggtcaaattttagatgcaattgcagattgttcactggctatagcccttgatgcagattatgctaaggctatttccagaaggtctagtttgtatgaacttataagggactatggccaggcagcaaatgatctccgtaggttgattgctcttcttgagaaacaactgcaagaagatatgaccatgccagtagagaggtctgagagtattcgtaacaatctgaatcgagccaatcttcggttttcttctttggagcgggatgccagaaaaggggcttcattaaatatgtatttgatattaggaattgagtcttcttcctctgctgtggatataaagaaggcctaccgcaaagcagcactaagacatcatccagacaaagccagtaactttcttgtcagaagtgaaaatatcagtgatgctgtatggagagatataacaaatgaaatacgcagggatgctgattatttattcaaaataattgggaaggcatatgctatgctttcagaccctacaacgagaagggaatgataacctggaggtggagtgatagaaaagcagtgcacatgtaacatgagcagcgggagcaatgaaaatgatgacaggacctcttagtgagagcatttaatcatgaagttggtaccgcacaaagctaccatactggagaggtcctatgtgaaattttgtgtgctctcaccaacgatatgatgccactggtgttgtccaatacctaatcacaaatgtcagtcggaacatgtcccacttttctgactgagtgctaataccgttacccccggggagcagtggatctttgtgttcatgcctgatcactgtttcgtgttctctgatgttccatttggatatgcagattgcatgagtctgagcacccgtgcaaaaggctagtttttttgtttgtgaagttgatgtcaatatatcaggtgctgtgcatagtagcttggagcagttcgagtggaatcaacaagagtggatagtgtaaatagaggtacacgtttcttgtacaccccctcactccac

SEQ ID NO: 34193 - DNA, 3769 bp, Zea Mays
cagatattcaaacccaaccgcatgggatcagatcaattctccccaccccgacggccccacccaccgcttctctctctgttcctacaatgacccaccggtcagcccagccggagaacgccgcccgctcccccggcgtgccgccgctgtaattcttcctcctccacccagagctgcacgtccgcgccttgccaccgatggatcccgcgcccgatcagctctctatctccgcctctgccccgttccccaccatcccggctgcctcaagccccaggccccgcgccgcgaggacgcggcgccatgccgcgcccttccggtcggaccaccccaccgccgggagctggcgctccgggatcgatctcccgcgccgtccttcggcctccgccttttcccagcaggagcgttatccttccgtggcctcctggagcgcctctcgcgacgccaactttgtgttcgggagcggcgtggccggtgcgccggagatgaggaggagcttctcgtctggatccggtgaggcatcgttggctgaactttcgtacgcagttcacaggttcgcgttggacggttctggcaggccaagcgacattgacgctcccggaggagaaggtacgcttccagtgacagactccggtggtcgctttggggcccgtggatgcagttccactttgtatgagggcttctctctggattctattcaccatcagactgagcacctcgatgaagaacgtggagtcccgtctcaaaccatacaatgcgagagtgtggggatgcgatcattagcttcaccaacccgcactgatgagaatgctcccattgaatttgcaaagagaggggacagcttgcccattcaagattctgtggatcaaagtagaaattctggacatgatgctaatgcccaccatgatttctttgtttttggtggacatgctgggtccaatagcttcgctaccaatgcaactcaaactaataccattcattttgcaggatgcaaagcatgtgtttggttcaagtgacaatgatcttccaggttcggaaccttgtgaaatttctaccacggtggaaacaccggatactataacctctagctttggatctgaagatgggatcgtgacggtttcttccataaaggtgccttgcaatattgaagtagtaccagcctcagaacttgttgaatgtcagccatttgatgagaaatctttcacctttgacgaccaaaatgtaccatataggaacaaaggaggggttaagggtatgggcatgaacagaggagcttttatgccaaataagtcctcagcaaaccaagcttcttttgaatcagtctcaagaagcgggcattgttctaaaaaagtgtctcctgaagaaaagttaaatttgaaagaagccagtagctctttgcaaacaacagaaagtgggcatgctgaagcagagtttacgtctgcagcaaatacggaacattctggtcaatccgatttcatattttctgcatcaactttccatcaaagcatgttgcacccgcaaagacgacataacaagaaaaaaagtggaggaatgggtaatcatgctagctctattcaaagtctcccttcatccgccattggactcgcatgctcagaagtctcaggaagtcagcaatgtgtggatttagctgccaagtggactgaatacaacaaaatagaacctaacagggttgcaatcagcagaggagccagatgctcaacatcagaaaactttggagaccatgacaattgtgaaacatggcgattaaggggaaaccaagcatatgcagaaggattgttaactaaggctgaagaatgctatacccatgggattgattctttttctccaaatgaagtttcaagaaaagcattaatgctgtgctacagcaatcgagcagctactcggatgtctctgggtaagatgagagatgccctatctgattgtcaagaagccattgatattgattccagttttctcaaggcacacgccagagccgccaactgcctacttgccctgggggatgttgaagaagcacaaaaggcttttgagatgtgtttaaagtctaatcatctatcaagcttggaccataaaattgtagaagaggcttctgatggtctacaaaaagctaagaaaatatctggtttaattagtcattctgaggagtatcttataaagaaagcatttgacaagatacccagtgccttacaaatgatctctgatgctttgtccataagtatttattcagataagttaatggagatgaaagcagaagcactgttactggtctgtatttacgttgcagcgatatgaagaagtaattcggttttgcgaagaaactctttatgtagcagaaagaaatagtgtgtgtttgtgtcttgacaagcagtcagaaagcaataacatggtcaacaatacttgctttgtgaaattgtggcgttatcatcttattgctaagtcatatttcttccttggaaagcttgaagaggctaaccagttcttaaagaagaatgatcaaataaaagtcatggggtgcaggtgtgggaatcaatctcaggactcaattttatcattctccatggctatctctgaactattgcggcttaaagctgctggcaatgaagcattccaatctggtaaatatttggaggctgtggaacattatactgctgctttgatgagcaatagcgagtccctacgctttttagcagtctgcttttgtaaccgtgcagcagcatatcaagcaatgggtcaaattttagatgcaattgcagattgttcactggctatagcccttgatgcagattatgctaaggctatttccagaaggtctagtttgtatgaacttataagggactatggccaggcagcaaatgatctccgtaggttgattgctcttcttgagaaacaactgcaagaagatatgaccatgccagtagagaggtctgagagtattcgtaacaatctgaatcgagccaatcttcggttttcttctttggagcgggatgccagaaaaggggcttcattaaatatgtatttgatattaggaattgagtcttcttcctctgctgtggatataaagaaggcctaccgcaaagcagcactaagacatcatccagacaaagccagtaactttcttgtcagaagtgaaaatatcagtgatgctgtatggagagatataacaaatgaaatacgcagggatgctgattatttattcaaaataattgggaaggcatatgctatgctttcagaccctacaacgagaagggaatgataacctggaggtggagtgatagaaaagcagtgcacatgtaacatgagcagcgggagcaatgaaaatgatgacaggacctcttagtgagagcatttaatcatgaagttggtaccgcacaaagctaccatactggagaggtcctatgtgaaattttgtgtgctctcaccaacgatatgatgccactggtgttgtccaatacctaatcacaaatgtcagtcggaacatgtcccacttttctgactgagtgctaataccgttacccccggggagcagtggatctttgtgttcatgcctgatcactgtttcgtgttctctgatgttccatttggatatgcagattgcatgagtctgagcacccgtgcaaaaggctagtttttttgtttgtgaagttgatgtcaatatatcaggtgctgtgcatagtagcttggagcagttcgagtggaatcaacaagagtggatagtgtaaatagaggtacacgtttcttgtacaccccctcactccac

SEQ ID NO: 34194 - DNA, 1218 bp, Zea Mays
atcgactgcgggagcttatccgcactccgaccggtgccacctccaagctgagcccgctcctagactcccagtcccctccgcagtccgcaccgccgcctcgccatggaggcagctgccgccgccttcttgtcccctccccgcgtcgccctcgacgtccgcacactcttctccccgccccgttgcctccccgtctcgccctcatcccagctccgcctcgctgcccgcccccgcgcgctcgccggcgccaagccgcggttcctgagcccccatcgagaacccgccgtcgacggcggtcgcggcgccagggatgtcgtcgcgatggtggtgccgttcctgaggggggccgcgtgggagcagccaccgccggacttggcctcgttcctgtacaagaaccggatcgtgtacttggggatgtgcctcgttccgtcggtcacggagctcatgctcgccgagtttctctacctccagtatgacgacgccgagaagccaatctacatgtacatcaattccactggcaccaccaagaatggcgagaagttaggctatgagacagaagctcttgcagtatatgatgctatgaggtaaccgtgccgcacttccatcatcgacaataatgataaaacagccaattggtcgctttcaaggtcaggcaacagacgttgacattgcaagaaaagagattcgaaatgtcaagatagaaatggttaagctgctggcaagacacattggtaaaccaatggaagagattgctcgggacatcaggcgtcctaaatactttagccccagtgaagctgtggattatggcatcatcgacaaggtgatatacaacgagaaaatccaggaagatggcggtgttgtgtcagaactcaaaagatcaaatttgatatagcgttctttttccacaagtagacacgtctttgtatgtttagtggtcattcacgtgtgtttgagtattgagtagttaccactcgatcactcagtacctggttgtagaggcgtagagcacatagccaatgcattgaacaagcatttccttcccccctctgccgtttcaacgctgtattgcccttacccaacgggcgtgctgaaagatgaattttggtaggttgttgatcgttggtgccctgtttgcgtgtttgttttagcccgcggggaagcatatagtttgatcgtggcaatttggcgtgtggattgttacaatctggaccatgattgttt

SEQ ID NO: 34195 - DNA, 2378 bp, Zea Mays
gccatgcaaaggccacgagcggaggcaagggtggtgaagtcgaggccccgcgtccaagccagaggggaaggatccggtcgtcgtacggccggtgcctggctggcagcaactgtcgtcgacggcgagggggcccgagtgaaggtctgatgtgcgtcaagatgagtcgttcgtattgcagaagtcgccaaagatagaccaacgtacaagcaaataaagcagagataagttacattgtgacaagctgacacttttacaatttacatctaatagtgtaatttgccttattttgtgaccaagggttggcgaggctttgttgattttttacaacttctattaagtatcaagatagatgcctcttaactctaaaagaacgattgctaggtcgacatgtagtccaaagaccgaaatgtacaggctaaactaaaggatcgatctaggacgacataggtgatatataaaatctataaacgcatgcttaatattgtgcaactaattaggtgattatgaccacaagatctaacaggattgtttggaaggtataacacaatctccactactattggttggcgatcaccaaagtgcggatgccactaattggcttctatgtacactcatgcagtactaaagatatgatgtttctgaatacataaatatatgggagatccattcccaatttatgatcataagcatatttggtgcttttgtatatgatgcgtacctaaattttggttagcatttatcctgacacattatgtacctgaagtattttttgtttgtccaactcttgatacaaattttattttatttctttgattgttgacattcatggacctgacgaacctgaagttcagagctgtctccaaagtccaaacaaccagaatatatagacataagtaactaccgacctttgtgaaaaatgattcttattggaaatatccagtgcaaagctcacccaccaaaaaaacctgatgtattcttctttccctagctgttgcaaagaggtgagaactgtttggggctttcactacccaattaaaatattaagtagcaaactgagcaccattactttgagcccaatgcaagttaataatacaatttattataatagtacatctactatcgcaccaaaaagacttactcaaatggcaacaaatcgcgcccaagggcgcgcccagttactattctttctatatataagagcagggagcaaagctgtgattccgtggagccacgtcactttaataatttttggccattcgattctatctcaacggccaggtggcaaacacacggaattcttcaccctacaccaaattcttctggactcttctagctgccgcgagggccattggggaactcccatcgctactcgccagtggctgagacagagcccgggcttctttcgtcggtgtcctcttggaccgcgccacgcagttctctaagctcactatccccttctcgaagaaggttgtggccgtatgggaaggcggtgaagaaggagaatacagaggagaagcttgctggcggcgacaggaagccgatatacatgcatgtgtgaccccagcaggttcacgccacggactgccacatctcgccgagcagaatggcgagaagttaggctatgagacagaagctcttgcagtatatgatgctatgaggtatgttaaagttcctattttcactctgtgtgtcggtaatgcatggggagaagctgctttactcttagctgctggcgctaaaggtaaccgtgccgcacttccatcatcgacaataatgataaaacagccaattggtcgctttcaaggtcaggcaacagacgttgacattgcaagaaaagagattcgaaatgtcaagatagaaatggttaagctgctggcaagacacattggtaaaccaatggaagagattgctcgggacatcaggcgtcctaaatactttagccccagtgaagctgtggattatggcatcatcgacaaggtgatatacaacgagaaaatccaggaagatggcggtgttgtgtcagaactcaaaagatcaaatttgatatagcgttctttttccacaagtagacacgtctttgtatgtttagtggtcattcacgtgtgtttgagtattgagtagttaccactcgatcactcagtacctggttgtagaggcgtagagcacatagccaatgcattgaacaagcatttccttcccccctctgccgtttcaacgctgtattgcccttacccaacgggcgtgctgaaagatgaattttggtaggttgttgatcgttggtgccctgtttgcgtgtttgttttagcccgcggggaagcatatagtttgatcgtggcaatttggcgtgtggattgttacaatctggaccatgattgttt

SEQ ID NO: 34196 - DNA, 2944 bp, Zea Mays
ggcgacaatgaggccaaagctgcggctgcgccaaaatagaagagaaggacccggacgtcgcacggccgcgcccggcggttagcagctgcagctaccgccgacagcaaggaggcccaatcggagggcgtcagcgcgttaatgggacagcgtcagcggcagcggcgacatcgacggggacaacttttgtaccagcagctacggcgttggcgtcctgctcaacttccacatgccgcagccactcacccgtagcttcaccgcgccgcgccgcgccgcgccccacccggacgccgtcgtccccctccggctgttggagccccaacgtcgcatccggctatagcaagaggggcttcgagcttttttcagccatgcaaaggccacgagcggaggcaagggtggtgaagtcgaggccccgcgtccaagccagaggggaaggatccggtcgtcgtacggccggtgcctggctggcagcaactgtcgtcgacggcgagggggcccgagtgaaggtctgatgtgcgtcaagatgagtcgttcgtattgcagaagtcgccaaagatagaccaacgtacaagcaaataaagcagagataagttacattgtgacaagctgacacttttacaatttacatctaatagtgtaatttgccttattttgtgaccaagggttggcgaggctttgttgattttttacaacttctattaagtatcaagatagatgcctcttaactctaaaagaacgattgctaggtcgacatgtagtccaaagaccgaaatgtacaggctaaactaaaggatcgatctaggacgacataggtgatatataaaatctataaacgcatgcttaatattgtgcaactaattaggtgattatgaccacaagatctaacaggattgtttggaaggtataacacaatctccactactattggttggcgatcaccaaagtgcggatgccactaattggcttctatgtacactcatgcagtactaaagatatgatgtttctgaatacataaatatatgggagatccattcccaatttatgatcataagcatatttggtgcttttgtatatgatgcgtacctaaattttggttagcatttatcctgacacattatgtacctgaagtattttttgtttgtccaactcttgatacaaattttattttatttctttgattgttgacattcatggacctgacgaacctgaagttcagagctgtctccaaagtccaaacaaccagaatatatagacataagtaactaccgacctttgtgaaaaatgattcttattggaaatatccagtgcaaagctcacccaccaaaaaaacctgatgtattcttctttccctagctgttgcaaagaggtgagaactgtttggggctttcactacccaattaaaatattaagtagcaaactgagcaccattactttgagcccaatgcaagttaataatacaatttattataatagtacatctactatcgcaccaaaaagacttactcaaatggcaacaaatcgcgcccaagggcgcgcccagttactattctttctatatataagagcagggagcaaagctgtgattccgtggagccacgtcactttaataatttttggccattcgattctatctcaacggccaggtggcaaacacacggaattcttcaccctacaccaaattcttctggactcttctagctgccgcgagggccattggggaactcccatcgctactcgccagtggctgagacagagcccgggcttctttcgtcggtgtcctcttggaccgcgccacgcagttctctaagctcactatccccttctcgaagaaggttgtggccgtatgggaaggcggtgaagaaggagaatacagaggagaagcttgctggcggcgacaggaagccgatatacatgcatgtgtgaccccagcaggttcacgccacggactgccacatctcgccgagcaggtggtgccgttcctgaggggggccgcgtgggagcagccaccgccggacttggcctcgttcctgtacaagaaccggatcgtgtacttggggatgtgcctcgttccgtcggtcacggagctcatgctcgccgagtttctctacctccagtatgacgacgccgagaagccaatctacatgtacatcaattccactggcaccaccaagaatggcgagaagttaggctatgagacagaagctcttgcagtatatgatgctatgaggtatgttaaagttcctattttcactctgtgtgtcggtaatgcatggggagaagctgctttactcttagctgctggcgctaaaggtaaccgtgccgcacttccatcatcgacaataatgataaaacagccaattggtcgctttcaaggtcaggcaacagacgttgacattgcaagaaaagagattcgaaatgtcaagatagaaatggttaagctgctggcaagacacattggtaaaccaatggaagagattgctcgggacatcaggcgtcctaaatactttagccccagtgaagctgtggattatggcatcatcgacaaggtgatatacaacgagaaaatccaggaagatggcggtgttgtgtcagaactcaaaagatcaaatttgatatagcgttctttttccacaagtagacacgtctttgtatgtttagtggtcattcacgtgtgtttgagtattgagtagttaccactcgatcactcagtacctggttgtagaggcgtagagcacatagccaatgcattgaacaagcatttccttcccccctctgccgtttcaacgctgtattgcccttacccaacgggcgtgctgaaagatgaattttggtaggttgttgatcgttggtgccctgtttgcgtgtttgttttagcccgcggggaagcatatagtttgatcgtggcaatttggcgtgtggattgttacaatctggaccatgattgttt

SEQ ID NO: 34197 - DNA, 1812 bp, Zea Mays
gtcctagttccgcgccctctcgtccgcgaacaacacgcaacgcccccgcagccatagccgcagcacttggcctagctagccgcatgagggagttctcgtacgaggaggtggaggcggcgacgggcgggttcgcggagaagaacctggtgggcaagggcagccacggcaccgtgtacagggccaggctgaggagaggcggcaggacggccgtcgtcgccgtgaagcggccgtcgcacgcgcagggggaggccaagctggccaacgagatcgccgtgctctcggccgcgccgcgccacccggggatcatcggcatcgtcggcgtgtcgccatcgccatcgccacagccgcagccggggcctcggctgcccccgctgctcgtcatggagttcatgcccagcgggtcgctgcacgacatgctgcaccggtcgccgcggccgccgccgtggccgcaccgcgtggagatcgcgctagacgtggcgcgcgccgtgctggcgctgcacggcgcggcgccgcgcgtcatccaccgcgacgtcaagtccgccaacgtcctgctcggccgcgacggccgcgcccgcctcgcggacttcggcctcgccgtgagcgtcgtcaaggccgccgccgccgtccacgcagacgcgccacctggaccagcagccgaggaaggctcggcgtcggcggggccgccaccagccccggcgggcacgatcgggtacctggacccctgctacacggagcccgggaagctgggccccgcgagcgacgtgttcagcttcggcgtggtgctcctggagctggtgagcgggcgcaaggtgatggacgtggactcgtgcccgtcgtccatcgtgtcgtgggccgcgccgctgatcggcgccgggcgcgcgcgggaggtgctcgacgcccgggtggccgccgcgccactgccgcccacggaccgcgcgctggcccgcgtcctcgccgtggctgcgcggtgcgtgtcggagagcgtggagcggcggccggccatggacgaggtggtggccgagctgcgcgagtgcgccgggtggcggcacgggcaccgcggcggcggcgtggtggggcgggtgtgcgagcgcgtcgcggcgtggggccagcgcgtgatgaggaggggcagcaaccgggtggtggcgaccaaggtcgagtgcaccgagcactccgacagcgacgtggcacccgatcgccagggctcctcctcctcctcgtgcacgaccgcggctctgccaccgcatcggaacgacggcatgatgaccggcgcacccaaatgaaccgaagacgaggtagtgtctgacccaattcgagagcgagtttggatctcgttttcagtagttgacaaactacggatgtttactggtaatagtactagctagttacgtgtcacgagactattactgtcacagcagttatggcatgcgctaatctgcgactgctttgctcgttccgatcatcgcacagtctcgagatatggattgacgtcgtggtgtatatacgcttcttcattttacgtttggaatttgggtttcttttgtctttgaccatcatgctggcagtggcatgcatgaggcccgacggcattcatcggcagcacaggtagcggtatactagcatcagaaggacatttcctttcttctccggttcaggcatgagatggccattatgtgaacaccgaagaaccggcagctgctgaactgccctgcacgcatgctgcatgcaaccgtagtaaaaagaaaaaaaaagctccttgatctgatttacactgtaaaaggtgggagagagagagagaaaaaaggaagaagggtg

SEQ ID NO: 34198 - DNA, 1399 bp, Zea Mays
gaaccggcccagcggtggccaaaccggcccgggcacaactacaaggcgtgcggtcgaagaaagaaattgatgaaacggcggctgaggccgcaagcttctcactggccgcaagcaaaccgaacgaacccaaccgaagcgagagctgagcaaggcagaggcgtcgtgaccggcgatggagcggctgcagcggatctttggcgcctccggcatggggcagccgccgacggactcgccgctgctcgattcctccgagcaggtctacatctcctccctagcgcttctcaagatgctcaagcacgggagggctggggtgcccatggaggtcatgggcctcatgctcggcgagttcgttgacgactacaccgtcagggccgtcgaccacgtcttccagacaaacatgcttgacatgcttaagcagaccggcaggccagaaatggttgtaggttggtatcactcacatcctggcttcggatgctggctatcaggcgtcgatatcaatactcagcagagttttgaagctttgaaccctagagccgttgctgttgtgatagaccccatccagagtgtgaaggggaaggtggttattgatgcattccgcctcattaatcctcagaccatgatgcttggccaggagccacgtcagacaacatcaaatgttgggcacctaaataagccatctattcaggctcttatccatgggttgaatagacactactattcaattgcaatcaattaccggaaaaatgagcttgaggagaaaatgctgttgaacttgcacaaaaagaaatggaccgatgggctaattttgaagaggtttgacactcactcgaaaaccaacgagcagactgtccaggaaatgctaaacctagccataaagtacaacaaggcagtgcaggaggaggacgaactgccacctgagaaacttgcgatagcaaatgtgggtcggcaagatgcaaaaaagcatttggaagagcatgtgtcgaatttgatgtcatcaaacatagttcagaccctaggaaccatgctcgacacggttgtcttttagtctactaataatattgttgtcccaaactgaaacatagccacactatggaagcatgacacatgcaatgagcttgaggccagatacattttggttctaaggtttgtttatgaatggatttgtctacatttcattgtcgttaaacttcctgccttttctatcaaagcttcagtgcgttctagttatgtttaagccaaggtggctccagatgtcagttgggatgtcattgccctgggagaactgtgtaatgtgattatgacctgtggcagataacttatttttgagttaatccatcaccacttcattctttattgttagttgtttagtactaatatgtggaatggagtcatcccatca

SEQ ID NO: 34199 - DNA, 5015 bp, Zea Mays
agatgactaaaaaaacttgacaaaatccataaccgaagtgcctaacaattatatttctgagttactatacttacaataaagaaaacacatcaatgactgccacagtcctaaatatgggccacagcatcaggcctagcgctggcgagctgtggcctcatggaggcccaacgtcaggccctggtgagccgtggcctcaccctggcaccgcaaaagaagtgcacgagacagggggcgcagcccctgccgctcctagagttcatcgcgccggagagaacaggaatagatcaaaaatctggaggtagccttcgataaattggaataaataaatcgagttcgtttagaaaaggagattggtttgttaggaatagtgaatccaaatctgtaaggactcttctagtttgcttggaatacaagtctaaatctataaggaatcatctagtttgcttggtatacaattctaataaggactatacatactcggcaatgtatccgtttcaatctaagcaagactagagctattgctcctccctttatctctcactctagtttgcttggaattcaacaacccccccccccaaccgtctcgatcccatgggtaacaattccaccatgtccacagaaatggagtggctcgagaccctcgctgctgatctcaccaagcacatggacaaggtgcaagagcaccttgccaaggtcgacgtctgcctgggcaacatgaagcaaggagggtccaaaaacgagatcgccaccgcagccaaggaaaagctggaatgtgaggctgtcaccaagcagctcgaagtggagaccaagcacgccatagatcaagctcgacgtgccttcctcaaggaggagacagcaaggtcattgaccgtcctcgagcttgtggaagaagtggcaaactgcaccacccacaacatcatcgacatcaactttgccaagccggccaaccttgcggaacagcgcatccaaaccataaagcttgtcaacagtggcaatgagattgctcgccaggaagcctgcctcaacacttggcttcacatcaacaccaagacgttccagatcgacgtcatcttcgacatgccatggttggtcgaccatggcaacatcatctagaactttgtgaccctagagaagcaattctaatgggacgaacataccatcatcttcgtcaatgtccctgaccgttgagcaccatagaatttgcttgttcttcctgtcttatgccaatcctaccggtgcctcgacacccatcacttctcccacgatcatggtctccatcgcagccatgatgtaacatgagcaaggcaattcaaccgtgtcaacctaatgccctcgacaaaatcagcattgtacgacgccatcataggcaatggtactcgagctacgcgccatcaccaccaccatcataggcgggagagctgcatcaacttagtccatggaccaagatctcctcttcttcaacggacaattctacctccccacgacattaccactattgctcgacctcttcgagacacgtcgtcattggcgaaatgaggaatctacgactactagtgttggggttctacacgccaccaacgactgcagccatcacctgcagcttccctatcagcatccttatgatccgtgagtggccgcaaggtatcattccttcgtcaatttcatcttcttcgacatcgccaattgccacttcctcgctaccaagaacacatcaacaccatccatgacttgagacactcgagcctctcgccaaacaacttcaacggggcaagttcatgtttggtgacttgctagacctaacaacaacacaatctatgtgcatcatgttgacaatttgtcgtcgtatggcagccttcatccttcgcagcaacaaggtacatagctttgagagatctccttaagctatgcagatattcactcttgacgtagccatacaccgatcgatcctcacctctagcaactatcgttactactttgagctcatcatcatcaggatccaagacaactagatcttggctaacatcatccacgatcgtctcattgtcaggatctaggcaatcccatttggagaacctcttccctcaaactgcatcaacaactagactataatagagcgcgaggacacgctgagtggagaagggggagatgtcataggcctaaatgtgggctgcagcattgggcctagcgggcaacggaggcccaacaccggccccttgtgaaccgcaatctcaccttgggtgtcgtaaaggaggcgcgtgagtgaggggttgcaacccctgccgccccagaagtccatccagttgaggagaatatggaatagatgaaatctaaagaaagcctttgataagtttggagtaaataaaataaagtttatttaggaaagaatattggtttgttaggaaaggagtgtccaaatctataaagactactgctctagtttgtttttaatacaagtccaataggggctataaatatataggtaatgtaacggtttcaatctaaggctaactctaacaataatatgcaaaaatgggaatccaaatacacgttcgtgttatgcagtcagccgaaagacgagacccaaatatttttgtgcccaaatacacgtttgagaaaatggccatcaatatataggtactctcccacatcacatctaaaatgggtatcgagtttaaattacctgttcgagatgctatagtgtcatttagatatctataatagatttaggtgtcacgataggtactctgttggagttagcctaagcaagcatagagccattgctccctcccatcccctcctctcccaccccacataacagcagcaagcacccccccccccccccgcatggttgtgacaatgacattttaaattttaccgcttgaaccattctagcatggaattatacaaatatagtgacgatgcaaattccttttgctaatattctgaggtatgttctccttttctgaatatattacatgacagatacctaaatttctagtgggttataagcaaaaaaaaacatagagctagatcaacaacccgcaagaccaagaaaaacttatgtaggtacataacaccggacccgtttgtataataggtctgaacattataaaaattctgttgggaaacatacatacacattggaaccatagcaagaaattcaacagtcctcctgatgggaaaagaaactaccaaatgagcattctgcacatactattgaattctaccttgttactcctttagtcctttgtatataactggtagtgcatcaaaatgtaaatggaccttatctagtatcccaaaggtagaggagactactgcaaactgaaaacaattgaacctttcttgtcatctgtcccttccatctcaaaatttattccaagctaacatggcatctgaccttcctacgtaggcgaagttctcatttaaaattgcacaaaacatctatttttatgtccgaagaattttaggcctactattatacacaatgaacaactttggagggttcaatgctagaaacttcctaaatcctaagagaatctttaccaaaacaatcccctctccctgtaaccagcaatgaaaaggattgaagcaaaaaaaacaagctccaacacatcccctttcctaatttttttctcaacctctcaaaatctcctttcttcctcctcatgtcactaagattgtggccttgtgggtccataggataggactggagcaccaccgcaacaccagtgcaccaagcacgaagcacgcaggccccatgccgccgacaccacttcgggcagtcaagtgtgtgggttggccacaccgccacaccactgccacactgggcacgcgggcccagaccgcgctaggcagacgagcacttgggtcgccacattgtcaccttgggcaagcactgaaagagatgggagggagaggaaagagagaacaggaagataaaagaagagagttgcaatgacatgtgggtctcatgaacgtaaaggggatggattttctcaattgctatagaagccctcccctataacatggaattcagttttatcaatccgctatagggaattttaagggaaaaggaagcttaactaaaacattacagattctaaaggtctgtttgtgagctataaaaaaagttgttgtgagctatgtgttggcaaaagattgtaagttttttgttttttggttgaaacaactataaaacttacaccgtctcttcatttccctcgaaacagctataaaatattaaaagtctcactatttccacctatttgggaaagtcgaaagccaaaataagggtccaagaagcggtgaaaattaagttacacgaaaggaactgcttctggaaaagcagtttcaggttctaaacatttggttgagcttcagcttctcattagaaacactttccagaagctgaaccaaacacagcctaatatatggtgcaaggatccacagttcaaagctatgttccaatcacaatccaaagttatggtgtaagacgaaaataattactctaaccacccaacaagtataactcaaatccacactgcacaccagcaacacaacctaaaactacgaacataacatagaaacacatcacttcaggatgcaaaaaaccaataaactgaagcaccaaaaataactagatgagatgacaggagagcagacagagacatcatgacggggatgggctgctcacaggatggatatctaatgtttttgctggaaattccccaattttggcaggaacagaactgtttccgatgaacctttgaaacaggcctatactgtatcgactaccgcgttcaaggctaataaaataaaatgctacagaatcatatcagaactagagtccagcacaatctggcctacagcactacagagtctttaacacgtcaccagaaatcttttgtatgaccattagggttcatagttcagaactgggacggctgggccgcaccggaaaacgacggcggtaccttcgtagcgtggagtaggcctcggcccggcgctgttgc

SEQ ID NO: 34200 - DNA, 1279 bp, Zea Mays
gaaccgtgctcaatccaaaacgccaaacggcccacgtgcgccgcgtttcctccatctccatccggccatcccacctccgcttcctcctccgcgccggcctacgcgactgcttccctctctctctcgagtctcgactctcgactgcgccgctacagcctgacgcgatggcctcgtcggcgacgagagaggttctcatgcttgaggcgcctccgccgtccgaccccgctgcggggccctggcgcgcggtgccggacgcggaggccattgacgcgctgccctacatcgacggcgactacggcgatgcggcggtgaagcgggaggtcgatcgcctcgtcgaggaggagatgcgccgagggaagcgcaagcctgcagacttcctccgggacctgccccctgttcccaccgccggattcgagggctggcaaacctccttttatgctagatatgtctcgctatggtttggagccacctccaatgaacaagaggaatgatgttggcgcttggaggcaggctctacggaatgctcagagccagttgcagcatcaaattataaggatagagaatctcgagcttatgctgaaatatggcgtagatgtttggaagctccagaacagacaaatggaatcagttctgtctaggatgcaaaagatggctgtagaatacaatgaaaggatagaaaatgtcaatcgcgagaggaagttccaccagcaaaatactggaggacagctgcatgccctgaaaatggaatggcaggagctgtgtcaaaaaaatatagctattcaggctgcttgtgttgacctgcagaatcatattgatcagcttaaacttgaagcaaaagaactgggaatgcccatggacgacaactcaggaaccgacccacaagcatcatgaggatttgagatacagaggtggcaaggaagaagctacgcttcatttgagtctggcagctggacgtttcattagccattgtgattacctgtcctgcaattgtcatatgggacagtctgtttgatattgaaaacaatgtggactgtgcctagcaatcccatgacctgtgctcctgaaaacacctcgcagaggaagaatctaaattcgtgtattgttgtccgttgaagtgccctaacttgtggcaagagaaatgcagctgatgtatgcagactctccagttgacattgagttcttacatgaagcttttctgtttgattttctgcttgtttctgaaaataccttgtgctttgccctcttctgaacacgcttacaagtgtttgcagacagtgca

SEQ ID NO: 34201 - DNA, 1253 bp, Zea Mays
gaaccgtgctcaatccaaaacgccaaacggcccacgtgcgccgcgtttcctccatctccatccggccatcccacctccgcttcctcctccgcgccggcctacgcgactgcttccctctctctctcgagtctcgactctcgactgcgccgctacagcctgacgcgatggcctcgtcggcgacgagagaggttctcatgcttgaggcgcctccgccgtccgaccccgctgcggggccctggcgcgcggtgccggacgcggaggccattgacgcgctgccctacatcgacggcgactacggcgatgcggcggtgaagcgggaggtcgatcgcctcgtcgaggaggagatgcgccgagggaagcgcaagcctgcagacttcctccgggacctgccccctgttcccaccgccggattcgagatatgtctcgctatggtttggagccacctccaatgaacaagaggaatgatgttggcgcttggaggcaggctctacggaatgctcagagccagttgcagcatcaaattataaggatagagaatctcgagcttatgctgaaatatggcgtagatgtttggaagctccagaacagacaaatggaatcagttctgtctaggatgcaaaagatggctgtagaatacaatgaaaggatagaaaatgtcaatcgcgagaggaagttccaccagcaaaatactggaggacagctgcatgccctgaaaatggaatggcaggagctgtgtcaaaaaaatatagctattcaggctgcttgtgttgacctgcagaatcatattgatcagcttaaacttgaagcaaaagaactgggaatgcccatggacgacaactcaggaaccgacccacaagcatcatgaggatttgagatacagaggtggcaaggaagaagctacgcttcatttgagtctggcagctggacgtttcattagccattgtgattacctgtcctgcaattgtcatatgggacagtctgtttgatattgaaaacaatgtggactgtgcctagcaatcccatgacctgtgctcctgaaaacacctcgcagaggaagaatctaaattcgtgtattgttgtccgttgaagtgccctaacttgtggcaagagaaatgcagctgatgtatgcagactctccagttgacattgagttcttacatgaagcttttctgtttgattttctgcttgtttctgaaaataccttgtgctttgccctcttctgaacacgcttacaagtgtttgcagacagtgca

SEQ ID NO: 34202 - DNA, 1743 bp, Zea Mays
gaagaaaaatgtagcagtgcttgctgtttaataagtggcagagctgttttcactccacctacgcttgtccaggaccaaaattttaatctgtcactttgagctaaaactgaagcaccaaaccgctacaaagaacgtaagagctgaattgtaacttgatgggattactatagcagttgctacagttcttgctagctaccttatactatacgcatcaccctaacaacccggctgactgctgcatctgaccccaccgtcccctgctccaaaccaactctcctttccttacatgcactacacccacttcctgcagctatatataccaccatatgcccatcttatgaaaccatccacaagaggagaagaaacaatcaaccagcaacactcttctcgtataacataatacagcgaaggtaactcacatggcaacttccatgggttgtctcgtcttgctctgccttgtttcttctctccttcccagtgccgtccttggccacccatggggtggcttgttcccacagttctatgaccattcgtgccccaaggcgaaggagattgtgcagtccattgtggcacaggctgtggccaaggagaccaggatggcggcatctttggtcagactgcatttccatgactgctttgtcaagggctgcgatgcttcggtgctgttggacaacagcagcagcatagttagtgagaaagggtccaacccgaacaggaactccctcagggggtttgaggtgatcgaccagattaaggctgctcttgaggctgcctgcccaggcacagtctcctgtgccgacattgttgcccttgcggctcgtgattccaccgccctggtatgttccacacttccactatcgacaatcctttccaacctcaaggaacagacatgatatttgttggtggaccatactgggacgtgccacttggccggagagactcgctcggtgcaagcatccagggctccaacaatgacatcccagcccccaacaacacactccccactatcatcaccaagttcaagcgccagggcctcaatgttgttgatgttgtcgccctctcaggtggtcacaccattggtatgtctcggtgcactagtttccggcagaggctatacaaccagacaggcaatggcatggctgacagcacactggatgtatcctacgccgcaaagctgaggcagggatgcccccgctctggtggtgacaacaacctcttccccttggacttcatcacccctgccaagtttgacaatttttactacaagaacctcctggccggcaagggccttctaagctctgatgagattctgttaaccaagagcgctgagacagcggccctcgtgaaggcatatgctgctgatgtcaatctcttcttccagcactttgcacagtctatggtgaatatgggcaacatctcgccactgacagggtcacaaggtgagatcaggaagaactgcaggaggctcaacaatgaccactgagggcactgaagtcgcttgatgtgctgaattgttcgtgatgttggtggcgtattttgtttaaataagtaagcatggctgtgattttatcatattatcgatctttggggttttatttaacacattgtaaaatgtgtatctattaataactcaatgtataagatgtgttcattcttcggttgccatagatctgcttatttgacctgtgatgttttgactcccaaaaccaaaatcacaactcaataaactcatggaatatgtcc

SEQ ID NO: 34203 - DNA, 1513 bp, Zea Mays
ggcggcaccaacgccgagttcaggctggcaagggacgcagcatgagagcaggcggcgtagtgggcaactgcgcatccccatgggcgcggtggcgacagcccaaacaggcgcaaacgcatcggcgggcaagcatatcatccgtcccacacttgtgagcgactagtcacatgaaaaacctacactacacaagtcttccaaattctatcacaaggttcaaaggttgaaattcaaaatgcttccgaatcaatctactaattcttcgtgcaattccattggaaaattggcagactagttaaaagcaccattcttatccaacaagggtcatcagatgaacaaggatgcatttgcaacatatcttaccatgaacgaatgtgcagggtgattgtcgaactagctattcgttgtgttaaaagtggtcccagagtatttaaaggtttcacggtgggcttccatccccgctcatcagaaattgtttataatggattcactcagcctggatttgaacaacctcaccatggatttagcttccagactgagcagattcatgtgtctctttaccttagcgccaagtcctcactctcaggccttgttgggaaaccgaccttcaaggttaatccagtgaaagggcttggtgttacacttgcaggatcaggattcaatgatgccatgcctagtaccctgtctcctacagttttgaatgtggattggagatgtgaaattgttcgaaccagtccttatgaggtccatatttttatccctgtggagggctatgacccaattgaatttacactaacgaaaaaatgtggttacagacaagaaaaagagagtgatcccatgaaaggctgggcaaaatttggaattgtttcttgcgtgttcattgtcttatcatgcatactttgttgtggagggttcatctacaaaactcgcacattgcatttgtacggtttagatgcgctgcctggtattgcggtcttgtctgccctattggatgctgttgggagaccaagaggctacttgcctgcagttaatcctaatgaaaaccatgcaagccatgcatcttgagagcacgtggttggtaccacacaagtaggaagtagcacaatggataaatcatagggcatatgggccaatgtgaactaatgggtatattctgaggactgtttcctgtatgttttcattatatattcaattaatctagtctctactttatcagacataattcgttgacacatccagcatcagcctacccaagaaattttccctctgctacaagcaagtgagctcatggagcgttgctaattatcgcactattagtgtagcttttatgcacaagttctttacatgttcaaaaatgaaaagcatatacaccatcctttgtatcacgctttgtaacatttaatatcttattatcttgcagtagagtaggatactcaaaatttaattgagctcgtagcatagagcttacgtgtcatcaacatcagaaaagtcaaaagataaaaaaaaaatccataat

SEQ ID NO: 34204 - DNA, 1471 bp, Zea Mays
atcttgtgcagcaccgaggtcttgctcaacacaacgaatggggtcaggctgcatttgtttatgtttgtgacaagaccagaagcctccccaaagatcctcagaatttctttgaccacccgccgtgacttcgttcctgttgggcttcaaatagaccacgacatcatcgggttaccttgaatttggacgctttgttagtcctcactcttttctaactggttcaggtcctattgactatattcagaaaatgcataatggagatttagtgcactgtgaaactacattccacaagatgggtcgtacagcacaggtaaacatcatatgtggacattgctcgaacaaagtgtgcaaagatgaacaaggatgcatttgcaacatatcttaccatgaacgaatgtgcagggtgattgtcgaactagctattcgttgtgttaaaagtggtcccagagtatttaaaggtttcacggtgggcttccatccccgctcatcagaaattgtttataatggattcactcagcctggatttgaacaacctcaccatggatttagcttccagactgagcagattcatgtgtctctttaccttagcgccaagtcctcactctcaggccttgttgggaaaccgaccttcaaggttaatccagtgaaagggcttggtgttacacttgcaggatcaggattcaatgatgccatgcctagtaccctgtctcctacagttttgaatgtggattggagatgtgaaattgttcgaaccagtccttatgaggttacagacaagaaaaagagagtgatcccatgaaaggctgggcaaaatttggaattgtttcttgcgtgttcattgtcttatcatgcatactttgttgtggagggttcatctacaaaactcgcacattgcatttgtacggtttagatgcgctgcctggtattgcggtcttgtctgccctattggatgctgttgggagaccaagaggctacttgcctgcagttaatcctaatgaaaaccatgcaagccatgcatcttgagagcacgtggttggtaccacacaagtaggaagtagcacaatggataaatcatagggcatatgggccaatgtgaactaatgggtatattctgaggactgtttcctgtatgttttcattatatattcaattaatctagtctctactttatcagacataattcgttgacacatccagcatcagcctacccaagaaattttccctctgctacaagcaagtgagctcatggagcgttgctaattatcgcactattagtgtagcttttatgcacaagttctttacatgttcaaaaatgaaaagcatatacaccatcctttgtatcacgctttgtaacatttaatatcttattatcttgcagtagagtaggatactcaaaatttaattgagctcgtagcatagagcttacgtgtcatcaacatcagaaaagtcaaaagataaaaaaaaaatccataat

SEQ ID NO: 34205 - DNA, 3469 bp, Zea Mays
ttttcctcattcgtattgaaactctatttaacagggaaggggcaatttctgagatacattggccatgcagccaacggtcagtccaaaatagcgttccagcaccatcccccactatggagcatagtgaggctgagaacatggcaatgacattaggatggacttgtacatcaaactcagcccaaggcctgtctggctgagttttcttgagccacaaccacctcaggttcaatgcccaaccaagaatttcaagattgtgtattcccaaacctcctagacttaagggtttacataccttattccaccccacaacacaatggccacctctgacatcctttctgcccttccacaaaaaacctcttctgattttgtcaatagccttgaccacccatttagggcaaggaatcacaataaggtgataaatagggatggcagtgaggacagatctgacaagtgttcgagaaaaaaaagatctgacaagtgttagtcttccagcttggttgattaaaggagccttccaacctggcagcttgttagcaactttatcaataagttccaaaaacacatttctaggcattttcttaacagaaagaggaaaccccaaatatttgcaaggaaagcctattatgttgcaagggaataaagattgtgcctcaccaacacattgatcattacattggatagggagtcatactgcatttactggcattggtttttaagcctgaggcctcccaaaaatccttaaaatctccttgatcactgtgatctctcttctgtttggctgtaagaaaagtacaacatcatcagcatacagggacatccgttgacaatttccatgtctcaatagaggcagcaacagtcccctttcttgtgcttttagaataagtgaatccaaggcatccattaccaggatgaaaagcattggggacaaagggtccccttgtctaagccctctatgatgcttgataatctcccctggttccccattcacaagtactcttgttgaagaagagtacaacattttagaaatgatgctgcaccaaacaggaccaaaacccaaatgcctgaagatttcaaacaagaagggccaagataccgagtcaaaagcttttccaatatccaatttcagcaggatacgggacaccttttgcctatgaatagcccttgcagtctgctgaaccgaaataaaattatcatggatgcttcttcccttcacaaaggcactttgattttttgacaccagaacagggagcctaggtgcaagtctggtggccaacagcttagttacaatttttgcaaaactgtgtatcagacttattggcctaaaatctttaacttccaaagcctcattctttttaggtaataaggtcacataagctgaattaaggagatgcagtttagaaatatccccatgcagcaatctgttaatagctgccataaaatcacccttaacaactggccaggcctttttataaaatctcccagtatagccatcaggcccaggggctttgtcagatgggagggccttgatagtattccagacctcctcctcactgaagttttggtccagatcatgtaagttcaaggccggcctatggaaggcatctagatttagagtagagtccctgtaagatactgtcccaagaagatgattatagaaatcccacactgcctcttttttatcttcctgctcgaacaataatctgtccccgacctgcaacttcccaatgaagttttttctcttcttatacctggcctgtcgatgaaaatatgaggtattggctgttggaatgtgaaccctaaccctaacaggggttccttgacgacccatttggggcactgaagagctataaaatagtagatatgggctgccgaaagcactgatttaaccaaggttgtcctcccagctgggttaattaacgcagctttccaaccagatcttgtgcagcaccgaggtcttgctcaacacaacgaatggggtcaggctgcatttgtttatgtttgtgacaagaccagaagcctccccaaagatcctcagaatttctttgaccacccgccgtgacttcgttcctgttgggcttcaaatagaccacgacatcatcgggttaccttgaatttggacgctttgttagtcctcactcttttctaactggttcaggtcctattgactatattcagaaaatgcataatggagatttagtgcactgtgaaactacattccacaagatgggtcgtacagcacaggtaaacatcatatgtggacattgctcgaacaaagtgtgcaaagatgaacaaggatgcatttgcaacatatcttaccatgaacgaatgtgcagggtgattgtcgaactagctattcgttgtgttaaaagtggtcccagagtatttaaaggtttcacggtgggcttccatccccgctcatcagaaattgtttataatggattcactcagcctggatttgaacaacctcaccatggatttagcttccagactgagcagattcatgtgtctctttaccttagcgccaagtcctcactctcaggccttgttgggaaaccgaccttcaaggttaatccagtgaaagggcttggtgttacacttgcaggatcaggattcaatgatgccatgcctagtaccctgtctcctacagttttgaatgtggattggagatgtgaaattgttcgaaccagtccttatgaggtccatatttttatccctgtggagggctatgacccaattgaatttacactaacgaaaaaatgtggttacagacaagaaaaagagagtgatcccatgaaaggctgggcaaaatttggaattgtttcttgcgtgttcattgtcttatcatgcatactttgttgtggagggttcatctacaaaactcgcacattgcatttgtacggtttagatgcgctgcctggtattgcggtcttgtctgccctattggatgctgttgggagaccaagaggctacttgcctgcagttaatcctaatgaaaaccatgcaagccatgcatcttgagagcacgtggttggtaccacacaagtaggaagtagcacaatggataaatcatagggcatatgggccaatgtgaactaatgggtatattctgaggactgtttcctgtatgttttcattatatattcaattaatctagtctctactttatcagacataattcgttgacacatccagcatcagcctacccaagaaattttccctctgctacaagcaagtgagctcatggagcgttgctaattatcgcactattagtgtagcttttatgcacaagttctttacatgttcaaaaatgaaaagcatatacaccatcctttgtatcacgctttgtaacatttaatatcttattatcttgcagtagagtaggatactcaaaatttaattgagctcgtagcatagagcttacgtgtcatcaacatcagaaaagtcaaaagataaaaaaaaaatccataat

SEQ ID NO: 34206 - DNA, 1540 bp, Zea Mays
cccgggtggtcaaggcctctacgtgctagacgatccgctgtccagcacctattaagggaagcaagccaaatgaagaatttgcacttagggggcgcccaactcttccatatcctttcacccggctcaaattccacagagccagccaagaaacgttggtaagctgttttaacatagtactcccccgaagcacctggaagccaacggaaagcatcagggttaccttgaatttggacgctttgttagtcctcactcttttctaactggttcaggtcctattgactatattcagaaaatgcataatggagatttagtgcactgtgaaactacattccacaagatgggtcgtacagcacagatgaacaaggatgcatttgcaacatatcttaccatgaacgaatgtgcagggtgattgtcgaactagctattcgttgtgttaaaagtggtcccagagtatttaaaggtttcacggtgggcttccatccccgctcatcagaaattgtttataatggattcactcagcctggatttgaacaacctcaccatggatttagcttccagactgagcagattcatgtgtctctttaccttagcgccaagtcctcactctcaggccttgttgggaaaccgaccttcaaggttaatccagtgaaagggcttggtgttacacttgcaggatcaggattcaatgatgccatgcctagtaccctgtctcctacagttttgaatgtggattggagatgtgaaattgttcgaaccagtccttatgaggtccatatttttatccctgtggagggctatgacccaattgaatttacactaacgaaaaaatgtggttacagacaagaaaaagagagtgatcccatgaaaggctgggcaaaatttggaattgtttcttgcgtgttcattgtcttatcatgcatactttgttgtggagggttcatctacaaaactcgcacattgcatttgtacggtttagatgcgctgcctggtattgcggtcttgtctgccctattggatgctgttgggagaccaagaggctacttgcctgcagttaatcctaatgaaaaccatgcaagccatgcatcttgagagcacgtggttggtaccacacaagtaggaagtagcacaatggataaatcatagggcatatgggccaatgtgaactaatgggtatattctgaggactgtttcctgtatgttttcattatatattcaattaatctagtctctactttatcagacataattcgttgacacatccagcatcagcctacccaagaaattttccctctgctacaagcaagtgagctcatggagcgttgctaattatcgcactattagtgtagcttttatgcacaagttctttacatgttcaaaaatgaaaagcatatacaccatcctttgtatcacgctttgtaacatttaatatcttattatcttgcagtagagtaggatactcaaaatttaattgagctcgtagcatagagcttacgtgtcatcaacatcagaaaagtcaaaagataaaaaaaaaatccataat

SEQ ID NO: 34207 - DNA, 3918 bp, Zea Mays
agaacgcatttccccgggtggtcaaggcctctacgtgctagacgatccgctgtccagcacctattaagggaagcaagccaaatgaagaatttgcacttagggggcgcccaactcttccatatcctttcacccggctcaaattccacagagccagccaagaaacgttggtaagctgttttaacatagtactcccccgaagcacctggaagccaacggaaagcatcaggtactccaggttgcaactgaatattctgtgttaagtcccaaattattaagaattcgacaatcacttctgtcggtaaactgccagagatgtcaccaacccaactgttatccctgagggcttgctgaactgttttccttttcctcattcgtattgaaactctatttaacagggaaggggcaatttctgagatacattggccatgcagccaacggtcagtccaaaatagcgttccagcaccatcccccactatggagcatagtgaggctgagaacatggcaatgacattaggatggacttgtacatcaaactcagcccaaggcctgtctggctgagttttcttgagccacaaccacctcaggttcaatgcccaaccaagaatttcaagattgtgtattcccaaacctcctagacttaagggtttacataccttattccaccccacaacacaatggccacctctgacatcctttctgcccttccacaaaaaacctcttctgattttgtcaatagccttgaccacccatttagggcaaggaatcacaataaggtgataaatagggatggcagtgaggacagatctgacaagtgttcgagaaaaaaaagatctgacaagtgttagtcttccagcttggttgattaaaggagccttccaacctggcagcttgttagcaactttatcaataagttccaaaaacacatttctaggcattttcttaacagaaagaggaaaccccaaatatttgcaaggaaagcctattatgttgcaagggaataaagattgtgcctcaccaacacattgatcattacattggatagggagtcatactgcatttactggcattggtttttaagcctgaggcctcccaaaaatccttaaaatctccttgatcactgtgatctctcttctgtttggctgtaagaaaagtacaacatcatcagcatacagggacatccgttgacaatttccatgtctcaatagaggcagcaacagtcccctttcttgtgcttttagaataagtgaatccaaggcatccattaccaggatgaaaagcattggggacaaagggtccccttgtctaagccctctatgatgcttgataatctcccctggttccccattcacaagtactcttgttgaagaagagtacaacattttagaaatgatgctgcaccaaacaggaccaaaacccaaatgcctgaagatttcaaacaagaagggccaagataccgagtcaaaagcttttccaatatccaatttcagcaggatacgggacaccttttgcctatgaatagcccttgcagtctgctgaaccgaaataaaattatcatggatgcttcttcccttcacaaaggcactttgattttttgacaccagaacagggagcctaggtgcaagtctggtggccaacagcttagttacaatttttgcaaaactgtgtatcagacttattggcctaaaatctttaacttccaaagcctcattctttttaggtaataaggtcacataagctgaattaaggagatgcagtttagaaatatccccatgcagcaatctgttaatagctgccataaaatcacccttaacaactggccaggcctttttataaaatctcccagtatagccatcaggcccaggggctttgtcagatgggagggccttgatagtattccagacctcctcctcactgaagttttggtccagatcatgtaagttcaaggccggcctatggaaggcatctagatttagagtagagtccctgtaagatactgtcccaagaagatgattatagaaatcccacactgcctcttttttatcttcctgctcgaacaataatctgtccccgacctgcaacttcccaatgaagttttttctcttcttatacctggcctgtcgatgaaaatatgaggtattggctgttggaatgtgaaccctaaccctaacaggggttccttgacgacccatttggggcactgaagagctataaaatagtagatatgggctgccgaaagcactgatttaaccaaggttgtcctcccagctgggttaattaacgcagctttccaaccaggtagcttatcagccaccttatcaatgagctccagaaaaacacttctaggcagcttcttaatagaaaggggtaaacccaaatacttgcatggaaaatccacaacgttgcaggggaacagatcttgtgcagcaccgaggtcttgctcaacacaacgaatggggtcaggctgcatttgtttatgtttgtgacaagaccagaagcctccccaaagatcctcagaatttctttgaccacccgccgtgacttcgttcctgttgggcttcaaatagaccacgacatcatcgggttaccttgaatttggacgctttgttagtcctcactcttttctaactggttcaggtcctattgactatattcagaaaatgcataatggagatttagtgcactgtgaaactacattccacaagatgggtcgtacagcacaggtaaacatcatatgtggacattgctcgaacaaagtgtgcaaagatgaacaaggatgcatttgcaacatatcttaccatgaacgaatgtgcagggtgattgtcgaactagctattcgttgtgttaaaagtggtcccagagtatttaaaggtttcacggtttataatggattcactcagcctggatttgaacaacctcaccatggatttagcttccagactgagcagattcatgtgtctctttaccttagcgccaagtcctcactctcaggccttgttgggaaaccgaccttcaaggttaatccagtgaaagggcttggtgttacacttgcaggatcaggattcaatgatgccatgcctagtaccctgtctcctacagttttgaatgtggattggagatgtgaaattgttcgaaccagtccttatgaggtccatatttttatccctgtggagggctatgacccaattgaatttacactaacgaaaaaatgtggttacagacaagaaaaagagagtgatcccatgaaaggctgggcaaaatttggaattgtttcttgcgtgttcattgtcttatcatgcatactttgttgtggagggttcatctacaaaactcgcacattgcatttgtacggtttagatgcgctgcctggtattgcggtcttgtctgccctattggatgctgttgggagaccaagaggctacttgcctgcagttaatcctaatgaaaaccatgcaagccatgcatcttgagagcacgtggttggtaccacacaagtaggaagtagcacaatggataaatcatagggcatatgggccaatgtgaactaatgggtatattctgaggactgtttcctgtatgttttcattatatattcaattaatctagtctctactttatcagacataattcgttgacacatccagcatcagcctacccaagaaattttccctctgctacaagcaagtgagctcatggagcgttgctaattatcgcactattagtgtagcttttatgcacaagttctttacatgttcaaaaatgaaaagcatatacaccatcctttgtatcacgctttgtaacatttaatatcttattatcttgcagtagagtaggatactcaaaatttaattgagctcgtagcatagagcttacgtgtcatcaacatcagaaaagtcaaaagataaaaaaaaaatccataat

SEQ ID NO: 34208 - DNA, 1763 bp, Zea Mays
catggttgtggacgagcggcgacagtgagatgggagcaactcagcaaccctaaccgcaggatatatgggctgcctgcctgtacacatatctaacagggaaccactttgaaacttgaatatattggcgttgctatagtggagtaacatggccttctgcactatgtataccattcatctgtccgtcatagttttgttggcagtcacctacatgcatgtaccagttactgctatcatcgttgttccaacctctaattgttatacatttgataatgaaagccgtcttgttgattttacacatctgattggaaatgttttcgaatataaggaacagggctcacctcgctctgatttggttgtcgaattctgcaaagatgtgcagaaaagatctcaagagggttaccttgaatttggacgctttgttagtcctcactcttttctaactggttcaggtcctattgactatattcagaaaatgcataatggagatttagtgcactgtgaaactacattccacaagatgggtcgtacagcacaggtaaacatcatatgtggacattgctcgaacaaagtgtgcaaagatgaacaaggatgcatttgcaacatatcttaccatgaacgaatgtgcagggtgattgtcgaactagctattcgttgtgttaaaagtggtcccagagtatttaaaggtttcacggtgggcttccatccccgctcatcagaaattgtttataatggattcactcagcctggatttgaacaacctcaccatggatttagcttccagactgagcagattcatgtgtctctttaccttagcgccaagtcctcactctcaggccttgttgggaaaccgaccttcaaggttaatccagtgaaagggcttggtgttacacttgcaggatcaggattcaatgatgccatgcctagtaccctgtctcctacagttttgaatgtggattggagatgtgaaattgttcgaaccagtccttatgaggtccatatttttatccctgtggagggctatgacccaattgaatttacactaacgaaaaaatgtggttacagacaagaaaaagagagtgatcccatgaaaggctgggcaaaatttggaattgtttcttgcgtgttcattgtcttatcatgcatactttgttgtggagggttcatctacaaaactcgcacattgcatttgtacggtttagatgcgctgcctggtattgcggtcttgtctgccctattggatgctgttgggagaccaagaggctacttgcctgcagttaatcctaatgaaaaccatgcaagccatgcatcttgagagcacgtggttggtaccacacaagtaggaagtagcacaatggataaatcatagggcatatgggccaatgtgaactaatgggtatattctgaggactgtttcctgtatgttttcattatatattcaattaatctagtctctactttatcagacataattcgttgacacatccagcatcagcctacccaagaaattttccctctgctacaagcaagtgagctcatggagcgttgctaattatcgcactattagtgtagcttttatgcacaagttctttacatgttcaaaaatgaaaagcatatacaccatcctttgtatcacgctttgtaacatttaatatcttattatcttgcagtagagtaggatactcaaaatttaattgagctcgtagcatagagcttacgtgtcatcaacatcagaaaagtcaaaagataaaaaaaaaatccataat

SEQ ID NO: 34209 - DNA, 1747 bp, Zea Mays
caagaagcgccatccgccgtgccgtgctcgccgcccccattttgaagccgtcgctctctctcgcggtctcacactctcacccaaggccggcatcccgctcggtgactgtgccgttcatttccgccgcgtacacatatctaacagggaaccactttgaaacttgaatatattggcgttgctatagtggagtaacatggccttctgcactatgtataccattcatctgtccgtcatagttttgttggcagtcacctacatgcatgtaccagttactgctatcatcgttgttccaacctctaattgttatacatttgataatgaaagccgtcttgttgattttacacatctgattggaaatgttttcgaatataaggaacagggctcacctcgctctgatttggttgtcgaattctgcaaagatgtgcagaaaagatctcaagagggttaccttgaatttggacgctttgttagtcctcactcttttctaactggttcaggtcctattgactatattcagaaaatgcataatggagatttagtgcactgtgaaactacattccacaagatgggtcgtacagcacaggtaaacatcatatgtggacattgctcgaacaaagtgtgcaaagatgaacaaggatgcatttgcaacatatcttaccatgaacgaatgtgcagggtgattgtcgaactagctattcgttgtgttaaaagtggtcccagagtatttaaaggtttcacggtgggcttccatccccgctcatcagaaattgtttataatggattcactcagcctggatttgaacaacctcaccatggatttagcttccagactgagcagattcatgtgtctctttaccttagcgccaagtcctcactctcaggccttgttgggaaaccgaccttcaaggttaatccagtgaaagggcttggtgttacacttgcaggatcaggattcaatgatgccatgcctagtaccctgtctcctacagttttgaatgtggattggagatgtgaaattgttcgaaccagtccttatgaggttacagacaagaaaaagagagtgatcccatgaaaggctgggcaaaatttggaattgtttcttgcgtgttcattgtcttatcatgcatactttgttgtggagggttcatctacaaaactcgcacattgcatttgtacggtttagatgcgctgcctggtattgcggtcttgtctgccctattggatgctgttgggagaccaagaggctacttgcctgcagttaatcctaatgaaaaccatgcaagccatgcatcttgagagcacgtggttggtaccacacaagtaggaagtagcacaatggataaatcatagggcatatgggccaatgtgaactaatgggtatattctgaggactgtttcctgtatgttttcattatatattcaattaatctagtctctactttatcagacataattcgttgacacatccagcatcagcctacccaagaaattttccctctgctacaagcaagtgagctcatggagcgttgctaattatcgcactattagtgtagcttttatgcacaagttctttacatgttcaaaaatgaaaagcatatacaccatcctttgtatcacgctttgtaacatttaatatcttattatcttgcagtagagtaggatactcaaaatttaattgagctcgtagcatagagcttacgtgtcatcaacatcagaaaagtcaaaagataaaaaaaaaatccataat

SEQ ID NO: 34210 - DNA, 1920 bp, Zea Mays
caagaagcgccatccgccgtgccgtgctcgccgcccccattttgaagccgtcgctctctctcgcggtctcacactctcacccaaggccggcatcccgctcggtgactgtgccgttcatttccgccgcgtacacatatctaacagggaaccactttgaaacttgaatatattggcgttgctatagtggagtaacatggccttctgcactatgtataccattcatctgtccgtcatagttttgttggcagtcacctacatgcatgtaccagttactgctatcatcgttgttccaacctctaattgttatacatttgataatgaaagccgtcttgttgattttacacatctgattggaaatgttttcgaatataaggaacagggctcacctcgctctgatttggttgtcgaattctgcaaagatgtgcagaaaagatctcaagagggttaccttgaatttggacgctttgttagtcctcactcttttctaactggttcaggtcctattgactatattcagaaaatgcataatggagatttagtgcactgtgaaactacattccacaagatgggtcgtacagcacaggtaaacatcatatgtggacattgctcgaacaaagtgtgcaaaggttgaaattcaaaatgcttccgaatcaatctactaattcttcgtgcaattccattggaaaattggcagactagttaaaagcaccattcttatccaacaagggtcatcagatgaacaaggatgcatttgcaacatatcttaccatgaacgaatgtgcagggtgattgtcgaactagctattcgttgtgttaaaagtggtcccagagtatttaaaggtttcacggtgggcttccatccccgctcatcagaaattgtttataatggattcactcagcctggatttgaacaacctcaccatggatttagcttccagactgagcagattcatgtgtctctttaccttagcgccaagtcctcactctcaggccttgttgggaaaccgaccttcaaggttaatccagtgaaagggcttggtgttacacttgcaggatcaggattcaatgatgccatgcctagtaccctgtctcctacagttttgaatgtggattggagatgtgaaattgttcgaaccagtccttatgaggtccatatttttatccctgtggagggctatgacccaattgaatttacactaacgaaaaaatgtggttacagacaagaaaaagagagtgatcccatgaaaggctgggcaaaatttggaattgtttcttgcgtgttcattgtcttatcatgcatactttgttgtggagggttcatctacaaaactcgcacattgcatttgtacggtttagatgcgctgcctggtattgcggtcttgtctgccctattggatgctgttgggagaccaagaggctacttgcctgcagttaatcctaatgaaaaccatgcaagccatgcatcttgagagcacgtggttggtaccacacaagtaggaagtagcacaatggataaatcatagggcatatgggccaatgtgaactaatgggtatattctgaggactgtttcctgtatgttttcattatatattcaattaatctagtctctactttatcagacataattcgttgacacatccagcatcagcctacccaagaaattttccctctgctacaagcaagtgagctcatggagcgttgctaattatcgcactattagtgtagcttttatgcacaagttctttacatgttcaaaaatgaaaagcatatacaccatcctttgtatcacgctttgtaacatttaatatcttattatcttgcagtagagtaggatactcaaaatttaattgagctcgtagcatagagcttacgtgtcatcaacatcagaaaagtcaaaagataaaaaaaaaatccataat

SEQ ID NO: 34211 - DNA, 2111 bp, Zea Mays
gggcccactgctatggcaagaagcgccatccgccgtgccgtgctcgccgcccccattttgaagccgtcgctctctctcgcggtctcacactctcacccaaggccggcatcccgctcggtgactgtgccgttcatttccgccgcgtacacatatctaacagggaaccactttgaaacttgaatatattggcgttgctatagtggagtaacatggccttctgcactatgtataccattcatctgtccgtcatagttttgttggcagtcacctacatgcatgtaccagttactgctatcatcgttgttccaacctctaattgttatacatttgataatgaaagccgtcttgttgattttacacatctgattggaaatgttttcgaatataaggaacagggctcacctcgctctgatttggttgtcgaattctgcaaagatgtgcagaaaagatctcaagaggtagcttatcagccaccttatcaatgagctccagaaaaacacttctaggcagcttcttaatagaaaggggtaaacccaaatacttgcatggaaaatccacaacgttgcaggggaacagatcttgtgcagcaccgaggtcttgctcaacacaacgaatggggtcaggctgcatttgtttatgtttgtgacaagaccagaagcctccccaaagatcctcagaatttctttgaccacccgccgtgacttcgttcctgttgggcttcaaatagaccacgacatcatcgggttaccttgaatttggacgctttgttagtcctcactcttttctaactggttcaggtcctattgactatattcagaaaatgcataatggagatttagtgcactgtgaaactacattccacaagatgggtcgtacagcacaggtaaacatcatatgtggacattgctcgaacaaagtgtgcaaagatgaacaaggatgcatttgcaacatatcttaccatgaacgaatgtgcagggtgattgtcgaactagctattcgttgtgttaaaagtggtcccagagtatttaaaggtttcacggtgggcttccatccccgctcatcagaaattgtttataatggattcactcagcctggatttgaacaacctcaccatggatttagcttccagactgagcagattcatgtgtctctttaccttagcgccaagtcctcactctcaggccttgttgggaaaccgaccttcaaggttaatccagtgaaagggcttggtgttacacttgcaggatcaggattcaatgatgccatgcctagtaccctgtctcctacagttttgaatgtggattggagatgtgaaattgttcgaaccagtccttatgaggtccatatttttatccctgtggagggctatgacccaattgaatttacactaacgaaaaaatgtggttacagacaagaaaaagagagtgatcccatgaaaggctgggcaaaatttggaattgtttcttgcgtgttcattgtcttatcatgcatactttgttgtggagggttcatctacaaaactcgcacattgcatttgtacggtttagatgcgctgcctggtattgcggtcttgtctgccctattggatgctgttgggagaccaagaggctacttgcctgcagttaatcctaatgaaaaccatgcaagccatgcatcttgagagcacgtggttggtaccacacaagtaggaagtagcacaatggataaatcatagggcatatgggccaatgtgaactaatgggtatattctgaggactgtttcctgtatgttttcattatatattcaattaatctagtctctactttatcagacataattcgttgacacatccagcatcagcctacccaagaaattttccctctgctacaagcaagtgagctcatggagcgttgctaattatcgcactattagtgtagcttttatgcacaagttctttacatgttcaaaaatgaaaagcatatacaccatcctttgtatcacgctttgtaacatttaatatcttattatcttgcagtagagtaggatactcaaaatttaattgagctcgtagcatagagcttacgtgtcatcaacatcagaaaagtcaaaagataaaaaaaaaatccataat

SEQ ID NO: 34212 - DNA, 4582 bp, Zea Mays
ggcaattacagccctagatagccccgcccgcaaagactcaacaatcctcaacggccctccgccgtctgggcccactgctatggcaagaagcgccatccgccgtgccgtgctcgccgcccccattttgaagccgtcgctctctctcgcggtctcacactctcacccaaggccggcatcccgctcggtgactgtgccgttcatttccgccgcgtacacatatctaacagggaaccactttgaaacttgaatatattggcgttgctatagtggagtaacatggccttctgcactatgtataccattcatctgtccgtcatagttttgttggcagtcacctacatgcatgtaccagttactgctatcatcgttgttccaacctctaattgttatacatttgataatgaaagccgtcttgttgattttacacatctgattggaaatgttttcgaatataaggaacagggctcacctcgctctgatttggttgtcgaattctgcaaagatgtgcagaaaagatctcaagagagaacgcatttccccgggtggtcaaggcctctacgtgctagacgatccgctgtccagcacctattaagggaagcaagccaaatgaagaatttgcacttagggggcgcccaactcttccatatcctttcacccggctcaaattccacagagccagccaagaaacgttggtaagctgttttaacatagtactcccccgaagcacctggaagccaacggaaagcatcaggtactccaggttgcaactgaatattctgtgttaagtcccaaattattaagaattcgacaatcacttctgtcggtaaactgccagagatgtcaccaacccaactgttatccctgagggcttgctgaactgttttccttttcctcattcgtattgaaactctatttaacagggaaggggcaatttctgagatacattggccatgcagccaacggtcagtccaaaatagcgttccagcaccatcccccactatggagcatagtgaggctgagaacatggcaatgacattaggatggacttgtacatcaaactcagcccaaggcctgtctggctgagttttcttgagccacaaccacctcaggttcaatgcccaaccaagaatttcaagattgtgtattcccaaacctcctagacttaagggtttacataccttattccaccccacaacacaatggccacctctgacatcctttctgcccttccacaaaaaacctcttctgattttgtcaatagccttgaccacccatttagggcaaggaatcacaataaggtgataaatagggatggcagtgaggacagatctgacaagtgttcgagaaaaaaaagatctgacaagtgttagtcttccagcttggttgattaaaggagccttccaacctggcagcttgttagcaactttatcaataagttccaaaaacacatttctaggcattttcttaacagaaagaggaaaccccaaatatttgcaaggaaagcctattatgttgcaagggaataaagattgtgcctcaccaacacattgatcattacattggatagggagtcatactgcatttactggcattggtttttaagcctgaggcctcccaaaaatccttaaaatctccttgatcactgtgatctctcttctgtttggctgtaagaaaagtacaacatcatcagcatacagggacatccgttgacaatttccatgtctcaatagaggcagcaacagtcccctttcttgtgcttttagaataagtgaatccaaggcatccattaccaggatgaaaagcattggggacaaagggtccccttgtctaagccctctatgatgcttgataatctcccctggttccccattcacaagtactcttgttgaagaagagtacaacattttagaaatgatgctgcaccaaacaggaccaaaacccaaatgcctgaagatttcaaacaagaagggccaagataccgagtcaaaagcttttccaatatccaatttcagcaggatacgggacaccttttgcctatgaatagcccttgcagtctgctgaaccgaaataaaattatcatggatgcttcttcccttcacaaaggcactttgattttttgacaccagaacagggagcctaggtgcaagtctggtggccaacagcttagttacaatttttgcaaaactgtgtatcagacttattggcctaaaatctttaacttccaaagcctcattctttttaggtaataaggtcacataagctgaattaaggagatgcagtttagaaatatccccatgcagcaatctgttaatagctgccataaaatcacccttaacaactggccaggcctttttataaaatctcccagtatagccatcaggcccaggggctttgtcagatgggagggccttgatagtattccagacctcctcctcactgaagttttggtccagatcatgtaagttcaaggccggcctatggaaggcatctagatttagagtagagtccctgtaagatactgtcccaagaagatgattatagaaatcccacactgcctcttttttatcttcctgctcgaacaataatctgtccccgacctgcaacttcccaatgaagttttttctcttcttatacctggcctgtcgatgaaaatatgaggtattggctgttggaatgtgaaccctaaccctaacaggggttccttgacgacccatttggggcactgaagagctataaaatagtagatatgggctgccgaaagcactgatttaaccaaggttgtcctcccagctgggttaattaacgcagctttccaaccaggtagcttatcagccaccttatcaatgagctccagaaaaacacttctaggcagcttcttaatagaaaggggtaaacccaaatacttgcatggaaaatccacaacgttgcaggggaacagatcttgtgcagcaccgaggtcttgctcaacacaacgaatggggtcaggctgcatttgtttatgtttgtgacaagaccagaagcctccccaaagatcctcagaatttctttgaccacccgccgtgacttcgttcctgttgggcttcaaatagaccacgacatcatcgggttaccttgaatttggacgctttgttagtcctcactcttttctaactggttcaggtcctattgactatattcagaaaatgcataatggagatttagtgcactgtgaaactacattccacaagatgggtcgtacagcacaggtaaacatcatatgtggacattgctcgaacaaagtgtgcaaaggttgaaattcaaaatgcttccgaatcaatctactaattcttcgtgcaattccattggaaaattggcagactagttaaaagcaccattcttatccaacaagggtcatcagatgaacaaggatgcatttgcaacatatcttaccatgaacgaatgtgcagggtgattgtcgaactagctattcgttgtgttaaaagtggtcccagagtatttaaaggtttcacggtgggcttccatccccgctcatcagaaattgtttataatggattcactcagcctggatttgaacaacctcaccatggatttagcttccagactgagcagattcatgtgtctctttaccttagcgccaagtcctcactctcaggccttgttgggaaaccgaccttcaaggttaatccagtgaaagggcttggtgttacacttgcaggatcaggattcaatgatgccatgcctagtaccctgtctcctacagttttgaatgtggattggagatgtgaaattgttcgaaccagtccttatgaggtccatatttttatccctgtggagggctatgacccaattgaatttacactaacgaaaaaatgtggttacagacaagaaaaagagagtgatcccatgaaaggctgggcaaaatttggaattgtttcttgcgtgttcattgtcttatcatgcatactttgttgtggagggttcatctacaaaactcgcacattgcatttgtacggtttagatgcgctgcctggtattgcggtcttgtctgccctattggatgctgttgggagaccaagaggctacttgcctgcagttaatcctaatgaaaaccatgcaagccatgcatcttgagagcacgtggttggtaccacacaagtaggaagtagcacaatggataaatcatagggcatatgggccaatgtgaactaatgggtatattctgaggactgtttcctgtatgttttcattatatattcaattaatctagtctctactttatcagacataattcgttgacacatccagcatcagcctacccaagaaattttccctctgctacaagcaagtgagctcatggagcgttgctaattatcgcactattagtgtagcttttatgcacaagttctttacatgttcaaaaatgaaaagcatatacaccatcctttgtatcacgctttgtaacatttaatatcttattatcttgcagtagagtaggatactcaaaatttaattgagctcgtagcatagagcttacgtgtcatcaacatcagaaaagtcaaaagataaaaaaaaaatccataat

SEQ ID NO: 34213 - DNA, 4453 bp, Zea Mays
gaaggtgtcgcctgacggaccctggtccgggcaattacagccctagatagccccgcccgcaaagactcaacaatcctcaacggccctccgccgtctgggcccactgctatggcaagaagcgccatccgccgtgccgtgctcgccgcccccattttgaagccgtcgctctctctcgcggtctcacactctcacccaaggccggcatcccgctcggtgactgtgccgttcatttccgccgcgtacacatatctaacagggaaccactttgaaacttgaatatattggcgttgctatagtggagtaacatggccttctgcactatgtataccattcatctgtccgtcatagttttgttggcagtcacctacatgcatgtaccagttactgctatcatcgttgttccaacctctaattgttatacatttgataatgaaagccgtcttgttgattttacacatctgattggaaatgttttcgaatataaggaacagggctcacctcgctctgatttggttgtcgaattctgcaaagatgtgcagaaaagatctcaagagagaacgcatttccccgggtggtcaaggcctctacgtgctagacgatccgctgtccagcacctattaagggaagcaagccaaatgaagaatttgcacttagggggcgcccaactcttccatatcctttcacccggctcaaattccacagagccagccaagaaacgttggtaagctgttttaacatagtactcccccgaagcacctggaagccaacggaaagcatcaggtactccaggttgcaactgaatattctgtgttaagtcccaaattattaagaattcgacaatcacttctgtcggtaaactgccagagatgtcaccaacccaactgttatccctgagggcttgctgaactgttttccttttcctcattcgtattgaaactctatttaacagggaaggggcaatttctgagatacattggccatgcagccaacggtcagtccaaaatagcgttccagcaccatcccccactatggagcatagtgaggctgagaacatggcaatgacattaggatggacttgtacatcaaactcagcccaaggcctgtctggctgagttttcttgagccacaaccacctcaggttcaatgcccaaccaagaatttcaagattgtgtattcccaaacctcctagacttaagggtttacataccttattccaccccacaacacaatggccacctctgacatcctttctgcccttccacaaaaaacctcttctgattttgtcaatagccttgaccacccatttagggcaaggaatcacaataaggtgataaatagggatggcagtgaggacagatctgacaagtgttcgagaaaaaaaagatctgacaagtgttagtcttccagcttggttgattaaaggagccttccaacctggcagcttgttagcaactttatcaataagttccaaaaacacatttctaggcattttcttaacagaaagaggaaaccccaaatatttgcaaggaaagcctattatgttgcaagggaataaagattgtgcctcaccaacacattgatcattacattggatagggagtcatactgcatttactggcattggtttttaagcctgaggcctcccaaaaatccttaaaatctccttgatcactgtgatctctcttctgtttggctgtaagaaaagtacaacatcatcagcatacagggacatccgttgacaatttccatgtctcaatagaggcagcaacagtcccctttcttgtgcttttagaataagtgaatccaaggcatccattaccaggatgaaaagcattggggacaaagggtccccttgtctaagccctctatgatgcttgataatctcccctggttccccattcacaagtactcttgttgaagaagagtacaacattttagaaatgatgctgcaccaaacaggaccaaaacccaaatgcctgaagatttcaaacaagaagggccaagataccgagtcaaaagcttttccaatatccaatttcagcaggatacgggacaccttttgcctatgaatagcccttgcagtctgctgaaccgaaataaaattatcatggatgcttcttcccttcacaaaggcactttgattttttgacaccagaacagggagcctaggtgcaagtctggtggccaacagcttagttacaatttttgcaaaactgtgtatcagacttattggcctaaaatctttaacttccaaagcctcattctttttaggtaataaggtcacataagctgaattaaggagatgcagtttagaaatatccccatgcagcaatctgttaatagctgccataaaatcacccttaacaactggccaggcctttttataaaatctcccagtatagccatcaggcccaggggctttgtcagatgggagggccttgatagtattccagacctcctcctcactgaagttttggtccagatcatgtaagttcaaggccggcctatggaaggcatctagatttagagtagagtccctgtaagatactgtcccaagaagatgattatagaaatcccacactgcctcttttttatcttcctgctcgaacaataatctgtccccgacctgcaacttcccaatgaagttttttctcttcttatacctggcctgtcgatgaaaatatgaggtattggctgttggaatgtgaaccctaaccctaacaggggttccttgacgacccatttggggcactgaagagctataaaatagtagatatgggctgccgaaagcactgatttaaccaaggttgtcctcccagctgggttaattaacgcagctttccaaccaggtagcttatcagccaccttatcaatgagctccagaaaaacacttctaggcagcttcttaatagaaaggggtaaacccaaatacttgcatggaaaatccacaacgttgcaggggaacagatcttgtgcagcaccgaggtcttgctcaacacaacgaatggggtcaggctgcatttgtttatgtttgtgacaagaccagaagcctccccaaagatcctcagaatttctttgaccacccgccgtgacttcgttcctgttgggcttcaaatagaccacgacatcatcgggttaccttgaatttggacgctttgttagtcctcactcttttctaactggttcaggtcctattgactatattcagaaaatgcataatggagatttagtgcactgtgaaactacattccacaagatgggtcgtacagcacaggtaaacatcatatgtggacattgctcgaacaaagtgtgcaaagggtgattgtcgaactagctattcgttgtgttaaaagtggtcccagagtatttaaaggtttcacggtgggcttccatccccgctcatcagaaattgtttataatggattcactcagcctggatttgaacaacctcaccatggatttagcttccagactgagcagattcatgtgtctctttaccttagcgccaagtcctcactctcaggccttgttgggaaaccgaccttcaaggttaatccagtgaaagggcttggtgttacacttgcaggatcaggattcaatgatgccatgcctagtaccctgtctcctacagttttgaatgtggattggagatgtgaaattgttcgaaccagtccttatgaggtccatatttttatccctgtggagggctatgacccaattgaatttacactaacgaaaaaatgtggttacagacaagaaaaagagagtgatcccatgaaaggctgggcaaaatttggaattgtttcttgcgtgttcattgtcttatcatgcatactttgttgtggagggttcatctacaaaactcgcacattgcatttgtacggtttagatgcgctgcctggtattgcggtcttgtctgccctattggatgctgttgggagaccaagaggctacttgcctgcagttaatcctaatgaaaaccatgcaagccatgcatcttgagagcacgtggttggtaccacacaagtaggaagtagcacaatggataaatcatagggcatatgggccaatgtgaactaatgggtatattctgaggactgtttcctgtatgttttcattatatattcaattaatctagtctctactttatcagacataattcgttgacacatccagcatcagcctacccaagaaattttccctctgctacaagcaagtgagctcatggagcgttgctaattatcgcactattagtgtagcttttatgcacaagttctttacatgttcaaaaatgaaaagcatatacaccatcctttgtatcacgctttgtaacatttaatatcttattatcttgcagtagagtaggatactcaaaatttaattgagctcgtagcatagagcttacgtgtcatcaacatcagaaaagtcaaaagataaaaaaaaaatccataat

SEQ ID NO: 34214 - DNA, 4392 bp, Zea Mays
gaaggtgtcgcctgacggaccctggtccgggcaattacagccctagatagccccgcccgcaaagactcaacaatcctcaacggccctccgccgtctgggcccactgctatggcaagaagcgccatccgccgtgccgtgctcgccgcccccattttgaagccgtcgctctctctcgcggtctcacactctcacccaaggccggcatcccgctcggtgactgtgccgttcatttccgccgcgtacacatatctaacagggaaccactttgaaacttgaatatattggcgttgctatagtggagtaacatggccttctgcactatgtataccattcatctgtccgtcatagttttgttggcagtcacctacatgcatgtaccagttactgctatcatcgttgttccaacctctaattgttatacatttgataatgaaagccgtcttgttgattttacacatctgattggaaatgttttcgaatataaggaacagggctcacctcgctctgatttggttgtcgaattctgcaaagatgtgcagaaaagatctcaagagagaacgcatttccccgggtggtcaaggcctctacgtgctagacgatccgctgtccagcacctattaagggaagcaagccaaatgaagaatttgcacttagggggcgcccaactcttccatatcctttcacccggctcaaattccacagagccagccaagaaacgttggtaagctgttttaacatagtactcccccgaagcacctggaagccaacggaaagcatcaggtactccaggttgcaactgaatattctgtgttaagtcccaaattattaagaattcgacaatcacttctgtcggtaaactgccagagatgtcaccaacccaactgttatccctgagggcttgctgaactgttttccttttcctcattcgtattgaaactctatttaacagggaaggggcaatttctgagatacattggccatgcagccaacggtcagtccaaaatagcgttccagcaccatcccccactatggagcatagtgaggctgagaacatggcaatgacattaggatggacttgtacatcaaactcagcccaaggcctgtctggctgagttttcttgagccacaaccacctcaggttcaatgcccaaccaagaatttcaagattgtgtattcccaaacctcctagacttaagggtttacataccttattccaccccacaacacaatggccacctctgacatcctttctgcccttccacaaaaaacctcttctgattttgtcaatagccttgaccacccatttagggcaaggaatcacaataaggtgataaatagggatggcagtgaggacagatctgacaagtgttcgagaaaaaaaagatctgacaagtgttagtcttccagcttggttgattaaaggagccttccaacctggcagcttgttagcaactttatcaataagttccaaaaacacatttctaggcattttcttaacagaaagaggaaaccccaaatatttgcaaggaaagcctattatgttgcaagggaataaagattgtgcctcaccaacacattgatcattacattggatagggagtcatactgcatttactggcattggtttttaagcctgaggcctcccaaaaatccttaaaatctccttgatcactgtgatctctcttctgtttggctgtaagaaaagtacaacatcatcagcatacagggacatccgttgacaatttccatgtctcaatagaggcagcaacagtcccctttcttgtgcttttagaataagtgaatccaaggcatccattaccaggatgaaaagcattggggacaaagggtccccttgtctaagccctctatgatgcttgataatctcccctggttccccattcacaagtactcttgttgaagaagagtacaacattttagaaatgatgctgcaccaaacaggaccaaaacccaaatgcctgaagatttcaaacaagaagggccaagataccgagtcaaaagcttttccaatatccaatttcagcaggatacgggacaccttttgcctatgaatagcccttgcagtctgctgaaccgaaataaaattatcatggatgcttcttcccttcacaaaggcactttgattttttgacaccagaacagggagcctaggtgcaagtctggtggccaacagcttagttacaatttttgcaaaactgtgtatcagacttattggcctaaaatctttaacttccaaagcctcattctttttaggtaataaggtcacataagctgaattaaggagatgcagtttagaaatatccccatgcagcaatctgttaatagctgccataaaatcacccttaacaactggccaggcctttttataaaatctcccagtatagccatcaggcccaggggctttgtcagatgggagggccttgatagtattccagacctcctcctcactgaagttttggtccagatcatgtaagttcaaggccggcctatggaaggcatctagatttagagtagagtccctgtaagatactgtcccaagaagatgattatagaaatcccacactgcctcttttttatcttcctgctcgaacaataatctgtccccgacctgcaacttcccaatgaagttttttctcttcttatacctggcctgtcgatgaaaatatgaggtattggctgttggaatgtgaaccctaaccctaacaggggttccttgacgacccatttggggcactgaagagctataaaatagtagatatgggctgccgaaagcactgatttaaccaaggttgtcctcccagctgggttaattaacgcagctttccaaccaggggaacagatcttgtgcagcaccgaggtcttgctcaacacaacgaatggggtcaggctgcatttgtttatgtttgtgacaagaccagaagcctccccaaagatcctcagaatttctttgaccacccgccgtgacttcgttcctgttgggcttcaaatagaccacgacatcatcgggttaccttgaatttggacgctttgttagtcctcactcttttctaactggttcaggtcctattgactatattcagaaaatgcataatggagatttagtgcactgtgaaactacattccacaagatgggtcgtacagcacaggtaaacatcatatgtggacattgctcgaacaaagtgtgcaaagatgaacaaggatgcatttgcaacatatcttaccatgaacgaatgtgcagggtgattgtcgaactagctattcgttgtgttaaaagtggtcccagagtatttaaaggtttcacggtgggcttccatccccgctcatcagaaattgtttataatggattcactcagcctggatttgaacaacctcaccatggatttagcttccagactgagcagattcatgtgtctctttaccttagcgccaagtcctcactctcaggccttgttgggaaaccgaccttcaaggttaatccagtgaaagggcttggtgttacacttgcaggatcaggattcaatgatgccatgcctagtaccctgtctcctacagttttgaatgtggattggagatgtgaaattgttcgaaccagtccttatgaggtccatatttttatccctgtggagggctatgacccaattgaatttacactaacgaaaaaatgtggttacagacaagaaaaagagagtgatcccatgaaaggctgggcaaaatttggaattgtttcttgcgtgttcattgtcttatcatgcatactttgttgtggagggttcatctacaaaactcgcacattgcatttgtacggtttagatgcgctgcctggtattgcggtcttgtctgccctattggatgctgttgggagaccaagaggctacttgcctgcagttaatcctaatgaaaaccatgcaagccatgcatcttgagagcacgtggttggtaccacacaagtaggaagtagcacaatggataaatcatagggcatatgggccaatgtgaactaatgggtatattctgaggactgtttcctgtatgttttcattatatattcaattaatctagtctctactttatcagacataattcgttgacacatccagcatcagcctacccaagaaattttccctctgctacaagcaagtgagctcatggagcgttgctaattatcgcactattagtgtagcttttatgcacaagttctttacatgttcaaaaatgaaaagcatatacaccatcctttgtatcacgctttgtaacatttaatatcttattatcttgcagtagagtaggatactcaaaatttaattgagctcgtagcatagagcttacgtgtcatcaacatcagaaaagtcaaaagataaaaaaaaaatccataat

SEQ ID NO: 34215 - DNA, 3262 bp, Zea Mays
caagaagcgccatccgccgtgccgtgctcgccgcccccattttgaagccgtcgctctctctcgcggtctcacactctcacccaaggccggcatcccgctcggtgactgtgccgttcatttccgccgcgtacacatatctaacagggaaccactttgaaacttgaatatattggcgttgctatagtggagtaacatggccttctgcactatgtataccattcatctgtccgtcatagttttgttggcagtcacctacatgcatgtaccagttactgctatcatcgttgttccaacctctaattgttatacatttgataatgaaagccgtcttgttgattttgtatccatacaatcatgctcttcactatgcaccatgtactttgaaactagatgaaattctttcatgttgctctcctaagcagctttcagacacatctgattggaaatgttttcgaatataaggaacagggctcacctcgctctgatttggttgtcgaattctgcaaagatgtgcagaaaagatctcaagagagaacgcatttccccgggtggtcaaggcctctacgtgctagacgatccgctgtccagcacctattaagggaagcaagccaaatgaagaatttgcacttagggggcgcccaactcttccatatcctttcacccggctcaaattccacagagccagccaagaaacgttggtaagctgttttaacatagtactcccccgaagcacctggaagccaacggaaagcatcaggtactccaggttgcaactgaatattctgtgttaagtcccaaattattaagaattcgacaatcacttctgtcggtaaactgccagagatgtcaccaacccaactgttatccctgagggcttgctgaactgttttccttttcctcattcgtattgaaactctatttaacagggaaggggcaatttctgagatacattggccatgcagccaacggtcagtccaaaatagcgttccagcaccatcccccactatggagcatagtgaggctgagaacatggcaatgacattaggatggacttgtacatcaaactcagcccaaggcctgtctggctgagttttcttgagccacaaccacctcaggttcaatgcccaaccaagaatttcaagattgtgtattcccaaacctcctagacttaagggtttacataccttattccaccccacaacacaatggccacctctgacatcctttctgcccttccacaaaaaacctcttctgattttgtcaatagccttgaccacccatttagggcaaggaatcacaataaggtgataaatagggatggcagtgaggacagatctgacaagtgttcgagaaaaaaaagatctgacaagtgttagtcttccagcttggttgattaaaggagccttccaacctggcagcttgttagcaactttatcaataagttccaaaaacacatttctaggcattttcttaacagaaagaggaaaccccaaatatttgcaaggaaagcctattatgttgcaagggaataaagattgtgcctcaccaacacattgatcattacattggatagggagtcatactgcatttactggcattggtttttaagcctgaggcctcccaaaaatccttaaaatctccttgatcactgtgatctctcttctgtttggctgtaagaaaagtacaacatcatcagcatacagggacatccgttgacaatttccatgtctcaatagaggcagcaacagtcccctttcttgtgcttttagaataagtgaatccaaggcatccattaccaggatgaaaagcattggggacaaagggtccccttgtctaagccctctatgatgcttgataatctcccctggttccccattcacaagtactcttgttgaagaagagtacaacattttagaaatgatgctgcaccaaacaggaccaaaacccaaatgcctgaagatttcaaacaagaagggccaagataccgagtcaaaagcttttccaatatccaatttcagcaggatacgggacaccttttgcctatgaatagcccttgcagtctgctgaaccgaaataaaattatcatggatgcttcttcccttcacaaaggcactttgattttttgacaccagaacagggagcctaggtgcaagtctggtggccaacagcttagttacaatttttgcaaaactgtgtatcagacttattggcctaaaatctttaacttccaaagcctcattctttttaggtaataaggtcacataagctgaattaaggagatgcagtttagaaatatccccatgcagcaatctgttaatagctgccataaaatcacccttaacaactggccaggcctttttataaaatctcccagtatagccatcaggcccaggggctttgtcagatgggagggccttgatagtattccagacctcctcctcactgaagttttggtccagatcatgtaagttcaaggccggcctatggaaggcatctagatttagagtagagtccctgtaagatactgtcccaagaagatgattatagaaatcccacactgcctcttttttatcttcctgctcgaacaataatctgtccccgacctgcaacttcccaatgaagttttttctcttcttatacctggcctgtcgatgaaaatatgaggtattggctgttggaatgtgaaccctaaccctaacaggggttccttgacgacccatttggggcactgaagagctataaaatagtagatatgggctgccgaaagcactgatttaaccaaggttgtcctcccagctgggttaattaacgcagctttccaaccaggtagcttatcagccaccttatcaatgagctccagaaaaacacttctaggcagcttcttaatagaaaggggtaaacccaaatacttgcatggaaaatccacaacgttgcaggggaacagatcttgtgcagcaccgaggtcttgctcaacacaacgaatggggtcaggctgcatttgtttatgtttgtgacaagaccagaagcctccccaaagatcctcagaatttctttgaccacccgccgtgacttcgttcctgttgggcttcaaatagaccacgacatcatcgggttaccttgaatttggacgctttgttagtcctcactcttttctaactggttcaggtcctattgactatattcagaaaatgcataatggagatttagtgcactgtgaaactacattccacaagatgggtcgtacagcacagggtgattgtcg

SEQ ID NO: 34216 - DNA, 3290 bp, Zea Mays
cggccctccgccgtctgggcccactgctatggcaagaagcgccatccgccgtgccgtgctcgccgcccccattttgaagccgtcgctctctctcgcggtctcacactctcacccaaggccggcatcccgctcggtgactgtgccgttcatttccgccgcgggaaccactttgaaacttgaatatattggcgttgctatagtggagtaacatggccttctgcactatgtataccattcatctgtccgtcatagttttgttggcagtcacctacatgcatgtaccagttactgctatcatcgttgttccaacctctaattgttatacatttgataatgaaagccgtcttgttgattttacacatctgattggaaatgttttcgaatataaggaacagggctcacctcgctctgatttggttgtcgaattctgcaaagatgtgcagaaaagatctcaagagagaacgcatttccccgggtggtcaaggcctctacgtgctagacgatccgctgtccagcacctattaagggaagcaagccaaatgaagaatttgcacttagggggcgcccaactcttccatatcctttcacccggctcaaattccacagagccagccaagaaacgttggtaagctgttttaacatagtactcccccgaagcacctggaagccaacggaaagcatcaggtactccaggttgcaactgaatattctgtgttaagtcccaaattattaagaattcgacaatcacttctgtcggtaaactgccagagatgtcaccaacccaactgttatccctgagggcttgctgaactgttttccttttcctcattcgtattgaaactctatttaacagggaaggggcaatttctgagatacattggccatgcagccaacggtcagtccaaaatagcgttccagcaccatcccccactatggagcatagtgaggctgagaacatggcaatgacattaggatggacttgtacatcaaactcagcccaaggcctgtctggctgagttttcttgagccacaaccacctcaggttcaatgcccaaccaagaatttcaagattgtgtattcccaaacctcctagacttaagggtttacataccttattccaccccacaacacaatggccacctctgacatcctttctgcccttccacaaaaaacctcttctgattttgtcaatagccttgaccacccatttagggcaaggaatcacaataaggtgataaatagggatggcagtgaggacagatctgacaagtgttcgagaaaaaaaagatctgacaagtgttagtcttccagcttggttgattaaaggagccttccaacctggcagcttgttagcaactttatcaataagttccaaaaacacatttctaggcattttcttaacagaaagaggaaaccccaaatatttgcaaggaaagcctattatgttgcaagggaataaagattgtgcctcaccaacacattgatcattacattggatagggagtcatactgcatttactggcattggtttttaagcctgaggcctcccaaaaatccttaaaatctccttgatcactgtgatctctcttctgtttggctgtaagaaaagtacaacatcatcagcatacagggacatccgttgacaatttccatgtctcaatagaggcagcaacagtcccctttcttgtgcttttagaataagtgaatccaaggcatccattaccaggatgaaaagcattggggacaaagggtccccttgtctaagccctctatgatgcttgataatctcccctggttccccattcacaagtactcttgttgaagaagagtacaacattttagaaatgatgctgcaccaaacaggaccaaaacccaaatgcctgaagatttcaaacaagaagggccaagataccgagtcaaaagcttttccaatatccaatttcagcaggatacgggacaccttttgcctatgaatagcccttgcagtctgctgaaccgaaataaaattatcatggatgcttcttcccttcacaaaggcactttgattttttgacaccagaacagggagcctaggtgcaagtctggtggccaacagcttagttacaatttttgcaaaactgtgtatcagacttattggcctaaaatctttaacttccaaagcctcattctttttaggtaataaggtcacataagctgaattaaggagatgcagtttagaaatatccccatgcagcaatctgttaatagctgccataaaatcacccttaacaactggccaggcctttttataaaatctcccagtatagccatcaggcccaggggctttgtcagatgggagggccttgatagtattccagacctcctcctcactgaagttttggtccagatcatgtaagttcaaggccggcctatggaaggcatctagatttagagtagagtccctgtaagatactgtcccaagaagatgattatagaaatcccacactgcctcttttttatcttcctgctcgaacaataatctgtccccgacctgcaacttcccaatgaagttttttctcttcttatacctggcctgtcgatgaaaatatgaggtattggctgttggaatgtgaaccctaaccctaacaggggttccttgacgacccatttggggcactgaagagctataaaatagtagatatgggctgccgaaagcactgatttaaccaaggttgtcctcccagctgggttaattaacgcagctttccaaccaggtagcttatcagccaccttatcaatgagctccagaaaaacacttctaggcagcttcttaatagaaaggggtaaacccaaatacttgcatggaaaatccacaacgttgcaggggaacagatcttgtgcagcaccgaggtcttgctcaacacaacgaatggggtcaggctgcatttgtttatgtttgtgacaagaccagaagcctccccaaagatcctcagaatttctttgaccacccgccgtgacttcgttcctgttgggcttcaaatagaccacgacatcatcgggttaccttgaatttggacgctttgttagtcctcactcttttctaactggttcaggtcctattgactatattcagaaaatgcataatggagatttagtgcactgtgaaactacattccacaagatgggtcgtacagcacaggtaaacatcatatgtggacattgctcgaacaaagtgtgcaaagatgaacaaggatgcatttgcaacatatcttaccatgaacgaatgtgcaggagaccaaagcaaaccatac

SEQ ID NO: 34217 - DNA, 3281 bp, Zea Mays
caaagactcaacaatcctcaacggccctccgccgtctgggcccactgctatggcaagaagcgccatccgccgtgccgtgctcgccgcccccattttgaagccgtcgctctctctcgcggtctcacactctcacccaaggccggcatcccgctcggtgactgtgccgttcatttccgccgcgtacacatatctaacagggaaccactttgaaacttgaatatattggcgttgctatagtggagtaacatggccttctgcactatgtataccattcatctgtccgtcatagttttgttggcagtcacctacatgcatgtaccagttactgctatcatcgttgttccaacctctaattgttatacatttgataatgaaagccgtcttgttgattttacacatctgattggaaatgttttcgaatataaggaacagggctcacctcgctctgatttggttgtcgaattctgcaaagatgtgcagaaaagatctcaagagagaacgcatttccccgggtggtcaaggcctctacgtgctagacgatccgctgtccagcacctattaagggaagcaagccaaatgaagaatttgcacttagggggcgcccaactcttccatatcctttcacccggctcaaattccacagagccagccaagaaacgttggtaagctgttttaacatagtactcccccgaagcacctggaagccaacggaaagcatcaggtactccaggttgcaactgaatattctgtgttaagtcccaaattattaagaattcgacaatcacttctgtcggtaaactgccagagatgtcaccaacccaactgttatccctgagggcttgctgaactgttttccttttcctcattcgtattgaaactctatttaacagggaaggggcaatttctgagatacattggccatgcagccaacggtcagtccaaaatagcgttccagcaccatcccccactatggagcatagtgaggctgagaacatggcaatgacattaggatggacttgtacatcaaactcagcccaaggcctgtctggctgagttttcttgagccacaaccacctcaggttcaatgcccaaccaagaatttcaagattgtgtattcccaaacctcctagacttaagggtttacataccttattccaccccacaacacaatggccacctctgacatcctttctgcccttccacaaaaaacctcttctgattttgtcaatagccttgaccacccatttagggcaaggaatcacaataaggtgataaatagggatggcagtgaggacagatctgacaagtgttcgagaaaaaaaagatctgacaagtgttagtcttccagcttggttgattaaaggagccttccaacctggcagcttgttagcaactttatcaataagttccaaaaacacatttctaggcattttcttaacagaaagaggaaaccccaaatatttgcaaggaaagcctattatgttgcaagggaataaagattgtgcctcaccaacacattgatcattacattggatagggagtcatactgcatttactggcattggtttttaagcctgaggcctcccaaaaatccttaaaatctccttgatcactgtgatctctcttctgtttggctgtaagaaaagtacaacatcatcagcatacagggacatccgttgacaatttccatgtctcaatagaggcagcaacagtcccctttcttgtgcttttagaataagtgaatccaaggcatccattaccaggatgaaaagcattggggacaaagggtccccttgtctaagccctctatgatgcttgataatctcccctggttccccattcacaagtactcttgttgaagaagagtacaacattttagaaatgatgctgcaccaaacaggaccaaaacccaaatgcctgaagatttcaaacaagaagggccaagataccgagtcaaaagcttttccaatatccaatttcagcaggatacgggacaccttttgcctatgaatagcccttgcagtctgctgaaccgaaataaaattatcatggatgcttcttcccttcacaaaggcactttgattttttgacaccagaacagggagcctaggtgcaagtctggtggccaacagcttagttacaatttttgcaaaactgtgtatcagacttattggcctaaaatctttaacttccaaagcctcattctttttaggtaataaggtcacataagctgaattaaggagatgcagtttagaaatatccccatgcagcaatctgttaatagctgccataaaatcacccttaacaactggccaggcctttttataaaatctcccagtatagccatcaggcccaggggctttgtcagatgggagggccttgatagtattccagacctcctcctcactgaagttttggtccagatcatgtaagttcaaggccggcctatggaaggcatctagatttagagtagagtccctgtaagatactgtcccaagaagatgattatagaaatcccacactgcctcttttttatcttcctgctcgaacaataatctgtccccgacctgcaacttcccaatgaagttttttctcttcttatacctggcctgtcgatgaaaatatgaggtattggctgttggaatgtgaaccctaaccctaacaggggttccttgacgacccatttggggcactgaagagctataaaatagtagatatgggctgccgaaagcactgatttaaccaaggttgtcctcccagctgggttaattaacgcagctttccaaccaggtagcttatcagccaccttatcaatgagctccagaaaaacacttctaggcagcttcttaatagaaaggggtaaacccaaatacttgcatggaaaatccacaacgttgcaggggaacagatcttgtgcagcaccgaggtcttgctcaacacaacgaatggggtcaggctgcatttgtttatgtttgtgacaagaccagaagcctccccaaagatcctcagaatttctttgaccacccgccgtgacttcgttcctgttgggcttcaaatagaccacgacatcatcgggttaccttgaatttggacgctttgttagtcctcactcttttctaactggttcaggtcctattgactatattcagaaaatgcataatggagatttagtgcactgtgaaactacattccacaagatgggtcgtacagcacaggtaaacatcatatgtggacattgctcgaacaaagtgtgcaaagacgagcgacagttcatctgaggc

SEQ ID NO: 34218 - DNA, 466 bp, Zea Mays
gttaatgatgatagaacttgaaaggctaaaaattgattttagaaacagctagtgcttttggcaaaccaaacccctcagccaaacagctgcatggtctagaggtagaggagtagactcctcacaccggttaagtctagctgagtattagtatactcagccttgcttgtggcaccatttttgcaggtaccatgcaggaattggttgatggtgtgacttggcctgccaccctgccaccgggttggacggtcgagtgggttgttgctccggcaggagaggagcacgaggagtagtgggctaggccttgcccatttcctcagtaccgacgacatcgattatccgctgcactttattttgtgaactttatttgctactcaagaactccgatttatgtaataactcagtacttaatttgaggtttcctgttttattgtatttcttctgtgactcaccttcgagtgggattgtg

SEQ ID NO: 34219 - DNA, 726 bp, Zea Mays
tgccgcccccatggccctgcccaggtacatataagatggcccctgcgacctcccataagccatcggcgagtaaaagcaccgctgagcaccgattgctcggatttgggtgggggatcaggggtgctcaccggtgtacatcgtacttggggctggtttttcccaagcgtctagaacaagcaatgaaggcccccttccgtggcaatagatttggtgcgagctgatggcgtccgtcaggagtccgctatacaatgacgggttctagaaaccgagtccgggagccggcggtggcagtggtgaacaacaaagctgggcgttggcctgccagcgtcaccggtgaaggtgcctcagacgcccaagccgcccatgttgcccttctacttaccgaaccgccctcgccctcgccctcgccctccagctacaagggctcgccgccgtacaaactaaagcccgccgccgctctgtagtttatggggaagaaacgactccgtccgttgatctgggaggtgagaatggagtcaccgtcgcagtccttggcctgcatcgccgattgaagtccgcactgtggtcagggatggccgcctgggtgtgtgctggctcatcgtggcattgacggacgacgacgacccccgtttccaacccaatttctcaccagacttgggaaatcaccgacgatcacaccatgccgtggccagccttgtgggcgcctttctcgcaggtagtctgcta

SEQ ID NO: 34220 - DNA, 1463 bp, Zea Mays
ggatgatagggctctctacctagatccccatgaagtttagatggtaatagaataaacatagaaggcgctttcagtttgccgtgttccgcaaggaagagagctagttatagatctttctgagtgtacagtttatttggaggggagaaggataaagatgagaatggcgatgaagcgccatcgaaagtattggcaaatattaagtggcctgaaacactcgagactgattttatctacagtgctttatcatttgggacttcaattaatccacagttcattgcaagctttgcttctgctgctggtaaacgtcctcatcaagatttcgactctcaagaatctgatccagagtggggttggtggatagcaaaccatgagctgaagaagccatcaattagtctgttgtttccaacaatcatcctcctcagtcgccgccatcaacagcagcagcagcgatgctaaatagtagtggtggatctggttctaactactctggtggcgagatcctacctccaccatttttttatctttattatctgtgattctgcaatccacatgtttgattttttacttagtttctctttgagaccggtcgccatgtttggttagcacatctagaatgcattacaattggaggcaatagctgttcactatccactataacctgaaagcttagctgttcaactgagctttctgattcttccatttttttccattcaagtatatgatattcttgtgtgctattcaatattacaaataacaaatttgcatatgagaataattaagtaaatttggccacctaatcagtaggattgtttggttggaggaatttttgtagcatgtgaaacttgagctaattagaaagcaaccactaccttctcttcagcatgaaaaaatagcttagccatttcttagagttaagcccttagccacttgctggccttatcgtctggaagaagaaatggtactcaactgctggtctctttggcaaatttttctttgcacttttcttgttcgaactggcaatccacaaccaagtaccttgcttgcaccaacaaaagtcccttctactgtagggcaatccatggatttattgcttgtcctgaaatttgatagaggcattcatgatatcagttgctcgttaattccatttgtttcttgttctcttgtgcattgttatgacatatttgcaccttttgcggggaacgatcgaccaacaatggagtggcccactagattaaagatcgctctgtgtgctgccaagggtttagctcatcttcatgaagactgtcatccaaagatcatccaccgcgacattaaggcatctaacattcttcttgacttcaaatttgaatataaggttgctgactttggacttgcaaagttcactactaataataacacccatgtttcaacaagagtaatgggcacctttggtttcttgtagttatccgctggattaacggcga

SEQ ID NO: 34221 - DNA, 4358 bp, Zea Mays
ctctctcacatgtctcattcctgcccacacgcttctctctctcaccagcgccaggctgcgccgcctccgccccaccgcctacaggccgcgccgcctccgccccaccgcctgcaggccgcgccgcctccgccccaccgcctgcaggccgcgccgccgccccggctcggcaccgacagcaggccacgccgccgccgtgccaccgccccggctcgcgccaccgccctggctcggcaccaccgccccggctcggcaccgacagcgggtcgcgccgccgcccctgctcgccaaccccagcggttcaaacattagctcgttttcactgctactgcattgggttctgcatagttcttccttggttgtttgatgtaaaccacagctggggagcttagctgtatagaactgatttcacgtgtttgttgacgagtttagctgcataggtaccgatgagtttgtcctgaacagaaattttatttggattcagttcggtgagctcttaattgtgtcctacccacatccctctgcatccctctgcagggtgcaagaactgtgctaacgtgtgttctaaggtcttccaaatcgaggatgatttcggacgggcaagagtttacgaccaatcaggcagcacagaactgattcaagaagctattgacagttggtgaggatggggaaaaatgtttatctttttttcgttaatttaccaatgatcctagtatccctactgaaaatttggtataacgtgggccaaacaaacatttcttttggtttcaagtcatgtattttgactaccttttctgatgttctgataagttctcgtttttgtaatgcacagagtagagagagtaaatgtatgattatgttgactgtaagattattttgactaccatgttacattcttctttgatcatttttgtttgaatgtaggcaaaggtgaaatgcttgtctggtttgctgtccaccagaattgtgctgaaccttagttcataatgatagtgccatttgtattgcatatgctttcacacactttcacttcatagcaatgccatttaacacaactgatgtcgtatagctgagccatcctacaaatttatttatctttatgcacattgggtatgctttcttcaacacagaagaatctgcctggcttaggcaagtgctccctgattttggatgcttgggaggttttaaagtcgagcgactagtaatgactagtcgagaagtagatgcagaggtgatagtcaatatgagcgacttgactttctctactagtcgctcgactcgtcgactagtcacaactagtcgtagcatttgagttaggcgactagtcacaacacagaagaatctctgcagtaatccaagtttatcttactattttaacttagttgcattgcatttcttcgggtctacacatacaggtatcagtcttgcttgcttggatcttttcaaactgtggaactaattgaaacatttatgaactatcaggtacggggcagatagataagcttggttttttatccatccttttcgctgatatcagatacttcccgagcctaaaaaaaactaccatccctttccattttacattttcctctactatgttatgtcatgactgcattagtggtttaatctgttacctaagtataaaaatagcaacctgccaaatagtcgaatggttcaggaaagaagactttatgttgagtccacgagtgatgcatttatatttgcaatgttgtttgttttatctgtctctaggtttcaattttttttgggtgggggttcaaattaattgtggtttcacacatttttctaatgccatgtttgaacagatctcatgtatattggatttgtgttccagctccaaatacttgtcaagaacagaaatcactgcaataagttgtgagtagtaaaaaaagggacaatgcttaagttgcatgaaaactagatgagtataggtgaagcaatgcatgtgttagatgctactagttgctatgctaacctcttgaaatagatttcaatggggtcacctttttgggagtttctttttctttgtttacctaaatacctagtagatataattctttatggttgactgtagcctcattgtttttgactagtagattaagatgtatgatccagcatgtttctgcatctaaacatttgtatcatttcaagtgattgaacaatcgtagctttattgcttatttcagtatgtggtgcttctctgatgatagcatcgaaatattgatgaggcaatcacttcctgaagttgatatgttatatcatcaacacttcttccaaagtcaaactagccacggctttctaacctcttgtaatatgttttctgccttctcaggcaagttcacgctgggagaaaagacaagccaaagtcctggagaaggtaagaaggcggatgagccaagatgattccagaaagggtggctcatggagtgacatctggggagcaccaacaagatacgagaagaacggggagaaggataaagatgagaatggcgatgaagcgccatcgaaagtattggcaaatattaagtggcctgaaacactcgagactgattttatctacagtgagaaaacaatcaattttcctatactgaaatagttactccttccataccaaattataagtcgttctagcttttttaggctcagtttttgttatccatctagatatacactatgccttggtattattttttagatgtttcttgcttgggtaaaattattttataggtgctttatcatttgggacttcaattaatccacagttcattgcaagctttgcttctgctgctggtaaacgtcctcatcaagatttcgactctcaagaatctgatccagaggcaattcttaactgtttgctgaagcttacttggggttggtggatagcaaaccatgagctgaagaagccatcaattagtctgttgtttccaacaatcatcctcctcagtcgccgccatcaacagcagcagcagcgatgctaaatagtagtggtggatctggttctaactactctggtggcgagatcctacctccaccatttttttatctttattatctgtgattctgcaatccacatgtttgattttttacttagtttctctttgagaccggtcgccatgtttggttagcacatctagaatgcattacaattggaggcaatagctgttcactatccactataacctgaaagcttagctgttcaactgagctttctgattcttccatttttttccattcaagtatatgatattcttgtgtgctattcaatattacaaataacaaatttgcatatgagaataattaagtaaatttggccacctaatcagtaggattgtttggttggaggaatttttgtagcatgtgaaacttgagctaattagaaagcaaccactaccttctcttcagcatgaaaaaatagcttagccatttcttagagttaagcccttagccacttgctggccttatcgtctggaagaagaaatggtactcaactgctggtctctttggcaaatttttctttgcacttttcttgttcgaactggcaatccacaaccaagtaccttgcttgcaccaacaaaagtcccttctactgtagggcaatccatggatttattgcttgtcctgaaatttgatagaggcattcatgatatcagttgctcgttaattccatttgtttcttgttctcttgtgcattgttatgacatatttgcaccttttgcggggaacgatcgaccaacaatggagtggcccactagattaaagatcgctctgtgtgctgccaagggtttagctcatcttcatgaagactgtcatccaaagatcatccaccgcgacattaaggcatctaacattcttcttgacttcaaatttgaaggttgctgactttggacttgcaaagttcactactaataataacacccatgtttcaacaagagtaatgggcacctttgggtatttggcacctgagtatgcagcgtctggcaagctcacagaaaaatttgatgtattttcgttcggagtcatgcttcttgagcttattactgggcggcgaccaattgacacaacccaattggcactgcttgctataagcacatatgtacttccatttgcatgttgtataatactaataccaattgcaaaattatagttattttttctacccttgttagttaataagcatatttctggtcaataggttgtattcttattcttgtaaccgtgttaattaatgttatggacttgtagtcttgtattaccttgtgaatatatctgtccctgcctgccatgtgaacgtgcttagcctggaatttgtgatatgtacatatatcaatgtgtttgaaatc

SEQ ID NO: 34222 - DNA, 1849 bp, Zea Mays
gggctctctacctagatccccatgaagtttagatgtttatttggaggggagaaggataaagatgagaatggcgatgaagcgccatcgaaagtattggcaaatattaagtggcctgaaacactcgagactgattttatctacagtgagaaaacaatcaattttcctatactgaaatagttactccttccataccaaattataagtcgttctagcttttttaggctcagtttttgttatccatctagatatacactatgccttggtattattttttagatgtttcttgcttgggtaaaattattttataggtgctttatcatttgggacttcaattaatccacagttcattgcaagctttgcttctgctgctgtggggttggtggatagcaaaccatgagctgaagaagccatcaattagtctgttgtttccaacaatcatcctcctcagtcgccgccatcaacagcagcagcagcgatgctaaatagtagtggtggatctggttctaactactctggtggcgagatcctacctccaccatttttttatctttattatctgtgattctgcaatccacatgtttgattttttacttagtttctctttgagaccggtcgccatgtttggttagcacatctagaatgcattacaattggaggcaatagctgttcactatccactataacctgaaagcttagctgttcaactgagctttctgattcttccatttttttccattcaagtatatgatattcttgtgtgctattcaatattacaaataacaaatttgcatatgagaataattaagtaaatttggccacctaatcagtaggattgtttggttggaggaatttttgtagcatgtgaaacttgagctaattagaaagcaaccactaccttctcttcagcatgaaaaaatagcttagccatttcttagagttaagcccttagccacttgctggccttatcgtctggaagaagaaatggtactcaactgctggtctctttggcaaatttttctttgcacttttcttgttcgaactggcaatccacaaccaagtaccttgcttgcaccaacaaaagtcccttctactgtagggcaatccatggatttattgcttgtcctgaaatttgatagaggcattcatgatatcagttgctcgttaattccatttgtttcttgttctcttgtgcattgttatgacatatttgcaccttttgcggggaacgatcgaccaacaatggagtggcccactagattaaagatcgctctgtgtgctgccaagggtttagctcatcttcatgaagactgtcatccaaagatcatccaccgcgacattaaggcatctaacattcttcttgacttcaaatttgaatataaggttgctgactttggacttgcaaagttcactactaataataacacccatgtttcaacaagagtaatgggcacctttgggtatttggcacctgagtatgcagcgtctggcaagctcacagaaaaatttgatgtattttctttcggagtcatgcttcttgagcttattactgggcggcgaccaattgacacaacccaattggcactgcttgctataagcacatatgtacttccatttgcatgttgtataatactaataccaattgcaaaattatagttattttttctacccttgttagttaataagcatatttctggtcaataggttgtattcttattcttgtaaccgtgttaattaatgttatggacttgtagtcttgtattaccttgtgaatatatctgtccctgcctgccatgtgaacgtgcttagcctggaatttgtgatatgtacatatatcaatgtgtttgaaatc

SEQ ID NO: 34223 - DNA, 2547 bp, Zea Mays
ctgtctctaggtttcaattttttttgggtgggggttcaaattaattgtggtttcacacatttttctaatgccatgtttgaacagatctcatgtatattggatttgtgttccagctccaaatacttgtcaagaacagaaatcactgcaataagttgtgagtagtaaaaaaagggacaatgcttaagttgcatgaaaactagatgagtataggtgaagcaatgcatgtgttagatgctactagttgctatgctaacctcttgaaatagatttcaatggggtcacctttttgggagtttctttttctttgtttacctaaatacctagtagatataattctttatggttgactgtagcctcattgtttttgactagtagattaagatgtatgatccagcatgtttctgcatctaaacatttgtatcatttcaagtgattgaacaatcgtagctttattgcttatttcagtatgtggtgcttctctgatgatagcatcgaaatattgatgaggcaatcacttcctgaagttgatatgttatatcatcaacacttcttccaaagtcaaactagccacggctttctaacctcttgtaatatgttttctgccttctcaggcaagttcacgctgggagaaaagacaagccaaagtcctggagaaggtaagaaggcggatgagccaagatgattccagaaagggtggctcatggagtgacatctggggagcaccaacaagatacgagaagaacggggagaaggataaagatgagaatggcgatgaagcgccatcgaaagtattggcaaatattaagtggcctgaaacactcgagactgattttatctacagtgagaaaacaatcaattttcctatactgaaatagttactccttccataccaaattataagtcgttctagcttttttaggctcagtttttgttatccatctagatatacactatgccttggtattattttttagatgtttcttgcttgggtaaaattattttataggtgctttatcatttgggacttcaattaatccacagttcattgcaagctttgcttctgctgctgtggggttggtggatagcaaaccatgagctgaagaagccatcaattagtctgttgtttccaacaatcatcctcctcagtcgccgccatcaacagcagcagcagcgatgctaaatagtagtggtggatctggttctaactactctggtggcgagatcctacctccaccatttttttatctttattatctgtgattctgcaatccacatgtttgattttttacttagtttctctttgagaccggtcgccatgtttggttagcacatctagaatgcattacaattggaggcaatagctgttcactatccactataacctgaaagcttagctgttcaactgagctttctgattcttccatttttttccattcaagtatatgatattcttgtgtgctattcaatattacaaataacaaatttgcatatgagaataattaagtaaatttggccacctaatcagtaggattgtttggttggaggaatttttgtagcatgtgaaacttgagctaattagaaagcaaccactaccttctcttcagcatgaaaaaatagcttagccatttcttagagttaagcccttagccacttgctggccttatcgtctggaagaagaaatggtactcaactgctggtctctttggcaaatttttctttgcacttttcttgttcgaactggcaatccacaaccaagtaccttgcttgcaccaacaaaagtcccttctactgtagggcaatccatggatttattgcttgtcctgaaatttgatagaggcattcatgatatcagttgctcgttaattccatttgtttcttgttctcttgtgcattgttatgacatatttgcaccttttgcggggaacgatcgaccaacaatggagtggcccactagattaaagatcgctctgtgtgctgccaagggtttagctcatcttcatgaagactgtcatccaaagatcatccaccgcgacattaaggcatctaacattcttcttgacttcaaatttgaatataaggttgctgactttggacttgcaaagttcactactaataataacacccatgtttcaacaagagtaatgggcacctttgggtatttggcacctgagtatgcagcgtctggcaagctcacagaaaaatttgatgtattttctttcggagtcatgcttcttgagcttattactgggcggcgaccaattgacacaacccaattggcactgcttgctataagcacatatgtacttccatttgcatgttgtataatactaataccaattgcaaaattatagttattttttctacccttgttagttaataagcatatttctggtcaataggttgtattcttattcttgtaaccgtgttaattaatgttatggacttgtagtcttgtattaccttgtgaatatatctgtccctgcctgccatgtgaacgtgcttagcctggaatttgtgatatgtacatatatcaatgtgtttgaaatc

SEQ ID NO: 34224 - DNA, 3638 bp, Zea Mays
gatggggaaaaatgtttatctttttttcgttaatttaccaatgatcctagtatccctactgaaaatttggtataacgtgggccaaacaaacatttcttttggtttcaagtcatgtattttgactaccttttctgatgttctgataagttctcgtttttgtaatgcacagagtagagagagtaaatgtatgattatgttgactgtaagattattttgactaccatgttacattcttctttgatcatttttgtttgaatgtaggcaaaggtgaaatgcttgtctggtttgctgtccaccagaattgtgctgaaccttagttcataatgatagtgccatttgtattgcatatgctttcacacactttcacttcatagcaatgccatttaacacaactgatgtcgtatagctgagccatcctacaaatttatttatctttatgcacattgggtatgctttcttcaacacagaagaatctgcctggcttaggcaagtgctccctgattttggatgcttgggaggttttaaagtcgagcgactagtaatgactagtcgagaagtagatgcagaggtgatagtcaatatgagcgacttgactttctctactagtcgctcgactcgtcgactagtcacaactagtcgtagcatttgagttaggcgactagtcacaacacagaagaatctctgcagtaatccaagtttatcttactattttaacttagttgcattgcatttcttcgggtctacacatacaggtatcagtcttgcttgcttggatcttttcaaactgtggaactaattgaaacatttatgaactatcaggtacggggcagatagataagcttggttttttatccatccttttcgctgatatcagatacttcccgagcctaaaaaaaactaccatccctttccattttacattttcctctactatgttatgtcatgactgcattagtggtttaatctgttacctaagtataaaaatagcaacctgccaaatagtcgaatggttcaggaaagaagactttatgttgagtccacgagtgatgcatttatatttgcaatgttgtttgttttatctgtctctaggtttcaattttttttgggtgggggttcaaattaattgtggtttcacacatttttctaatgccatgtttgaacagatctcatgtatattggatttgtgttccagctccaaatacttgtcaagaacagaaatcactgcaataagttgtgagtagtaaaaaaagggacaatgcttaagttgcatgaaaactagatgagtataggtgaagcaatgcatgtgttagatgctactagttgctatgctaacctcttgaaatagatttcaatggggtcacctttttgggagtttctttttctttgtttacctaaatacctagtagatataattctttatggttgactgtagcctcattgtttttgactagtagattaagatgtatgatccagcatgtttctgcatctaaacatttgtatcatttcaagtgattgaacaatcgtagctttattgcttatttcagtatgtggtgcttctctgatgatagcatcgaaatattgatgaggcaagttcacgctgggagaaaagacaagccaaagtcctggagaaggtaagaaggcggatgagccaagatgattccagaaagggtggctcatggagtgacatctggggagcaccaacaagatacgagaagaacggtacatcccattactaaaggagacatttatgttcccacaaagcttgggcattttaggtggaaaacctggtacatcaacacacattgctggggtacaggatgatagggctctctacctagatccccatgaagtttagatggtaatagaataaacatagaaggcgctttcagtttgccgtgttccgcaaggaagagagctagttatagatctttctgagtgtacagtttatttggaggggagaaggataaagatgagaatggcgatgaagcgccatcgaaagtattggcaaatattaagtggcctgaaacactcgagactgattttatctacagtgctttatcatttgggacttcaattaatccacagttcattgcaagctttgcttctgctgctggtaaacgtcctcatcaagatttcgactctcaagaatctgatccagagtggggttggtggatagcaaaccatgagctgaagaagccatcaattagtctgttgtttccaacaatcatcctcctcagtcgccgccatcaacagcagcagcagcgatgctaaatagtagtggtggatctggttctaactactctggtggcgagatcctacctccaccatttttttatctttattatctgtgattctgcaatccacatgtttgattttttacttagtttctctttgagaccggtcgccatgtttggttagcacatctagaatgcattacaattggaggcaatagctgttcactatccactataacctgaaagcttagctgttcaactgagctttctgattcttccatttttttccattcaagtatatgatattcttgtgtgctattcaatattacaaataacaaatttgcatatgagaataattaagtaaatttggccacctaatcagtaggattgtttggttggaggaatttttgtagcatgtgaaacttgagctaattagaaagcaaccactaccttctcttcagcatgaaaaaatagcttagccatttcttagagttaagcccttagccacttgctggccttatcgtctggaagaagaaatggtactcaactgctggtctctttggcaaatttttctttgcacttttcttgttcgaactggcaatccacaaccaagtaccttgcttgcaccaacaaaagtcccttctactgtagggcaatccatggatttattgcttgtcctgaaatttgatagaggcattcatgatatcagttgctcgttaattccatttgtttcttgttctcttgtgcattgttatgacatatttgcaccttttgcggggaacgatcgaccaacaatggagtggcccactagattaaagatcgctctgtgtgctgccaagggtttagctcatcttcatgaagactgtcatccaaagatcatccaccgcgacattaaggcatctaacattcttcttgacttcaaatttgaatataaggttgctgactttggacttgcaaagttcactactaataataacacccatgtttcaacaagagtaatgggcacctttgggtatttggcacctgagtatgcagcgtctggcaagctcacagaaaaatttgatgtattttctttcggagtcatgcttcttgagcttattactgggcggcgaccaattgacacaacccaattggcactgcttgctataagcacatatgtacttccatttgcatgttgtataatactaataccaattgcaaaattatagttattttttctacccttgttagttaataagcatatttctggtcaataggttgtattcttattcttgtaaccgtgttaattaatgttatggacttgtagtcttgtattaccttgtgaatatatctgtccctgcctgccatgtgaacgtgcttagcctggaatttgtgatatgtacatatatcaatgtgtttgaaatc

SEQ ID NO: 34225 - DNA, 3695 bp, Zea Mays
gatggggaaaaatgtttatctttttttcgttaatttaccaatgatcctagtatccctactgaaaatttggtataacgtgggccaaacaaacatttcttttggtttcaagtcatgtattttgactaccttttctgatgttctgataagttctcgtttttgtaatgcacagagtagagagagtaaatgtatgattatgttgactgtaagattattttgactaccatgttacattcttctttgatcatttttgtttgaatgtaggcaaaggtgaaatgcttgtctggtttgctgtccaccagaattgtgctgaaccttagttcataatgatagtgccatttgtattgcatatgctttcacacactttcacttcatagcaatgccatttaacacaactgatgtcgtatagctgagccatcctacaaatttatttatctttatgcacattgggtatgctttcttcaacacagaagaatctgcctggcttaggcaagtgctccctgattttggatgcttgggaggttttaaagtcgagcgactagtaatgactagtcgagaagtagatgcagaggtgatagtcaatatgagcgacttgactttctctactagtcgctcgactcgtcgactagtcacaactagtcgtagcatttgagttaggcgactagtcacaacacagaagaatctctgcagtaatccaagtttatcttactattttaacttagttgcattgcatttcttcgggtctacacatacaggtatcagtcttgcttgcttggatcttttcaaactgtggaactaattgaaacatttatgaactatcaggtacggggcagatagataagcttggttttttatccatccttttcgctgatatcagatacttcccgagcctaaaaaaaactaccatccctttccattttacattttcctctactatgttatgtcatgactgcattagtggtttaatctgttacctaagtataaaaatagcaacctgccaaatagtcgaatggttcaggaaagaagactttatgttgagtccacgagtgatgcatttatatttgcaatgttgtttgttttatctgtctctaggtttcaattttttttgggtgggggttcaaattaattgtggtttcacacatttttctaatgccatgtttgaacagatctcatgtatattggatttgtgttccagctccaaatacttgtcaagaacagaaatcactgcaataagttgtgagtagtaaaaaaagggacaatgcttaagttgcatgaaaactagatgagtataggtgaagcaatgcatgtgttagatgctactagttgctatgctaacctcttgaaatagatttcaatggggtcacctttttgggagtttctttttctttgtttacctaaatacctagtagatataattctttatggttgactgtagcctcattgtttttgactagtagattaagatgtatgatccagcatgtttctgcatctaaacatttgtatcatttcaagtgattgaacaatcgtagctttattgcttatttcagtatgtggtgcttctctgatgatagcatcgaaatattgatgaggcaatcacttcctgaagttgatatgttatatcatcaacacttcttccaaagtcaaactagccacggctttctaacctcttgtaatatgttttctgccttctcaggcaagttcacgctgggagaaaagacaagccaaagtcctggagaaggtaagaaggcggatgagccaagatgattccagaaagggtggctcatggagtgacatctggggagcaccaacaagatacgagaagaacggtacatcccattactaaaggagacatttatgttcccacaaagcttgggcattttaggtggaaaacctggtacatcaacacacattgctggggtacaggatgatagggctctctacctagatccccatgaagtttagatggtaatagaataaacatagaaggcgctttcagtttgccgtgttccgcaaggaagagagctagttatagatctttctgagtgtacagtttatttggaggggagaaggataaagatgagaatggcgatgaagcgccatcgaaagtattggcaaatattaagtggcctgaaacactcgagactgattttatctacagtgctttatcatttgggacttcaattaatccacagttcattgcaagctttgcttctgctgctgtggggttggtggatagcaaaccatgagctgaagaagccatcaattagtctgttgtttccaacaatcatcctcctcagtcgccgccatcaacagcagcagcagcgatgctaaatagtagtggtggatctggttctaactactctggtggcgagatcctacctccaccatttttttatctttattatctgtgattctgcaatccacatgtttgattttttacttagtttctctttgagaccggtcgccatgtttggttagcacatctagaatgcattacaattggaggcaatagctgttcactatccactataacctgaaagcttagctgttcaactgagctttctgattcttccatttttttccattcaagtatatgatattcttgtgtgctattcaatattacaaataacaaatttgcatatgagaataattaagtaaatttggccacctaatcagtaggattgtttggttggaggaatttttgtagcatgtgaaacttgagctaattagaaagcaaccactaccttctcttcagcatgaaaaaatagcttagccatttcttagagttaagcccttagccacttgctggccttatcgtctggaagaagaaatggtactcaactgctggtctctttggcaaatttttctttgcacttttcttgttcgaactggcaatccacaaccaagtaccttgcttgcaccaacaaaagtcccttctactgtagggcaatccatggatttattgcttgtcctgaaatttgatagaggcattcatgatatcagttgctcgttaattccatttgtttcttgttctcttgtgcattgttatgacatatttgcaccttttgcggggaacgatcgaccaacaatggagtggcccactagattaaagatcgctctgtgtgctgccaagggtttagctcatcttcatgaagactgtcatccaaagatcatccaccgcgacattaaggcatctaacattcttcttgacttcaaatttgaatataaggttgctgactttggacttgcaaagttcactactaataataacacccatgtttcaacaagagtaatgggcacctttgggtatttggcacctgagtatgcagcgtctggcaagctcacagaaaaatttgatgtattttctttcggagtcatgcttcttgagcttattactgggcggcgaccaattgacacaacccaattggcactgcttgctataagcacatatgtacttccatttgcatgttgtataatactaataccaattgcaaaattatagttattttttctacccttgttagttaataagcatatttctggtcaataggttgtattcttattcttgtaaccgtgttaattaatgttatggacttgtagtcttgtattaccttgtgaatatatctgtccctgcctgccatgtgaacgtgcttagcctggaatttgtgatatgtacatatatcaatgtgtttgaaatc

SEQ ID NO: 34226 - DNA, 3021 bp, Zea Mays
gatggggaaaaatgtttatctttttttcgttaatttaccaatgatcctagtatccctactgaaaatttggtataacgtgggccaaacaaacatttcttttggtttcaagtcatgtattttgactaccttttctgatgttctgataagttctcgtttttgtaatgcacagagtagagagagtaaatgtatgattatgttgactgtaagattattttgactaccatgttacattcttctttgatcatttttgtttgaatgtaggcaaaggtgaaatgcttgtctggtttgctgtccaccagaattgtgctgaaccttagttcataatgatagtgccatttgtattgcatatgctttcacacactttcacttcatagcaatgccatttaacacaactgatgtcgtatagctgagccatcctacaaatttatttatctttatgcacattgggtatgctttcttcaacacagaagaatctgcctggcttaggcaagtgctccctgattttggatgcttgggaggttttaaagtcgagcgactagtaatgactagtcgagaagtagatgcagaggtgatagtcaatatgagcgacttgactttctctactagtcgctcgactcgtcgactagtcacaactagtcgtagcatttgagttaggcgactagtcacaacacagaagaatctctgcagtaatccaagtttatcttactattttaacttagttgcattgcatttcttcgggtctacacatacaggtatcagtcttgcttgcttggatcttttcaaactgtggaactaattgaaacatttatgaactatcagtatgtggtgcttctctgatgatagcatcgaaatattgatgaggcaagttcacgctgggagaaaagacaagccaaagtcctggagaaggtaagaaggcggatgagccaagatgattccagaaagggtggctcatggagtgacatctggggagcaccaacaagatacgagaagaacggtacatcccattactaaaggagacatttatgttcccacaaagcttgggcattttaggtggaaaacctggtacatcaacacacattgctggggtacaggatgatagggctctctacctagatccccatgaagtttagatggtaatagaataaacatagaaggcgctttcagtttgccgtgttccgcaaggaagagagctagttatagatctttctgagtgtacagtttatttggaggggagaaggataaagatgagaatggcgatgaagcgccatcgaaagtattggcaaatattaagtggcctgaaacactcgagactgattttatctacagtgctttatcatttgggacttcaattaatccacagttcattgcaagctttgcttctgctgctggtaaacgtcctcatcaagatttcgactctcaagaatctgatccagaggcaattcttaactgtttgctgaagcttactgtattctagaaaatcactggaatatgtatatcttttcttgatggacataaccacttaagtgttccttaattttcgtagtggggttggtggatagcaaaccatgagctgaagaagccatcaattagtctgttgtttccaacaatcatcctcctcagtcgccgccatcaacagcagcagcagcgatgctaaatagtagtggtggatctggttctaactactctggtggcgagatcctacctccaccatttttttatctttattatctgtgattctgcaatccacatgtttgattttttacttagtttctctttgagaccggtcgccatgtttggttagcacatctagaatgcattacaattggaggcaatagctgttcactatccactataacctgaaagcttagctgttcaactgagctttctgattcttccatttttttccattcaagtatatgatattcttgtgtgctattcaatattacaaataacaaatttgcatatgagaataattaagtaaatttggccacctaatcagtaggattgtttggttggaggaatttttgtagcatgtgaaacttgagctaattagaaagcaaccactaccttctcttcagcatgaaaaaatagcttagccatttcttagagttaagcccttagccacttgctggccttatcgtctggaagaagaaatggtactcaactgctggtctctttggcaaatttttctttgcacttttcttgttcgaactggcaatccacaaccaagtaccttgcttgcaccaacaaaagtcccttctactgtagggcaatccatggatttattgcttgtcctgaaatttgatagaggcattcatgatatcagttgctcgttaattccatttgtttcttgttctcttgtgcattgttatgacatatttgcaccttttgcggggaacgatcgaccaacaatggagtggcccactagattaaagatcgctctgtgtgctgccaagggtttagctcatcttcatgaagactgtcatccaaagatcatccaccgcgacattaaggcatctaacattcttcttgacttcaaatttgaatataaggttgctgactttggacttgcaaagttcactactaataataacacccatgtttcaacaagagtaatgggcacctttgggtatttggcacctgagtatgcagcgtctggcaagctcacagaaaaatttgatgtattttctttcggagtcatgcttcttgagcttattactgggcggcgaccaattgacacaacccaattggcactgcttgctataagcacatatgtacttccatttgcatgttgtataatactaataccaattgcaaaattatagttattttttctacccttgttagttaataagcatatttctggtcaataggttgtattcttattcttgtaaccgtgttaattaatgttatggacttgtagtcttgtattaccttgtgaatatatctgtccctgcctgccatgtgaacgtgcttagcctggaatttgtgatatgtacatatatcaatgtgtttgaaatc

SEQ ID NO: 34227 - DNA, 2824 bp, Zea Mays
gatggggaaaaatgtttatctttttttcgttaatttaccaatgatcctagtatccctactgaaaatttggtataacgtgggccaaacaaacatttcttttggtttcaagtcatgtattttgactaccttttctgatgttctgataagttctcgtttttgtaatgcacagagtagagagagtaaatgtatgattatgttgactgtaagattattttgactaccatgttacattcttctttgatcatttttgtttgaatgtaggcaaaggtgaaatgcttgtctggtttgctgtccaccagaattgtgctgaaccttagttcataatgatagtgccatttgtattgcatatgctttcacacactttcacttcatagcaatgccatttaacacaactgatgtcgtatagctgagccatcctacaaatttatttatctttatgcacattgggtatgctttcttcaacacagaagaatctgcctggcttaggcaagtgctccctgattttggatgcttgggaggttttaaagtcgagcgactagtaatgactagtcgagaagtagatgcagaggtgatagtcaatatgagcgacttgactttctctactagtcgctcgactcgtcgactagtcacaactagtcgtagcatttgagttaggcgactagtcacaacacagaagaatctctgcagtaatccaagtttatcttactattttaacttagttgcattgcatttcttcgggtctacacatacaggtatcagtcttgcttgcttggatcttttcaaactgtggaactaattgaaacatttatgaactatcaggcaagttcacgctgggagaaaagacaagccaaagtcctggagaaggtaagaaggcggatgagccaagatgattccagaaagggtggctcatggagtgacatctggggagcaccaacaagatacgagaagaacggtacatcccattactaaaggagacatttatgttcccacaaagcttgggcattttaggtggaaaacctggtacatcaacacacattgctggggtacaggatgatagggctctctacctagatccccatgaagtttagatggtaatagaataaacatagaaggcgctttcagtttgccgtgttccgcaaggaagagagctagttatagatctttctgagtgtacagtttatttggaggggagaaggataaagatgagaatggcgatgaagcgccatcgaaagtattggcaaatattaagtggcctgaaacactcgagactgattttatctacagtgctttatcatttgggacttcaattaatccacagttcattgcaagctttgcttctgctgctgtggggttggtggatagcaaaccatgagctgaagaagccatcaattagtctgttgtttccaacaatcatcctcctcagtcgccgccatcaacagcagcagcagcgatgctaaatagtagtggtggatctggttctaactactctggtggcgagatcctacctccaccatttttttatctttattatctgtgattctgcaatccacatgtttgattttttacttagtttctctttgagaccggtcgccatgtttggttagcacatctagaatgcattacaattggaggcaatagctgttcactatccactataacctgaaagcttagctgttcaactgagctttctgattcttccatttttttccattcaagtatatgatattcttgtgtgctattcaatattacaaataacaaatttgcatatgagaataattaagtaaatttggccacctaatcagtaggattgtttggttggaggaatttttgtagcatgtgaaacttgagctaattagaaagcaaccactaccttctcttcagcatgaaaaaatagcttagccatttcttagagttaagcccttagccacttgctggccttatcgtctggaagaagaaatggtactcaactgctggtctctttggcaaatttttctttgcacttttcttgttcgaactggcaatccacaaccaagtaccttgcttgcaccaacaaaagtcccttctactgtagggcaatccatggatttattgcttgtcctgaaatttgatagaggcattcatgatatcagttgctcgttaattccatttgtttcttgttctcttgtgcattgttatgacatatttgcaccttttgcggggaacgatcgaccaacaatggagtggcccactagattaaagatcgctctgtgtgctgccaagggtttagctcatcttcatgaagactgtcatccaaagatcatccaccgcgacattaaggcatctaacattcttcttgacttcaaatttgaatataaggttgctgactttggacttgcaaagttcactactaataataacacccatgtttcaacaagagtaatgggcacctttgggtatttggcacctgagtatgcagcgtctggcaagctcacagaaaaatttgatgtattttctttcggagtcatgcttcttgagcttattactgggcggcgaccaattgacacaacccaattggcactgcttgctataagcacatatgtacttccatttgcatgttgtataatactaataccaattgcaaaattatagttattttttctacccttgttagttaataagcatatttctggtcaataggttgtattcttattcttgtaaccgtgttaattaatgttatggacttgtagtcttgtattaccttgtgaatatatctgtccctgcctgccatgtgaacgtgcttagcctggaatttgtgatatgtacatatatcaatgtgtttgaaatc

SEQ ID NO: 34228 - DNA, 2161 bp, Zea Mays
ggcaagttcacgctgggagaaaagacaagccaaagtcctggagaaggtaagaaggcggatgagccaagatgattccagaaagggtggctcatggagtgacatctggggagcaccaacaagatacgagaagaacggtacatcccattactaaaggagacatttatgttcccacaaagcttgggcattttaggtggaaaacctggtacatcaacacacattgctggggtacaggatgatagggctctctacctagatccccatgaagtttagatggtaatagaataaacatagaaggcgctttcagtttgccgtgttccgcaaggaagagagctagttatagatctttctgagtgtacagtttatttggaggggagaaggataaagatgagaatggcgatgaagcgccatcgaaagtattggcaaatattaagtggcctgaaacactcgagactgattttatctacagtgctttatcatttgggacttcaattaatccacagttcattgcaagctttgcttctgctgctggtaaacgtcctcatcaagatttcgactctcaagaatctgatccagaggcaattcttaactgtttgctgaagcttactgtattctagaaaatcactggaatatgtatatcttttcttgatggacataaccacttaagtgttccttaattttcgtagtggggttggtggatagcaaaccatgagctgaagaagccatcaattagtctgttgtttccaacaatcatcctcctcagtcgccgccatcaacagcagcagcagcgatgctaaatagtagtggtggatctggttctaactactctggtggcgagatcctacctccaccatttttttatctttattatctgtgattctgcaatccacatgtttgattttttacttagtttctctttgagaccggtcgccatgtttggttagcacatctagaatgcattacaattggaggcaatagctgttcactatccactataacctgaaagcttagctgttcaactgagctttctgattcttccatttttttccattcaagtatatgatattcttgtgtgctattcaatattacaaataacaaatttgcatatgagaataattaagtaaatttggccacctaatcagtaggattgtttggttggaggaatttttgtagcatgtgaaacttgagctaattagaaagcaaccactaccttctcttcagcatgaaaaaatagcttagccatttcttagagttaagcccttagccacttgctggccttatcgtctggaagaagaaatggtactcaactgctggtctctttggcaaatttttctttgcacttttcttgttcgaactggcaatccacaaccaagtaccttgcttgcaccaacaaaagtcccttctactgtagggcaatccatggatttattgcttgtcctgaaatttgatagaggcattcatgatatcagttgctcgttaattccatttgtttcttgttctcttgtgcattgttatgacatatttgcaccttttgcggggaacgatcgaccaacaatggagtggcccactagattaaagatcgctctgtgtgctgccaagggtttagctcatcttcatgaagactgtcatccaaagatcatccaccgcgacattaaggcatctaacattcttcttgacttcaaatttgaatataaggttgctgactttggacttgcaaagttcactactaataataacacccatgtttcaacaagagtaatgggcacctttgggtatttggcacctgagtatgcagcgtctggcaagctcacagaaaaatttgatgtattttctttcggagtcatgcttcttgagcttattactgggcggcgaccaattgacacaacccaattggcactgcttgctataagcacatatgtacttccatttgcatgttgtataatactaataccaattgcaaaattatagttattttttctacccttgttagttaataagcatatttctggtcaataggttgtattcttattcttgtaaccgtgttaattaatgttatggacttgtagtcttgtattaccttgtgaatatatctgtccctgcctgccatgtgaacgtgcttagcctggaatttgtgatatgtacatatatcaatgtgtttgaaatc

SEQ ID NO: 34229 - DNA, 2673 bp, Zea Mays
ctctctcacatgtctcattcctgcccacacgcttctctctctcaccagcgccaggctgcgccgcctccgccccaccgcctacaggccgcgccgcctccgccccaccgcctgcaggccgcgccgcctccgccccaccgcctgcaggccgcgccgccgccccggctcggcaccgacagcaggccacgccgccgccgtgccaccgccccggctcgcgccaccgccctggctcggcaccaccgccccggctcggcaccgacagcgggtcgcgccgccgcccctgctcgccaaccccagcggttcaaacattagctcgttttcactgctactgcattgggttctgcatagttcttccttggttgtttgatgtaaaccacagctggggagcttagctgtatagaactgatttcacgtgtttgttgacgagtttagctgcataggtaccgatgagtttgtcctgaacagaaattttatttggattcagttcggtgagctcttaattgtgtcctacccacatccctctgcatccctctgcagggtgcaagaactgtgctaacgtgtgttctaaggtcttccaaatcgaggatgatttcggacgggcaagagtttacgaccaatcaggcagcacagaactgattcaagaagctattgacagttgtatgtggtgcttctctgatgatagcatcgaaatattgatgaggcaagttcacgctgggagaaaagacaagccaaagtcctggagaaggtaagaaggcggatgagccaagatgattccagaaagggtggctcatggagtgacatctggggagcaccaacaagatacgagaagaacggtacatcccattactaaaggagacatttatgttcccacaaagcttgggcattttaggtggaaaacctggtacatcaacacacattgctggggtacaggatgatagggctctctacctagatccccatgaagtttagatggtaatagaataaacatagaaggcgctttcagtttgccgtgttccgcaaggaagagagctagttatagatctttctgagtgtacagtttatttggaggggagaaggataaagatgagaatggcgatgaagcgccatcgaaagtattggcaaatattaagtggcctgaaacactcgagactgattttatctacagtgagaaaacaatcaattttcctatactgaaatatggggttggtggatagcaaaccatgagctgaagaagccatcaattagtctgttgtttccaacaatcatcctcctcagtcgccgccatcaacagcagcagcagcgatgctaaatagtagtggtggatctggttctaactactctggtggcgagatcctacctccaccatttttttatctttattatctgtgattctgcaatccacatgtttgattttttacttagtttctctttgagaccggtcgccatgtttggttagcacatctagaatgcattacaattggaggcaatagctgttcactatccactataacctgaaagcttagctgttcaactgagctttctgattcttccatttttttccattcaagtatatgatattcttgtgtgctattcaatattacaaataacaaatttgcatatgagaataattaagtaaatttggccacctaatcagtaggattgtttggttggaggaatttttgtagcatgtgaaacttgagctaattagaaagcaaccactaccttctcttcagcatgaaaaaatagcttagccatttcttagagttaagcccttagccacttgctggccttatcgtctggaagaagaaatggtactcaactgctggtctctttggcaaatttttctttgcacttttcttgttcgaactggcaatccacaaccaagtaccttgcttgcaccaacaaaagtcccttctactgtagggcaatccatggatttattgcttgtcctgaaatttgatagaggcattcatgatatcagttgctcgttaattccatttgtttcttgttctcttgtgcattgttatgacatatttgcaccttttgcggggaacgatcgaccaacaatggagtggcccactagattaaagatcgctctgtgtgctgccaagggtttagctcatcttcatgaagactgtcatccaaagatcatccaccgcgacattaaggcatctaacattcttcttgacttcaaatttgaatataaggttgctgactttggacttgcaaagttcactactaataataacacccatgtttcaacaagagtaatgggcacctttgggtatttggcacctgagtatgcagcgtctggcaagctcacagaaaaatttgatgtattttctttcggagtcatgcttcttgagcttattactgggcggcgaccaattgacacaacccaattggcactgcttgctataagcacatatgtacttccatttgcatgttgtataatactaataccaattgcaaaattatagttattttttctacccttgttagttaataagcatatttctggtcaataggttgtattcttattcttgtaaccgtgttaattaatgttatggacttgtagtcttgtattaccttgtgaatatatctgtccctgcctgccatgtgaacgtgcttagcctggaatttgtgatatgtacatatatcaatgtgtttgaaatc

SEQ ID NO: 34230 - DNA, 1089 bp, Zea Mays
aacacacattgctggggtacaggatgatagggctctctacctagatccccatgaagtttagatggtaatagaataaacatagaaggcgctttcagtttgccgtgttccgcaaggaagagagctagttatagatctttctgagtgtacagtttatttggaggggagaaggataaagatgagaatggcgatgaagcgccatcgaaagtattggcaaatattaagtggcctgaaacactcgagactgattttatctacagtgctttatcatttgggacttcaattaatccacagttcattgcaagctttgcttctgctgctggtaaacgtcctcatcaagatttcgactctcaagaatctgatccagaggcaattcttaactgtttgctgaagcttactgtattctagaaaatcactggaatatgtatatcttttcttgatggacataaccacttaagtgttccttaattttcgtagtggggttggtggatagcaaaccatgagctgaagaagccatcaattagtctgttgtttccaacaatcatcctcctcagtcgccgccatcaacagcagcagcagcgatgctaaatagtagtggtggatctggttctaactactctggtggcgagatcctacctccaccatttttttatctttattatctgtgattctgcaatccacatgtttgattttttacttagtttctctttgagaccggtcgccatgtttggttagcacatctagaatgcattacaattggaggcaatagctgttcactatccactataacctgaaagcttagctgttcaactgagctttctgattcttccatttttttccattcaagtatatgatattcttgtgtgctattcaatattacaaataacaaatttgcatatgagaataattaagtaaatttggccacctaatcagtaggattgtttggttggaggaatttttgtagcatgtgaaacttgagctaattagaaagcaaccactaccttctcttcagcatgaaaaaatagcttagccatttcttagagttaagcccttagccacttgctggccttatcgtctggaagaagaaatggt

SEQ ID NO: 34231 - DNA, 1774 bp, Zea Mays
caattccatttcctccctgcttctctccggcaggtctccgggacgtgcaccactgtcaccacgaagagggagctagagatgctgggcatgaatgcttccgttttcgatggcacagaggacagcctggaaaatattcacagtttacgacaagcaactcacttgctcatctccatcccacccatccctggagttggtgatcctctacttattaatttagatgaagatctgaggagaatactcggccatggtaatcttgaatggctatgctacctttcgtcaacaagtgtgtatggtgattgtggtggtgtattggttgatgaggagtaagggactcgttggttcttttctcgtccatgaagtacattttaatagaaagctaaatacactgctgtgtatgcagtcatacagtaaacccaaagagcgagtctgccaaattaagatataacgcagaaaaaggatggctgaatcttattgatgatccaaaactgtcagcttttgtattccgtttaggtggaatatatgggcctggaagaaggttttgacctgctgaatttcattccatttcaccattttaatttctactaattcagtttgagggatatttgttggcatgctgattagtagctctgtttaaagcttgtgaaaactgaaacatatttataatgccaagtttgtataaaaagggaagggcaggcccaatgctggtggctcccacatgattggggtctaggaaggaataaccgatgcaactcttatctctgcatttttgcagagaggctacatcgaagatagtacctttggctaagtgggaagatctatcaccactgtgccaggcctgtcctttggaatgctaagtgtttatacttgttgaaaaaaaggtggccaaaaatagaatagattatgacatgaagaatatcttattggatgctattgtagtgtttcgataactgttttgtgaaatattttcttttataattcttttcctatattccaatgactggacgctgtttactgcagtgctttggacaccttagcgaagagcaaatctttgtcacggaaacagaagttgcgagaatctaagcaatatactgcacgaatccacgtggctgacatctaccaggctgtcttggctagcatgagcatcagatgtgcaaggaaaatatttaatgtggtggatgacgaccctgccccaagagctgaagtttttgcgtttgctacgagtttgatacagaggagatatcctgatatgataactgaaaccattgatgccaagcctgcaggcttagattatcaagagatgatcgtacctgcagagaaacgggtttctaatgctcggatgaagcaggaacttggtgttaatctgcttcatccaacttatagatctggtctgcagagtatccttgatgcttggcaaattcagcctccacttcccaatacaagtcaatgatgatttagttttgaaaggcatataggtgtatgtaagtgtatttgtgcttgatttggttcagatatactacctccgttctaatatttgtataaaaaagaacggagcgaataataatttagtgacattgtagcctttttggctgagttggactggtgctcgtgttatttttagcattgtttacgaatcatatagtacaatctagtcgccatggatctgactagacgattaatcgtgatgagattgattagtggagcctatttggaatcatatagttgaccgacatatttcaagacatatacgtattatatagtagtaatagatatttat

SEQ ID NO: 34232 - DNA, 3216 bp, Zea Mays
  misc_feature (3215)..(3216): n is a, c, g, or t
ggtggcacgtctaaatccggtgaccggcggcggcatccacgtcgcggcgtgcctgcgtcgagcggcagaacaggcacgggacccggccgcaagctaggccgtgaccagtgcagaaagtgtgggcaaaccggccactgggctcgtgattgcaaggcaaggccaaagcaggaggcggcccacatggcccaggaggaggaggcgctcatgctgttgagggccgcaccactgcgtcgatccccgccagtagggtccgcgcctccaccgccaccggcagggtccgcgcctccaccgccgccggggcggatccagctacaggagggaaaggtgttcgtgcagctcggcgcgaaggagcagcgggaccctaggtcctggatctgcgacaccggggccacgaaccacatgacggggtctcgggcggcgttcgcagatctggacacggcagtgtctgggtcggtgcggttcggcgatgactccatggcggagattgaagggcgcgggaccgtgctgttcaagtgcaagaatggcgagcatcgctccttcaccggcgtttactacatcccgcgactcacggcgaatatcgtgagtctcggccagttggaggaggccgactacgacgtccacctctggcgcggtggcatggagattcgggagcctgaggggcgactgctggcgaggatcccacgcgcaggcaaccggctgtatgtgctcaacgtcgacgtggcacgaccggtgtgcctggcagcgcgcggcgaagaaagtgcctggcggtggcatgccaggctcggccacatcaacatgccggcgctgaggaagatggcgcgggaggagctcgttcgtggactgccttccatcgagcaggtggaccaactctgtgaggcgtgtctcgccggcaagcagcgacggacggcgttccctgaccagacacagtggcgggcggaccgcgcactggagctggtgcacggggacttatgtggacccgtgacaccggcgacaccaagcgggaacacctacttcctgcttctcgtcgacgatcggagtcgctacatgtggctgacgctgctgcggtccaaggatcgagcggcggctgccatcaaggagttccaggcacgtgcagaagctgagtccagctgcaagctgctggcgctccggacggatcgtggtggcgagttcacatccaaagagttcatggagtactgcgcggcggacggcgtgcaccggcagctgacagcgccgtattccccacaacagaacggcgtcgtcgagcgccggaacgccatggtggcaggcacagcacgctgtctgctcaaggcaaaggggctgccggcttggttctggggagaggcggtgaacactgccgtgtatctcctgaaccgggtaccgacgaaggcagtagaaggcaagactccattcgaggcatggtacgggaagaagccggcagtacaccacctgaagaccttcgggtgcattgtctatgttaagaatacgacaccgcacctgaagaagatggaggatcgtggccgcaagatgattttcgtcgggtacgagcgcgggtctaaggcatatcgagcctacgatccggccactaagcgcgtgcacgtgacgcgcgacgtggtctttgatgagtccgcccagtgggactggtcagagggagctaagaccggcactggcgcggatcatggcggcgacgacacgttcaccatccaatttcaggtggtggcggggccaggaggtgcccaggcgggggcaccggtggctgcattgcagcatatgacgccaccaggaacaccaggggaggccggagtagcttctccgggtgtgcagttcgccacaccacctgctgcgttagacgaagacctggacaccgaccacgacgacaacgcaccactgcggttccgaacagtggaggacgtcaccggagctgcgtcgccacctgggtacgccgtgcgcgtactgtacagcgagcaactctttgcagtgagtgcggaggagcctgggtcgcttgcacatgctgggcaagacccgtgctggcgacgagcgatggaggaggaactgcgcgccatagaggacaaccacacctggacactcactgagttgccatctgggcagcgagccattgggctcaagtgggtattcaaggtcaagaaagatgaacacggtgccgtggtacggcacaaggcacgacttgtcgcaaaaggctacgctcagcgccaaggaatcgactacgatgaggtgtttgcaccggtcgctcgcttggaagcggtgcggctgctgctggcgttggcagcgcaggagggatggcaagtccatcacatggacgtcaagacggcgttcttgaacggcgacctccaggaggaggtgtatgtgcagcaagcgcctggatttgctcaaccagggcaggaacacaagaagttgaatccaacggtacccttgaagaagccgtctttggcaacaagtgctcggagtgtgagttcttccatccggggttctgctgacaaaccggcttccatcaagccagctccaccagtagcacgccatggcagcgcaacacaaaggcataacaatgttcctcctcctaaagtgcctaccattgccgatgtgccaagtcgtgctcctgccttggtgtcctgcaccggcttggtgtctcctggacgctcaggagattctgtttcatccgatgagacgatgtcgacttgcgactccatgaaaagcccagactttgagtacgtagacaatcaggacacctcgatgctggcttcgttgcagcgacggacaagtgaacatctgcgaatatcagaggatagagatgttgaagaaaataagcggaagaaaaatgccgtggccccaatggaaattgaccgcatctgtgatgttgacagtgaatatgaggatccacagctgtgcgctactctggcttctgacatttacatgcacttgcgagaggctgagacgaagaaaagaccgtcaactgatttcatggaaacgattcaaaaagatgtcaacccaagcatgagagcaattttgatagactggctcgtggaagttgctgaagaatatcgtcttgttcctgatactttgtacctgacagtcaactacattgaccgttatctttctggcaacgaaatcagccgccaacggctgcaattacttggtgttgcatgcatgcttatagctgcaaaatacgaggagatatgtgcaccacaagtagaagaattctnn

SEQ ID NO: 34233 - DNA, 995 bp, Zea Mays
  misc_feature (994)..(995): n is a, c, g, or t
catccctcctgcactgtttattggttcaaatcttgggttctggtcatggtcaaatggctagaccttccatggcatttcttttttcgaaagaaagttcattggttttcgcgccgtggcaaatctcttgtctttgtttgctttgcagtcttctcttgtcaagcacatatacttctctagtgcacctgaagttgaatccaacggtacccttgaagaagccgtctttggcaacaagtgctcggagtgtgagttcttccatccggggttctgctgacaaaccggcttccatcaagccagctccaccagtagcacgccatggcagcgcaacacaaaggcataacaatgttcctcctcctaaagtgcctaccattgccgatgtgccaagtcgtgctcctgccttggtgtcctgcaccggcttggtgtctcctggacgctcaggagattctgtttcatccgatgagacgatgtcgacttgcgactccatgaaaagcccagactttgagtacgtagacaatcaggacacctcgatgctggcttcgttgcagcgacggacaagtgaacatctgcgaatatcagaggatagagatgttgaagaaaataagcggaagaaaaatgccgtggccccaatggaaattgaccgcatctgtgatgttgacagtgaatatgaggatccacagctgtgcgctactctggcttctgacatttacatgcacttgcgagaggctgagacgaagaaaagaccgtcaactgatttcatggaaacgattcaaaaagatgtcaacccaagcatgagagcaattttgatagactggctcgtggaagttgctgaagaatatcgtcttgttcctgatactttgtacctgacagtcaactacattgaccgttatctttctggcaacgaaatcagccgccaacggctgcaattacttggtgttgcatgcatgcttatagctgcaaaatacgaggagatatgtgcaccacaagtagaagaattctnn

SEQ ID NO: 34234 - DNA, 1112 bp, Zea Mays
  misc_feature (1111)..(1112): n is a, c, g, or t
ccgcatcctcaccctcgtccgctcctccgctgccccaaaccctagcctgaggaggggtcctcctccgctaccgagacccacgatgtcgaccatcgctgcctcccgccgctcgtcctcctcgtcctcttccgcgaccgccaagcgccccgcgattgcggacggccccgggggacccaaggcgaccgccgcacaggccaagaagcgcgtggcgctcggcaacatcaccaacgttgccgcgcggggagggagggcttccgttggcggcagccttgggaacgtcatggcgcccaccagcagcgcgaagttgaatccaacggtacccttgaagaagccgtctttggcaacaagtgctcggagtgtgagttcttccatccggggttctgctgacaaaccggcttccatcaagccagctccaccagtagcacgccatggcagcgcaacacaaaggcataacaatgttcctcctcctaaagtgcctaccattgccgatgtgccaagtcgtgctcctgccttggtgtcctgcaccggcttggtgtctcctggacgctcaggagattctgtttcatccgatgagacgatgtcgacttgcgactccatgaaaagcccagactttgagtacgtagacaatcaggacacctcgatgctggcttcgttgcagcgacggacaagtgaacatctgcgaatatcagaggatagagatgttgaagaaaataagcggaagaaaaatgccgtggccccaatggaaattgaccgcatctgtgatgttgacagtgaatatgaggatccacagctgtgcgctactctggcttctgacatttacatgcacttgcgagaggctgaggacgaagaaaagaccgtcaactgatttcatggaaacgattcaaaaagatgtcaacccaagcatgagagcaattttgatagactggctcgtggaagttgctgaagaatatcgtcttgttcctgatactttgtacctgacagtcaactacattgaccgttatctttctggcaacgaaatcagccgccaacggctgcaattacttggtgttgcatgcatgcttatagctgcaaaatacgaggagatatgtgcaccacaagtagaagaattctnn

SEQ ID NO: 34235 - DNA, 634 bp, Zea Mays
  misc_feature (633)..(634): n is a, c, g, or t
ggcctaatgactggggcgacataaacacacgttacacaccccgccttcaactcctcgccgctgccgcatcctcaccctcgtccgctcctccgctgccccaaaccctagcctgaggaggggtcctcctccgctaccgagacccacgatgtcgaccatcgctgcctcccgccgctcgtcctcctcgtcctcttccgcgaccgccaagcgccccgcgattgcggacggccccgggggacccaaggcgaccgccgcacaggccaagaagcgcgtggcgctcggcaacatcaccaacgttgccgcgcggggagggagggcttccgttggcggcagccttgggaacgtcatggcgcccaccagcagcgcgacgaagaaaagaccgtcaactgatttcatggaaacgattcaaaaagatgtcaacccaagcatgagagcaattttgatagactggctcgtggaagttgctgaagaatatcgtcttgttcctgatactttgtacctgacagtcaactacattgaccgttatctttctggcaacgaaatcagccgccaacggctgcaattacttggtgttgcatgcatgcttatagctgcaaaatacgaggagatatgtgcaccacaagtagaagaattctnn

SEQ ID NO: 34236 - DNA, 1211 bp, Zea Mays
  misc_feature (1210)..(1211): n is a, c, g, or t
caaaaccttgccgttgcccgttggagcatcaaccaacggcctaatgactggggcgacataaacacacgttacacaccccgccttcaactcctcgccgctgccgcatcctcaccctcgtccgctcctccgctgccccaaaccctagcctgaggaggggtcctcctccgctaccgagacccacgatgtcgaccatcgctgcctcccgccgctcgtcctcctcgtcctcttccgcgaccgccaagcgccccgcgattgcggacggccccgggggacccaaggcgaccgccgcacaggccaagaagcgcgtggcgctcggcaacatcaccaacgttgccgcgcggggagggagggcttccgttggcggcagccttgggaacgtcatggcgcccaccagcagcgcgaagttgaatccaacggtacccttgaagaagccgtctttggcaacaagtgctcggagtgtgagttcttccatccggggttctgctgacaaaccggcttccatcaagccagctccaccagtagcacgccatggcagcgcaacacaaaggcataacaatgttcctcctcctaaagtgcctaccattgccgatgtgccaagtcgtgctcctgccttggtgtcctgcaccggcttggtgtctcctggacgctcaggagattctgtttcatccgatgagacgatgtcgacttgcgactccatgaaaagcccagactttgagtacgtagacaatcaggacacctcgatgctggcttcgttgcagcgacggacaagtgaacatctgcgaatatcagaggatagagatgttgaagaaaataagcggaagaaaaatgccgtggccccaatggaaattgaccgcatctgtgatgttgacagtgaatatgaggatccacagctgtgcgctactctggcttctgacatttacatgcacttgcgagaggctgagacgaagaaaagaccgtcaactgatttcatggaaacgattcaaaaagatgtcaacccaagcatgagagcaattttgatagactggctcgtggaagttgctgaagaatatcgtcttgttcctgatactttgtacctgacagtcaactacattgaccgttatctttctggcaacgaaatcagccgccaacggctgcaattacttggtgttgcatgcatgcttatagctgcaaaatacgaggagatatgtgcaccacaagtagaagaattctnn

SEQ ID NO: 34237 - DNA, 1504 bp, Zea Mays
cgcagcagcacagctcgccgcctcgccgtctcttagctgaggcgtccgacgccaccgcccccaatccggtggcgctcctccgtccggccctgcgcggcggccgtggagcaggagggcggcgccgcgggggaggccccgcggctggtgctgcacgactccctcgactccgtgggggtggccaccgcgcacgctagggcggcgcgggaggggttcgtggcgcaggtggggcggctcacccgggtaagtgcggggagcagcatcgccatcagccgcggccctgacctcgcccgcgcagcgctctgcgtcgctgccgaggacgactcgctcgtctcccactcctcggtcccgctccccgtagatgccttcatcgcgcgcctcgacgacctctccacgggcttctgcgccggcgggaacttcccgccctcgggtgcgccgcccgaggtcttcttcgattaccttaaccgctacctctacgtccataaggggtttcggagaacaaatggagtgtcagatgtgcggattatgtaccttcactcgagatattgaagactgtacgaacatatggcttactggattttgatgcagagattttctttccaaatgatctcaatagcctccctaggggctatgacaaacaaaaaagcaaattggtcgatgagccacatattatgacttcaaagtcacttttggttgagactttgagaactttgaagtgtgcattttggccatttcaatctgatcagtctagtagcttatttctaaatgctgttgctgcaaaccagcgtggccctggtactttaggtgataaccaagcgaggtcatatgggaacacaagtgccattgagatggctgctgctaaagctgctcagcatagattgatgcgtggagtatggactaatgctcgttttggtgatatgcgtcgtgctttagcagcttgtgagcgactgatactactgcatcacgatccgcatgaactgagggattatgcagcccttctgtaccactgtgggtactatgaagactgcctacactacttatcattgtaccaaactgcaaagtctgggaaatccccaaccaatcgattggagatcttggaggacgaagctgtgaatactctcaaagcgcggttaatgcttattttagcagaggatggctggagcagatgtagacctgtggcaaggtactggaccaagaactctgagccgtggtaattagagctggccaacgttgcggctgaagcaaataactacagattgtacatagcattttcaactgtggatatgttgtacagtcacttggtaatccatgcgggatgtgaatcaaattcctaattttatacaacaccgcgttgttgctttatctgagattcgcagggcttttttatatttttgaataaatttgatacaatacaacaacatcctcaaatctgtatctacattttttagtcaaacaatattatgttacagaactatcagttttccgtaagttctttcaggcacataat

SEQ ID NO: 34238 - DNA, 1698 bp, Zea Mays
atcttgcttttacacgtacgacgcagcagcacagctcgccgcctcgccgtctcttagctgaggcgtccgacgccaccgcccccaatccggtggcgctcctccgtccggccctgcgcggcggccgtggagcaggagggcggcgccgcgggggaggccccgcggctggtgctgcacgactccctcgactccgtgggggtggccaccgcgcacgctagggcggcgcgggaggggttcgtggcgcaggtggggcggctcacccgggtaagtgcggggagcagcatcgccatcagccgcggccctgacctcgcccgcgcagcgctctgcgtcgctgccgaggacgactcgctcgtctcccactcctcggtcccgctccccgtagatgccttcatcgcgcgcctcgacgacctctccacgggcttctgcgccggcgggaacttcccgccctcgggtgcgccgcccgaggtcttcttcgattaccttaaccgctacctctacgtccataaggtactgtatagatttgtcgccaagttattctgatccggttgctacccaatttgggactactacgagcgagctgctggaattcgaagtcatttcagctgtctgattgatatggcatgatgtagggtttcggagaacaaatggagtgtcagatgtgcggattatgtaccttcactcggtcttgacatgccgttctggatcagctctaatgcttgcgttaatatattcagagatattgaagactgtacgaacatatggcttactggattttgatgcagagattttctttccaaatgatctcaatagcctccctaggggctatgacaaacaaaaaagcaaattggtcgatgagccacatattatgacttcaaagtcacttttggttgagactttgagaactttgaagtgtgcattttggccatttcaatctgatcagtctagtagcttatttctaaatgctgttgctgcaaaccagcgtggccctggtactttaggtgataaccaagcgaggtcatatgggaacacaagtgccattgagatggctgctgctaaagctgctcagcatagattgatgcgtggagtatggactaatgctcgttttggtgatatgcgtcgtgctttagcagcttgtgagcgactgatactactgcatcacgatccgcatgaactgagggattatgcagcccttctgtaccactgtgggtactatgaagactgcctacactacttatcattgtaccaaactgcaaagtctgggaaatccccaaccaatcgattggagatcttggaggacgaagctgtgaatactctcaaagcgcggttaatgcttattttagcagaggatggctggagcagatgtagacctgtggcaaggtactggaccaagaactctgagccgtggtaattagagctggccaacgttgcggctgaagcaaataactacagattgtacatagcattttcaactgtggatatgttgtacagtcacttggtaatccatgcgggatgtgaatcaaattcctaattttatacaacaccgcgttgttgctttatctgagattcgcagggcttttttatatttttgaataaatttgatacaatacaacaacatcctcaaatctgtatctacattttttagtcaaacaatattatgttacagaactatcagttttccgtaagttctttcaggcacataat

SEQ ID NO: 34239 - DNA, 1711 bp, Zea Mays
atcttgcttttacacgtacgacgcagcagcacagctcgccgcctcgccgtctcttagctgaggcgtccgacgccaccgcccccaatccggtggcgctcctccgtccggccctgcgcggcggccgtggagcaggagggcggcgccgcgggggaggccccgcggctggtgctgcacgactccctcgactccgtgggggtggccaccgcgcacgctagggcggcgcgggaggggttcgtggcgcaggtggggcggctcacccgggtaagtgcggggagcagcatcgccatcagccgcggccctgacctcgcccgcgcagcgctctgcgtcgctgccgaggacgactcgctcgtctcccactcctcggtcccgctccccgtagatgccttcatcgcgcgcctcgacgacctctccacgggcttctgcgccggcgggaacttcccgccctcgggtgcgccgcccgaggtcttcttcgattaccttaaccgctacctctacgtccataaggtactgtatagatttgtcgccaagttattctgatccggttgctacccaatttgggactactacgagcgagctgctggaattcgaagtcatttcagctgtctgattgatatggcatgatgtagggtttcggagaacaaatggagtgtcagatgtgcggattatgtaccttcactcggtcttgacatgccgttctggatcagctctaatgcttgcgttaatatattcagagatattgaagactgtacgaacatatggcttactggattttgatgcagagattttctttccaaatgatctcaatagcctccctaggggctatgacaaacaaaaaagcaaattggtcgatgagccacatattatgacttcaaagtcacttttggttgagtccttttatgcagactttgagaactttgaagtgtgcattttggccatttcaatctgatcagtctagtagcttatttctaaatgctgttgctgcaaaccagcgtggccctggtactttaggtgataaccaagcgaggtcatatgggaacacaagtgccattgagatggctgctgctaaagctgctcagcatagattgatgcgtggagtatggactaatgctcgttttggtgatatgcgtcgtgctttagcagcttgtgagcgactgatactactgcatcacgatccgcatgaactgagggattatgcagcccttctgtaccactgtgggtactatgaagactgcctacactacttatcattgtaccaaactgcaaagtctgggaaatccccaaccaatcgattggagatcttggaggacgaagctgtgaatactctcaaagcgcggttaatgcttattttagcagaggatggctggagcagatgtagacctgtggcaaggtactggaccaagaactctgagccgtggtaattagagctggccaacgttgcggctgaagcaaataactacagattgtacatagcattttcaactgtggatatgttgtacagtcacttggtaatccatgcgggatgtgaatcaaattcctaattttatacaacaccgcgttgttgctttatctgagattcgcagggcttttttatatttttgaataaatttgatacaatacaacaacatcctcaaatctgtatctacattttttagtcaaacaatattatgttacagaactatcagttttccgtaagttctttcaggcacataat

SEQ ID NO: 34240 - DNA, 1715 bp, Zea Mays
atcttgcttttacacgtacgacgcagcagcacagctcgccgcctcgccgtctcttagctgaggcgtccgacgccaccgcccccaatccggtgaatctgactcaccgctgccgccatgaactgcgcggtggcgtggtctcccccctcatccgctctcgtccaccgtcccggccgtgtacgcaggtggcgctcctccgtccggccctgcgcggcggccgtggagcaggagggcggcgccgcgggggaggccccgcggctggtgctgcacgactccctcgactccgtgggggtggccaccgcgcacgctagggcggcgcgggaggggttcgtggcgcaggtggggcggctcacccgggtaagtgcggggagcagcatcgccatcagccgcggccctgacctcgcccgcgcagcgctctgcgtcgctgccgaggacgactcgctcgtctcccactcctcggtcccgctccccgtagatgccttcatcgcgcgcctcgacgacctctccacgggcttctgcgccggcgggaacttcccgccctcgggtgcgccgcccgaggtcttcttcgattaccttaaccgctacctctacgtccataaggtactgtatagatttgtcgccaagttattctgatccggttgctacccaatttgggactactacgagcgagctgctggaattcgaagtcatttcagctgtctgattgatatggcatgatgtagggtttcggagaacaaatggagtgtcagatagatattgaagactgtacgaacatatggcttactggattttgatgcagagattttctttccaaatgatctcaatagcctccctaggggctatgacaaacaaaaaagcaaattggtcgatgagccacatattatgacttcaaagtcacttttggttgagactttgagaactttgaagtgtgcattttggccatttcaatctgatcagtctagtagcttatttctaaatgctgttgctgcaaaccagcgtggccctggtactttaggtgataaccaagcgaggtcatatgggaacacaagtgccattgagatggctgctgctaaagctgctcagcatagattgatgcgtggagtatggactaatgctcgttttggtgatatgcgtcgtgctttagcagcttgtgagcgactgatactactgcatcacgatccgcatgaactgagggattatgcagcccttctgtaccactgtgggtactatgaagactgcctacactacttatcattgtaccaaactgcaaagtctgggaaatccccaaccaatcgattggagatcttggaggacgaagctgtgaatactctcaaagcgcggttaatgcttattttagcagaggatggctggagcagatgtagacctgtggcaaggtactggaccaagaactctgagccgtggtaattagagctggccaacgttgcggctgaagcaaataactacagattgtacatagcattttcaactgtggatatgttgtacagtcacttggtaatccatgcgggatgtgaatcaaattcctaattttatacaacaccgcgttgttgctttatctgagattcgcagggcttttttatatttttgaataaatttgatacaatacaacaacatcctcaaatctgtatctacattttttagtcaaacaatattatgttacagaactatcagttttccgtaagttctttcaggcacataat

SEQ ID NO: 34241 - DNA, 2746 bp, Zea Mays
cgcactgtcggtcactgcagtgcacgcctgggtgtgccgtttcaccgccatgtggggccagctacgcagaatctccatctaccttccctcaacagactctcgcgcctgcgaccgattctttcccatcggcgcgattgctgggcaggtccccctcctggcgatccgaagtactcgcgcccaacctccttctgcccgaggtataagaccgacctccccttccttcgtccatccgttcgtggtgcgccattgcagggaggaatcagagagagagaaagaaatcgaggtgagagaatgaggggatcaacaaattgggggggagagtccccggacccgcgtgcgtccttcaccggagtccacgcaaccgttggcaccctcatcgtgtggagttgcggtcggtcctagggtcaattgctcgccgataattgtgagcaccgcggaaacacaacctgccgcggtcgactcatgcttgcagcgccaccccaccgtcggcggatggccagggtcaacccctggagttcaaggagcatctttgtggctgttgcgggagcgatggacaaccatggagactgggattctccaccgcggattcatggatgcggctgaccctcgcttcaccggggacctggtggctctgtgcataaattttcggtaagaaccctatgagcacggtcatcatggtttgtatttcgattagcatcaattgggagacagacttcctcacgaggtcgggtttggcatgctctggtgagctcgaccatcgtggggcagggaacgtcgccaaactccggcgttgtgaggtgggtgatgagcgtcggtcgttagatagggacctaacgacgctggttagatctgcattccccttcggctagggcttctctcgcccgttgatcggacatcctgctcttaggattagaactcgcgtaattagaatccaatccgttgaccgcttgatgaacggttctgattggatgtggaggtcccctttcactttgttgcatcatggttgtcggtccgggatcggagatctgtgagtcgagcttgggtgtgtctgatttcgtgccattggatcttgatcctgcggcggtcggtgtgtactggttcgtgtggtataacaatctaatcacagccgtcaagggcagatccatcggccgaaatcgtctgataccctgtcgccatggcatgtttgcgaacaagcccctgcgattttcagaaaacaacctgcagtcctggcaccagtcgccctgagtcttagaggttttgcatcctagaccctgggttctccggtaatgatgcgctcggtccagataatcagaaaatcaaataaattcatttggaaaatactttttagagtaaaaataaatgctagaacttgtttaattcatagaaaagtcatattaagtccaaattgatccattccagttcctataattttgtaataatgttgtttatcacatagtgtctctgttttgacatgaaaatcatattaaaatttatctcataattaattccgtatcaaatacataaaaccttcggaaattcataactcccatgttttaattccgaattgatccgttcaagttgcgttcgctccgtataaatatttactatgcagtaacaatattaattataccatgtcgcatacttttatatttatttatcctatgtctactagattaactcttttaaatcaaatttaacctatccataattataatatgattaaaatatgatctctagtcaagttataattaaaactaatgttgagttaattatttataaaataacctctcatatgatttacactaaccaatttataatatagtttaatattttaatcacatagattttctataaatcataactccttaatcgtaactccaaatttagtgattctcgtttccacgatctcgttacgacgcatagattattattatgcagtttgttcttatgtttggtatgatgttaattttgtctataccatgtttgtttttattgctatgactagcgcgaggtcacgagtcacctgaagatcatcctggtacctgaaatctcaagtcacagacaagttgtgcccttgatcactttttacctaataatattctttataatcatttattcatgcataggtttaatttttatgggacccaataggtcaccctagtctgcttatcttgttaccttgtttatccctgaattatttgggtagtttttgctattgctttatatggtttggggattaatattacattatgtccatgttccaattattctgttactttatttatgttcatgtcaagatcattatatttttaattggaacaaggagcttaacttgagaaacacgtgccaccacaagggtggaatgagacgcccttggctgactaactaggaaagctagtggaagactaccttacccgaaaggggcaagggcagtaggggagttgcatgcagggaggttctcgggttgattttgctgcgatggcggtcagacgagggattcctgcaagtgctcttcccataaactattggtatttcctcacttattcactcttggttccttctttaatagaatatcatcaagtttaacttgttgttgaacatttgcatactactcattatacattattcaagtgtattcaatatactcaatttcctgttcaacactcagcaaacttgtcagtccttaaactgtgttgtcattcaattcaccgaaatccacaaaagggctagatgcacttacaggttc

SEQ ID NO: 34242 - DNA, 1390 bp, Zea Mays
ccgcactgtcggtcactgcagtgcacgcctgggtgtgccgtttcaccgccatgtggggccagctacgcagaatctccatctaccttccctcaacagactctcgcgcctgcgaccgattctttcccatcggcgcgattgctgggcaggtccccctcctggcgatccgaagtactcgcgcccaacctccttctgcccgaggtataagaccgacctccccttccttcgtccatccgttcgtggtgcgccattgcagggaggaatcagagagagagaaagaaatcgaggtgagagaatgaggggatcaacaaattgggggggagagtccccggacccgcgtgcgtccttcaccggagtccacgcaaccgttggcaccctcatcgtgtggagttgcggtcggtcctagggtcaattgctcgccgataattgtgagcaccgcggaaacacaacctgccgcggtcgactcatgcttgcagcgccaccccaccgtcggcggatggccagggtcaacccctggagttcaaggagcatctttgtggctgttgcgggagcgatggacaaccatggagactgggattctccaccgcggattcatggatgcggctgaccctcgcttcaccggggacctggtggctctgtgcataaattttcgcgcgaggtcacgagtcacctgaagatcatcctggtacctgaaatctcaagtcacagacaagttgtgcccttgatcactttttacctaataatattctttataatcatttattcatgcataggtttaatttttatgggacccaataggtcaccctagtctgcttatcttgttaccttgtttatccctgaattatttgggtagtttttgctattgctttatatggtttggggattaatattacattatgtccatgttccaattattctgttactttatttatgttcatgtcaagatcattatatttttaattggaacaaggagcttaacttgagaaacacgtgccaccacaagggtggaatgagacgcccttggctgactaactaggaaagctagtggaagactaccttacccgaaaggggcaagggcagtaggggagttgcatgcagggaggttctcgggttgattttgctgcgatggcggtcagacgagggattcctgcaagtgctcttcccataaactattggtatttcctcacttattcactcttggttccttctttaatagaatatcatcaagtttaacttgttgttgaacatttgcatactactcattatacattattcaagtgtattcaatatactcaatttcctgttcaacactcagcaaacttgtcagtccttaaactgtgttgtcattcaattcaccgaaatccacaaaagggctagatgcacttacaggttc

SEQ ID NO: 34243 - DNA, 893 bp, Zea Mays
atagctagttctggtattaaccgtaaccctctttgcttagtgcttaactactatgattaacacttggtggaccctgttacatccggtccttactggcatatttaggattgagcttcggtactctttggcttctcttcaagtggtgccttggcagacctgaccagctagcaaataggcccagccaactccgatcgcaccagcacctgcaccactgcaccagccgcccgcaacccgcaaagctgcttcccggactagctagggtttcgtgtacgccgcttgatctagtcctctctcccggcacgcgagggcgcagcgttgatggcggcggcaccggcggacgctaaggcggaggccgccaagatggacctcctcgaggacgatgacgagttcgaagagttcgagatcgaccaagaatgggatgaccaggaagaaggcaacgaagccgtccagcagtgggaggatgattgggatgacgatgacgtgaacgatgatttctcgctgcagcttaaggaagagctggacggaagcaacggccagaagagctgaagtattatttctctactttatataaatgatttttatatggcagctacttttggaaccgttgatgtgctttggatgtgaaagtttttggacatcagtcggcaatttgacagcactgtacgtgttagttgtcgttaggatatgtctctagccgaaacgctagaatccgccacaatgtctacgccccaactgtttctcttaaaagagtgccgcaactgtttttccaacaaaaaaatagaacaaagtatggacccgttaacccgttaacaaaaaaatctaaacatctctattgggcctctcctccgggacctcccccagctcccctcacttttcccttcacttacctgaga

SEQ ID NO: 34244 - DNA, 680 bp, Zea Mays
tcttgctggtgatggttggacaagggtggtgatcagaatagaaaaagaaacagtcctggaaattttggaggtgggcgtggcttcgggcgaggacgagggagaggtaggggtcgggaatctggagatttcaatggcagaaatgatcaaggaaattgaaagaattcatggggtggtgacaatgctgaaaaatcttcttggaggacgaggaagaggcagagacaatggttggagaaatggtgatggaccaaaatgggatggtggagataattggaacgctacaaatccaccaagtaatcagccttggagtagcagtggaggcaccaagtcatatggtcaaaatcagccttccacttggaataattcagaggataacaaaccatctgtaggtgaaaggctcttcctgcaatgatgggggtaagtgggaaaaatgctggtagcgttgagtgttagactgtgtgtgttagtgtgtgtgggccggcaccactgttgggctgccggcccattagagttagggttgagtctatatattgtacccattctctatgcaatacaacattttcatattcctacatggtatcagaggattaggtttagggtttcctcccatctcccacagcagccaccacaggcttccctgccgccgtccccgggaggctccttcatctctctcaggggcggcc

SEQ ID NO: 34245 - DNA, 501 bp, Zea Mays
tcttgctggtgatggttggacaagggtggtgatcagaatagaaaaagaaacagtcctggaaattttggaggtgggcgtggcttcgggcgaggacgagggagaggtaggggtcgggaatctggagatttcaatggcagaaatgatcaaggaaattgaaagaattcatggggtggtgacaatgctgaaaaatcttcttggaggtttgataatcaggtagacaatgaagctggagattctggtggatataggggacggggaagaggaggaagggggcaatatggaggacgaggaagaggcagagacaatggttggagaaatggtgatggaccaaaatgggatggtggagataattggaacgctacaaatccaccaagtaatcagccttggagtagcagtggaggcaccaagtcatatggtcaaaatcagccttccacttggaataattcagaggataacaaaccatctgtgaacaaggtgatccttgggcaagcaaggtgtctt

SEQ ID NO: 34246 - DNA, 582 bp, Zea Mays
accacgctcaccatccccctctacctcggcaccggcgtcttcaccctcgggtacacaccacgccttttctcaccatctgagcattgccaaggagctcctctccatccccgatggcaccctcgccccaccaccgacgacgaatgggcgcttcagattcctgatcagcaggagagtcgttgaggctgagacgacgacacgaatgcggcaaggagcttcagattcactgccattagaaacttgcaggtaagaaatactgcggtggtttggacctcagttattggccagatgaaggtcggaggccattatcagatcctcgtccacctttgggctaatgctgataagaggacgagtgtcgtacacctctccaattccccccttcaatgtggtcagtgttgaatcatctacgtcatacagtgaacaagggcatactgatgagagaagggatgacatggatttttctcattcgagcatcaggttttgtgcgctgattatggtgtggtcgttgggcagtggcacaagcctggacgtcgttgctgctgccattcaaattttggagatatattttgtgcacataaatggaac

SEQ ID NO: 34247 - DNA, 608 bp, Zea Mays
ctcagcaccacgctcaccatccccctctacctcggcaccggcgtcttcaccctcgggtacacaccacgccttttctcaccatctgagcattgccaaggagctcctctccatccccgatggcaccctcgccccaccaccgacgacgaatgggcgcttcagattcctgatcagcaggagagtcgttgaggctgagacgacgacacgaatgcggcaaggagcttcagattcactgccattagaaacttgcaggtaagaaatactgcggtggtttggacctcagttattggccagatgaaggtcggaggccattatcagatcctcgtccacctttgggctaatgctgataagaggacgagtgtcgtacacctctccaattccccccttcaatgtggtcagtgttgaatcatctacgtcatacagtgaacaagggcatactgatgagagaagggatgacatggatttttctcattcgagcatcaggttttgtgcgctgattatggtgtggtcgttggtgagactgcaacgtcctctggcagtggcacaagcctggacgtcgttgctgctgccattcaaattttggagatatattttgtgcacataaatggaac

SEQ ID NO: 34248 - DNA, 660 bp, Zea Mays
gtttttctgtgtgctgtcgtgcaaggtgccctgaataaaattagaatcaaaccaaaattggtctggtttgcaatccgtactagccaatatttgtgacaaattgggagagggcgagcagaggctcttctgttagcagcctatgggaaaggccttgtgctgccatcggggaagttcagcaaaacctcagtttgatgtctatggtgattgcagattgacttgccatttttttgggggtaaacagaggctcttctgttagcagcctatgggaaaggccttgtacgatgcctatggtgattgccgactgacttaccatttcctgtattgatggtactgcaaattttcatttcgcttaggaggccccaatcaagacattaaggttgaatctgctgtaagtttgcaaaccgtaatagagatcatagctaacccatcatttttcgtggaatgcattacagcattagacatttcccattgtgtccttagtgtggcaggctacctagatgaaatctggatgttgtaaacatgtaatgatggaaactggaatgaactggtcgtcttttcggtgaaagtggactcgtttgctcattttgctacactgacatggttgggttggcagtgttgtgttttaaggtgtttggtttgaagaatgagttagtccatcat

SEQ ID NO: 34249 - DNA, 659 bp, Zea Mays
attgatgttagagtcagacaaaaacaaacatatttgatgatagcagacaagctgcttcaattttgttccctgacaaagatcagtccttgaagttgaaaaaacaccatgggcgagcagaggctcttctgttagcagcctatgggaaaggccttgtgctgccatcggggaagttcagcaaaacctcagtttgatgtctatggtgattgcagattgacttgccatttttttgggggtaaacagaggctcttctgttagcagcctatgggaaaggccttgtacgatgcctatggtgattgccgactgacttaccatttcctgtattgatggtactgcaaattttcatttcgcttaggaggccccaatcaagacattaaggttgaatctgctgtaagtttgcaaaccgtaatagagatcatagctaacccatcatttttcgtggaatgcattacagcattagacatttcccattgtgtccttagtgtggcaggctacctagatgaaatctggatgttgtaaacatgtaatgatggaaactggaatgaactggtcgtcttttcggtgaaagtggactcgtttgctcattttgctacactgacatggttgggttggcagtgttgtgttttaaggtgtttggtttgaagaatgagttagtccatcat

SEQ ID NO: 34250 - DNA, 852 bp, Zea Mays
cttagtggcactatggccacccatataagactcagtagttgcagaactacggcatacattgagaagtctagcccatttccaactgatggaaagcagggatggtggagcactggtttctcatatggcttgtggattgcttctctagtggcttcggggttttcggttgtcccgattgcatctcagacatggaaggcttactttgggctaatgcgaagtgaaacaccaaaggatgatagcagacaagctgcttcaattttgttccctgacaaagatcagtccttgaagttgaaaaaacaccatgggcgagcagaggctcttctgttagcagcctatgggaaaggccttgtgctgccatcggggaagttcagcaaaacctcagtttgatgtctatggtgattgcagattgacttgccatttttttgggggtaaacagaggctcttctgttagcagcctatgggaaaggccttgtacgatgcctatggtgattgccgactgacttaccatttcctgtattgatggtactgcaaattttcatttcgcttaggaggccccaatcaagacattaaggttgaatctgctgtaagtttgcaaaccgtaatagagatcatagctaacccatcatttttcgtggaatgcattacagcattagacatttcccattgtgtccttagtgtggcaggctacctagatgaaatctggatgttgtaaacatgtaatgatggaaactggaatgaactggtcgtcttttcggtgaaagtggactcgtttgctcattttgctacactgacatggttgggttggcagtgttgtgttttaaggtgtttggtttgaagaatgagttagtccatcat

SEQ ID NO: 34251 - DNA, 1348 bp, Zea Mays
ggcgctgggcatctgtcgtttccatcggcgccacctcacatgctcacatttagaaatgtttgacatcttggggaaaattgaatgttaactcttgattataagtggcaactagcaaggacactataacgaattttcgtttatggaagatattcccatctgtatttgcttttcagtcaacaccagagttaatgtttggactgtaccttctgtattacttccgtgtgtttgagaggcagataggctctaacaaatactcggttttttgtctcttcactatcacagcatcatcgctcctcgagatcctgtcattggttatcttgaaagatacaaattacatcagcacgcttgcatcagggccttatggtctcatatttgcctcttttgttcccttctttcttgacattccaatcacatcacggttccgtatttttggtctgaatttcagtgacaaatcattcatttacttagctggttttcagcttcttttatcttcttggaagcgctcccttattcctggtatatttggtctggttgctggttctctctatcgtctaaatgtgctcggcatccgcaagatgaagcttccacaggttatttcatcattttttgcaagatatttcgccccttccccaggaagcacatctcgcccctccaggagtcttgttggaaacacaccgtcccatagaggccgtgctgttcagaatcagccatcaactggatttgcacctatcgtggagcctccagagtcctccgttgctatgctggtctcaatgggctttgatggcaataacgcaaggcaggcactcgtgagggctagaaatgacatcaacgtggcaacgaacatcctactggaagcacagtctcattgaactaacgcactgcaactttctggtggtaaattagagggaagaactggttatattccaagatgaacaaacaatatgagcacattggactacagatcggtagattagtgcctcatttcatctaccttgaactgcaggccgacagtttagtaaatcagcgtatacatttgcggcagttagttttatcgtgtcaatacttagatgccttacatacagagaatgtaatattccaatttcagcttgtaggatagatgatataagcattcatagtgtacaattcatccgatgttttacagctttagaacttgttccagcacgatatgtggatcgtgctgagttccttgatgttgcaaagaaaacgaggaaggacatcagggatcggtaaaatttaagcttgttttagggcgaacaagaaacagaacgggtacgaaggcgaaacatgctcgggcatggcttgggtgcaatattttcctaaatgcaga

SEQ ID NO: 34252 - DNA, 1772 bp, Zea Mays
caaccaaccaggcaccaggcaactaccaccaccgtctcaacacgacaacacccgtctggccgtctcgccacgctcgtccggcagtctcctaccgggctccgtcccgtcccgccgcctgcatcacccaagggaagtacagccgagcccccactcgcgttccctgccgcgcgacctgatcgtacggccggggaggctgccgcgcctcctgacctcgcttccgcctcgcctccccgaccggaccagcggcctccgtctgaagatgcagggcggcgtctccggattccagaacgcgccggtgacgcgggcggtcgtcgtcgcgagcggcctcctgtccgtcgtcttcagcgcgcagcggcgcgcccgcgccctcggcatctcataccaggttttggatttgttgcgcaactgggagtattggctcttcattattgaaggttacagatgtggaggggtgttggtgggacaacatgacttatgcttgtaggatggtaccagttatgactgcatggactaaagtttttagctgacctgtggaataaggacactataacgaattttcgtttatggaagatattcccatctgtatttgcttttcagtcaacaccagagttaatgtttggactgtaccttctgtattacttccgtgtgtttgagaggcagataggctctaacaaatactcggttttttgtctcttcactatcacagcatcatcgctcctcgagatcctgtcattggttatcttgaaagatacaaattacatcagcacgcttgcatcagggccttatggtctcatatttgcctcttttgttcccttctttcttgacattccaatcacatcacggttccgtatttttggtctgaatttcagtgacaaatcattcatttacttagctggttttcagcttcttttatcttcttggaagcgctcccttattcctggtatatttggtctggttgctggttctctctatcgtctaaatgtgctcggcatccgcaagatgaagcttccacaggttatttcatcattttttgcaagatatttcgccccttccccaggaagcacatctcgcccctccaggagtcttgttggaaacacaccgtcccatagaggccgtgctgttcagaatcagccatcaactggatttgcacctatcgtggagcctccagagtcctccgttgctatgctggtctcaatgggctttgatggcaataacgcaaggcaggcactcgtgagggctagaaatgacatcaacgtggcaacgaacatcctactggaagcacagtctcattgaactaacgcactgcaactttctggtggtaaattagagggaagaactggttatattccaagatgaacaaacaatatgagcacattggactacagatcggtagattagtgcctcatttcatctaccttgaactgcaggccgacagtttagtaaatcagcgtatacatttgcggcagttagttttatcgtgtcaatacttagatgccttacatacagagaatgtaatattccaatttcagcttgtaggatagatgatataagcattcatagtgtacaattcatccgatgttttacagctttagaacttgttccagcacgatatgtggatcgtgctgagttccttgatgttgcaaagaaaacgaggaaggacatcagggatcggtaaaatttaagcttgttttagggcgaacaagaaacagaacgggtacgaaggcgaaacatgctcgggcatggcttgggtgcaatattttcctaaatgcaga

SEQ ID NO: 34253 - DNA, 2930 bp, Zea Mays
ggcgccataaaccctcggcctcgacctcatccagtacccgcacctccgctcaaaaccccagctctcctgccccggctggtctcagccacaagtaggcggccggcaagccaagaccaaggagcccgcgagcgcgagggctcgccgacgcggatggcgctactcctccggccgattcctccccctccccgcctccgcgcgctcctcggccgcctcctctccactggcgccagtctatttccctcccgcatgctccccgcgccccgctccaccgccgccgtccctcggctcctgtttgggcccagtgctgtggccgcggcagccacgcggcgcaatggggtccgggtgcgtgcgttcatggcgtcaacgacggcgtctgaggcgatgcacgagaagcaggtgtccgcggagtacactgctgccaatgtccaggtcctagaagcattagatggagttcgcacaaggcctggtatgtacattgggagcacaggaccacgcggcttgcatcatctggtttatgaaatcttggataatgctgtggatgaagctcaagcgggccatgcttcgaagattgatgtagttcttcatgatgacaattctgtcagtgtaacagacaacggccgtgggattcctactgatatgcacccccagacgaagaaatcttgtgtggagactgtcttaacattaatgcacgctggtggcaaatttggaggttcaaaaagtggttacagtgtctctggagggcttcatggtgttggcttatcagttgttaatgctttatcagagacacttgaagttactgtttggcgtgatgggaaggaacacagacaaagctattcgcgggggaaaccaaccactaggctaactagtagcacactgactggtgaaacaagctctcgtcaagggacgcgcatcagattttggcctgataaagatagtaagcttatattcttacaaataagctgtctggtctaacttctaagcaccactagtgatgctgctccagggattaatcattattttgaatgtagtatttaccaccacgatcgattttgacttcaatacaatctccagtcgcatacgggagcttgcctttctaaatcctgagaagggcacacagttcaacgcaacgaatattgttatgctggtggccttgttgaatatgttaaatggttgaatactgacaagaaacccctgcatgacccgattgcgttcagaaaggagttggatggtataacagtggatgtctcccttcaatggtcctctgattcctactctgatacagtgctaggatacgcaaacagtatccgcactattgatggtggtactcatattgatggtctaaaggcttcattgacgagaaccattaataaccttgcaaagaagtcgaagactattaaggataaggatattaccttgagtggggagcatgtaagagaaggaatgacatgcatcatttcagtgaaggtccctagtccagagtttgagggtcaaacaaagacaaggttgggaaatccagaagtacggagaatagttgagcagtctgttcaagaaaacttaacagagtacttagagcttcatccagatgttctggattcaatcctatcaaagtcccttaatgctctcaaggctgcgttggcagccaagcgtgctagggaactagtcaggacaaagagtgtgttgaaatcttcatcactccctgggaaacttgctgattgtgcatcagctaatcctgaagaatctgaaatctttattgtcgaaggtgattctgcgggcggtagtgcaaagcaaggacgggatagaagattccaggctattttgcctctaagaggtaaaattctcaacattgaaagaagggatgaagcagccatgtacaaaaatgaagagatccaaaaccttattcttgcacttggattaggagtgaagggtgaggattttaagaaggaggctctccggtatcataagatagttatacttactgacgctgatgttgatggagcacatatccggactctcctccttactttcttcttcagatatcaaagagcattatttgatgaaggttgcatctacgttggtgtacctcctctttacaaggttgagcgtggaaaactagcacattactgctatgatgatgccgacctcaaagagatagttaacaccttccctgcaaatgcatcatatcatatccagaggtttaaaggtttgggtgagatgatgcctgcacaattatgggaaacaacgatggatcctgagaggcggctgttgaagcagcttagggttgaagatgctgccgaggccaatgttgtgttctcgtcacttatgggcacccgggttgaatataggaaggaactgatccagaaagctgctagcatgatcaacatagatcaacttgacatttgaaggcattaagtaaggctgtcctttctgtgtatgatatagaaggtccgccacctgctgcttttcttgccactccaacaggattctagcgttgcagacttgatgataccttggcaacatctttttggtgctagagtagcagaaaacgtagggtacaaacattggatccaggatgagagctgggtttcctaacgaaaactctgattcatttgtggcggtgctataaccatttcagcttgacagttcagagctcacgggtgtagttccctgctgacatcgttcctccgatacggtgtaatatgcttttatatctatcgcctaatatttgcttcatgattccgtgtctcctttcttaatctggcagttaagtatctgtatgagctatggattcgtctgatgtttaaattggacggtttgaacccagttgacatgtgagcaatatctggtttggtttataggtaccaggtttagagagcaatatctaagagattttgtaaactaaatctccaaactcaatatttagtggatcgttg

SEQ ID NO: 34254 - DNA, 3145 bp, Zea Mays
ggcgccataaaccctcggcctcgacctcatccagtacccgcacctccgctcaaaaccccagctctcctgccccggctggtctcagccacaagtaggcggccggcaagccaagaccaaggagcccgcgagcgcgagggctcgccgacgcggatggcgctactcctccggccgattcctccccctccccgcctccgcgcgctcctcggccgcctcctctccactggcgccagtctatttccctcccgcatgctccccgcgccccgctccaccgccgccgtccctcggctcctgtttgggcccagtgctgtggccgcggcagccacgcggcgcaatggggtccgggtgcgtgcgttcatggcgtcaacgacggcgtctgaggcgatgcacgagaagcaggtgtccgcggagtacactgctgccaatgtccaggtcctagaagcattagatggagttcgcacaaggcctggtatgtacattgggagcacaggaccacgcggcttgcatcatctggtttatgaaatcttggataatgctgtggatgaagctcaagcgggccatgcttcgaagattgatgtagttcttcatgatgacaattctgtcagtgtaacagacaacggccgtgggattcctactgatatgcacccccagacgaagaaatcttgtgtggagactgtcttaacattaatgcacgctggtggcaaatttggaggttcaaaaagtggttacagtgtctctggagggcttcatggtgttggcttatcagttgttaatgctttatcagagacacttgaagttactgtttggcgtgatgggaaggaacacagacaaagctattcgcgggggaaaccaaccactaggctaactagtagcacactgactggtgaaacaagctctcgtcaagggacgcgcatcagattttggcctgataaagatatatttaccaccacgatcgattttgacttcaatacaatctccagtcgcatacgggagcttgcctttctaaatcctgagctaacaataatcttgacaaaggaagaagggcacacagttcaacgcaacgaatattgttatgctggtggccttgttgaatatgttaaatggttgaatactgacaagaaacccctgcatgacccgattgcgttcagaaaggagttggatggtataacagtggatgtctcccttcaatggtcctctgattcctactctgatacagtgctaggatacgcaaacagtatccgcactattgatggtggtactcatattgatggtctaaaggcttcattgacgagaaccattaataaccttgcaaagaagtcgaagactattaaggataaggatattaccttgagtggggagcatgtaagagaaggaatgacatgcatcatttcagtgaaggtccctagtccagagtttgagggtcaaacaaagacaaggttgggaaatccagaagtacggagaatagttgagcagtctgttcaagaaaacttaacagagtacttagagcttcatccagatgttctggattcaatcctatcaaagtcccttaatgctctcaaggctgcgttggcagccaagcgtgctagggaactagtcaggacaaagagtgtgttgaaatcttcatcactccctgggaaacttgctgattgtgcatcagctaatcctgaagaatctgaaatctttattgtcgaaggtgattctgcgggcggtagtgcaaagcaaggacgggatagaagattccaggctattttgcctctaagaggtaaaattctcaacattgaaagaagggatgaagcagccatgtacaaaaatgaagagatccaaaaccttattcttgcacttggattaggagtgaagggtgaggattttaagaaggaggctctccggtatcataagatagttatacttactgacgctgatgttgatggagcacatatccggactctcctccttactttcttcttcagatatcaaagagcattatttgatgaaggttgcatctacgttggtgtacctcctctttacaaggttgagcgtggaaaactagcacattactgctatgatgatgccgacctcaaagagatagttaacaccttccctgcaaatgcatcatatcatatccagaggtttaaaggtacatttaactattgaacaatgagcttctaagaaaatatcctggcacataaaaaaacatttttcttacttcagtgcacatttttaattgccttctatttcatcttgacaaacccctcaaactggcacccatcctccccacctccaaccgacagattatttgtctccactcaccctgactggatgactataccgtcttatgtcggtttcaagtctttacatattcagtggttcttatgtttcctttgtcgttatcttctatttgcttttctggtgttgcaacaggtttgggtgagatgatgcctgcacaattatgggaaacaacgatggatcctgagaggcggctgttgaagcagcttagggttgaagatgctgccgaggccaatgttgtgttctcgtcacttatgggcacccgggttgaatataggaaggaactgatccagaaagctgctagcatgatcaacatagatcaacttgacatttgaaggcattaagtaaggctgtcctttctgtgtatgatatagaaggtccgccacctgctgcttttcttgccactccaacaggattctagcgttgcagacttgatgataccttggcaacatctttttggtgctagagtagcagaaaacgtagggtacaaacattggatccaggatgagagctgggtttcctaacgaaaactctgattcatttgtggcggtgctataaccatttcagcttgacagttcagagctcacgggtgtagttccctgctgacatcgttcctccgatacggtgtaatatgcttttatatctatcgcctaatatttgcttcatgattccgtgtctcctttcttaatctggcagttaagtatctgtatgagctatggattcgtctgatgtttaaattggacggtttgaacccagttgacatgtgagcaatatctggtttggtttataggtaccaggtttagagagcaatatctaagagattttgtaaactaaatctccaaactcaatatttagtggatcgttg

SEQ ID NO: 34255 - DNA, 2756 bp, Zea Mays
ggcgccataaaccctcggcctcgacctcatccagtacccgcacctccgctcaaaaccccagctctcctgccccggctggtctcagccacaagtaggcggccggcaagccaagaccaaggagcccgcgagcgcgagggctcgccgacgcggatggcgctactcctccggccgattcctccccctccccgcctccgcgcgctcctcggccgcctcctctccactggcgccagtctatttccctcccgcatgctccccgcgccccgctccaccgccgccgtccctcggctcctgtttgggcccagtgctgtggccgcggcagccacgcggcgcaatggggtccgggtgcgtgcgttcatggcgtcaacgacggcgtctgaggcgatgcacgagaagcaggtgtccgcggagtacactgctgccaatgtccaggtcctagaagcattagatggagttcgcacaaggcctggtatgtacattgggagcacaggaccacgcggcttgcatcatctggtttatgaaatcttggataatgctgtggatgaagctcaagcgggccatgcttcgaagattgatgtagttcttcatgatgacaattctgtcagtgtaacagacaacggccgtgggattcctactgatatgcacccccagacgaagaaatcttgtgtggagactgtcttaacattaatgcacgctggtggcaaatttggaggttcaaaaagtggttacagtgtctctggagggcttcatggtgttggcttatcagttgttaatgctttatcagagacacttgaagttactgtttggcgtgatgggaaggaacacagacaaagctattcgcgggggaaaccaaccactaggctaactagtagcacactgactggtgaaacaagctctcgtcaagggacgcgcatcagattttggcctgataaagatatatttaccaccacgatcgattttgacttcaatacaatctccagtcgcatacgggagcttgcctttctaaatcctgagaaacccctgcatgacccgattgcgttcagaaaggagttggatggtataacagtggatgtctcccttcaatggtcctctgattcctactctgatacagtgctaggatacgcaaacagtatccgcactattgatggtggtactcatattgatggtctaaaggcttcattgacgagaaccattaataaccttgcaaagaagtcgaagactattaaggataaggatattaccttgagtggggagcatgtaagagaaggaatgacatgcatcatttcagtgaaggtccctagtccagagtttgagggtcaaacaaagacaaggttgggaaatccagaagtacggagaatagttgagcagtctgttcaagaaaacttaacagagtacttagagcttcatccagatgttctggattcaatcctatcaaagtcccttaatgctctcaaggctgcgttggcagccaagcgtgctagggaactagtcaggacaaagagtgtgttgaaatcttcatcactccctgggaaacttgctgattgtgcatcagctaatcctgaagaatctgaaatctttattgtcgaaggtgattctgcgggcggtagtgcaaagcaaggacgggatagaagattccaggctattttgcctctaagaggtaaaattctcaacattgaaagaagggatgaagcagccatgtacaaaaatgaagagatccaaaaccttattcttgcacttggattaggagtgaagggtgaggattttaagaaggaggctctccggtatcataagatagttatacttactgacgctgatgttgatggagcacatatccggactctcctccttactttcttcttcagatatcaaagagcattatttgatgaaggttgcatctacgttggtgtacctcctctttacaaggttgagcgtggaaaactagcacattactgctatgatgatgccgacctcaaagagatagttaacaccttccctgcaaatgcatcatatcatatccagaggtttaaaggtttgggtgagatgatgcctgcacaattatgggaaacaacgatggatcctgagaggcggctgttgaagcagcttagggttgaagatgctgccgaggccaatgttgtgttctcgtcacttatgggcacccgggttgaatataggaaggaactgatccagaaagctgctagcatgatcaacatagatcaacttgacatttgaaggcattaagtaaggctgtcctttctgtgtatgatatagaaggtccgccacctgctgcttttcttgccactccaacaggattctagcgttgcagacttgatgataccttggcaacatctttttggtgctagagtagcagaaaacgtagggtacaaacattggatccaggatgagagctgggtttcctaacgaaaactctgattcatttgtggcggtgctataaccatttcagcttgacagttcagagctcacgggtgtagttccctgctgacatcgttcctccgatacggtgtaatatgcttttatatctatcgcctaatatttgcttcatgattccgtgtctcctttcttaatctggcagttaagtatctgtatgagctatggattcgtctgatgtttaaattggacggtttgaacccagttgacatgtgagcaatatctggtttggtttataggtaccaggtttagagagcaatatctaagagattttgtaaactaaatctccaaactcaatatttagtggatcgttg

SEQ ID NO: 34256 - DNA, 500 bp, Zea Mays
cctaaatcaagacaattcatgtcagatctagtctatcgggctgaatttcatgctcttcttcattgtcttctgaatccaacaactcatcttgatcgaacacaatgtcaacattggcataaaccccataatcattaagatgcaggttctcttgttgttcatccattgggatatttagatcaaaagaatggagtatttgatgtggaggaacaaaaggaaaaactccaccaacctcaggctggtgagtgctttaaaggctggaggtagagtgtgttttatagccgtgagaaaggagcagtggcagagtggcagaacagcagcagaccagtggcagtttcaaatattgaatgtttttcgtttttgttaatgtgtttggcgcgtgtgcctgtgtacacatttctacttttggcgccggatggataaaaaattaataaatgctgagatgactagctacatcatccatatgtgacacaagaatctttacatttaatggagggtattct

SEQ ID NO: 34257 - DNA, 2156 bp, Zea Mays
atttgcactttgttttgttctctaagttccttttgagttatgcatcttagttttatatatacagcttctaagtacttggtgattttcttgcttatgtagattcacactgaaacataaaaatggtaacaatggtgactctgaagagatcactgtttatgattacttcgtaaagcagcgtggcatagtgctgcaatactctggtgatcttccttgcatcaatgtgggaaaactaaagcggccaacatattttccaattgagttatgcagtcttgtgcctttacaaagatacactaaagctttgaacacacttcagaggtcatcactcgtggagaaatctaggcagaaaccgcaggaaaggatgtctgttttatctgatgtgctgcaaagaagcaactatgatgcagagcccatgttgaaggcatgcgggattacaattgctagaaatttcacagaagttgatggtagggtattgcagccacctaagcttacagctgggaatggtgaagacatttttacacgcaatggtagatggaacttcaacaataagaggctcattagagcttgtagtgtcgagaaatgggcggtggtaaacttttctgcacgatgcaatgtcagggatcttgtccgggatctcatcaagtgtggaggcatgaagggcattatggttgatgctccttttgctgtatttgatgagaatccttcaatgagacggtcacctgctataagaagggttgaagacatgtttgaacaagtgaaaactaagcttcctggagcaccaaagtttcttttgtgtgttctagctgaaaggaagaattctgatatttatgggccttggaagaagaaatgccttgctgaatttgggatcgttacacaatgtgtggcaccaactagagtgaacgaccagtatcttacaaatgtcctacttaagataaatgcaaagctgggtggcatgaattcgttgctccaaattgaaacatccccagcaattcctcttgtatccaaggtcccaactataatcttgggaatggatgtgtcacacggttctcctggacattctgatgtaccatctattgctgctgttgttagttctcgtgaatggcctcttatctcgaaatacagagcttctgtccgcacccaatcacctaaaatggaaatgattgactcattgtttaagccacgggaagctgaagatgatggtctgatccgggagtgtctgattgacttctacaccagttctgggaagagaaagcctgaccaagttatcatattcagggacggtgttagcgaaagtcagtttaatcaggtgctgaacattgagttgcaacaaatcatcgaggcttgcaaatttcttgatgagaaatggaatcccaagttcacgttgattattgcccagaagaatcatcacactaaatttttcattcctggaaagccagataatgtcccaccaggaactgtggtggacaacaaagtctgccatccaaagaacttcgatttctacatgtgtgcgcatgctggaatgatcgggactacgaggccaactcactaccacatcctgcatgatgagataggcttcagtcctgatgatctgcaggagctggtgcattcgctctcttatgtgtaccaaaggagcacaacagccatatcagtcgttgctcccatctgctacgcacatctggcagctgctcaggttggccagttcataaagttcgatgagatgtcggagacgtcctccagtcatggcgggcatacttcggcgggcagcgttccggtccaggagctgccgcgcctgcatgagaaagaaggctcgagctggtacgatgttaaatgttagttttttaagcgtcgctgcggctatgttggtgcctcaggaagacttggaacctggttaggatgtcgttaaatctaccccttatcgttcctggttcgttgggctgttgttcttattgtccgtcctggtgtctgatttctgctttgttgcatgcaagtgtgaggcccagcttgatattgaaaagtttggcgtacatgtcgttcatttggcactctggactactgggtgggttttgctgtttttgatgacctgcagtagccaggacgcgcctctggtggtttctactgctcagtatttatgcgagtcgaccacctctgtttgcttccta

SEQ ID NO: 34258 - DNA, 649 bp, Zea Mays
  misc_feature (649)..(649): n is a, c, g, or t
acggaaactcctccgctccgctcctcactcccgctcccccgctcgctgttggtggaaatctagggtttcggtggggttcttgccgctgcggttgttcgtgcggcgcggatttagggagggttctgaggcgagggcttttgccccctcgagcgcaaggctcactaaatggagtctcacaatggcgaggccaatgacttgcctccaccacctcctctgattgctggtgttgaaccacttaaagctgatgaaacaaagatgccattgaaacctaggagtctggtccagagaaatggatttggcagaaaggggcagccaataaagctgataacaaatcacttcaaagtttctcttgtgaatgctgaagaatttttctaccattactatgtcaatttgaagtatgaagatgatacaccggttgatcgcaaagggtcaggaaggaaagtgattgaaaaactgcagcaaacttatgctgctgaacttgcaaataaagattttgcctatgatggtgagaagagcctgttcacaattggtgctcttcctcaagttaaaaatgagtttactgtcgtggttgaagatttttcaactggaaagactcctgcaaacggcagtccaggaaatgacagtcctcccggaagtgaccggaaaaggn

SEQ ID NO: 34259 - DNA, 560 bp, Zea Mays
  misc_feature (560)..(560): n is a, c, g, or t
gcggaatgacctcactgtccttccctcggcgatttgcagctttgggtccgatacagtgctcatcaaggctcactaaatggagtctcacaatggcgaggccaatgacttgcctccaccacctcctctgattgctggtgttgaaccacttaaagctgatgaaacaaagatgccattgaaacctaggagtctggtccagagaaatggatttggcagaaaggggcagccaataaagctgataacaaatcacttcaaagtttctcttgtgaatgctgaagaatttttctaccattactatgtcaatttgaagtatgaagatgatacaccggttgatcgcaaagggtcaggaaggaaagtgattgaaaaactgcagcaaacttatgctgctgaacttgcaaataaagattttgcctatgatggtgagaagagcctgttcacaattggtgctcttcctcaagttaaaaatgagtttactgtcgtggttgaagatttttcaactggaaagactcctgcaaacggcagtccaggaaatgacagtcctcccggaagtgaccggaaaaggn

SEQ ID NO: 34260 - DNA, 571 bp, Zea Mays
  misc_feature (571)..(571): n is a, c, g, or t
agattggccgatcggagcccacaggtgggcccgcgcgggcagatttgcagctttgggtccgatacagtgctcatcaaggctcactaaatggagtctcacaatggcgaggccaatgacttgcctccaccacctcctctgattgctggtgttgaaccacttaaagctgatgaaacaaagatgccattgaaacctaggagtctggtccagagaaatggatttggcagaaaggggcagccaataaagctgataacaaatcacttcaaagtttctcttgtgaatgctgaagaatttttctaccattactatgtcaatttgaagtatgaagatgatacaccggttgatcgcaaagggtcaggaaggaaagtgattgaaaaactgcagcaaacttatgctgctgaacttgcaaataaagattttgcctatgatggtgagaagagcctgttcacaattggtgctcttcctcaagttaaaaatgagtttactgtcgtggttgaagatttttcaactggaaagactcctgcaaacggcagtccaggaaatgacagtcctcccggaagtgaccggaaaaggn

SEQ ID NO: 34261 - DNA, 413 bp, Zea Mays
caacctccaaacgtgagccgccagcctgcgcctccaccccgtgcgatctctgtttagatcaatcgagttgagtttgttcattccaagtcattcttgcatagagatatcaagcctgataattttctcatgggtctcgggaaaagagaaaaccaggtttatgttatcgattttggacttgcaaagaagtacagagatacatcaacacaccagcacattccatacagagagaacaagaacttgactggaacagcaagatatgcaattgtaaatacccaccttggaattggtaggtttaattcaattggtggtagctagtttccaggcatgctgtttctggattcctgaaaaacttctcttacctttccatgacatttcatttctatattattattgatgtcttctcgcagaacaaa

SEQ ID NO: 34262 - DNA, 797 bp, Zea Mays
aaaaagatgttttccgagctgccccagaggcccagcccacggtgtcagtgtcacctctgctatttcttcacccgtccgttcacttgcgttcatccggcctacgttaaaatctctccatcccggcgacgactggcgacagccgctgccggcctactccaggtccccaggtctacgtcggacccttcgccgcggcgaacaccaccagagatctgtcactgattttgcagtcctcttgtcagatggcgagcacggggcggtcgatgctgctgtcactgctcctcttcgcagtgacgctgtcgctgctggagatgtacagggccaagttcgcctcgtcggagctcatgaccattgccggtggattcgtctgctccctcctattcctgctactcctcacctttattggaaactatcaagaagctagtggagatagaactgggtggggtgcagttgttgtagcacaacttgtagctcttattgtagccggcactgtccaccgtgtctgtatcacaacatgcttcctgttttccgctggactcctttacgaggttgacaagctctctggcatgatccttgcgaggagtgagtctaaggtgaggcggcactaagcacagaagcagcacagagagatgatacatcgatatttttatgtgatttaccaccttttgccggtttcatgatgtcattttccttcagccatactcgcggtgcgttgcatctgtctgtgcaatatagttttgccatcttttgtcgctcatctgttttccttcagccatactaggccagaagtttgatcgcac

SEQ ID NO: 34263 - DNA, 866 bp, Zea Mays
aaaaagatgttttccgagctgccccagaggcccagcccacggtgtcagtgtcacctctgctatttcttcacccgtccgttcacttgcgttcatccggcctacgttaaaatctctccatcccggcgacgactggcgacagccgctgccggcctactccaggtccccaggtctacgtcggacccttcgccgcggcgaacaccaccaggtaacgcaacccttattctctccctgctgtgcgaaaccgagcacccaaaccctaatttaagctatttgtattcggatctgatctaattactacaagtggatatatggcgagcacggggcggtcgatgctgctgtcactgctcctcttcgcagtgacgctgtcgctgctggagatgtacagggccaagttcgcctcgtcggagctcatgaccattgccggtggattcgtctgctccctcctattcctgctactcctcacctttattggaaactatcaagaagctagtggagatagaactgggtggggtgcagttgttgtagcacaacttgtagctcttattgtagccggcactgtccaccgtgtctgtatcacaacatgcttcctgttttccgctggactcctttacgaggttgacaagctctctggcatgatccttgcgaggagtgagtctaaggtgaggcggcactaagcacagaagcagcacagagagatgatacatcgatatttttatgtgatttaccaccttttgccggtttcatgatgtcattttccttcagccatactcgcggtgcgttgcatctgtctgtgcaatatagttttgccatcttttgtcgctcatctgttttccttcagccatactaggccagaagtttgatcgcac

SEQ ID NO: 34264 - DNA, 694 bp, Zea Mays
aatcacacaacctacccagacggccagaccccgctccgccaccgcgcccaccccaaattaatcgcacgcgccaccgctgccgccatgggctcctccgtcagtcaggccagtgcccctcctccacctcctccgacatacgcgtcgacccctccttccttcgtgcatgctgccgctgacgtcgctgccccgccgccgaagccccatgaggaggaggcgaccgaggagaaggtggactacctcaacctcccgtgccccgtcccatacgaggagattcagcgcgaggccttcatgacgctgaagcctgacctattcgagggcatgcgcttcgatttcaccaagatgatcaccccgtacttcgctttgactcacagacgatgctcatggggagggtcgcacatgatgggagggagaacatccgtgtcaagcacgatattacggacaacctttctttaaagataaatgctcagttgacaagtgagccccactactccaaggggatgctttattttgattataaggtcagcctcttgttgtaaagatcgatttctgttgtcttggaagcctgcatttggttgtttagtttggttggctgtcccggcaattgtacctgactactttctcttatgttattaagtaaatagctaattgttatttgttgatgtactatctcgctcaaaattgatttatttttgtg

SEQ ID NO: 34265 - DNA, 1902 bp, Zea Mays
agcaatttcgcacaaacgcgtggaccaaaccgaaaaccccaaagcttcgaccctggtcggtctcacgccgaggagcgagagaaattccccatcgatcttggtttcctctttcctccctctccgcggcatggatcccgccggcgcctctccggcgccggctcccgccgtggaagagcccgtaagcgccacctccattttcgacacccttggcgcggaggtgctggcggtcatgtccccggtctccatctgcatggcccttgtcgtgctcctcatctccctactctcgccgccgtcctccgggtccgcgtcgagctcaccccctccagtcacagctgccactctcgtctacctcgagtcccctaacgactccccgggccagaagctcctcggggcgctcctcgacgccgccgtcttcgtcgccctcgttgccgccgtcacctttgtcctcgttgcgctctactacttccgctgcacgggttttctcaagaactacatgcggttctccgccttcttcgtcatcttctccatgggaggcgccatcgtggccgccgtgctccggcgcctcgcggtcccgctcgacgcgcccaccgcgctcctgctcctcttcaacggcgccgctgtcggtgtcctctctgtattcgcctccgccgtccccatcctcgtccgccaggggtacatggtcgcgctcgccgtcatcgtcgccgcctggctctccaggctccccgaatggaccacgtggatcatgctcgtcgcgctcgctctttacgacctcgttgccgtgcttgcaccccggggaccgctcaggatgcttgtggagttggcctcctccagagatgatgagctgccagcactcgtctacgagtctcggcctacagtcggcccagtcacaagttcttcctcttacgcttcagccatggggtctgtggagatgcaaaccatggcagattctggtcagatcggtagcagtcaatatgagcaggaggaagatgccagccctgccttcgtgcaaatgagggatcttgtgagagtccgatcaagcattggtgagatgaaaagatcaagaggttctgtgctccaaatggagaaccttgaaagggaggtaccagtgatttcagcagaactgacagcaaaccaaggtgggagttcacagcatgccatcattcaaattgaacatcctgacgtagaagagacatcacctttggtgtctgcaccctctacctacaatgcagctttggatgaggagcatagacaaagttcatcgtcagagcctctggattttgagatgtttgagtctaccaggggcatcaagttgggccttggcgattttgttttctacagtgtgcttgttgggagagctgccatgtatgatctgatgactgtgtatgcatgctacctcgccatcattgctgggcttggttgcacccttgtcttgctttccatatgccggcatgcgctacctgcactcccaatctctattatgctgggagttacattctacttcttgacacggttgctgatggagccatttgtggttggtgcttcaacaaacttggtgatgttctgactttcactgatctgctgttgtcatttacatgtggatgaagccctcaatcgaaagaaagttgttggttagcaattcagcatcctatatacaaaatataggaccatacaagagagccacatgctgtttcaagacaattgggttatagctacaagtcagtcatgtgttctgacagcttagttgcatggtggctgtatctgattccaagtatttccattgaattgaagattggttgaatgtggtattctctcttttattaagtcgagaattgatctatagaaaatgttagacttaagctgctgaagtgtgggttggtaaggatgttctagaaaattaatggg

SEQ ID NO: 34266 - DNA, 2031 bp, Zea Mays
cttaattccgtccacagaagaagaatccttctcgacgccgcccccattcattcttggagggcaagaagaacgcgcagtccaaaagcgaaacaaggggaaggggcgaggcagccaaacgaatcccagcacctgcctctcctttgcttgcgcagatctagcgatggcggcgggcggtgagttggcgtggggggaggagcccgtggcgcggcgccggcctaagaccaagatcgtctgcacgctcggcccggcgtcgcgatccgtcgagatgatctcgcgcctgctgcgcgccgggatgtgcgtcgcgcgcttcaacttctcccatggctcccacgagtaccaccaggagacgctcgacaacctgcacgccgccatggagctcaccgggatcctctgcgccgttatgctcgacaccaagggtccagagattagaactggatttttgaaagatgggaagcctattcaattgataaaaggccaagaaatcacaatttctacagactatagcattcagggtgatgagaaaatgatatcaatgagctacaagaagcttgctgttgatctgaagccaggcagtgtcatattgtgtgctgatggtaccatcactcttactgttcttcactgtgataaagaacaaggcttggttcgctgccgctgtgagaacactttcaagcttggcgagaggaagaatgttaatcttccaggagttattgttgatctccccacactcacagacaaggacaaggaggacatccttaaatggggtgttccaaacaagattgacatgattgccttgtcatttgttcggaagggttcggatcttgtggaggttaggaaggtacttggtgagcatgccaagtccataatgctgatgtcaagttgagaatcaagagggagtagctaactttgatgatatcctggcaaactctgatgcttttatggtggcaagaggtgatttaggaatggaaattcctatagagaagattttctttgcacagaaggtgatgattttcaagtgcaatattcaaggcaagcctgttgtgactgcaacccagatgttggaatctatgatcaagtctcctcgccctactcgggcagaagcaacggatgttgcaaacgcagttcttgatggcacagactgtgttatgctcagtggtgagactgctgctggggcttatccagagttggcggtgcagactatggctaagatctgcctgcaagcagagtcttgcgtagaccatgctgctattttcaaatcaatcatggcttcagctccaattccaatgagtccattggagagccttgcatcatcagctgttcgcacagcaaactctgccagggcagcacttatcttggtcctgaccaggggaggaactactgctaggcttgtagccaagtataggccatccatgccgattctgtccgttgtggttcctgagctgaagacagactcgttcgactgggcctgcagtgacgagggtccggcaaggcacagcctcattgtgaggggtgtcatcccaatgctgagtgccgccactgccaaggcctttgacaacgaagccactgacgaagctattggttttgccattgaaaatgcgaagacgatggggctatgcaacaccgatcaatccgttgtggccctgcaccgcatcgggatttcatccgtcatcaagcttcttactgtgaagtaggggtccaagggtgagggacaccattttgcttggtgaatttttgtgaggctgcttacgcacatcagcgtatccacagcttttctgttgccaaagatacagactttgcgttctggtacaccttggtgttacaaggttgtgggaatttgtcgtttagatattagcgatttaaacagtttatcaactgctatagctaattaatttgcagctgtgctgcaactttatcgtactgaaaattttatgtttgtttcacatgcttgcttgttgattttatttcgtttggcaaaaaaaaatttcttgtttggttcagcgaaatcaatttattacctacctagtgctattgaac

SEQ ID NO: 34267 - DNA, 1333 bp, Zea Mays
ttataatgccgtgggggcggtcataatccccgcaggattctagccctgacaatcctgagggtttatctagggaagagttaggtcgtatggtggcttctcgttggactggggaaagtgtaactgaggttagtaaagatgataagaaggggcatgaagatcagcaagaaataccagaacctgcagaggaagcacttgaagatgaattagaaattccagaacctgccgaagaaaattatggtggttatcattcagaagttgaggatgataggcgtaaatatgaagatgaagagttttatcatgagtcagaagatgaatatgttgacgaccatgatgagcatgttgagtcctacaaatctgatgatgaccaaaaagatttaactgagccaggacatgcatcgtggttggacaaagttcagcagactgtacaaaatgttttccaaaaattcaactcttttaagacccctgtagatttgtcagaggcttctcatgttcgtaaggagtatgatgatgctagctcaaagctttcaaaaattcagtctaagatatccagtctagctgagaagctaaaacatgattttggtaatgacaaggagttctattccttttatgatcagtgttttgagaccaaggaagggaagtatacttacaaggtctgtgcatataagaaagcatcacaggctgaagggcacagttctaccaacctggggcggtgggacaaatttgaagattcgtacagagtgatgcacttttcaagtggagacaaatgctggaatggtcctgaccgaagcctaaaggttaggcttagatgtgggctgagcaatgagcttaatgatgtagatgagcctagcagatgcgagtatgtggctgtattgtcgacccctgcagtttgcgtagaggagaagctgaaggagctgcaaaacaaactggacgccatgtctttgaagcagcccgggcatgacgaactttaaaaactttagaatattccagcgtgaacataaagaagatgtcaccaggaggcatagctctgacagttacatccataacatgataggcatggaagtcaatgaggtatatggacagaaacgggccaagcgcgagaaatgagaatgtagagtttaggtcgcctaccaggctatattagctcgcatagaacattttttttagctgaaatttgatgttgcaattttccagactcatctgatggaatatatagtaagaaacagtacaccttgaatcagcatatactttacccagggtttttacatgaaactatgttcagaacggtcatttggaactgaaggaattcccacttggaacacaaggtgaatcgcct

SEQ ID NO: 34268 - DNA, 1307 bp, Zea Mays
cggcactgggattctagccctgacaatcctgagggtttatctagggaagagttaggtcgtatggtggcttctcgttggactggggaaagtgtaactgaggttagtaaagatgataagaaggggcatgaagatcagcaagaaataccagaacctgcagaggaagcacttgaagatgaattagaaattccagaacctgccgaagaaaattatggtggttatcattcagaagttgaggatgataggcgtaaatatgaagatgaagagttttatcatgagtcagaagatgaatatgttgacgaccatgatgagcatgttgagtcctacaaatctgatgatgaccaaaaagatttaactgagccaggacatgcatcgtggttggacaaagttcagcagactgtacaaaatgttttccaaaaattcaactcttttaagacccctgtagatttgtcagaggcttctcatgttcgtaaggagtatgatgatgctagctcaaagctttcaaaaattcagtctaagatatccagtctagctgagaagctaaaacatgattttggtaatgacaaggagttctattccttttatgatcagtgttttgagaccaaggaagggaagtatacttacaaggtctgtgcatataagaaagcatcacaggctgaagggcacagttctaccaacctggggcggtgggacaaatttgaagattcgtacagagtgatgcacttttcaagtggagacaaatgctggaatggtcctgaccgaagcctaaaggttaggcttagatgtgggctgagcaatgagcttaatgatgtagatgagcctagcagatgcgagtatgtggctgtattgtcgacccctgcagtttgcgtagaggagaagctgaaggagctgcaaaacaaactggacgccatgtctttgaagcagcccgggcatgacgaactttaaaaactttagaatattccagcgtgaacataaagaagatgtcaccaggaggcatagctctgacagttacatccataacatgataggcatggaagtcaatgaggtatatggacagaaacgggccaagcgcgagaaatgagaatgtagagtttaggtcgcctaccaggctatattagctcgcatagaacattttttttagctgaaatttgatgttgcaattttccagactcatctgatggaatatatagtaagaaacagtacaccttgaatcagcatatactttacccagggtttttacatgaaactatgttcagaacggtcatttggaactgaaggaattcccacttggaacacaaggtgaatcgcct

SEQ ID NO: 34269 - DNA, 2251 bp, Zea Mays
gcctgaagaacagtagaactcagactcgagcgctccaaagcgagccaccgccgatctgctcctccctcttgaccctcctccgtgcgctgcgcaggcatgaggcgcctcctcggcggctccctcgtcctttgtatcgccgcggtggtggagtccaagccgcctctcgactctctgggcataccaccgcaagatgaggcgtactacataggcggcgtgatcaaatgcagggacggatcgggcaggttttccagggaccagctcaacgacgacttctgcgactgccccgacggcaccgacgagcccgggacatctgcatgccctgaggcgaaattctactgcaagaatgcaggccacactccagtcacgatcttctcgtcacgagtgaatgacggcatttgtgattgctgtgatgggagtgatgaatatgacagcaatgtcacctgtaagaacacttgctgggaggctggaaaggtggcaagggagaaattgaagaagaaaattgctacatacgaaaatggtgttgttattcggaaacaggaagttgaaagggcaaaagaggcttttgctaaagatgaagcagatttagcaaaattgaagggcgaagagaaaatgctccaaggacttgttgataaactcaaagagcaaaagaaattaatagagaatgcagaggaagaagagcgtttaagaaaagagaaggaagaaaagagaacaaaagaagaagatgaaaagcaagctgctgttgaaaagggagcgcttgatgcctctcgggatgtagattctaaggaaattcatgatcatctgcaagaaggtgaaaacaaggccatgataatcatgtaacagaaagcagggcatctattgagcagcatggttctgtaagcaaagatggtattagcgttgaaggtggaactgtagatgaattgccgcaggagtctgcagcacctaccatagagaaggattctagccctgacaatcctgagggtttatctagggaagagttaggtcgtatggtggcttctcgttggactggggaaagtgtaactgaggttagtaaagatgataagaaggggcatgaagatcagcaagaaataccagaacctgcagaggaagcacttgaagatgaattagaaattccagaacctgccgaagaaaattatggtggttatcattcagaagttgaggatgataggcgtaaatatgaagatgaagagttttatcatgagtcagaagatgaatatgttgacgaccatgatgagcatgttgagtcctacaaatctgatgatgaccaaaaagatttaactgagccaggacatgcatcgtggttggacaaagttcagcagactgtacaaaatgttttccaaaaattcaactcttttaagacccctgtagatttgtcagaggcttctcatgttcgtaaggagtatgatgatgctagctcaaagctttcaaaaattcagtctaagatatccagtctagctgagaagctaaaacatgattttggtaatgacaaggagttctattccttttatgatcagtgttttgagaccaaggaagggaagtatacttacaaggtctgtgcatataagaaagcatcacaggctgaagggcacagttctaccaacctggggcggtgggacaaatttgaagattcgtacagagtgatgcacttttcaagtggagacaaatgctggaatggtcctgaccgaagcctaaaggttaggcttagatgtgggctgagcaatgagcttaatgatgtagatgagcctagcagatgcgagtatgtggctgtattgtcgacccctgcagtttgcgtagaggagaagctgaaggagctgcaaaacaaactggacgccatgtctttgaagcagcccgggcatgacgaactttaaaaactttagaatattccagcgtgaacataaagaagatgtcaccaggaggcatagctctgacagttacatccataacatgataggcatggaagtcaatgaggtatatggacagaaacgggccaagcgcgagaaatgagaatgtagagtttaggtcgcctaccaggctatattagctcgcatagaacattttttttagctgaaatttgatgttgcaattttccagactcatctgatggaatatatagtaagaaacagtacaccttgaatcagcatatactttacccagggtttttacatgaaactatgttcagaacggtcatttggaactgaaggaattcccacttggaacacaaggtgaatcgcct

SEQ ID NO: 34270 - DNA, 2212 bp, Zea Mays
gcctgaagaacagtagaactcagactcgagcgctccaaagcgagccaccgccgatctgctcctccctcttgaccctcctccgtgcgctgcgcaggcatgaggcgcctcctcggcggctccctcgtcctttgtatcgccgcggtggtggagtccaagccgcctctcgactctctgggcataccaccgcaagatgaggcgtactacataggcggcgtgatcaaatgcagggacggatcgggcaggttttccagggaccagctcaacgacgacttctgcgactgccccgacggcaccgacgagcccgggacatctgcatgccctgaggcgaaattctactgcaagaatgcaggccacactccagtcacgatcttctcgtcacgagtgaatgacggcatttgtgattgctgtgatgggagtgatgaatatgacagcaatgtcacctgtaagaacacttgctgggaggctggaaaggtggcaagggagaaattgaagaagaaaattgctacatacgaaaatggtgttgttattcggaaacaggaagttgaaagggcaaaagaggcttttgctaaagatgaagcagatttagcaaaattgaagggcgaagagaaaatgctccaaggacttgttgataaactcaaagagcaaaagaaattaatagagaatgcagaggaagaagagcgtttaagaaaagagaaggaagaaaagagaacaaaagaagaagatgaaaagcaagctgctgttgaaaagggagcgcttgatgcctctcgggatgtagattctaaggaaattcatgatcatctgcaagaaggtgaaaacaagcatgatggacatgcaacaggccatgataatcatgtaacagaaagcagggcatctattgagcagcatggttctgtaagcaaagatggtattagcgttgaaggtggaactgtagatgaattgccgcaggagtctgcagcacctaccatagagaaggattctagccctgacaatcctgagggtttatctagggaagagttaggtcgtatggtggcttctcgttggactggggaaagtgtaactgaggttagtaaagatgataagaaggggcatgaagatcagcaagaaataccagaacctgcagaggaagcacttgaagatgaattagaaattccagaacctgccgaagaaaattatggtggttatcattcagaagttgaggatgataggcgtaaatatgaagatgaagagttttatcatgagtcagaagatgaatatgttgacgaccatgatgagcatgttgagtcctacaaatctgatgatgaccaaaaagatttaactgagccaggacatgcatcgtggttggacaaagttcagcagactgtacaaaatgttttccaaaaattcaactcttttaagacccctgtagatttgtcagaggcttctcatgttcgtaaggagtatgatgatgctagctcaaagctttcaaaaattcagtctaagatatccagtctagctgagaagctaaaacatgattttggtatacttacaaggtctgtgcatataagaaagcatcacaggctgaagggcacagttctaccaacctggggcggtgggacaaatttgaagattcgtacagagtgatgcacttttcaagtggagacaaatgctggaatggtcctgaccgaagcctaaaggttaggcttagatgtgggctgagcaatgagcttaatgatgtagatgagcctagcagatgcgagtatgtggctgtattgtcgacccctgcagtttgcgtagaggagaagctgaaggagctgcaaaacaaactggacgccatgtctttgaagcagcccgggcatgacgaactttaaaaactttagaatattccagcgtgaacataaagaagatgtcaccaggaggcatagctctgacagttacatccataacatgataggcatggaagtcaatgaggtatatggacagaaacgggccaagcgcgagaaatgagaatgtagagtttaggtcgcctaccaggctatattagctcgcatagaacattttttttagctgaaatttgatgttgcaattttccagactcatctgatggaatatatagtaagaaacagtacaccttgaatcagcatatactttacccagggtttttacatgaaactatgttcagaacggtcatttggaactgaaggaattcccacttggaacacaaggtgaatcgcct

SEQ ID NO: 34271 - DNA, 2177 bp, Zea Mays
gcctgaagaacagtagaactcagactcgagcgctccaaagcgagccaccgccgatctgctcctccctcttgaccctcctccgtgcgctgcgcaggcatgaggcgcctcctcggcggctccctcgtcctttgtatcgccgcggtggtggagtccaagccgcctctcgactctctgggcataccaccgcaagatgaggcgtactacataggcggcgtgatcaaatgcagggacggatcgggcaggttttccagggaccagctcaacgacgacttctgcgactgccccgacggcaccgacgagcccgggacatctgcatgccctgaggcgaaattctactgcaagaatgcaggccacactccagtcacgatcttctcgtcacgagtgaatgacggcatttgtgattgctgtgatgggagtgatgaatatgacagcaatgtcacctgtaagaacacttgctgggaggctggaaaggtggcaagggagaaattgaagaagaaaattgctacatacgaaaatggtgttgttattcggaaacaggaagttgaaagggcaaaagaggcttttgctaaagatgaagcagatttagcaaaattgaagggcgaagagaaaatgctccaaggacttgttgataaactcaaagagcaaaagaaattaatagagaatgcagaggaagaagagcgtttaagaaaagagaaggaagaaaagagaacaaaagaagaagatgaaaagcaagctgctgttgaaaagggagcgcttgatgcctctcgggatgtagattctaaggaaattcatgatcatctgcaagaaggtgaaaacaagcatgatggacatgcaacaggccatgataatcatgtaacagaaagcagggcatctattgagcagcatggttctgtaagcaaagatggtattagcgttgaaggtggaactgtagatgaattgccgcaggagtctgcagcacctaccatagagaagggaagagttaggtcgtatggtggcttctcgttggactggggaaagtgtaactgaggttagtaaagatgataagaaggggcatgaagatcagcaagaaataccagaacctgcagaggaagcacttgaagatgaattagaaattccagaacctgccgaagaaaattatggtggttatcattcagaagttgaggatgataggcgtaaatatgaagatgaagagttttatcatgagtcagaagatgaatatgttgacgaccatgatgagcatgttgagtcctacaaatctgatgatgaccaaaaagatttaactgagccaggacatgcatcgtggttggacaaagttcagcagactgtacaaaatgttttccaaaaattcaactcttttaagacccctgtagatttgtcagaggcttctcatgttcgtaaggagtatgatgatgctagctcaaagctttcaaaaattcagtctaagatatccagtctagctgagaagctaaaacatgattttggtatacttacaaggtctgtgcatataagaaagcatcacaggctgaagggcacagttctaccaacctggggcggtgggacaaatttgaagattcgtacagagtgatgcacttttcaagtggagacaaatgctggaatggtcctgaccgaagcctaaaggttaggcttagatgtgggctgagcaatgagcttaatgatgtagatgagcctagcagatgcgagtatgtggctgtattgtcgacccctgcagtttgcgtagaggagaagctgaaggagctgcaaaacaaactggacgccatgtctttgaagcagcccgggcatgacgaactttaaaaactttagaatattccagcgtgaacataaagaagatgtcaccaggaggcatagctctgacagttacatccataacatgataggcatggaagtcaatgaggtatatggacagaaacgggccaagcgcgagaaatgagaatgtagagtttaggtcgcctaccaggctatattagctcgcatagaacattttttttagctgaaatttgatgttgcaattttccagactcatctgatggaatatatagtaagaaacagtacaccttgaatcagcatatactttacccagggtttttacatgaaactatgttcagaacggtcatttggaactgaaggaattcccacttggaacacaaggtgaatcgcct

SEQ ID NO: 34272 - DNA, 2230 bp, Zea Mays
gcctgaagaacagtagaactcagactcgagcgctccaaagcgagccaccgccgatctgctcctccctcttgaccctcctccgtgcgctgcgcaggcatgaggcgcctcctcggcggctccctcgtcctttgtatcgccgcggtggtggagtccaagccgcctctcgactctctgggcataccaccgcaagatgaggcgtactacataggcggcgtgatcaaatgcagggacggatcgggcaggttttccagggaccagctcaacgacgacttctgcgactgccccgacggcaccgacgagcccgggacatctgcatgccctgaggcgaaattctactgcaagaatgcaggccacactccagtcacgatcttctcgtcacgagtgaatgacggcatttgtgattgctgtgatgggagtgatgaatatgacagcaatgtcacctgtaagaacacttgctgggaggctggaaaggtggcaagggagaaattgaagaagaaaattgctacatacgaaaatggtgttgttattcggaaacaggaagttgaaagggcaaaagaggcttttgctaaagatgaagcagatttagcaaaattgaagggcgaagagaaaatgctccaaggacttgttgataaactcaaagagcaaaagaaattaatagagaatgcagaggaagaagagcgtttaagaaaagagaaggaagaaaagagaacaaaagaagaagatgaaaagcaagctgctgttgaaaagggagcgcttgatgcctctcgggatgtagattctaaggaaattcatgatcatctgcaagaaggtgaaaacaagcatgatggacatgcaacaggccatgataatcatgtaacagaaagcagggcatctattgagcagcatggttctgtaagcaaagatggtattagcgttgaaggtggaactgtagatgaattgccgcaggagtctgcagcacctaccatagagaagagttaggtcgtatggtggcttctcgttggactggggaaagtgtaactgaggttagtaaagatgataagaaggggcatgaagatcagcaagaaataccagaacctgcagaggaagcacttgaagatgaattagaaattccagaacctgccgaagaaaattatggtggttatcattcagaagttgaggatgataggcgtaaatatgaagatgaagagttttatcatgagtcagaagatgaatatgttgacgaccatgatgagcatgttgagtcctacaaatctgatgatgaccaaaaagatttaactgagccaggacatgcatcgtggttggacaaagttcagcagactgtacaaaatgttttccaaaaattcaactcttttaagacccctgtagatttgtcagaggcttctcatgttcgtaaggagtatgatgatgctagctcaaagctttcaaaaattcagtctaagatatccagtctagctgagaagctaaaacatgattttggtaatgacaaggagttctattccttttatgatcagtgttttgagaccaaggaagggaagtatacttacaaggtctgtgcatataagaaagcatcacaggctgaagggcacagttctaccaacctggggcggtgggacaaatttgaagattcgtacagagtgatgcacttttcaagtggagacaaatgctggaatggtcctgaccgaagcctaaaggttaggcttagatgtgggctgagcaatgagcttaatgatgtagatgagcctagcagatgcgagtatgtggctgtattgtcgacccctgcagtttgcgtagaggagaagctgaaggagctgcaaaacaaactggacgccatgtctttgaagcagcccgggcatgacgaactttaaaaactttagaatattccagcgtgaacataaagaagatgtcaccaggaggcatagctctgacagttacatccataacatgataggcatggaagtcaatgaggtatatggacagaaacgggccaagcgcgagaaatgagaatgtagagtttaggtcgcctaccaggctatattagctcgcatagaacattttttttagctgaaatttgatgttgcaattttccagactcatctgatggaatatatagtaagaaacagtacaccttgaatcagcatatactttacccagggtttttacatgaaactatgttcagaacggtcatttggaactgaaggaattcccacttggaacacaaggtgaatcgcct

SEQ ID NO: 34273 - DNA, 2235 bp, Zea Mays
gcctgaagaacagtagaactcagactcgagcgctccaaagcgagccaccgccgatctgctcctccctcttgaccctcctccgtgcgctgcgcaggcatgaggcgcctcctcggcggctccctcgtcctttgtatcgccgcggtggtggagtccaagccgcctctcgactctctgggcataccaccgcaagatgaggcgtactacataggcggcgtgatcaaatgcagggacggatcgggcaggttttccagggaccagctcaacgacgacttctgcgactgccccgacggcaccgacgagcccgggacatctgcatgccctgaggcgaaattctactgcaagaatgcaggccacactccagtcacgatcttctcgtcacgagtgaatgacggcatttgtgattgctgtgatgggagtgatgaatatgacagcaatgtcacctgtaagaacacttgctgggaggctggaaaggtggcaagggagaaattgaagaagaaaattgctacatacgaaaatggtgttgttattcggaaacaggaagttgaaagggcaaaagaggcttttgctaaagatgaagcagatttagcaaaattgaagggcgaagagaaaatgctccaaggacttgttgataaactcaaagagcaaaagaaattaatagagaatgcagaggaagaagagcgtttaagaaaagagaaggaagaaaagagaacaaaagaagaagatgaaaagcaagctgctgttgaaaagggagcgcttgatgcctctcgggatgtagattctaaggaaattcatgatcatctgcaagaaggtgaaaacaagcatgatggacatgcaacaggccatgataatcatgtaacagaaagcagggcatctattgagcagcatggttctgtaagcaaagatggtattagcgttgaaggtggaactgtagatgaattgccgcaggagtctgcagcacctaccatagagaagggaagagttaggtcgtatggtggcttctcgttggactggggaaagtgtaactgaggttagtaaagatgataagaaggggcatgaagatcagcaagaaataccagaacctgcagaggaagcacttgaagatgaattagaaattccagaacctgccgaagaaaattatggtggttatcattcagaagttgaggatgataggcgtaaatatgaagatgaagagttttatcatgagtcagaagatgaatatgttgacgaccatgatgagcatgttgagtcctacaaatctgatgatgaccaaaaagatttaactgagccaggacatgcatcgtggttggacaaagttcagcagactgtacaaaatgttttccaaaaattcaactcttttaagacccctgtagatttgtcagaggcttctcatgttcgtaaggagtatgatgatgctagctcaaagctttcaaaaattcagtctaagatatccagtctagctgagaagctaaaacatgattttggtaatgacaaggagttctattccttttatgatcagtgttttgagaccaaggaagggaagtatacttacaaggtctgtgcatataagaaagcatcacaggctgaagggcacagttctaccaacctggggcggtgggacaaatttgaagattcgtacagagtgatgcacttttcaagtggagacaaatgctggaatggtcctgaccgaagcctaaaggttaggcttagatgtgggctgagcaatgagcttaatgatgtagatgagcctagcagatgcgagtatgtggctgtattgtcgacccctgcagtttgcgtagaggagaagctgaaggagctgcaaaacaaactggacgccatgtctttgaagcagcccgggcatgacgaactttaaaaactttagaatattccagcgtgaacataaagaagatgtcaccaggaggcatagctctgacagttacatccataacatgataggcatggaagtcaatgaggtatatggacagaaacgggccaagcgcgagaaatgagaatgtagagtttaggtcgcctaccaggctatattagctcgcatagaacattttttttagctgaaatttgatgttgcaattttccagactcatctgatggaatatatagtaagaaacagtacaccttgaatcagcatatactttacccagggtttttacatgaaactatgttcagaacggtcatttggaactgaaggaattcccacttggaacacaaggtgaatcgcct

SEQ ID NO: 34274 - DNA, 2280 bp, Zea Mays
gcctgaagaacagtagaactcagactcgagcgctccaaagcgagccaccgccgatctgctcctccctcttgaccctcctccgtgcgctgcgcaggcatgaggcgcctcctcggcggctccctcgtcctttgtatcgccgcggtggtggagtccaagccgcctctcgactctctgggcataccaccgcaagatgaggcgtactacataggcggcgtgatcaaatgcagggacggatcgggcaggttttccagggaccagctcaacgacgacttctgcgactgccccgacggcaccgacgagcccgggacatctgcatgccctgaggcgaaattctactgcaagaatgcaggccacactccagtcacgatcttctcgtcacgagtgaatgacggcatttgtgattgctgtgatgggagtgatgaatatgacagcaatgtcacctgtaagaacacttgctgggaggctggaaaggtggcaagggagaaattgaagaagaaaattgctacatacgaaaatggtgttgttattcggaaacaggaagttgaaagggcaaaagaggcttttgctaaagatgaagcagatttagcaaaattgaagggcgaagagaaaatgctccaaggacttgttgataaactcaaagagcaaaagaaattaatagagaatgcagaggaagaagagcgtttaagaaaagagaaggaagaaaagagaacaaaagaagaagatgaaaagcaagctgctgttgaaaagggagcgcttgatgcctctcgggatgtagattctaaggaaattcatgatcatctgcaagaaggtgaaaacaagcatgatggacatgcaacaggccatgataatcatgtaacagaaagcagggcatctattgagcagcatggttctgtaagcaaagatggtattagcgttgaaggtggaactgtagatgaattgccgcaggagtctgcagcacctaccatagagaaggattctagccctgacaatcctgagggtttatctagggaagagttaggtcgtatggtggcttctcgttggactggggaaagtgtaactgaggttagtaaagatgataagaaggggcatgaagatcagcaagaaataccagaacctgcagaggaagcacttgaagatgaattagaaattccagaacctgccgaagaaaattatggtggttatcattcagaagttgaggatgataggcgtaaatatgaagatgaagagttttatcatgagtcagaagatgaatatgttgacgaccatgatgagcatgttgagtcctacaaatctgatgatgaccaaaaagatttaactgagccaggacatgcatcgtggttggacaaagttcagcagactgtacaaaatgttttccaaaaattcaactcttttaagacccctgtagatttgtcagaggcttctcatgttcgtaaggagtatgatgatgctagctcaaagctttcaaaaattcagtctaagatatccagtctagctgagaagctaaaacatgattttggtaatgacaaggagttctattccttttatgatcagtgttttgagaccaaggaagggaagtatgtatatgtatacttacaaggtctgtgcatataagaaagcatcacaggctgaagggcacagttctaccaacctggggcggtgggacaaatttgaagattcgtacagagtgatgcacttttcaagtggagacaaatgctggaatggtcctgaccgaagcctaaaggttaggcttagatgtgggctgagcaatgagcttaatgatgtagatgagcctagcagatgcgagtatgtggctgtattgtcgacccctgcagtttgcgtagaggagaagctgaaggagctgcaaaacaaactggacgccatgtctttgaagcagcccgggcatgacgaactttaaaaactttagaatattccagcgtgaacataaagaagatgtcaccaggaggcatagctctgacagttacatccataacatgataggcatggaagtcaatgaggtatatggacagaaacgggccaagcgcgagaaatgagaatgtagagtttaggtcgcctaccaggctatattagctcgcatagaacattttttttagctgaaatttgatgttgcaattttccagactcatctgatggaatatatagtaagaaacagtacaccttgaatcagcatatactttacccagggtttttacatgaaactatgttcagaacggtcatttggaactgaaggaattcccacttggaacacaaggtgaatcgcct

SEQ ID NO: 34275 - DNA, 4321 bp, Zea Mays
atggcgtccgagcgcccgctcctcatcgccacaaccccgggcgcctcaacccccgacgacgccccctcgccgcatcccccagcggcgtcactgctcccgccggcccagtcggagcctcctctccgcgcagaccgtctcgccttctccgtggagatccccgacccattccgctcctaccgccgtggcgacggacccgccgccgacccatccgcgtcgttggagagggaacgtgatgtcggggatgacgaatcccgagaggtcatcgtgggagagtcctcaccggagttctctgggaacgccatccgaacggcaaagtactcgttcctcacctttctaccgcggaacctcttcgaacagttccggcggctgtcgtacgtctacttcctcgcaatcactgtgcttaaccagctgccccaggtcgctgtcttcggccgcggtgcgtccgtgctaccactcgccttcgtgctcttcgtcactgccgtaaaggacgcctacgaggatttccgccgccaccgttccgaccgccaggagaacaaccgccttgccaccgtgctcgcactgggcacagctggcgagttccagcccaagagatggaagcacatacgcgtcggggacgtggtacggatcgagtccaatgagacactgccggccgatatggtgctgcttgctaccagcgatcccaccggtgttgcgcacgtccagactgtgaatctcgatggggagaccaatcttaagacgaggtatgccaagcaggagacacatgtcatgttctcccagaatggtggtgttggtggcgtcctgcattgcgaacgacccaacaggaacatttacggattccaagcaaatcttgagattgatggcaagcgtgtctcgcttgggccatccaacattgttcttcgtggctgtgaactcaagaacaccacatgggcaataggggttgtggtatatgctgggaaggagaccaaggtgatgctaaatagctcaggggcgccatcgaagcggagtcgcttggaaacacagttgaatcgggagactgtcatattatctattatgcttattgggatgtgcacaactgcatccgtgcttgctgggatttggctgctgaatcaccggagggagctggagttcacccaattcttcagggagaaggactatacaactgggaaaaactacaactattatggtgttgggatgcagatattcatcacattccttatggcagtgatagtgtatcaggttatcattcctatctcattgtatatatcaatggagctggtaaggcttggacaggcatatttcatgggtgctgataaagatctgtatgatgagtcatcaaggtcaaagttccagtgcagagctttgaatataaatgaggatttagggcaaataaggtatgtgttctctgacaagactgggacactaacggagaacaagatggtcttccagtgtgcgtcaattcgtggggttgattacaactctggtaaagatacaggtggatactcggttgtagtcggtgatcatctgtggacaccaaagatgtcagttaaaattgaccctgagctcgtgaaactactcagggatggtggttcaaatgaggaaccaaagcttgttcttgaattcttacttgctcttgcttcctgtaataccatagtgccgcttgtccttgacactagagactcaaaacagaagttgattgactatcagggtgagtcccctgatgaacaggcactagcatatgctgcagcatcttatggcattgtccttgttgagcgaacatctggttacatagtgattgatgtccttggtgacaggcagagatttgatatactgggacttcatgagtttgatagtgatcgtaagagaatgtctgttatcgtgggctgccctgataagactgttaagctgtatgtgaaaggtgcggacagttcagtatttggaattacaaacaattcatctgaattggacattgttcgtgctacagaggcacatctccataagtactcttcacttggactaagaactcttgttgttggtatgcgtaaactgagtcaatctgagtttgaggagtggcaattagcttatgagaatgccagtacagcagtacttggaagaggaaacttactccgatctgttgctgcaaacatagagatcaatgtcaacatattgggggccactgggattgaagataagcttcaagatggggttccagaagcaatagaatctattcggcaagcagacataaaggtttggattttaaccggagacaagcaggagaccgcaatttctattgggtactcctgtaagctgctgaccaatgacatgacacaaatcgttataaataacaattcaaaggagtcatgtcagagaagtcttgtggaggcgcttgctacaactaagaagctcagagccgcttcatcaattggtacacagggtccattgttagcatcagaaacttctaatgtaactcttgctttgattgtagatggtaacagtcttgtttacattctggagacagatttgcaagacgagcttttcaaactagcaactgaatgtagtgttgtcttatgttgccgagtggctccattacagaaggcagggatagttgcccttatcaagaacaggacaaatgatatgaccttagcaattggcgatggcgcaaatgatgtttcaatgattcaaatggctgatgttgggattggcatcagtggccaagaaggtcgacaagctgttatggcatcagatttttctatgggacaatttagatttttggttcctcttttattagttcatggtcactggaattatcaaaggatggcctatatgatcctttacaacttttacaagaatgctatgtttgtcttggttcttttctggtatgtactttatacagcattcactttgacaactgctatcactgagtggagtagtctcctgtatactgtcctgtatacatcccttccaacgattgtcgtcggcattcttgacaaggatcttaataaggcaaccctgatagcttatccaaagctatatggatctggccagagggacgacaagtacaatgtgaatttgtttgtgctcaatatgcttgaagcactctggcagagtttggtcgttttctacttgccgtattttgcatatagacgaagcacaatagatatgtctagtcttggagacttgtgggcacttgcacctgtcattgttgtaaatatgcaattggccatggacattattaggtggaactggataatacatgcgtttgtatggggcacaatagccgcaacaacagtttgtctctttgtgatagattcgatatgggttcttccagggtatgggtgagtactttctcttcaacctcttatgactgaagtcatgcattttccttttatattccatgaattaactgcaccatgatgtaagaagagcaaaatgaattcaggcccttctctctgcaaaataatgttcttagaatgtaaaatgattcgttccttgaatgttagtgggaaatttgcctgaagaaccaaaccaaaccaatgctcactgaaaaaaaaggaaaggaaaacagtacttctcattactgagctgagagtggactataatctctgtctagcatgcaaaaattatgatttactgcttttgcactgtggcttttcaaatacgttgagaacttcaataaccaaaacttaataagaattgtagtagttaatatgttgctttgtgattacttgaatgtctgcggtgaattgtatgctaactgtttctattaatcattccagggcaatttttcatataatggggactggtctgttttggtttttgctgcttatcattgttgttacagcaatggtcccacattttgtgttcaaggctttcacagaacactttaggcccagcgatattcaaatcgcccgtgagatggaaaaatttgcaaatgtcaatcaggtgaaccggttggaatttccaacgagaggactttcatgacaatagtagggaaactatagtatttcgttcttttcttattttcacgtctttcccccctactggtgtgaataggagctgattcatttagctgtaaggtgataggtttaatctctaatgtgcatgtatgtattcgtataaaatttacagaaaaggaaatagaagtccacgtacaagttttcatctgtttgttgcagcattattgcaggctaaatttgtggagagtgtattgtaaatatgggatactgatgcttggagattcaattttcaagtttgtagagagaatgtagatttgggaacacacggatgccaggaaatttaagttccagttttgtttcttccgaaa

SEQ ID NO: 34276 - DNA, 3762 bp, Zea Mays
atggcgtccgagcgcccgctcctcatcgccacaaccccgggcgcctcaacccccgacgacgccccctcgccgcatcccccagcggcgtcactgctcccgccggcccagtcggagcctcctctccgcgcagaccgtctcgccttctccgtggagatccccgacccattccgctcctaccgccgtggcgacggacccgccgccgacccatccgcgtcgttggagagggaacgtgatgtcggggatgacgaatcccgagaggtcatcgtgggagagtcctcaccggagttctctgggaacgccatccgaacggcaaagtactcgttcctcacctttctaccgcggaacctcttcgaacagttccggcggctgtcgtacgtctacttcctcgcaatcactgtgcttaaccagctgccccaggtcgctgtcttcggccgcggtgcgtccgtgctaccactcgccttcgtgctcttcgtcactgccgtaaaggacgcctacgaggatttccgccgccaccgttccgaccgccaggagaacaaccgccttgccaccgtgctcgcactgggcacagctggcgagttccagcccaagagatggaagcacatacgcgtcggggacgtggtacggatcgagtccaatgagacactgccggccgatatggtgctgcttgctaccagcgatcccaccggtgttgcgcacgtccagactgtgaatctcgatggggagaccaatcttaagacgaggtatgccaagcaggagacacatgtcatgttctcccagaatggtggtgttggtggcgtcctgcattgcgaacgacccaacaggaacatttacggattccaagcaaatcttgagattgatggcaagcgtgtctcgcttgggccatccaacattgttcttcgtggctgtgaactcaagaacaccacatgggcaataggggttgtggtatatgctgggaaggagaccaaggtgatgctaaatagctcaggggcgccatcgaagcggagtcgcttggaaacacagttgaatcgggagactgtcatattatctattatgcttattgggatgtgcacaactgcatccgtgcttgctgggatttggctgctgaatcaccggagggagctggagttcacccaattcttcagggagaaggactatacaactgggaaaaactacaactattatggtgttgggatgcagatattcatcacattccttatggcagtgatagtgtatcaggttatcattcctatctcattgtatatatcaatggagctggtaaggcttggacaggcatatttcatgggtgctgataaagatctgtatgatgagtcatcaaggtcaaagttccagtgcagagctttgaatataaatgaggatttagggcaaataaggtatgtgttctctgacaagactgggacactaacggagaacaagatggtcttccagtgtgcgtcaattcgtggggttgattacaactctggtaaagatacaggtggatactcggttgtagtcggtgatcatctgtggacaccaaagatgtcagttaaaattgaccctgagctcgtgaaactactcagggatggtggttcaaatgaggaaccaaagcttgttcttgaattcttacttgctcttgcttcctgtaataccatagtgccgcttgtccttgacactagagactcaaaacagaagttgattgactatcaggatttgatatactgggacttcatgagtttgatagtgatcgtaagagaatgtctgttatcgtgggctgccctgataagactgttaagctgtatgtgaaaggtgcggacagttcagtatttggaattacaaacaattcatctgaattggacattgttcgtgctacagaggcacatctccataagtactcttcacttggactaagaactcttgttgttggtatgcgtaaactgagtcaatctgagtttgaggagtggcaattagcttatgagaatgccagtacagcagtacttggaagaggaaacttactccgatctgttgctgcaaacatagagatcaatgtcaacatattgggggccactgggattgaagataagcttcaagatggggttccagaagcaatagaatctattcggcaagcagacataaaggtttggattttaaccggagacaagcaggagaccgcaatttctattgggtactcctgtaagctgctgaccaatgacatgacacaaatcgttataaataacaattcaaaggagtcatgtcagagaagtcttgtggaggcgcttgctacaactaagaagctcagagccgcttcatcaattggtacacagggtccattgttagcatcagaaacttctaatgtaactcttgctttgattgtagatggtaacagtcttgtttacattctggagacagatttgcaagacgagcttttcaaactagcaactgaatgtagtgttgtcttatgttgccgagtggctccattacagaaggcagggatagttgcccttatcaagaacaggacaaatgatatgaccttagcaattggcgatggcgcaaatgatgtttcaatgattcaaatggctgatgttgggattggcatcagtggccaagaaggtcgacaagctgttatggcatcagatttttctatgggacaatttagatttttggttcctcttttattagttcatggtcactggaattatcaaaggatggcctatatgatcctttacaacttttacaagaatgctatgtttgtcttggttcttttctggtatgtactttatacagcattcactttgacaactgctatcactgagtggagtagtctcctgtatactgtcctgtatacatcccttccaacgattgtcgtcggcattcttgacaaggatcttaataaggcaaccctgatagcttatccaaagctatatggatctggccagagggacgacaagtacaatgtgaatttgtttgtgctcaatatgcttgaagcactctggcagagtttggtcgttttctacttgccgtattttgcatatagacgaagcacaatagatatgtctagtcttggagacttgtgggcacttgcacctgtcattgttgtaaatatgcaattggccatggacattattaggtggaactggataatacatgcgtttgtatggggcacaatagccgcaacaacagtttgtctctttgtgatagattcgatatgggttcttccaggggcaatttttcatataatggggactggtctgttttggtttttgctgcttatcattgttgttacagcaatggtcccacattttgtgttcaaggctttcacagaacactttaggcccagcgatattcaaatcgcccgtgagatggaaaaatttgcaaatgtcaatcaggtgaaccggttggaatttccaacgagaggactttcatgacaatagtagggaaactatagtatttcgttcttttcttattttcacgtctttcccccctactggtgtgaataggagctgattcatttagctgtaaggtgataggtttaatctctaatgtgcatgtatgtattcgtataaaatttacagaaaaggaaatagaagtccacgtacaagttttcatctgtttgttgcagcattattgcaggctaaatttgtggagagtgtattgtaaatatgggatactgatgcttggagattcaattttcaagtttgtagagagaatgtagatttgggaacacacggatgccaggaaatttaagttccagttttgtttcttccgaaa

SEQ ID NO: 34277 - DNA, 4000 bp, Zea Mays
ctgcctttgacctcgccggcgccaacccaaacccgccgccgccgatgcctctggcgcactagcttcgcatctccgtcctcaacatggcgtccgagcgcccgctcctcatcgccacaaccccgggcgcctcaacccccgacgacgccccctcgccgcatcccccagcggcgtcactgctcccgccggcccagtcggagcctcctctccgcgcagaccgtctcgccttctccgtggagatccccgacccattccgctcctaccgccgtggcgacggacccgccgccgacccatccgcgtcgttggagagggaacgtgatgtcggggatgacgaatcccgagaggtcatcgtgggagagtcctcaccggagttctctgggaacgccatccgaacggcaaagtactcgttcctcacctttctaccgcggaacctcttcgaacagttccggcggctgtcgtacgtctacttcctcgcaatcactgtgcttaaccagctgccccaggtcgctgtcttcggccgcggtgcgtccgtgctaccactcgccttcgtgctcttcgtcactgccgtaaaggacgcctacgaggatttccgccgccaccgttccgaccgccaggagaacaaccgccttgccaccgtgctcgcactgggcacagctggcgagttccagcccaagagatggaagcacatacgcgtcggggacgtggtacggatcgagtccaatgagacactgccggccgatatggtgctgcttgctaccagcgatcccaccggtgttgcgcacgtccagactgtgaatctcgatggggagaccaatcttaagacgaggtatgccaagcaggagacacatgtcatgttctcccagaatggtggtgttggtggcgtcctgcattgcgaacgacccaacaggaacatttacggattccaagcaaatcttgagattgatggcaagcgtgtctcgcttgggccatccaacattgttcttcgtggctgtgaactcaagaacaccacatgggcaataggggttgtggtatatgctgggaaggagaccaaggtgatgctaaatagctcaggggcgccatcgaagcggagtcgcttggaaacacagttgaatcgggagactgtcatattatctattatgcttattgggatgtgcacaactgcatccgtgcttgctgggatttggctgctgaatcaccggagggagctggagttcacccaattcttcagggagaaggactatacaactgggaaaaactacaactattatggtgttgggatgcagatattcatcacattccttatggcagtgatagtgtatcaggttatcattcctatctcattgtatatatcaatggagctggtaaggcttggacaggcatatttcatgggtgctgataaagatctgtatgatgagtcatcaaggtcaaagttccagtgcagagctttgaatataaatgaggatttagggcaaataaggtatgtgttctctgacaagactgggacactaacggagaacaagatggtcttccagtgtgcgtcaattcgtggggttgattacaactctggtaaagatacaggtggatactcggttgtagtcggtgatcatctgtggacaccaaagatgtcagttaaaattgaccctgagctcgtgaaactactcagggatggtggttcaaatgaggaaccaaagcttgttcttgaattcttacttgctcttgcttcctgtaataccatagtgccgcttgtccttgacactagagactcaaaacagaagttgattgactatcagggtgagtcccctgatgaacaggcactagcatatgctgcagcatcttatggcattgtccttgttgagcgaacatctggttacatagtgattgatgtccttggtgacaggcagagatttgatatactgggacttcatgagtttgatagtgatcgtaagagaatgtctgttatcgtgggctgccctgataagactgttaagctgtatgtgaaaggtgcggacagttcagtatttggaattacaaacaattcatctgaattggacattgttcgtgctacagaggcacatctccataagtactcttcacttggactaagaactcttgttgttggtatgcgtaaactgagtcaatctgagtttgaggagtggcaattagcttatgagaatgccagtacagcagtacttggaagaggaaacttactccgatctgttgctgcaaacatagagatcaatgtcaacatattgggggccactgggattgaagataagcttcaagatggggttccagaagcaatagaatctattcggcaagcagacataaaggtttggattttaaccggagacaagcaggagaccgcaatttctattgggtactcctgtaagctgctgaccaatgacatgacacaaatcgttataaataacaattcaaaggagtcatgtcagagaagtcttgtggaggcgcttgctacaactaagaagctcagagccgcttcatcaattggtacacagggtccattgttagcatcagaaacttctaatgtaactcttgctttgattgtagatggtaacagtcttgtttacattctggagacagatttgcaagacgagcttttcaaactagcaactgaatgtagtgttgtcttatgttgccgagtggctccattacagaaggcagggatagttgcccttatcaagaacaggacaaatgatatgaccttagcaattggcgatggcgcaaatgatgtttcaatgattcaaatggctgatgttgggattggcatcagtggccaagaaggtcgacaagctgttatggcatcagatttttctatgggacaatttagatttttggttcctcttttattagttcatggtcactggaattatcaaaggatggcctatatgatcctttacaacttttacaagaatgctatgtttgtcttggttcttttctgatatttctgaaaaactaatactcatgtgtgatcccaggtatgtactttatacagcattcactttgacaactgctatcactgagtggagtagtctcctgtatactgtcctgtatacatcccttccaacgattgtcgtcggcattcttgacaaggatcttaataaggcaaccctgatagcttatccaaagctatatggatctggccagagggacgacaagtacaatgtgaatttgtttgtgctcaatatgcttgaagcactctggcagagtttggtcgttttctacttgccgtattttgcatatagacgaagcacaatagatatgtctagtcttggagacttgtgggcacttgcacctgtcattgttgtaaatatgcaattggccatggacattattaggtggaactggataatacatgcgtttgtatggggcacaatagccgcaacaacagtttgtctctttgtgatagattcgatatgggttcttccagggtatggggcaatttttcatataatggggactggtctgttttggtttttgctgcttatcattgttgttacagcaatggtcccacattttgtgttcaaggctttcacagaacactttaggcccagcgatattcaaatcgcccgtgagatggaaaaatttgcaaatgtcaatcaggtgaaccggttggaatttccaacgagaggactttcatgacaatagtagggaaactatagtatttcgttcttttcttattttcacgtctttcccccctactggtgtgaataggagctgattcatttagctgtaaggtgataggtttaatctctaatgtgcatgtatgtattcgtataaaatttacagaaaaggaaatagaagtccacgtacaagttttcatctgtttgttgcagcattattgcaggctaaatttgtggagagtgtattgtaaatatgggatactgatgcttggagattcaattttcaagtttgtagagagaatgtagatttgggaacacacggatgccaggaaatttaagttccagttttgtttcttccgaaa

SEQ ID NO: 34278 - DNA, 3872 bp, Zea Mays
cacctccccacctggccacctctgcctttgacctcgccggcgccaacccaaacccgccgccgccgatgcctctggcgcactagcttcgcatctccgtcctcaacatggcgtccgagcgcccgctcctcatcgccacaaccccgggcgcctcaacccccgacgacgccccctcgccgcatcccccagcggcgtcactgctcccgccggcccagtcggagcctcctctccgcgcagaccgtctcgccttctccgtggagatccccgacccattccgctcctaccgccgtggcgacggacccgccgccgacccatccgcgtcgttggagagggaacgtgatgtcggggatgacgaatcccgagaggtcatcgtgggagagtcctcaccggagttctctgggaacgccatccgaacggcaaagtactcgttcctcacctttctaccgcggaacctcttcgaacagttccggcggctgtcgtacgtctacttcctcgcaatcactgtgcttaaccagctgccccaggtcgctgtcttcggccgcggtgcgtccgtgctaccactcgccttcgtgctcttcgtcactgccgtaaaggacgcctacgaggatttccgccgccaccgttccgaccgccaggagaacaaccgccttgccaccgtgctcgcactgggcacagctggcgagttccagcccaagagatggaagcacatacgcgtcggggacgtggtacggatcgagtccaatgagacactgccggccgatatggtgctgcttgctaccagcgatcccaccggtgttgcgcacgtccagactgtgaatctcgatggggagaccaatcttaagacgaggtatgccaagcaggagacacatgtcatgttctcccagaatggtggtgttggtggcgtcctgcattgcgaacgacccaacaggaacatttacggattccaagcaaatcttgagattgatggcaagcgtgtctcgcttgggccatccaacattgttcttcgtggctgtgaactcaagaacaccacatgggcaataggggttgtggtatatgctgggaaggagaccaaggtgatgctaaatagctcaggggcgccatcgaagcggagtcgcttggaaacacagttgaatcgggagactgtcatattatctattatgcttattgggatgtgcacaactgcatccgtgcttgctgggatttggctgctgaatcaccggagggagctggagttcacccaattcttcagggagaaggactatacaactgggaaaaactacaactattatggtgttgggatgcagatattcatcacattccttatggcagtgatagtgtatcaggttatcattcctatctcattgtatatatcaatggagctggtaaggcttggacaggcatatttcatgggtgctgataaagatctgtatgatgagtcatcaaggtcaaagttccagtgcagagctttgaatataaatgaggatttagggcaaataaggtatgtgttctctgacaagactgggacactaacggagaacaagatggtcttccagtgtgcgtcaattcgtggggttgattacaactctggtaaagatacaggtggatactcggttgtagtcggtgatcatctgtggacaccaaagatgtcagttaaaattgaccctgagctcgtgaaactactcagggatggtggttcaaatgaggaaccaaagcttgttcttgaattcttacttgctcttgcttcctgtaataccatagtgccgcttgtccttgacactagagactcaaaacagaagttgattgactatcaggatttgatatactgggacttcatgagtttgatagtgatcgtaagagaatgtctgttatcgtgggctgccctgataagactgttaagctgtatgtgaaaggtgcggacagttcagtatttggaattacaaacaattcatctgaattggacattgttcgtgctacagaggcacatctccataagtactcttcacttggactaagaactcttgttgttggtatgcgtaaactgagtcaatctgagtttgaggagtggcaattagcttatgagaatgccagtacagcagtacttggaagaggaaacttactccgatctgttgctgcaaacatagagatcaatgtcaacatattgggggccactgggattgaagataagcttcaagatggggttccagaagcaatagaatctattcggcaagcagacataaaggtttggattttaaccggagacaagcaggagaccgcaatttctattgggtactcctgtaagctgctgaccaatgacatgacacaaatcgttataaataacaattcaaaggagtcatgtcagagaagtcttgtggaggcgcttgctacaactaagaagctcagagccgcttcatcaattggtacacagggtccattgttagcatcagaaacttctaatgtaactcttgctttgattgtagatggtaacagtcttgtttacattctggagacagatttgcaagacgagcttttcaaactagcaactgaatgtagtgttgtcttatgttgccgagtggctccattacagaaggcagggatagttgcccttatcaagaacaggacaaatgatatgaccttagcaattggcgatggcgcaaatgatgtttcaatgattcaaatggctgatgttgggattggcatcagtggccaagaaggtcgacaagctgttatggcatcagatttttctatgggacaatttagatttttggttcctcttttattagttcatggtcactggaattatcaaaggatggcctatatgatcctttacaacttttacaagaatgctatgtttgtcttggttcttttctggtatgtactttatacagcattcactttgacaactgctatcactgagtggagtagtctcctgtatactgtcctgtatacatcccttccaacgattgtcgtcggcattcttgacaaggatcttaataaggcaaccctgatagcttatccaaagctatatggatctggccagagggacgacaagtacaatgtgaatttgtttgtgctcaatatgcttgaagcactctggcagagtttggtcgttttctacttgccgtattttgcatatagacgaagcacaatagatatgtctagtcttggagacttgtgggcacttgcacctgtcattgttgtaaatatgcaattggccatggacattattaggtggaactggataatacatgcgtttgtatggggcacaatagccgcaacaacagtttgtctctttgtgatagattcgatatgggttcttccagggtatggggcaatttttcatataatggggactggtctgttttggtttttgctgcttatcattgttgttacagcaatggtcccacattttgtgttcaaggctttcacagaacactttaggcccagcgatattcaaatcgcccgtgagatggaaaaatttgcaaatgtcaatcaggtgaaccggttggaatttccaacgagaggactttcatgacaatagtagggaaactatagtatttcgttcttttcttattttcacgtctttcccccctactggtgtgaataggagctgattcatttagctgtaaggtgataggtttaatctctaatgtgcatgtatgtattcgtataaaatttacagaaaaggaaatagaagtccacgtacaagttttcatctgtttgttgcagcattattgcaggctaaatttgtggagagtgtattgtaaatatgggatactgatgcttggagattcaattttcaagtttgtagagagaatgtagatttgggaacacacggatgccaggaaatttaagttccagttttgtttcttccgaaa

SEQ ID NO: 34279 - DNA, 3932 bp, Zea Mays
ccccaatacctctacagtctacacctgctctctcgactcccccaaagtcctcacctccccacctggccacctctgcctttgacctcgccggcgccaacccaaacccgccgccgccgatgcctctggcgcactagcttcgcatctccgtcctcaacatggcgtccgagcgcccgctcctcatcgccacaaccccgggcgcctcaacccccgacgacgccccctcgccgcatcccccagcggcgtcactgctcccgccggcccagtcggagcctcctctccgcgcagaccgtctcgccttctccgtggagatccccgacccattccgctcctaccgccgtggcgacggacccgccgccgacccatccgcgtcgttggagagggaacgtgatgtcggggatgacgaatcccgagaggtcatcgtgggagagtcctcaccggagttctctgggaacgccatccgaacggcaaagtcgctgtcttcggccgcggtgcgtccgtgctaccactcgccttcgtgctcttcgtcactgccgtaaaggacgcctacgaggatttccgccgccaccgttccgaccgccaggagaacaaccgccttgccaccgtgctcgcactgggcacagctggcgagttccagcccaagagatggaagcacatacgcgtcggggacgtggtacggatcgagtccaatgagacactgccggccgatatggtgctgcttgctaccagcgatcccaccggtgttgcgcacgtccagactgtgaatctcgatggggagaccaatcttaagacgaggtatgccaagcaggagacacatgtcatgttctcccagaatggtggtgttggtggcgtcctgcattgcgaacgacccaacaggaacatttacggattccaagcaaatcttgagattgatggcaagcgtgtctcgcttgggccatccaacattgttcttcgtggctgtgaactcaagaacaccacatgggcaataggggttgtggtatatgctgggaaggagaccaaggtgatgctaaatagctcaggggcgccatcgaagcggagtcgcttggaaacacagttgaatcgggagactgtcatattatctattatgcttattgggatgtgcacaactgcatccgtgcttgctgggatttggctgctgaatcaccggagggagctggagttcacccaattcttcagggagaaggactatacaactgggaaaaactacaactattatggtgttgggatgcagatattcatcacattccttatggcagtgatagtgtatcaggttatcattcctatctcattgtatatatcaatggagctggtaaggcttggacaggcatatttcatgggtgctgataaagatctgtatgatgagtcatcaaggtcaaagttccagtgcagagctttgaatataaatgaggatttagggcaaataaggtatgtgttctctgacaagactgggacactaacggagaacaagatggtcttccagtgtgcgtcaattcgtggggttgattacaactctggtaaagatacaggtggatactcggttgtagtcggtgatcatctgtggacaccaaagatgtcagttaaaattgaccctgagctcgtgaaactactcagggatggtggttcaaatgaggaaccaaagcttgttcttgaattcttacttgctcttgcttcctgtaataccatagtgccgcttgtccttgacactagagactcaaaacagaagttgattgactatcagggtgagtcccctgatgaacaggcactagcatatgctgcagcatcttatggcattgtccttgttgagcgaacatctggttacatagtgattgatgtccttggtgacaggcagagatttgatatactgggacttcatgagtttgatagtgatcgtaagagaatgtctgttatcgtgggctgccctgataagactgttaagctgtatgtgaaaggtgcggacagttcagtatttggaattacaaacaattcatctgaattggacattgttcgtgctacagaggcacatctccataagtactcttcacttggactaagaactcttgttgttggtatgcgtaaactgagtcaatctgagtttgaggagtggcaattagcttatgagaatgccagtacagcagtacttggaagaggaaacttactccgatctgttgctgcaaacatagagatcaatgtcaacatattgggggccactgggattgaagataagcttcaagatggggttccagaagcaatagaatctattcggcaagcagacataaaggtttggattttaaccggagacaagcaggagaccgcaatttctattgggtactcctgtaagctgctgaccaatgacatgacacaaatcgttataaataacaattcaaaggagtcatgtcagagaagtcttgtggaggcgcttgctacaactaagaagctcagagccgcttcatcaattggtacacagggtccattgttagcatcagaaacttctaatgtaactcttgctttgattgtagatggtaacagtcttgtttacattctggagacagatttgcaagacgagcttttcaaactagcaactgaatgtagtgttgtcttatgttgccgagtggctccattacagaaggcagggatagttgcccttatcaagaacaggacaaatgatatgaccttagcaattggcgatggcgcaaatgatgtttcaatgattcaaatggctgatgttgggattggcatcagtggccaagaaggtcgacaagctgttatggcatcagatttttctatgggacaatttagatttttggttcctcttttattagttcatggtcactggaattatcaaaggatggcctatatgatcctttacaacttttacaagaatgctatgtttgtcttggttcttttctggtatgtactttatacagcattcactttgacaactgctatcactgagtggagtagtctcctgtatactgtcctgtatacatcccttccaacgattgtcgtcggcattcttgacaaggatcttaataaggcaaccctgatagcttatccaaagctatatggatctggccagagggacgacaagtacaatgtgaatttgtttgtgctcaatatgcttgaagcactctggcagagtttggtcgttttctacttgccgtattttgcatatagacgaagcacaatagatatgtctagtcttggagacttgtgggcacttgcacctgtcattgttgtaaatatgcaattggccatggacattattaggtggaactggataatacatgcgtttgtatggggcacaatagccgcaacaacagtttgtctctttgtgatagattcgatatgggttcttccagggtatggggcaatttttcatataatggggactggtctgttttggtttttgctgcttatcattgttgttacagcaatggtcccacattttgtgttcaaggctttcacagaacactttaggcccagcgatattcaaatcgcccgtgagatggaaaaatttgcaaatgtcaatcaggtgaaccggttggaatttccaacgagaggactttcatgacaatagtagggaaactatagtatttcgttcttttcttattttcacgtctttcccccctactggtgtgaataggagctgattcatttagctgtaaggtgataggtttaatctctaatgtgcatgtatgtattcgtataaaatttacagaaaaggaaatagaagtccacgtacaagttttcatctgtttgttgcagcattattgcaggctaaatttgtggagagtgtattgtaaatatgggatactgatgcttggagattcaattttcaagtttgtagagagaatgtagatttgggaacacacggatgccaggaaatttaagttccagttttgtttcttccgaaa

SEQ ID NO: 34280 - DNA, 4290 bp, Zea Mays
cctgcgtctttccgaccttctccatcgcatcctcaaatgatttctgcacatttaagagcttgcatcaggcatacggagtagcactagtgcgcaagatcacacactatcccgcaacagttacaggtacagattgtcattccatatagatcttgcttttctaatcactcaattatttgaagggcttaccaatctaaccgattcctctgatcctctcccacatgccagaacagaaatatcagcactaagtacatctacagggacttcttgttttatttttcaggatctatggcagaattttttttcccaccatggaccaagcaaatttcactactcatcatattcaacatttgaatttagtgataggtaaattctagctttacaatcataagcacaccaaaatttgcaatatcttgatgattgctacaaaatctcctcaagctaagaccctgacataagaaaaccatgctgaagtaatttagatagttaggcattggtgagaactacacagcacctaaagtcgaccactcagcattcacaaaaagaaaaagagggctatcaattataataaaaatgtatcagcagagtacagttacacaattttgaatcagtttactgtctactaatgcaacacatcatgatctgcgcctctgtcaggctcactactggcaatgtatgaacatgtgaataggataaaaaaaagaataatccacatgtcatcaaataataatctacgtaaagcacaatacaagaatcttatgctgacttgtctactcatctagtttcacattttgatttaatgataacccaagatttttcttaaacaaatagtgatcaacatttgaagagatgggcctattccacaattttgaataaagtgtcaataaccatgggaggtaatgggattatgggaacacaaacctagggtattgcaatgttttatttatagaactaacaatcctgttaggaaagaaaaaaagagaaaatatccctgttgcattttagatatgaccaaaaaacagggcgtacccagtgctgaaagctcccacaaggtgcaaatcatataatttactgttttagtttgcttagagtcagcttcacttttggggcgcaatatgacaacaacaacagcagaagtcgtgcaacactctaaaatcgtatcttggtgagttaagaaaattccctaaagatttagaatttcaagcgtattataacaaagtgactttcttttctaaaatttaataaatagtaaatataaaatgttggctatataaaaactataataaataagataatgagttattctacataaattactcctattgggttatataactatgggaattccatacttattaaatttcatgcatacaaatacttatttgagcaaagtaaatgaggagtaaataaatataaaatatttgcattcatgttggtgttttggttgtgcatataaatatgatttcaaaatttaaaatcagatttgaattgggataattaaatctagaaataaaaaataggaaaaaaagaatagcaaataaaaggcttatctattcggtcacttaaggaacacaacccacgtgagtttttcctcctatttttttattccacttgccggatcttgcatcactgttacctattctaggttcgagtttgttagagttcctaatagatatgataagattgtaacagataagtaccagattagatctatcatgtaacagatttaggttcgagtttgttagagttcctaatatataggatatgattgtagcagataagtaccagattaaatctatcatgtaaccatccacctcccagcctatataaatacatgtcaccataacacctcaagccatcaatcaaagactcatctcatccatagcctcgcaaccgccaccgctggccggtgggcctgccaccgcgggcaggttaacgcaaccccgttccagcgtgaacatgatcgtgcggggagaaacagtcctgaccgtcgatccggtgatgagcgttgtgctctatattaatcaacccgccgtccaactgtgcggtaagatgattacctagcagtccctgagagttgcaaataagtccctagtgctcgatttaattataaaaatgaccgaaaactaaattaatccctatattgctcgttttaactccgatttagtccgttcaagttgcgttagtctcgtattaaatttgtctacgcaataacaacattatttacaacatattgcttacttttatattatttatcctatgattattgatttatcttgctaatcaaagttaattgtccatgattataacctgactaaaaatacaacctataatcaagttatatcttggattaagtttaactaattctcacatgatttatattagttaacatataatttatcttttattgtttaatcacatctttggaaagtcatatcctcttaatcgtaactctaaatttagtggttctcgaacctacaatctcatagcaacatgtaaaatattcttacgtggtctgtcctcatgtttggtgtaatgttatttttatgtactctttgtctgcttgaatgtattgctacgagtagcagcgaggttgcgagtcaccgaagaccaacttggtaaagtacctggaaattcgagttacaggcaagttgtgcccttgatcactcttctttacctaataatgttccggataatcactgtaacatgctcaagttaatttgatgggacctattaggtttttctagatttgtttatctcacaccttgtttaccactaaactcttgagtagttttgctattgatctacctggttttgggaaattaatgttattatgatcatgttccagttatgctgttgttttaattattgttcatgacaagatcattgtgttaattggaacatagagcttaacttaagatatacgtgctaccacaagggtagaatgggacgcccttggctgactaattaggaaagctagtagagtactaccttacccgaaaggggcaagagcggtagaggagttgcgtattctcgggtcgatcatgctgcggtggctttttggactagggattcctataatgcccttctcagaaaccgtagcgagttttctgaagctaatagcaactttgtaaaggcctcgtagtggatccctagccattcaccttgaaagtgtctaagggccttgcaaaccctggctagacgagatacacgacttgtgggtaaaaggcgcaaccgctgcagagtgtaaaactggtatatcagtcgtgctcacggtcaagaacgactaaagactctcgcatgattaatttatggaactaaacttaatttgtcatatgcattgcatcgcaggtgttattataaattgtgatctcttatttaagtgggttggtatctacttatacttagtaactgctaataaacttttgaccaactttaaaagcaatgctcagctttaatcatctcctttggtaagccttacacttcacatgagctcccacctttagtaagttcatgcacattattcaccacaacttgttgagcgatgaacgtatgtgagctcactgctcaccctcgctgtactcacatcccctcaggtcaagaacaggtaccacaggatgaggcgtatgaaggatgctgcgatgagttcgtgggtggtctaggtcgtcgtctctcagtcaactttggttgctggatcgttgtcatcgtatgatgtaactatttatctattttgtacagaactccgttatatattaaaaatatgacattcatttatgtaccatgagtcatcatatgtgtgagacttggtcttagcacacatgtgaatcgtgcccgggtttagacccctaaatccaggtgtgacaagtcggcatcgatcgaatgagtcatttcaccgatcctgcggtccgtttcttttctacaacttgccaaagcaaaatgggtgaacttcataatttttcttctagtcacctccatccacattgtttttacatgacggagcaggacccttttatgattaacaaacccattaagagctgattgcatggctatcacccatcagcatacggcataacctcacaaggagcacaaattatgtactcaatttataagttcatgtaacatcttgtaccaactagcggttaataaaattcatactgacaaataggcccagctgattataccaaggaataaatctgattatctaaacattatgaaaattaatgaaggaacacaattgaacacacttaccccggtgttattcatcttccaaatttctaaaatagtccaatcaag

SEQ ID NO: 34281 - DNA, 1708 bp, Zea Mays
agtgtattgatcatcttggtgaacattgagtaaaccaaaacccaatctaatatacgaggggatttaaagctcttaaacaaactgtcaagctttactataagctggggaaatacaaagaaatgatggatgcatatagagagatgttaacatacataaaatctgcggtcacccggaactacagcgagaaatgtataaacaacataatggattttgtttctggatcagctagtcagaattttactcttctgcaagagttctaccagacaacactgaaagcgcttgaagaagcgaaaaatgagagattatggttcaagacaaacttgaagctttgcaaaatttggtttgatataggcgagtacggtcgcatgagcaagatattgaaggaactgcataaatcttgccaaagggaagatggttctgatgatcaaaagaaaggcacacaacttttggaagtctatgctattgaaatacaaatgtacactgaaacaaagaataataaaaagcttaaggaattgtatcaaagggctctttccatcaaatcagcgatacctcatccaagaatcatgggtataattcgcgagtgtggtggaaagatgcatatggctgagaggcagtgggctgaggctgcgactgatttctttgaagctttcaagaactacgatgaagcaggcaatccacggagaatccaatgcctaaaatatcttgtccttgccaatatgttgatggaatctgaagtgaatccttttgatggacaagaggccaagccgtacaagaatgatcctgaaatccttgcaatgacaaacctgattgcagcgtaccagaagaatgacatcatggaatttgaaaagatcctgaagagtaatagaagaacaataatggacgatccttttatccgtaactatattgaggacttattgaagaacatcagaacccaagtgctgctcaagcttattaaaccatatactcgaatcaggataccattcatttcacaggaactcaattttccagaaaaggatgtcgagcagctgttggtgtcactcattctggacaaccgtatccaaggccacatagatcaggttaacaagctgctagaacgtggagaaaggtccaaggggatgaggaagtacaatgctatcgacaagtggaatactcagctgaagtccatttaccaaacattgtccaacagagtttgatgagaaggatcgctgctgctgcgtgcattgcacacctagcattgttgatagcctgttttgcggatttgagggcaactgcaaagaactgtctggtgacgcttgcgatagaatcctggatctgggtaaagttaatattgactacgaggtcgtctctgaattgaatctggtgttttgatagtgcaagactacttgactggtcaaaagccaaatatacgacgatgcccttctggttggtctttgattgcagttggagcgatgacggtctttaacctcccaaacttgcctgcacacgctgaacgttaagtttcaggttgagagtagatgcgctgggtgaagtggcgcggcttaaatgttgaaacgaggtgagcgcagacactaccaaagaagctgggcctgtttggttgcctccgaatcagggtcgcgggatgcaggtagctagcttgcgtttggcttcctggtccaggcattgagccaggcttgtggcgtgctacgttcctacaaattttatcttggaa

SEQ ID NO: 34282 - DNA, 2033 bp, Zea Mays
ccctctcctcgcgtctcgttgtcccatctagcccatctgctatcagcgaggacgaaggcacaaacccctcacctccctcaaaccctagccctcgctctcccgcttgttcccgtcaccgccatcatgggctcagatgcggacatggaggactacgggttcgagtactctgacgaagagccggaggagcaggatgtcgacattgagaaccagtattacaactccaaaggaggcaccaccattttgtgctaataactaggcgagcaaaattttacaattacaacggcggcagctgctctctccttatgtttggtcgagacagacccagagggtgcacttgctggttttgatcaagtggtcagtatggagcctgaaaaggctgaatggggatttaaagctcttaaacaaactgtcaagctttactataagctggggaaatacaaagaaatgatggatgcatatagagagatgttaacatacataaaatctgcggtcacccggaactacagcgagaaatgtataaacaacataatggattttgtttctggatcagctagtcagaattttactcttctgcaagagttctaccagacaacactgaaagcgcttgaagaagcgaaaaatgagagattatggttcaagacaaacttgaagctttgcaaaatttggtttgatataggcgagtacggtcgcatgagcaagatattgaaggaactgcataaatcttgccaaagggaagatggttctgatgatcaaaagaaaggcacacaacttttggaagtctatgctattgaaatacaaatgtacactgaaacaaagaataataaaaagcttaaggaattgtatcaaagggctctttccatcaaatcagcgatacctcatccaagaatcatgggtataattcgcgagtgtggtggaaagatgcatatggctgagaggcagtgggctgaggctgcgactgatttctttgaagctttcaagaactacgatgaagcaggcaatccacggagaatccaatgcctaaaatatcttgtccttgccaatatgttgatggaatctgaagtgaatccttttgatggacaagaggccaagccgtacaagaatgatcctgaaatccttgcaatgacaaacctgattgcagcgtaccagaagaatgacatcatggaatttgaaaagatcctgaagagtaatagaagaacaataatggacgatccttttatccgtaactatattgaggacttattgaagaacatcagaacccaagtgctgctcaagcttattaaaccatatactcgaatcaggataccattcatttcacaggaactcaattttccagaaaaggatgtcgagcagctgttggtgtcactcattctggacaaccgtatccaaggccacatagatcaggttaacaagctgctagaacgtggagaaaggtccaaggggatgaggaagtacaatgctatcgacaagtggaatactcagctgaagtccatttaccaaacattgtccaacagagtttgatgagaaggatcgctgctgctgcgtgcattgcacacctagcattgttgatagcctgttttgcggatttgagggcaactgcaaagaactgtctggtgacgcttgcgatagaatcctggatctgggtaaagttaatattgactacgaggtcgtctctgaattgaatctggtgttttgatagtgcaagactacttgactggtcaaaagccaaatatacgacgatgcccttctggttggtctttgattgcagttggagcgatgacggtctttaacctcccaaacttgcctgcacacgctgaacgttaagtttcaggttgagagtagatgcgctgggtgaagtggcgcggcttaaatgttgaaacgaggtgagcgcagacactaccaaagaagctgggcctgtttggttgcctccgaatcagggtcgcgggatgcaggtagctagcttgcgtttggcttcctggtccaggcattgagccaggcttgtggcgtgctacgttcctacaaattttatcttggaa

SEQ ID NO: 34283 - DNA, 1932 bp, Zea Mays
ccctctcctcgcgtctcgttgtcccatctagcccatctgctatcagcgaggacgaaggcacaaacccctcacctccctcaaaccctagccctcgctctcccgcttgttcccgtcaccgccatcatgggctcagatgcggacatggaggactacgggttcgagtactctgacgaagagccggaggagcaggatgtcgacattgagaaccagtattacaactccaaaggtttggtcgagacagacccagagggtgcacttgctggttttgatcaagtggtcagtatggagcctgaaaaggctgaatggggatttaaagctcttaaacaaactgtcaagctttactataagctggggaaatacaaagaaatgatggatgcatatagagagatgttaacatacataaaatctgcggtcacccggaactacagcgagaaatgtataaacaacataatggattttgtttctggatcagctagtcagaattttactcttctgcaagagttctaccagacaacactgaaagcgcttgaagaagcgaaaaatgagagattatggttcaagacaaacttgaagctttgcaaaatttggtttgatatagatattgaaggaactgcataaatcttgccaaagggaagatggttctgatgatcaaaagaaaggcacacaacttttggaagtctatgctattgaaatacaaatgtacactgaaacaaagaataataaaaagcttaaggaattgtatcaaagggctctttccatcaaatcagcgatacctcatccaagaatcatgggtataattcgcgagtgtggtggaaagatgcatatggctgagaggcagtgggctgaggctgcgactgatttctttgaagctttcaagaactacgatgaagcaggcaatccacggagaatccaatgcctaaaatatcttgtccttgccaatatgttgatggaatctgaagtgaatccttttgatggacaagaggccaagccgtacaagaatgatcctgaaatccttgcaatgacaaacctgattgcagcgtaccagaagaatgacatcatggaatttgaaaagatcctgaagagtaatagaagaacaataatggacgatccttttatccgtaactatattgaggacttattgaagaacatcagaacccaagtgctgctcaagcttattaaaccatatactcgaatcaggataccattcatttcacaggaactcaattttccagaaaaggatgtcgagcagctgttggtgtcactcattctggacaaccgtatccaaggccacatagatcaggttaacaagctgctagaacgtggagaaaggtccaaggggatgaggaagtacaatgctatcgacaagtggaatactcagctgaagtccatttaccaaacattgtccaacagagtttgatgagaaggatcgctgctgctgcgtgcattgcacacctagcattgttgatagcctgttttgcggatttgagggcaactgcaaagaactgtctggtgacgcttgcgatagaatcctggatctgggtaaagttaatattgactacgaggtcgtctctgaattgaatctggtgttttgatagtgcaagactacttgactggtcaaaagccaaatatacgacgatgcccttctggttggtctttgattgcagttggagcgatgacggtctttaacctcccaaacttgcctgcacacgctgaacgttaagtttcaggttgagagtagatgcgctgggtgaagtggcgcggcttaaatgttgaaacgaggtgagcgcagacactaccaaagaagctgggcctgtttggttgcctccgaatcagggtcgcgggatgcaggtagctagcttgcgtttggcttcctggtccaggcattgagccaggcttgtggcgtgctacgttcctacaaattttatcttggaa

SEQ ID NO: 34284 - DNA, 1929 bp, Zea Mays
ccccctctcctcgcgtctcgttgtcccatctagcccatctgctatcagcgaggacgaaggcacaaacccctcacctccctcaaaccctagccctcgctctcccgcttgttcccgtcaccgccatcatgggctcagatgcggacatggaggactacgggttcgagtactctgacgaagagccggaggagcaggatgtcgacattgagaaccagtattacaactccaaaggtttggtcgagacagacccagagggtgcacttgctggttttgatcaagtggtcagtatggagcctgaaaaggctgaatggggatttaaagctcttaaacaaactgtcaagctttactataagctggggaaatacaaagaaatgatggatgcatatagagagatgttaacatacataaaatctgcggtcacccggaactacagcgagaaatgtataaacaacataatggattttgtttctggatcagctagtcagaattttactcttctgcaagagttctaccagacaacactgaaagcgcttgaagaagcgaaaaatgagagattatggttcaagacaaacttgaagctttgcaaaatttggtttgatataggcgagtacggtcgcatgagcaagatattgaaggaactgcataaatcttgccaaagggaagatggttctgatgatcaaaagaaaggcacacaacttttggaagtctatgctattgaaatacaaatgtacactgaaacaaagaataataaaaagcttaaggaattgtatcaaagggctctttccatcaaatcagcgatacctcatccaagaatcatgggtataattcgcgagtgtggtggaaagatgcatatggctgagaggcagtgggctgaggctgcgactgatttctttgaagctttcaagaactacgatgaagcagatatcttgtccttgccaatatgttgatggaatctgaagtgaatccttttgatggacaagaggccaagccgtacaagaatgatcctgaaatccttgcaatgacaaacctgattgcagcgtaccagaagaatgacatcatggaatttgaaaagatcctgaagagtaatagaagaacaataatggacgatccttttatccgtaactatattgaggacttattgaagaacatcagaacccaagtgctgctcaagcttattaaaccatatactcgaatcaggataccattcatttcacaggaactcaattttccagaaaaggatgtcgagcagctgttggtgtcactcattctggacaaccgtatccaaggccacatagatcaggttaacaagctgctagaacgtggagaaaggtccaaggggatgaggaagtacaatgctatcgacaagtggaatactcagctgaagtccatttaccaaacattgtccaacagagtttgatgagaaggatcgctgctgctgcgtgcattgcacacctagcattgttgatagcctgttttgcggatttgagggcaactgcaaagaactgtctggtgacgcttgcgatagaatcctggatctgggtaaagttaatattgactacgaggtcgtctctgaattgaatctggtgttttgatagtgcaagactacttgactggtcaaaagccaaatatacgacgatgcccttctggttggtctttgattgcagttggagcgatgacggtctttaacctcccaaacttgcctgcacacgctgaacgttaagtttcaggttgagagtagatgcgctgggtgaagtggcgcggcttaaatgttgaaacgaggtgagcgcagacactaccaaagaagctgggcctgtttggttgcctccgaatcagggtcgcgggatgcaggtagctagcttgcgtttggcttcctggtccaggcattgagccaggcttgtggcgtgctacgttcctacaaattttatcttggaa

SEQ ID NO: 34285 - DNA, 2048 bp, Zea Mays
aaaaaaggtccccctctcctcgcgtctcgttgtcccatctagcccatctgctatcagcgaggacgaaggcacaaacccctcacctccctcaaaccctagccctcgctctcccgcttgttcccgtcaccgccatcatgggctcagatgcggacatggaggactacgggttcgagtactctgacgaagagccggaggagcaggatgtcgacattgagaaccagtattacaactccaaaggaggcaccaccattttgtgctaataactaggcgagcaaaattttacaattacaacggcggcagctgctctctccttatgtaggtttggtcgagacagacccagagggtgcacttgctggttttgatcaagtggtcagtatggagcctgaaaaggctgaatggggatttaaagctcttaaacaaactgtcaagctttactataagctggggaaatacaaagaaatgatggatgcatatagagagatgttaacatacataaaatctgcggtcacccggaactacagcgagaaatgtataaacaacataatggattttgtttctggatcagctagtcagaattttactcttctgcaagagttctaccagacaacactgaaagcgcttgaagaagcgaaaaatgagagattatggttcaagacaaacttgaagctttgcaaaatttggtttgatataggcgagtacggtcgcatgagcaagatattgaaggaactgcataaatcttgccaaagggaagatggttctgatgatcaaaagaaaggcacacaacttttggaagtctatgctattgaaatacaaatgtacactgaaacaaagaataataaaaagcttaaggaattgtatcaaagggctctttccatcaaatcagcgatacctcatccaagaatcatgggtataattcgcgagtgtggtggaaagatgcatatggctgagaggcagtgggctgaggctgcgactgatttctttgaagctttcaagaactacgatgaagcaggcaatccacggagaatccaatgcctaaaatatcttgtccttgccaatatgttgatggaatctgaagtgaatccttttgatggacaagaggccaagccgtacaagaatgatcctgaaatccttgcaatgacaaacctgattgcagcgtaccagaagaatgacatcatggaatttgaaaagatcctgaagagtaatagaagaacaataatggacgatccttttatccgtaactatattgaggacttattgaagaacatcagaacccaagtgctgctcaagcttattaaaccatatactcgaatcaggataccattcatttcacaggaactcaattttccagaaaaggatgtcgagcagctgttggtgtcactcattctggacaaccgtatccaaggccacatagatcaggttaacaagctgctagaacgtggagaaaggtccaaggggatgaggaagtacaatgctatcgacaagtggaatactcagctgaagtccatttaccaaacattgtccaacagagtttgatgagaaggatcgctgctgctgcgtgcattgcacacctagcattgttgatagcctgttttgcggatttgagggcaactgcaaagaactgtctggtgacgcttgcgatagaatcctggatctgggtaaagttaatattgactacgaggtcgtctctgaattgaatctggtgttttgatagtgcaagactacttgactggtcaaaagccaaatatacgacgatgcccttctggttggtctttgattgcagttggagcgatgacggtctttaacctcccaaacttgcctgcacacgctgaacgttaagtttcaggttgagagtagatgcgctgggtgaagtggcgcggcttaaatgttgaaacgaggtgagcgcagacactaccaaagaagctgggcctgtttggttgcctccgaatcagggtcgcgggatgcaggtagctagcttgcgtttggcttcctggtccaggcattgagccaggcttgtggcgtgctacgttcctacaaattttatcttggaa

SEQ ID NO: 34286 - DNA, 1958 bp, Zea Mays
aaaaaaggtccccctctcctcgcgtctcgttgtcccatctagcccatctgctatcagcgaggacgaaggcacaaacccctcacctccctcaaaccctagccctcgctctcccgcttgttcccgtcaccgccatcatgggctcagatgcggacatggaggactacgggttcgagtactctgacgaagagccggaggagcaggatgtcgacattgagaaccagtattacaactccaaaggtttggtcgagacagacccagagggtgcacttgctggttttgatcaagtggtcagtatggagcctgaaaaggctgaatggggatttaaagctcttaaacaaactgtcaagctttactataagctggggaaatacaaagaaatgatggatgcatatagagagatgttaacatacataaaatctgcggtcacccggaactacagcgagaaatgtataaacaacataatggattttgtttctggatcagctagtcagaattttactcttctgcaagagttctaccagacaacactgaaagcgcttgaagaagcgaaaaatgagagattatggttcaagacaaacttgaagctttgcaaaatttggtttgatataggcgagtacggtcgcatgagcaagatattgaaggaactgcataaatcttgccaaagggaagatggttctgatgatcaaaagaaaggcacacaacttttggaagtctatgctattgaaatacaaatgtacactgaaacaaagaataataaaaagcttaaggaattgtatcaaagggctctttccatcaaatcagcgatacctcatccaagaatcatgggtataattcgcgagtgtggtggaaagatgcatatggctgagaggcagtgggctgaggctgcgactgatttctttgaagctttcaagaactacgatgaagcaggcaatccacggagaatccaatgcctaaaatatcttgtccttgccaatatgttgatggaatctgaagtgaatccttttgatggacaagaggccaagccgtacaagaatgatcctgaaatccttgcaatgacaaacctgattgcagcgtaccagaagaatgacatcatggaatttgaaaagatcctgaagaagaacaataatggacgatccttttatccgtaactatattgaggacttattgaagaacatcagaacccaagtgctgctcaagcttattaaaccatatactcgaatcaggataccattcatttcacaggaactcaattttccagaaaaggatgtcgagcagctgttggtgtcactcattctggacaaccgtatccaaggccacatagatcaggttaacaagctgctagaacgtggagaaaggtccaaggggatgaggaagtacaatgctatcgacaagtggaatactcagctgaagtccatttaccaaacattgtccaacagagtttgatgagaaggatcgctgctgctgcgtgcattgcacacctagcattgttgatagcctgttttgcggatttgagggcaactgcaaagaactgtctggtgacgcttgcgatagaatcctggatctgggtaaagttaatattgactacgaggtcgtctctgaattgaatctggtgttttgatagtgcaagactacttgactggtcaaaagccaaatatacgacgatgcccttctggttggtctttgattgcagttggagcgatgacggtctttaacctcccaaacttgcctgcacacgctgaacgttaagtttcaggttgagagtagatgcgctgggtgaagtggcgcggcttaaatgttgaaacgaggtgagcgcagacactaccaaagaagctgggcctgtttggttgcctccgaatcagggtcgcgggatgcaggtagctagcttgcgtttggcttcctggtccaggcattgagccaggcttgtggcgtgctacgttcctacaaattttatcttggaa

SEQ ID NO: 34287 - DNA, 2694 bp, Zea Mays
ccagctacaaattgcgcccatgctgccggtaccagtccctaccaccagtgtcccgtccccggtttgactgccgagctgattcgtgtgggcgtcaatggtgaacaccgggcgcttcgtcgtcctcgtcctcgcctaccgcctcctgtcgtatgtcgtatacatggggagcccgtcgggcggcggcgacccggaggcggtgcaggcggctcacctgcagatgctgtcgtccatcgtcccgagcgacgagcaggggagggtggcgctgacgcatagctaccaccacgcgttcgagggcttcgccgccgcgctcaccgacaaggaggccgccgcgctctccgggcacgagagggtggtgtccgtgttcaaggaccgagccctgcagctgcacacgacgcggtcgtgggacttcctggaggtgcagtccgggctccagtccggccgcctcggccgacgggcgtcgggggacgtcatcatgggcatcgtcgacacgggcgtctggccggagtcgccgagcttcaacgacgccgggatgcgggacgtgccggcgcggtggcgcggcgtgtgcatggaaggacccgacttcaagaagagcaactgcaacaagaagctcataggcgcccggttctacggcgtccagcccgagtcgtcggcatcgaacgcctccagcagcgccgtggcgacgccggccgcaaccggatcgccgcgggacaccgtgggccacggcacgcacaccgcgtccacggcggccggcgcggtcgtgtcggacgccgactactacgggctcgcccggggcgcggccaagggcggggcgccgtcgagccgggtggccgtgtaccgcgcgtgctcgctgggcgggtgctccgcgtcggccgtgctcaaggccatcgacgacgcggtgggcgacggcgtggacgtcatctccatctccatcggtatgagctccgtgttccagtcagacttcctcaccgaccccatcgcgctgggcgcgctccacgcgcaccagcgcggcgtgctggtggtctgctccggcggcaacgacgggcccaacccctacaccgtcgtcaactccgcgccgtggatcctcaccgtcgccgcctcatccatcgaccgctccttccagtccaccatcgctctcggcaacggcgacgtcgtgaagggagtggcaataaacttctccaaccacagcctcagcggcgagcagtaccctctggtgttcggggcccaggtggccgcccactacgcgccggtcgccgaggcgagcaactgctaccctggatcattggacgcgcagaaggtggccgggaagatcgtggtgtgcgtaagcacggacccgatggtgtcgcggcgggtgaagaagctggtcgccgaggggtcgggcgccaggggactggtgctcatcgacgacgccgagaaggacgtgcccttcgtcaccggcggcttcgcgctttcccaagtcggcaccgacgccggcgcgcagatccttgagtacatcaactccacaaagaatccgaccgccgtaatcctccagaccgaagacgtcggcgacttcaagccggcgccggtggtggcgtccttctcggcgcgtggccccggcctcaccgagtccatcctcaagcctgatttgatggcgcccggcgtcagcatcctggccgccacgatcccgtccaccgatagcgaggacgtgccgccggggaagaagcagtcggcctacgccatcaagtccggtacatcgatggcctgcccgcacgtcgccggcgccgccgccttcgtgaagtcggcgcacccgggctggacgccgtccatgatcagatcagctctcatgaccacagccacgacgacgaacaacctcgggaaaccactggcgagcagcacgggcgcggcggcgacggggcacgacatgggcgccggggagatgagccccctgcgcgcgctgagcccgggcctggtgttcgacaccagcacgcaggactacctcgacctcctctgctactacggctacaaggagcagcaggtccggaagatctccggcgccgcgcgcttctcctgccccgcgggcgcgccctcgccggacctcatcgcgtcggccgtcaactacccgtccatctccgtgccgcggctgaagagggggagacccgccaccgtggcgcgcaccgccatgaacgtggggccctcgaacgcgacatacgcggccaccgtcgatgcgccccccggcctggcggtgcgggtctcgcccgaccggctcgtgttctcgaggagatggacgacggcgaggtacgaggtgagcttcgacgtggccgccgccgctgccgtgagcaagggctacgtgcacggcgcggtcacctggtccgacggcgcgcactcggtgcggacgccgttcgcggtcaatgtcctctgatctggtggagtcatcggcgtttttgcttctttcataatcatgttcttggttgcatgagtgtttgatttttgtgtcccccctcaatttggtagaaggggaataatttcaaattcagttttgttgtagcacccctgcttcgtgtaggttcatctcacagttaagattgtgatggccaaggctagaaaactagccatcatatttgtttgaaacctcttcttcttgatacaaacatgtgtaatgttcatgcgccttcgaaaaacaaaacatctaaaaaatatatctactgtgagtctaccgtg

SEQ ID NO: 34288 - DNA, 1463 bp, Zea Mays
atatatacttagggcagggggttttgcatctctctattcattcatccggccaccaccgctctaactactcttcaagagacgacgaccaacaggcacgtcgatcgtcttccggcgagggcgacggaaggatgtccggcggcgagagtggtccggcagcggcggcggcggccgttccgttgctgcaggcgccggaggggaggacgacgaagtactacgagggatgccccgggtgccggctggacgaggccaacaagactaggaccggcgtcccctacctcaatttcttctacatctgggtcgtctgcctcgccgccgcactgccggtccagtcactgttcccttatctatacttcatgatcagggacttgaaagtggcgaaagaggagcaagacattgggttttatgctggttttgttggggctacctatttccttggaagggccatcagcgccgtgccatggggcatgttcgctgacaagtatggaaggaagccatgcattgtgatcagcatcctctcagtgattgtgttcaacacactgtttggacttagcacaacttactggatggcaattgtgactaggggattacttgggttgctatgtggcatacttggacccatcaaggcctatgcttcagaagtctgcaggaaagagcaccaagctctgggaatctctcttgttacatcttcacgagccatagctcttgttattgggcctgctattggaggcttccttgcacagcctgcacagaagtacccaaatcttttctctgaagagtccatatttggaaggtttccatacttccttccttgctttgtaatatcgttgctagcagcaggatcatgtattgcatgcatttggcttccggaaacgctacactttcatggtgatgacaaagtagaagctattgaagaactggaggcacaagttcgtggctccgaatctacaaaagatctgcataagaattggcaattgatgtcagcaataatcctctactgtgtcttttctatgcatgacacagcttatcttgaggtattttcactgtgggctgtgagcagtagaaaatttcgggggcttagtttgacatcccaggatgttggtactgtgctagccatctcaggttttggtgtacttgtataccaactcgctatttatccttttcttgcgaagtattttggaccaatcaagacatttcggcctgccgcgatcctgtcgatcattctcctcactacgtaccccttcatggccaatttacatggcctggagcttaaaatactcatcaacattgcatctgttttgaagaacatgtttgcggctaccatcactattgcctgcaacatcctacagaacactgcagtgagaggcgttgctaatggcatctctgttaccctgatgtccgtgttcaattctgttcctccagcagcagcaggaattcttaaatatcttccatattcccttcattag

SEQ ID NO: 34289 - DNA, 1015 bp, Zea Mays
cactgagggaccaccttctactcctactccaggtggatcaacttgagggtaccgttccaggaagtgtacggggacgtccgctgcaacctgaaggaggcagtccagctggccgggctcacatgggaggggcgcgctcactgcgggctcgacgacgcccgcaacaccgctcgcctcctggcacttctgatgcaccggggcttcaagttctccatcaccaactcactggtgtggcaacctgccgccgctccgcagtcaaccgccgccacctgccacttctccccggaccgctctccggacccagtcgtcgtccagctccagcaccagcagcagcagcacaagccgaaggaggcgctggggtctcccgcgtcgctggtgaacccatcgtacgccacccccgcgggagggaaggacagagccatgtactgctactgcggggtgctgagccggtggagcgtcgtgcgcaagccgggacccatgcaggggcgctacttcttcgggtgcgggaactggaccgccacccggcgcgccatctgcccgtacttcgcatgggcctcgtgaatagcaaagcaagcagagatctgggctggtgctttaaccgagggaggcgcgccatgttgctgcggctggctgctgcgcctcccagttccgtatatattattattgttattattatggtataataactttgctcgcgagacaatggaggttatctaggtagtgtctctaacctgtcgtactgacttctgtcgatagaagagaatggggccagatgctgcttaggtgtgatctatcctatccatccatggataataaagaagtttgtggattgctgttttattaacttgatggaactcctccgtaggtgtggtttgtgcaacttggattttgaaggcttgtgcgtctgtgagtgtttgatcaaatcgaaggtggtgtttgtttgctgaatgaaatggttatggaaggtgcctattattcctgacaagctctgttcagtgagaggttcaagtttgtgtcg

SEQ ID NO: 34290 - DNA, 1024 bp, Zea Mays
gctagatgaggatgctcgtgctggtgctattcttgctgctagtggatcaacttgagggtaccgttccaggaagtgtacggggacgtccgctgcaacctgaaggaggcagtccagctggccgggctcacatgggaggggcgcgctcactgcgggctcgacgacgcccgcaacaccgctcgcctcctggcacttctgatgcaccggggcttcaagttctccatcaccaactcactggtgtggcaacctgccgccgctccgcagtcaaccgccgccacctgccacttctccccggaccgctctccggacccagtcgtcgtccagctccagcaccagcagcagcagcacaagccgaaggaggcgctggggtctcccgcgtcgctggtgaacccatcgtacgccacccccgcgggagggaaggacagagccatgtactgctactgcggggtgctgagccggtggagcgtcgtgcgcaagccgggacccatgcaggggcgctacttcttcgggtgcgggaactggaccgccacccggcgcgccatctgcccgtacttcgcatgggcctcgtgaatagcaaagcaagcagagatctgggctggtgctttaaccgagggaggcgcgccatgttgctgcggctggctgctgcgcctcccagttccgtatatattattattgttattattatggtataataactttgctcgcgagacaatggaggttatctaggtagtgtctctaacctgtcgtactgacttctgtcgatagaagagaatggggccagatgctgcttaggtgtgatctatcctatccatccatggataataaagaagtttgtggattgctgttttattaacttgatggaactcctccgtaggtgtggtttgtgcaacttggattttgaaggcttgtgcgtctgtgagtgtttgatcaaatcgaaggtggtgtttgtttgctgaatgaaatggttatggaaggtgcctattattcctgacaagctctgttcagtgagaggttcaagtttgtgtcg

SEQ ID NO: 34291 - DNA, 1013 bp, Zea Mays
tgtaaattggcatcctgaacttgaattttggtggatcaacttgagggtaccgttccaggaagtgtacggggacgtccgctgcaacctgaaggaggcagtccagctggccgggctcacatgggaggggcgcgctcactgcgggctcgacgacgcccgcaacaccgctcgcctcctggcacttctgatgcaccggggcttcaagttctccatcaccaactcactggtgtggcaacctgccgccgctccgcagtcaaccgccgccacctgccacttctccccggaccgctctccggacccagtcgtcgtccagctccagcaccagcagcagcagcacaagccgaaggaggcgctggggtctcccgcgtcgctggtgaacccatcgtacgccacccccgcgggagggaaggacagagccatgtactgctactgcggggtgctgagccggtggagcgtcgtgcgcaagccgggacccatgcaggggcgctacttcttcgggtgcgggaactggaccgccacccggcgcgccatctgcccgtacttcgcatgggcctcgtgaatagcaaagcaagcagagatctgggctggtgctttaaccgagggaggcgcgccatgttgctgcggctggctgctgcgcctcccagttccgtatatattattattgttattattatggtataataactttgctcgcgagacaatggaggttatctaggtagtgtctctaacctgtcgtactgacttctgtcgatagaagagaatggggccagatgctgcttaggtgtgatctatcctatccatccatggataataaagaagtttgtggattgctgttttattaacttgatggaactcctccgtaggtgtggtttgtgcaacttggattttgaaggcttgtgcgtctgtgagtgtttgatcaaatcgaaggtggtgtttgtttgctgaatgaaatggttatggaaggtgcctattattcctgacaagctctgttcagtgagaggttcaagtttgtgtcg

SEQ ID NO: 34292 - DNA, 1772 bp, Zea Mays
agccaaccctgcatttttgcacagagaggaaatgcaagttaataatgaggcaccactagggtgcctcaagccaaatatttctcagtataactctccagagcagataggtggtgttgaagggtttcctgagaataatgaaaaaaggaatgatattgttgctgcggaaaaaatctgggaggcgactccaaaccaaggccttagcaggcccatctaccgacaagaattttatgcctggccatatatttattcagattatcaaatcgtgcgtcagccactaccttatggttttgacaaccaattttatcagataaatagggaccacggtttccctattgagaacagggttcaatatcttccattcaagatgctccctcaaggtcacccccatgatgcacagcttcaggaatttcagtattttgtggttattgactttgaagcaacctgtgacaaggtgaacaatccatttccacaagaaatcatcgagtttccatctgtcttggttaacagtgcaactggaaaactcgaagaatgcttccaaacatatgttcggccgacgtatcatcaatttttgactgatttttgcaaggagcttactggcatacaacagattcaggtggacagaggtgtgcctctaggtgaagccttactcatgcacgataaatggctagaggacaagggcatcaagaacacaaactttgctattgtgacctggtctaactgggactgccgtataatgctggagtcggaatgcagatttaagagaatcaggaagcccccttattttaacaggtggatcaacttgagggtaccgttccaggaagtgtacggggacgtccgctgcaacctgaaggaggcagtccagctggccgggctcacatgggaggggcgcgctcactgcgggctcgacgacgcccgcaacaccgctcgcctcctggcacttctgatgcaccggggcttcaagttctccatcaccaactcactggtgtggcaacctgccgccgctccgcagtcaaccgccgccacctgccacttctccccggaccgctctccggacccagtcgtcgtccagctccagcaccagcagcagcagcacaagccgaaggaggcgctggggtctcccgcgtcgctggtgaacccatcgtacgccacccccgcgggagggaaggacagagccatgtactgctactgcggggtgctgagccggtggagcgtcgtgcgcaagccgggacccatgcaggggcgctacttcttcgggtgcgggaactggaccgccacccggcgcgccatctgcccgtacttcgcatgggcctcgtgaatagcaaagcaagcagagatctgggctggtgctttaaccgagggaggcgcgccatgttgctgcggctggctgctgcgcctcccagttccgtatatattattattgttattattatggtataataactttgctcgcgagacaatggaggttatctaggtagtgtctctaacctgtcgtactgacttctgtcgatagaagagaatggggccagatgctgcttaggtgtgatctatcctatccatccatggataataaagaagtttgtggattgctgttttattaacttgatggaactcctccgtaggtgtggtttgtgcaacttggattttgaaggcttgtgcgtctgtgagtgtttgatcaaatcgaaggtggtgtttgtttgctgaatgaaatggttatggaaggtgcctattattcctgacaagctctgttcagtgagaggttcaagtttgtgtcg

SEQ ID NO: 34293 - DNA, 1822 bp, Zea Mays
tccatccacattttagaggctactaaggacatccagtgctcctaaatgagtggaatctggggaaggaacaaccaagaggaaatgcaagttaataatgaggcaccactagggtgcctcaagccaaatatttctcagtataactctccagagcagataggtggtgttgaagggtttcctgagaataatgaaaaaaggaatgatattgttgctgcggaaaaaatctgggaggcgactccaaaccaaggccttagcaggcccatctaccgacaagaattttatgcctggccatatatttattcagattatcaaatcgtgcgtcagccactaccttatggttttgacaaccaattttatcagataaatagggaccacggtttccctattgagaacagggttcaatatcttccattcaagatgctccctcaaggtcacccccatgatgcacagcttcaggaatttcagtattttgtggttattgactttgaagcaacctgtgacaaggtgaacaatccatttccacaagaaatcatcgagtttccatctgtcttggttaacagtgcaactggaaaactcgaagaatgcttccaaacatatgttcggccgacgtatcatcaatttttgactgatttttgcaaggagcttactggcatacaacagattcaggtggacagaggtgtgcctctaggtgaagccttactcatgcacgataaatggctagaggacaagggcatcaagaacacaaactttgctattgtgacctggtctaactgggactgccgtataatgctggagtcggaatgcagatttaagagaatcaggaagcccccttattttaacaggtggatcaacttgagggtaccgttccaggaagtgtacggggacgtccgctgcaacctgaaggaggcagtccagctggccgggctcacatgggaggggcgcgctcactgcgggctcgacgacgcccgcaacaccgctcgcctcctggcacttctgatgcaccggggcttcaagttctccatcaccaactcactggtgtggcaacctgccgccgctccgcagtcaaccgccgccacctgccacttctccccggaccgctctccggacccagtcgtcgtccagctccagcaccagcagcagcagcacaagccgaaggaggcgctggggtctcccgcgtcgctggtgaacccatcgtacgccacccccgcgggagggaaggacagagccatgtactgctactgcggggtgctgagccggtggagcgtcgtgcgcaagccgggacccatgcaggggcgctacttcttcgggtgcgggaactggaccgccacccggcgcgccatctgcccgtacttcgcatgggcctcgtgaatagcaaagcaagcagagatctgggctggtgctttaaccgagggaggcgcgccatgttgctgcggctggctgctgcgcctcccagttccgtatatattattattgttattattatggtataataactttgctcgcgagacaatggaggttatctaggtagtgtctctaacctgtcgtactgacttctgtcgatagaagagaatggggccagatgctgcttaggtgtgatctatcctatccatccatggataataaagaagtttgtggattgctgttttattaacttgatggaactcctccgtaggtgtggtttgtgcaacttggattttgaaggcttgtgcgtctgtgagtgtttgatcaaatcgaaggtggtgtttgtttgctgaatgaaatggttatggaaggtgcctattattcctgacaagctctgttcagtgagaggttcaagtttgtgtcg

SEQ ID NO: 34294 - DNA, 1710 bp, Zea Mays
aaacacccatcggagtttcaaagtttggaaacaaaaggaacataacacatgtcacacaggacaccacgtccaaggctatgcaaagtaaatcatgaggaaatgcaagttaataatgaggcaccactagggtgcctcaagccaaatatttctcagtataactctccagagcagataggtggtgttgaagggtttcctgagaataatgaaaaaaggaatgatattgttgctgcggaaaaaatctgggaggcgactccaaaccaaggccttagcaggcccatctaccgacaagaattttatgcctggccatatatttattcagattatcaaatcgtgcgtcagccactaccttatggttttgacaaccaattttatcagataaatagggaccacggtttccctattgagaacagggttcaatatcttccattcaagatgctccctcaagtgcaactggaaaactcgaagaatgcttccaaacatatgttcggccgacgtatcatcaatttttgactgatttttgcaaggagcttactggcatacaacagattcaggtggacagaggtgtgcctctaggtgaagccttactcatgcacgataaatggctagaggacaagggcatcaagaacacaaactttgctattgtgacctggtctaactgggactgccgtataatgctggagtcggaatgcagatttaagagaatcaggaagcccccttattttaacaggtggatcaacttgagggtaccgttccaggaagtgtacggggacgtccgctgcaacctgaaggaggcagtccagctggccgggctcacatgggaggggcgcgctcactgcgggctcgacgacgcccgcaacaccgctcgcctcctggcacttctgatgcaccggggcttcaagttctccatcaccaactcactggtgtggcaacctgccgccgctccgcagtcaaccgccgccacctgccacttctccccggaccgctctccggacccagtcgtcgtccagctccagcaccagcagcagcagcacaagccgaaggaggcgctggggtctcccgcgtcgctggtgaacccatcgtacgccacccccgcgggagggaaggacagagccatgtactgctactgcggggtgctgagccggtggagcgtcgtgcgcaagccgggacccatgcaggggcgctacttcttcgggtgcgggaactggaccgccacccggcgcgccatctgcccgtacttcgcatgggcctcgtgaatagcaaagcaagcagagatctgggctggtgctttaaccgagggaggcgcgccatgttgctgcggctggctgctgcgcctcccagttccgtatatattattattgttattattatggtataataactttgctcgcgagacaatggaggttatctaggtagtgtctctaacctgtcgtactgacttctgtcgatagaagagaatggggccagatgctgcttaggtgtgatctatcctatccatccatggataataaagaagtttgtggattgctgttttattaacttgatggaactcctccgtaggtgtggtttgtgcaacttggattttgaaggcttgtgcgtctgtgagtgtttgatcaaatcgaaggtggtgtttgtttgctgaatgaaatggttatggaaggtgcctattattcctgacaagctctgttcagtgagaggttcaagtttgtgtcg

SEQ ID NO: 34295 - DNA, 1775 bp, Zea Mays
tttcattcaggaccatagtgatggttcagaggaaatgcaagttaataatgaggcaccactagggtgcctcaagccaaatatttctcagtataactctccagagcagataggtggtgttgaagggtttcctgagaataatgaaaaaaggaatgatattgttgctgcggaaaaaatctgggaggcgactccaaaccaaggccttagcaggcccatctaccgacaagaattttatgcctggccatatatttattcagattatcaaatcgtgcgtcagccactaccttatggttttgacaaccaattttatcagataaatagggaccacggtttccctattgagaacagggttcaatatcttccattcaagatgctccctcaaggtcacccccatgatgcacagcttcaggaatttcagtattttgtggttattgactttgaagcaacctgtgacaaggtgaacaatccatttccacaagaaatcatcgagtttccatctgtcttggttaacagtgcaactggaaaactcgaagaatgcttccaaacatatgttcggccgacgtatcatcaatttttgactgatttttgcaaggagcttactggcatacaacagattcaggtggacagaggtgtgcctctaggtgaagccttactcatgcacgataaatggctagaggacaagggcatcaagaacacaaactttgctattgtgacctggtctaactgggactgccgtataatgctggagtcggaatgcagatttaagagaatcaggaagcccccttattttaacaggtggatcaacttgagggtaccgttccaggaagtgtacggggacgtccgctgcaacctgaaggaggcagtccagctggccgggctcacatgggaggggcgcgctcactgcgggctcgacgacgcccgcaacaccgctcgcctcctggcacttctgatgcaccggggcttcaagttctccatcaccaactcactggtgtggcaacctgccgccgctccgcagtcaaccgccgccacctgccacttctccccggaccgctctccggacccagtcgtcgtccagctccagcaccagcagcagcagcacaagccgaaggaggcgctggggtctcccgcgtcgctggtgaacccatcgtacgccacccccgcgggagggaaggacagagccatgtactgctactgcggggtgctgagccggtggagcgtcgtgcgcaagccgggacccatgcaggggcgctacttcttcgggtgcgggaactggaccgccacccggcgcgccatctgcccgtacttcgcatgggcctcgtgaatagcaaagcaagcagagatctgggctggtgctttaaccgagggaggcgcgccatgttgctgcggctggctgctgcgcctcccagttccgtatatattattattgttattattatggtataataactttgctcgcgagacaatggaggttatctaggtagtgtctctaacctgtcgtactgacttctgtcgatagaagagaatggggccagatgctgcttaggtgtgatctatcctatccatccatggataataaagaagtttgtggattgctgttttattaacttgatggaactcctccgtaggtgtggtttgtgcaacttggattttgaaggcttgtgcgtctgtgagtgtttgatcaaatcgaaggtggtgtttgtttgctgaatgaaatggttatggaaggtgcctattattcctgacaagctctgttcagtgagaggttcaagtttgtgtcg

SEQ ID NO: 34296 - DNA, 1545 bp, Zea Mays
gagaaaccacgcgtgtcagccagccattggatcaccaccattcgcgctgttcggcgtgcgcacccgatcccgtctccgtgcggctttgtgagtagagaagggaaggggaagcaggagcaggaggggttcgtcatcgcgtggtggccgcgccgctctgttcctccgtcccctcctccttccggctctcgctgtcacatgtcgtgtggtgtgggggcgctctgatccggatggtgcagcgccgcgggatcgcccacggccatgattgatcgcgaacgagcagtgcaactggaaaactcgaagaatgcttccaaacatatgttcggccgacgtatcatcaatttttgactgatttttgcaaggagcttactggcatacaacagattcaggtggacagaggtgtgcctctaggtgaagccttactcatgcacgataaatggctagaggacaagggcatcaagaacacaaactttgctattgtgacctggtctaactgggactgccgtataatgctggagtcggaatgcagatttaagagaatcaggaagcccccttattttaacaggtggatcaacttgagggtaccgttccaggaagtgtacggggacgtccgctgcaacctgaaggaggcagtccagctggccgggctcacatgggaggggcgcgctcactgcgggctcgacgacgcccgcaacaccgctcgcctcctggcacttctgatgcaccggggcttcaagttctccatcaccaactcactggtgtggcaacctgccgccgctccgcagtcaaccgccgccacctgccacttctccccggaccgctctccggacccagtcgtcgtccagctccagcaccagcagcagcagcacaagccgaaggaggcgctggggtctcccgcgtcgctggtgaacccatcgtacgccacccccgcgggagggaaggacagagccatgtactgctactgcggggtgctgagccggtggagcgtcgtgcgcaagccgggacccatgcaggggcgctacttcttcgggtgcgggaactggaccgccacccggcgcgccatctgcccgtacttcgcatgggcctcgtgaatagcaaagcaagcagagatctgggctggtgctttaaccgagggaggcgcgccatgttgctgcggctggctgctgcgcctcccagttccgtatatattattattgttattattatggtataataactttgctcgcgagacaatggaggttatctaggtagtgtctctaacctgtcgtactgacttctgtcgatagaagagaatggggccagatgctgcttaggtgtgatctatcctatccatccatggataataaagaagtttgtggattgctgttttattaacttgatggaactcctccgtaggtgtggtttgtgcaacttggattttgaaggcttgtgcgtctgtgagtgtttgatcaaatcgaaggtggtgtttgtttgctgaatgaaatggttatggaaggtgcctattattcctgacaagctctgttcagtgagaggttcaagtttgtgtcg

SEQ ID NO: 34297 - DNA, 1439 bp, Zea Mays
gagaaaccacgcgtgtcagccagccattggatcaccaccattcgcgctgttcggcgtgcgcacccgatcccgtctccgtgcggctttgtgagtagagaagggaaggggaagcaggagcaggaggggttcgtcatcgcgtggtggccgcgccgctctgttcctccgtcccctcctccttccggctctcgctgtcacatgtcgtgtggtgtgggggcgctctgatccggatggtgcagcgccgcgggatcgcccacggccatgattgatcgcgaacgagcaggtggacagaggtgtgcctctaggtgaagccttactcatgcacgataaatggctagaggacaagggcatcaagaacacaaactttgctattgtgacctggtctaactgggactgccgtataatgctggagtcggaatgcagatttaagagaatcaggaagcccccttattttaacaggtggatcaacttgagggtaccgttccaggaagtgtacggggacgtccgctgcaacctgaaggaggcagtccagctggccgggctcacatgggaggggcgcgctcactgcgggctcgacgacgcccgcaacaccgctcgcctcctggcacttctgatgcaccggggcttcaagttctccatcaccaactcactggtgtggcaacctgccgccgctccgcagtcaaccgccgccacctgccacttctccccggaccgctctccggacccagtcgtcgtccagctccagcaccagcagcagcagcacaagccgaaggaggcgctggggtctcccgcgtcgctggtgaacccatcgtacgccacccccgcgggagggaaggacagagccatgtactgctactgcggggtgctgagccggtggagcgtcgtgcgcaagccgggacccatgcaggggcgctacttcttcgggtgcgggaactggaccgccacccggcgcgccatctgcccgtacttcgcatgggcctcgtgaatagcaaagcaagcagagatctgggctggtgctttaaccgagggaggcgcgccatgttgctgcggctggctgctgcgcctcccagttccgtatatattattattgttattattatggtataataactttgctcgcgagacaatggaggttatctaggtagtgtctctaacctgtcgtactgacttctgtcgatagaagagaatggggccagatgctgcttaggtgtgatctatcctatccatccatggataataaagaagtttgtggattgctgttttattaacttgatggaactcctccgtaggtgtggtttgtgcaacttggattttgaaggcttgtgcgtctgtgagtgtttgatcaaatcgaaggtggtgtttgtttgctgaatgaaatggttatggaaggtgcctattattcctgacaagctctgttcagtgagaggttcaagtttgtgtcg

SEQ ID NO: 34298 - DNA, 2153 bp, Zea Mays
gagaaaccacgcgtgtcagccagccattggatcaccaccattcgcgctgttcggcgtgcgcacccgatcccgtctccgtgcggctttgtgagtagagaagggaaggggaagcaggagcaggaggggttcgtcatcgcgtggtggccgcgccgctctgttcctccgtcccctcctccttccggctctcgctgtcacatgtcgtgtggtgtgggggcgctctgatccggatggtgcagcgccgcgggatcgcccacggccatgattgatcgcgaacgagcagtaactgcgtgaaatgctataccggagatgccattgtgcacggaggtggtttattttgaggaagagttgggacacagtttggtgaattttgttgtgtgctggtctgagagctagtgctgctgggattgaggaaatgcaagttaataatgaggcaccactagggtgcctcaagccaaatatttctcagtataactctccagagcagataggtggtgttgaagggtttcctgagaataatgaaaaaaggaatgatattgttgctgcggaaaaaatctgggaggcgactccaaaccaaggccttagcaggcccatctaccgacaagaattttatgcctggccatatatttattcagattatcaaatcgtgcgtcagccactaccttatggttttgacaaccaattttatcagataaatagggaccacggtttccctattgagaacagggttcaatatcttccattcaagatgctccctcaaggtcacccccatgatgcacagcttcaggaatttcagtattttgtggttattgactttgaagcaacctgtgacaaggtgaacaatccatttccacaagaaatcatcgagtttccatctgtcttggttaacagtgcaactggaaaactcgaagaatgcttccaaacatatgttcggccgacgtatcatcaatttttgactgatttttgcaaggagcttactggcatacaacagattcaggtggacagaggtgtgcctctaggtgaagccttactcatgcacgataaatggctagaggacaagggcatcaagaacacaaactttgctattgtgacctggtctaactgggactgccgtataatgctggagtcggaatgcagatttaagagaatcaggaagcccccttattttaacaggtggatcaacttgagggtaccgttccaggaagtgtacggggacgtccgctgcaacctgaaggaggcagtccagctggccgggctcacatgggaggggcgcgctcactgcgggctcgacgacgcccgcaacaccgctcgcctcctggcacttctgatgcaccggggcttcaagttctccatcaccaactcactggtgtggcaacctgccgccgctccgcagtcaaccgccgccacctgccacttctccccggaccgctctccggacccagtcgtcgtccagctccagcaccagcagcagcagcacaagccgaaggaggcgctggggtctcccgcgtcgctggtgaacccatcgtacgccacccccgcgggagggaaggacagagccatgtactgctactgcggggtgctgagccggtggagcgtcgtgcgcaagccgggacccatgcaggggcgctacttcttcgggtgcgggaactggaccgccacccggcgcgccatctgcccgtacttcgcatgggcctcgtgaatagcaaagcaagcagagatctgggctggtgctttaaccgagggaggcgcgccatgttgctgcggctggctgctgcgcctcccagttccgtatatattattattgttattattatggtataataactttgctcgcgagacaatggaggttatctaggtagtgtctctaacctgtcgtactgacttctgtcgatagaagagaatggggccagatgctgcttaggtgtgatctatcctatccatccatggataataaagaagtttgtggattgctgttttattaacttgatggaactcctccgtaggtgtggtttgtgcaacttggattttgaaggcttgtgcgtctgtgagtgtttgatcaaatcgaaggtggtgtttgtttgctgaatgaaatggttatggaaggtgcctattattcctgacaagctctgttcagtgagaggttcaagtttgtgtcg

SEQ ID NO: 34299 - DNA, 2169 bp, Zea Mays
ccagaagtaagagaaaccacgcgtgtcagccagccattggatcaccaccattcgcgctgttcggcgtgcgcacccgatcccgtctccgtgcggctttgtgagtagagaagggaaggggaagcaggagcaggaggggttcgtcatcgcgtggtggccgcgccgctctgttcctccgtcccctcctccttccggctctcgctgtcacatgtcgtgtggtgtgggggcgctctgatccggatggtgcagcgccgcgggatcgcccacggccatgattgatcgcgaacgagcagttgcagtaactgcgtgaaatgctataccggagatgccattgtgcacggaggtggtttattttgaggaagagttgggacacagtttggtgaattttgttgtgtgctggtctgagagctagtgctgctgggattgaggaaatgcaagttaataatgaggcaccactagggtgcctcaagccaaatatttctcagtataactctccagagcagataggtggtgttgaagggtttcctgagaataatgaaaaaaggaatgatattgttgctgcggaaaaaatctgggaggcgactccaaaccaaggccttagcaggcccatctaccgacaagaattttatgcctggccatatatttattcagattatcaaatcgtgcgtcagccactaccttatggttttgacaaccaattttatcagataaatagggaccacggtttccctattgagaacagggttcaatatcttccattcaagatgctccctcaaggtcacccccatgatgcacagcttcaggaatttcagtattttgtggttattgactttgaagcaacctgtgacaaggtgaacaatccatttccacaagaaatcatcgagtttccatctgtcttggttaacagtgcaactggaaaactcgaagaatgcttccaaacatatgttcggccgacgtatcatcaatttttgactgatttttgcaaggagcttactggcatacaacagattcaggtggacagaggtgtgcctctaggtgaagccttactcatgcacgataaatggctagaggacaagggcatcaagaacacaaactttgctattgtgacctggtctaactgggactgccgtataatgctggagtcggaatgcagatttaagagaatcaggaagcccccttattttaacaggtggatcaacttgagggtaccgttccaggaagtgtacggggacgtccgctgcaacctgaaggaggcagtccagctggccgggctcacatgggaggggcgcgctcactgcgggctcgacgacgcccgcaacaccgctcgcctcctggcacttctgatgcaccggggcttcaagttctccatcaccaactcactggtgtggcaacctgccgccgctccgcagtcaaccgccgccacctgccacttctccccggaccgctctccggacccagtcgtcgtccagctccagcaccagcagcagcagcacaagccgaaggaggcgctggggtctcccgcgtcgctggtgaacccatcgtacgccacccccgcgggagggaaggacagagccatgtactgctactgcggggtgctgagccggtggagcgtcgtgcgcaagccgggacccatgcaggggcgctacttcttcgggtgcgggaactggaccgccacccggcgcgccatctgcccgtacttcgcatgggcctcgtgaatagcaaagcaagcagagatctgggctggtgctttaaccgagggaggcgcgccatgttgctgcggctggctgctgcgcctcccagttccgtatatattattattgttattattatggtataataactttgctcgcgagacaatggaggttatctaggtagtgtctctaacctgtcgtactgacttctgtcgatagaagagaatggggccagatgctgcttaggtgtgatctatcctatccatccatggataataaagaagtttgtggattgctgttttattaacttgatggaactcctccgtaggtgtggtttgtgcaacttggattttgaaggcttgtgcgtctgtgagtgtttgatcaaatcgaaggtggtgtttgtttgctgaatgaaatggttatggaaggtgcctattattcctgacaagctctgttcagtgagaggttcaagtttgtgtcg

SEQ ID NO: 34300 - DNA, 1879 bp, Zea Mays
cgccaccagaagtaagagaaaccacgcgtgtcagccagccattggatcaccaccattcgcgctgttcggcgtgcgcacccgatcccgtctccgtgcggctttgtgagtagagaagggaaggggaagcaggagcaggaggggttcgtcatcgcgtggtggccgcgccgctctgttcctccgtcccctcctccttccggctctcgctgtcacatgtcgtgtggtgtgggggcgctctgatccggatggtgcagcgccgcgggatcgcccacggccatgattgatcgcgaacgagcagtttatttgatgcagaggaaatgcaagttaataatgaggcaccactagggtgcctcaagccaaatatttctcagtataactctccagagcagataggtggtgttgaagggtttcctgagaataatgaaaaaaggaatgatattgttgctgcggaaaaaatctgggaggcgactccaaaccaaggccttagcaggcccatctaccgacaagaattttatgcctggccatatatttattcagattatcaaatcgtgcgtcagccactaccttatggttttgacaaccaattttatcagataaatagggaccacggtttccctattgagaacagggttcaatatcttccattcaagatgctccctcaaggtcacccccatgatgcacagcttcaggaatttcagtattttgtggttattgactttgaagcaacctgtgacaaggtgaacaatccatttccacaagaaatcatcgagtttccatctgtcttggttaacagtgcaactggaaaactcgaagaatgcttccaaacatatgttcggccgacgtatcatcaatttttgactgatttttgcaaggagcttactggcatacaacagattcaggtggatcaacttgagggtaccgttccaggaagtgtacggggacgtccgctgcaacctgaaggaggcagtccagctggccgggctcacatgggaggggcgcgctcactgcgggctcgacgacgcccgcaacaccgctcgcctcctggcacttctgatgcaccggggcttcaagttctccatcaccaactcactggtgtggcaacctgccgccgctccgcagtcaaccgccgccacctgccacttctccccggaccgctctccggacccagtcgtcgtccagctccagcaccagcagcagcagcacaagccgaaggaggcgctggggtctcccgcgtcgctggtgaacccatcgtacgccacccccgcgggagggaaggacagagccatgtactgctactgcggggtgctgagccggtggagcgtcgtgcgcaagccgggacccatgcaggggcgctacttcttcgggtgcgggaactggaccgccacccggcgcgccatctgcccgtacttcgcatgggcctcgtgaatagcaaagcaagcagagatctgggctggtgctttaaccgagggaggcgcgccatgttgctgcggctggctgctgcgcctcccagttccgtatatattattattgttattattatggtataataactttgctcgcgagacaatggaggttatctaggtagtgtctctaacctgtcgtactgacttctgtcgatagaagagaatggggccagatgctgcttaggtgtgatctatcctatccatccatggataataaagaagtttgtggattgctgttttattaacttgatggaactcctccgtaggtgtggtttgtgcaacttggattttgaaggcttgtgcgtctgtgagtgtttgatcaaatcgaaggtggtgtttgtttgctgaatgaaatggttatggaaggtgcctattattcctgacaagctctgttcagtgagaggttcaagtttgtgtcg

SEQ ID NO: 34301 - DNA, 2076 bp, Zea Mays
ctccgcgccaccgccggtaaccgccaccagaagtaagagaaaccacgcgtgtcagccagccattggatcaccaccattcgcgctgttcggcgtgcgcacccgatcccgtctccgtgcggctttgtgagtagagaagggaaggggaagcaggagcaggaggggttcgtcatcgcgtggtggccgcgccgctctgttcctccgtcccctcctccttccggctctcgctgtcacatgtcgtgtggtgtgggggcgctctgatccggatggtgcagcgccgcgggatcgcccacggccatgattgatcgcgaacgagcagtttatttgatgcagaggaaatgcaagttaataatgaggcaccactagggtgcctcaagccaaatatttctcagtataactctccagagcagataggtggtgttgaagggtttcctgagaataatgaaaaaaggaatgatattgttgctgcggaaaaaatctgggaggcgactccaaaccaaggccttagcaggcccatctaccgacaagaattttatgcctggccatatatttattcagattatcaaatcgtgcgtcagccactaccttatggttttgacaaccaattttatcagataaatagggaccacggtttccctattgagaacagggttcaatatcttccattcaagatgctccctcaaggtcacccccatgatgcacagcttcaggaatttcagtattttgtggttattgactttgaagcaacctgtgacaaggtgaacaatccatttccacaagaaatcatcgagtttccatctgtcttggttaacagtgcaactggaaaactcgaagaatgcttccaaacatatgttcggccgacgtatcatcaatttttgactgatttttgcaaggagcttactggcatacaacagattcaggtggacagaggtgtgcctctaggtgaagccttactcatgcacgataaatggctagaggacaagggcatcaagaacacaaactttgctattgtgacctggtctaactgggactgccgtataatgctggagtcggaatgcagatttaagagaatcaggaagcccccttattttaacaggtggatcaacttgagggtaccgttccaggaagtgtacggggacgtccgctgcaacctgaaggaggcagtccagctggccgggctcacatgggaggggcgcgctcactgcgggctcgacgacgcccgcaacaccgctcgcctcctggcacttctgatgcaccggggcttcaagttctccatcaccaactcactggtgtggcaacctgccgccgctccgcagtcaaccgccgccacctgccacttctccccggaccgctctccggacccagtcgtcgtccagctccagcaccagcagcagcagcacaagccgaaggaggcgctggggtctcccgcgtcgctggtgaacccatcgtacgccacccccgcgggagggaaggacagagccatgtactgctactgcggggtgctgagccggtggagcgtcgtgcgcaagccgggacccatgcaggggcgctacttcttcgggtgcgggaactggaccgccacccggcgcgccatctgcccgtacttcgcatgggcctcgtgaatagcaaagcaagcagagatctgggctggtgctttaaccgagggaggcgcgccatgttgctgcggctggctgctgcgcctcccagttccgtatatattattattgttattattatggtataataactttgctcgcgagacaatggaggttatctaggtagtgtctctaacctgtcgtactgacttctgtcgatagaagagaatggggccagatgctgcttaggtgtgatctatcctatccatccatggataataaagaagtttgtggattgctgttttattaacttgatggaactcctccgtaggtgtggtttgtgcaacttggattttgaaggcttgtgcgtctgtgagtgtttgatcaaatcgaaggtggtgtttgtttgctgaatgaaatggttatggaaggtgcctattattcctgacaagctctgttcagtgagaggttcaagtttgtgtcg

SEQ ID NO: 34302 - DNA, 929 bp, Zea Mays
attcaggaccatagtgatggttcagaggaaatgcaagttaataatgaggcaccactagggtgcctcaagccaaatatttctcagtataactctccagagcagataggtggtgttgaagggtttcctgagaataatgaaaaaaggaatgatattgttgctgcggaaaaaatctgggaggcgactccaaaccaaggccttagcaggcccatctaccgacaagaattttatgcctggccatatatttattcagattatcaaatcgtgcgtcagccactaccttatggttttgacaaccaattttatcagataaatagggaccacggtttccctattgagaacagggttcaatatcttccattcaagatgctccctcaaggtcacccccatgatgcacagcttcaggaatttcagtattttgtggttattgactttgaagcaacctgtgacaaggtgaacaatccatttccacaagaaatcatcgagtttccatctgtcttggttaacagtgcaactggaaaactcgaagaatgcttccaaacatatgttcggccgacgtatcatcaatttttgactgatttttgcaaggagcttactggcatacaacagattcaggtggacagaggtgtgcctctaggtgaagccttactcatgcacgataaatggctagaggacaagggcatcaagaacacaaactttgctattgtgacctggtctaactgggactgccgtataatgctggagtcggaatgcagatttaagagaatcaggaagcccccttattttaacaggactgatgcacgggtcacctggttggtactggccctcgccgtcatgattctcaacatctttgggagcttgactggcttaatcttccttccgccgcgtctgtcggtcttgctggatccgcttctgctgcttctacctcgtcg

SEQ ID NO: 34303 - DNA, 1137 bp, Zea Mays
ctccgcgccaccgccggtaaccgccaccagaagtaagagaaaccacgcgtgtcagccagccattggatcaccaccattcgcgctgttcggcgtgcgcacccgatcccgtctccgtgcggctttgtgagtagagaagggaaggggaagcaggagcaggaggggttcgtcatcgcgtggtggccgcgccgctctgttcctccgtcccctcctccttccggctctcgctgtcacataggaaatgcaagttaataatgaggcaccactagggtgcctcaagccaaatatttctcagtataactctccagagcagataggtggtgttgaagggtttcctgagaataatgaaaaaaggaatgatattgttgctgcggaaaaaatctgggaggcgactccaaaccaaggccttagcaggcccatctaccgacaagaattttatgcctggccatatatttattcagattatcaaatcgtgcgtcagccactaccttatggttttgacaaccaattttatcagataaatagggaccacggtttccctattgagaacagggttcaatatcttccattcaagatgctccctcaaggtcacccccatgatgcacagcttcaggaatttcagtattttgtggttattgactttgaagcaacctgtgacaaggtgaacaatccatttccacaagaaatcatcgagtttccatctgtcttggttaacagtgcaactggaaaactcgaagaatgcttccaaacatatgttcggccgacgtatcatcaatttttgactgatttttgcaaggagcttactggcatacaacagattcaggtggacagaggtgtgcctctaggtgaagccttactcatgcacgataaatggctagaggacaagggcatcaagaacacaaactttgctattgtgacctggtctaactgggactgccgtataatgctggagtcggaatgcagatttaagagaatcaggaagcccccttattttaacaggactgatgcacgggtcacctggttggtactggccctcgccgtcatgattctcaacatctttgggagcttgactggcttaatcttccttccgccgcgtctgtcggtcttgctggatccgcttctgctgcttctacctcgtcg

SEQ ID NO: 34304 - DNA, 987 bp, Zea Mays
atcagcatttcattcaggaccatagtgatggttcagaggaaatgcaagttaataatgaggcaccactagggtgcctcaagccaaatatttctcagtataactctccagagcagataggtggtgttgaagggtttcctgagaataatgaaaaaaggaatgatattgttgctgcggaaaaaatctgggaggcgactccaaaccaaggccttagcaggcccatctaccgacaagaattttatgcctggccatatatttattcagattatcaaatcgtgcgtcagccactaccttatggttttgacaaccaattttatcagataaatagggaccacggtttccctattgagaacagggttcaatatcttccattcaagatgctccctcaaggtcacccccatgatgcacagcttcaggaatttcagtattttgtggttattgactttgaagcaacctgtgacaaggtgaacaatccatttccacaagaaatcatcgagtttccatctgtcttggttaacagtgcaactggaaaactcgaagaatgcttccaaacatatgttcggccgacgtatcatcaatttttgactgatttttgcaaggagcttactggcatacaacagattcaggtggacagaggtgtgcctctaggtgaagccttactcatgcacgataaatggctagaggacaagggcatcaagaacacaaactttgctattgtgacctggtctaactgggactgccgtataatgctggagtcggaatgcagatttaagagaatcaggaagcccccttattttaacagcttttgtgccagggagatgctacagttgagttctttgcctagatgtctgctatttggcgtcagctcgacgctcttggtcctcagttatcactagatacgtgccagtcttgccagagtcagaaggctgcacttgagcttcgacgcacctacgacttcttgactcggcttcgtgatgagtttgagcctct

SEQ ID NO: 34305 - DNA, 1245 bp, Zea Mays
gagaaaccacgcgtgtcagccagccattggatcaccaccattcgcgctgttcggcgtgcgcacccgatcccgtctccgtgcggctttgtgagtagagaagggaaggggaagcaggagcaggaggggttcgtcatcgcgtggtggccgcgccgctctgttcctccgtcccctcctccttccggctctcgctgtcacatgtcgtgtggtgtgggggcgctctgatccggatggtgcagcgccgcgggatcgcccacggccatgattgatcgcgaacgagcagtttatttgatgcagaggaaatgcaagttaataatgaggcaccactagggtgcctcaagccaaatatttctcagtataactctccagagcagataggtggtgttgaagggtttcctgagaataatgaaaaaaggaatgatattgttgctgcggaaaaaatctgggaggcgactccaaaccaaggccttagcaggcccatctaccgacaagaattttatgcctggccatatatttattcagattatcaaatcgtgcgtcagccactaccttatggttttgacaaccaattttatcagataaatagggaccacggtttccctattgagaacagggttcaatatcttccattcaagatgctccctcaaggtcacccccatgatgcacagcttcaggaatttcagtattttgtggttattgactttgaagcaacctgtgacaaggtgaacaatccatttccacaagaaatcatcgagtttccatctgtcttggttaacagtgcaactggaaaactcgaagaatgcttccaaacatatgttcggccgacgtatcatcaatttttgactgatttttgcaaggagcttactggcatacaacagattcaggtggacagaggtgtgcctctaggtgaagccttactcatgcacgataaatggctagaggacaagggcatcaagaacacaaactttgctattgtgacctggtctaactgggactgccgtataatgctggagtcggaatgcagatttaagagaatcaggaagcccccttattttaacagcttttgtgccagggagatgctacagttgagttctttgcctagatgtctgctatttggcgtcagctcgacgctcttggtcctcagttatcactagatacgtgccagtcttgccagagtcagaaggctgcacttgagcttcgacgcacctacgacttcttgactcggcttcgtgatgagtttgagcctct

SEQ ID NO: 34306 - DNA, 1397 bp, Zea Mays
cgcgccaccgccggtaaccgccaccagaagtaagagaaaccacgcgtgtcagccagccattggatcaccaccattcgcgctgttcggcgtgcgcacccgatcccgtctccgtgcggctttgtgagtagagaagggaaggggaagcaggagcaggaggggttcgtcatcgcgtggtggccgcgccgctctgttcctccgtcccctcctccttccggctctcgctgtcacatgtcgtgtggtgtgggggcgctctgatccggatggtgcagcgccgcgggatcgcccacggccatgattgatcgcgaacgagcagttgcagtaactgcgtgaaatgctataccggagatgccattgtgcacggaggtggtttattttgaggaagagttgggacacagtttggtgaattttgttgtgtgctggtctgagagctagtgctgctgggattgaggaaatgcaagttaataatgaggcaccactagggtgcctcaagccaaatatttctcagtataactctccagagcagataggtggtgttgaagggtttcctgagaataatgaaaaaaggaatgatattgttgctgcggaaaaaatctgggaggcgactccaaaccaaggccttagcaggcccatctaccgacaagaattttatgcctggccatatatttattcagattatcaaatcgtgcgtcagccactaccttatggttttgacaaccaattttatcagataaatagggaccacggtttccctattgagaacagggttcaatatcttccattcaagatgctccctcaaggtcacccccatgatgcacagcttcaggaatttcagtattttgtggttattgactttgaagcaacctgtgacaaggtgaacaatccatttccacaagaaatcatcgagtttccatctgtcttggttaacagtgcaactggaaaactcgaagaatgcttccaaacatatgttcggccgacgtatcatcaatttttgactgatttttgcaaggagcttactggcatacaacagattcaggtggacagaggtgtgcctctaggtgaagccttactcatgcacgataaatggctagaggacaagggcatcaagaacacaaactttgctattgtgacctggtctaactgggactgccgtataatgctggagtcggaatgcagatttaagagaatcaggaagcccccttattttaacagcttttgtgccagggagatgctacagttgagttctttgcctagatgtctgctatttggcgtcagctcgacgctcttggtcctcagttatcactagatacgtgccagtcttgccagagtcagaaggctgcacttgagcttcgacgcacctacgacttcttgactcggcttcgtgatgagtttgagcctct

SEQ ID NO: 34307 - DNA, 1284 bp, Zea Mays
taaacaccggttcctctctccgcgccaccgccggtaaccgccaccagaagtaagagaaaccacgcgtgtcagccagccattggatcaccaccattcgcgctgttcggcgtgcgcacccgatcccgtctccgtgcggctttgtgagtagagaagggaaggggaagcaggagcaggaggggttcgtcatcgcgtggtggccgcgccgctctgttcctccgtcccctcctccttccggctctcgctgtcacatgtcgtgtggtgtgggggcgctctgatccggatggtgcagcgccgcgggatcgcccacggccatgattgatcgcgaacgagcagaggaaatgcaagttaataatgaggcaccactagggtgcctcaagccaaatatttctcagtataactctccagagcagataggtggtgttgaagggtttcctgagaataatgaaaaaaggaatgatattgttgctgcggaaaaaatctgggaggcgactccaaaccaaggccttagcaggcccatctaccgacaagaattttatgcctggccatatatttattcagattatcaaatcgtgcgtcagccactaccttatggttttgacaaccaattttatcagataaatagggaccacggtttccctattgagaacagggttcaatatcttccattcaagatgctccctcaaggtcacccccatgatgcacagcttcaggaatttcagtattttgtggttattgactttgaagcaacctgtgacaaggtgaacaatccatttccacaagaaatcatcgagtttccatctgtcttggttaacagtgcaactggaaaactcgaagaatgcttccaaacatatgttcggccgacgtatcatcaatttttgactgatttttgcaaggagcttactggcatacaacagattcaggtggacagaggtgtgcctctaggtgaagccttactcatgcacgataaatggctagaggacaagggcatcaagaacacaaactttgctattgtgacctggtctaactgggactgccgtataatgctggagtcggaatgcagatttaagagaatcaggaagcccccttattttaacagcttttgtgccagggagatgctacagttgagttctttgcctagatgtctgctatttggcgtcagctcgacgctcttggtcctcagttatcactagatacgtgccagtcttgccagagtcagaaggctgcacttgagcttcgacgcacctacgacttcttgactcggcttcgtgatgagtttgagcctct

SEQ ID NO: 34308 - DNA, 843 bp, Zea Mays
ccacgtccaaggctatgcaaagtaaatcatgaggaaatgcaagttaataatgaggcaccactagggtgcctcaagccaaatatttctcagtataactctccagagcagataggtggtgttgaagggtttcctgagaataatgaaaaaaggaatgatattgttgctgcggaaaaaatctgggaggcgactccaaaccaaggccttagcaggcccatctaccgacaagaattttatgcctggccatatatttattcagattatcaaatcgtgcgtcagccactaccttatggttttgacaaccaattttatcagataaatagggaccacggtttccctattgagaacagggttcaatatcttccattcaagatgctccctcaaggtcacccccatgatgcacagcttcaggaatttcagtattttgtggttattgactttgaagcaacctgtgacaaggtgaacaatccatttccacaagaaatcatcgagtttccatctgtcttggttaacagtgcaactggaaaactcgaagaatgcttccaaacatatgttcggccgacgtatcatcaatttttgactgatttttgcaaggagcttactggcatacaacagattcaggtggacagaggtgtgcctctaggtgaagccttactcatgcacgataaatggctagaggacaagggcatcaagaacacaaactttgctattgtgacctggtctaactgggactgccgtataatgctggagtcggaatgcagatttaagagaatcaggaagcccccttattttaacagataagagccagatcgttagatggtctgcatcgattttcaaagaagtggg

SEQ ID NO: 34309 - DNA, 1220 bp, Zea Mays
gagaaaccacgcgtgtcagccagccattggatcaccaccattcgcgctgttcggcgtgcgcacccgatcccgtctccgtgcggctttgtgagtagagaagggaaggggaagcaggagcaggaggggttcgtcatcgcgtggtggccgcgccgctctgttcctccgtcccctcctccttccggctctcgctgtcacatgtcgtgtggtgtgggggcgctctgatccggatggtgcagcgccgcgggatcgcccacggccatgattgatcgcgaacgagcagttgcagtaactgcgtgaaatgctataccggagatgccattgtgcacggaggtggtttattttgaggaagagttgggacacagtttggtgaattttgttgtgtgctggtctgagagctagtgctgctgggattggtaatggtaactgatgaggaaatgcaagttaataatgaggcaccactagggtgcctcaagccaaatatttctcagtataactctccagagcagataggtggtgttgaagggtttcctgagaataatgaaaaaaggaatgatattgttgctgcggaaaaaatctgggaggcgactccaaaccaaggccttagcaggcccatctaccgacaagaattttatgcctggccatatatttattcagattatcaaatcgtgcgtcagccactaccttatggttttgacaaccaattttatcagataaatagggaccacggtttccctattgagaacagggttcaatatcttccattcaagatgctccctcaaggtcacccccatgatgcacagcttcaggaatttcagtattttgtggttattgactttgaagcaacctgtgacaaggtgaacaatccatttccacaagaaatcatcgagtttccatctgtcttggttaacagtgcaactggaaaactcgaagaatgcttccaaacatatgttcggccgacgtatcatcaatttttgactgatttttgcaaggagcttactggcatacaacagattcaggtggacagaggtgtgcctctaggtgaagccttactcatgcacgataaatggctagaggacaagggcatcaagaacacaaactttgctattgtgacctggtctaactgggactgccgtataatgctggagtcggaatgcagatttaagagaatcaggaagcccccttattttaacagattcatccttgatgctcagaaacaaaat

SEQ ID NO: 34310 - DNA, 2921 bp, Zea Mays
gacacaatggcggaaggtgtggagggagcagtggagcgaggtcgggatgcaaggcgacgaactctataggctttctgatcagaagagatctacaactgtcctctccgctctgcctactcagctactgccaccgttgcaattgctgcacgagccgctctatccatacggcgcttcttgttggagaacctcccaagttattaggcccacatgcaccggcccttgtctcaaagacctcaaacggctatgcatgtgcaccggataacttaacaggatccgtccgagtgtccggagggccccagataaaccacttacaaccaagatcgcaagattaagtaaacataaatcacacaccaacattttgcagcataatttctttattacaaaaagttacaagttacaacaaatttatattatatttattggagtgattacaaaagtgattcaaagaaatatactttgaaatgttgtaaattatttgtaagtttgaatatatgctagctcaatgacaattctcaataagaagtatagaagagctactttaacctataagaaggccgagcccactggcatttagcaccatcaatagcagcacaaatctagtacctgcaacaacatgggttcgaaaactctaagtacaaagtgtactttcgcaagtcttaccggactaaggaaaaagaatctcaaggatatgctggttaaataggaatcaaggaaaaggctttaacaagaatcaacttagatacttttgcagaaatagtatactaaagtgagtccttactttcaatattttaacgccagaataaatattaatagactctggttgcatctagtctaatttcaccatatcatcaatacaacatcatttttattcataatgtttacaaactgacctaggttgcaggtcagagatcaagtctccactgtccggggatataacagcgatccgaatcaatttactcagctgaggatctctaaccacatgacatatgtttctcataactcttgcatatgtctaccattcccacggatcctccactgcatgaataggtccgcgccacccgagagcacaccaccccttttaggaggtcctttgctaggatggtacgtgccactctcgccatctctccactcccagtgcgtgattgtcttttcatgtatggaatagccgggttcaagcttaccctatcccatatctagggcatgtggccagctaagatagtcctttatcatacaggcctatatacgcatccaatccttaattaacttgggtggagcatcacctgttcctagcccaagtctcgatttaaatacttccatcattaggattgttttgtgttcctaaggatgaaaagagcattatagggaaccttgcagtaagatcccacatgctcccaatgaaaatattcttgcaggtagaagccatcgttcctcaggataacccctgagctaggcattattgcaaaagacaacctctatccacaagatctaagcaatgctaagcatttttgtaaacaatatttgatacttccaaagaagtatctataataggaatggatatcaaggtactcgatgcatcaaatagttttcaagcaattcctataaacttaatgcacatttcactagacttaagtgtataaaagtcttttaaaaatacaaggggtaaatgcaccgggacttgcctggaataacactaggttagtgtttgttagatgaagaccacttgttgagcatctccaatactggtacttgatcaaatcatccactcctctggtttatgcatcagcatcactttgggattaatccaacgcttttcctccacatcttgtgatcaattaacgtacctcaatgatatgcataatgcgcatgtatgaacataacaacataagaaggaatagcaagaataaataatgcttcacggaagcgaactaaacacttagtgatgatacatcataactcctatgagcacacactagataactatgactttacgataattctaatcttcgagataatcatacttaattcaaacatcaaattaacaataattgaacataggcctcaaagtagagcataacatctaaaactagacttaatattatagaacaccagaagactaacaaacttagaatcattaatcttagacatctaaatttagaataaggatagaagcacattaactgactttctaaaccacttgttcaaactaatttggataacacgctaattacatgaatatcacattagttttagatctagcagacaactcattatcaactagcatggagccccgcgaaactgtatcctcaatacgctaaatacctaaggcagttttactcacatatgcctaattaattactaatttaatcatcttgcatccactttgcatttttaatctaagcttgactatatgtcacatacttgcttaccaaacactctactatcatatgaacctcaaacatatacttcaccaagcatagcggttaatttaccatttccaacactaacacattaagcctacatgtctacccaaacactcctcgccactgcggtatttcaacaagcattcgaccattcacacgaccatatcaccgcaagcgactcgaacattgcaataaacattatccttatgaccacaatgcacatgctatcgacaagagaaacgacacaactattatgtttaactaaattcatccgaccaatagcggaagtaacgaatcggctactattatctaaatcggactcgaaaccacgagattgacaacgatgcccagttcgagcctttcatcgcgcaccaggcggacagcgaacaaggacctcctcgcaaacacacatacacacataaatcaacagctagccacatcggcatatgataagaaattaaacagagcgaggagtgcgagtctcaccggcggggatgcaag

SEQ ID NO: 34311 - DNA, 1696 bp, Zea Mays
agttatccttgccctcagcatgcggttcctaaaacctccctccaatcaagtacatgcaaaagttcgtgaagataaccgattttacccttactttaagaattgtctgggttcaatagatggaacccacgttccaatatcgatgtcacctaatcaagctgcaccattcaggaatagaaaagggacacttagtcaaaatgtgatgttcgtttgtgattttgatctcagagtcacttatttgtcagctggatgggaaggatcagcaacagattcaatggttctcagatctgcaatgaccaattctataggaaaggttgaagtaccttccagaaagttctacctagtagatggtggttatgccaatacagcttcctttcttgcgccttatcgtggggttaggtaccacttgaaagagtttggtcgtggccaccgaagacctcaaaatcataaggagttatataatcatcgcccatgccattttaagaaatcatgtagagagggctttgggtgtcataaagaagagatttccaatcctcaaagttgctacctttcacaaaatagaaaaccaagccaaaatacctttagctactgcagtctttcataacttgattcggtcactaaatggtgatgagaggtggctagagaatgatcaaggaaatatcaatccataaacttttatcaacctacatgatgataagatgtttagaggttctcctaagataatagctttatctaaagctgctcaaaagaaggcttctcctaaagctgcaaaatcaaagaaatgtggcggtggtgttgagagagctgcatggaatgttgaattagagaagagtcttgttgacttgttatttgaacacaatatgcctgcatatagggctcaaaatggatggagtccagatgcttggaataaaatagtttctgaattccacaagaagcatgaatatgttacattcaacaagatccaaattcaagaaaaggagagagaatttaaaagggaatacaaggtattgaaggaggcaagaaaacaaagtggagtttcttggaatgaaaaaagatgcatgatcattgctgaaccaacgatatggggcaacattatcactacatttcctagagctaagaagttccgcaagaagtcttttcctctctttgatgccttgagtgaattatatgatggtcacattgcacaagggacttggaacattacatctactcaaccactacaaaattctgatgaaggagagaaatttaaaaccatagaagtggaagatgaagatactaatgaaccacaagtagatgcgagaatagaacaagatgaagatatagtaattgttgaaagggttgaacagaggttacctaaaaggtcaggtgcaccaactgttaatcaagagaaggagacaaagagagtgaggaaagatgcactagaagggctgatagggaggtaccttgatgtaaaaacaaagcaagttgcaaatgaggctgcacaatcaacaaaagagaaggaagttgctcaagataatgatttttctatcaagaggtgtatttctgttcttaagactatggatatcacaagagatgagaagatcaaagcagctgaggtgtttaacacaccaaattacagagaaacatttatttgtttcaatgatgatgagccagaagtcgctctcctttggctaagggggaagatggataaactctaaag

SEQ ID NO: 34312 - DNA, 2382 bp, Zea Mays
gccacaccaaccggcgcgcggtcttcccctccgcgcagccactccaaccgccaagcccccaccgccaagccctcacctcgctcgatccaccatgcctccgcctcgcaagatccgccatgccagcgtctcggcttcccctccgtgcagccgcctgacccgccgcccgacccgccgcaaaacagccatgcccccgcctcggctagcccttcgcgcagatccgcagccgcccgacccgccaggacccgcctctccttcccctcggcgctcaaacaaccaagccgaggaaatgcacccacaaatgtggaagctccgcgcagccacacgaactgccatgcaaccacctcgcacgatctgccatgcccccgcctcgcacgatccaccatgccttcgcctcggcttctcctccgtgcaaccgcctgacccgtcaggaccccgcctctccttcccctccgcgctcaagcaaccaatccgagaaaatgcacccacaaatttggaagccgcggcaatggcgcccgatttggctatggcgttcatgatttggaaaccgcacaatctacgttgccgatttggaaagcacgatcttggtactgcaatcacaacaactatcccccaaatgtcgcgcccaccaacgaccagctgacttaggaacgtccaagcaggagcctactcctcatttgcccctgttcagaggacccccagatttggcaatgcaacattcggaacaatcgcgctcgatctggcaattgtgtgcatgatcttcgtcgccgatttggaaagcgcacgatctacgacgctgatttggaaagtgccttgccaaacgattccagcacaaatcccccaaatcgtgcacccaccatcgttaaaaaggtcacaattgccatcctgctccaaccttcctacaacgacggaaatcctgcgctcacactcctccagtgtaaggtgctcctgtaaggaaaaaagtgaataaaagtgacataagattattcttacccaaggtgcaggaaagactcgagcttcaacaagggtcagattaagactggagcacaccctgccgatcagagcgtcttgccaaatacaaccagattttctgatgtgaaaacaaagaaccaacagaaacgaatctaatgggccataatgctggtcgcacaccattcatagacatctcgaacacaagcattacaggtgatcaaaatggatcgaactcgcttagaccaatagtcgatgctaatgaacgtaagaggcaaagggataaggaaagatatgccatgatgtccattgaacaaaagaatgagaaaaataggaagcgacgtgaagcacgtcaacgaaataaaggactacccataaagtccgagtcatctagagacattaatacgaatcagacacgtgaggcggtcaacgttgaaataagtcgagatgtgcatcttggttcaggtcctattaaaaacactccatcgactggtaattctatcgaacgaaagaggcaaagggatagagaaaggcgtgcaacaatgtcggctgaacaaaggaatgagtacaataacaagcgtcgtcaaatgcgtcaacgaaataagggacaaaatgtgatgccagctatttcaggagatggcgacaaaaaagtaaatgtggatccagatgatgatagcgactggctgcatcggaacgagacattccagtcaaatgactatgtcgcaacgatagaccttctgccaccagagtattcagctactatggtggtgtactgaagattacttctctactaaaagctgctgttgctcagctcaaaaacttgaactgtttgctggctgcagaagaccaatctgcagatgaagcagtgaaaaattctagggtgatgctaaatatacttgtatgcataatcaccataatttcaaacttcatgaagttggacataactgttggaaggattccccatattaccgataccacaaagcataccccatcatgcaactatttggctgcagtcacgtctagctctcctgatagaaccatttctaatacacttcgacattggcagcagaaagcaaatgttcttgtgatggaagccagatgtgtcaactggttagtagaaaataataaacggtgccaaggtcagcaattggatatgtctttatttttgtgaagatttatcaaggaagatattaaggagttttgctttaagctggccgaaatttctcgtattactatattggtaatatgcattttcattatacatttttactggctctaggtccatactgtcttgtgcccctttttactttaatttcaggactttgccaatttgaagcccccaatattcattgcacgtccagatcgagttgaagatggtatacgtaagtgctatcaggaagcgaaaaataagccgag

SEQ ID NO: 34313 - DNA, 2276 bp, Zea Mays
gccacaccaaccggcgcgcggtcttcccctccgcgcagccactccaaccgccaagcccccaccgccaagccctcacctcgctcgatccaccatgcctccgcctcgcaagatccgccatgccagcgtctcggcttcccctccgtgcagccgcctgacccgccgcccgacccgccgcaaaacagccatgcccccgcctcggctagcccttcgcgcagatccgcagccgcccgacccgccaggacccgcctctccttcccctcggcgctcaaacaaccaagccgaggaaatgcacccacaaatgtggaagctccgcgcagccacacgaactgccatgcaaccacctcgcacgatctgccatgcccccgcctcgcacgatccaccatgccttcgcctcggcttctcctccgtgcaaccgcctgacccgtcaggaccccgcctctccttcccctccgcgctcaagcaaccaatccgagaaaatgcacccacaaatttggaagccgcggcaatggcgcccgatttggctatggcgttcatgatttggaaaccgcacaatctacgttgccgatttggaaagcacgatcttggtactgcaatcacaacaactatcccccaaatgtcgcgcccaccaacgaccagctgacttaggaacgtccaagcaggagcctactcctcatttgcccctgttcagaggacccccagatttggcaatgcaacattcggaacaatcgcgctcgatctggcaattgtgtgcatgatcttcgtcgccgatttggaaagcgcacgatctacgacgctgatttggaaagtgccttgccaaacgattccagcacaaatcccccaaatcgtgcacccaccatcgttaaaaaggtcacaattgccatcctgctccaaccttcctacaacgacggaaatcctgcgctcacactcctccagtgtaaggtgctcctgtaaggaaaaaagtgaataaaagtgacataagattattcttacccaaggtgcaggaaagactcgagcttcaacaagggtcagattaagactggagcacaccctgccgatcagagcgtcttgccaaatacaaccagattttctgatgtgaaaacaaagaaccaacagaaacgaatctaatgggccataatgctggtcgcacaccattcatagacatctcgaacacaagcattacaggtgatcaaaatggatcgaactcgcttagaccaatagtcgatgctaatgaacgtaagaggcaaagggataaggaaagatatgccatgatgtccattgaacaaaagaatgagaaaaataggaagcgacgtgaagcacgtcaacgaaataaaggactacccataaagtccgagtcatctagagacattaatacgaatcagacacgtgaggcggtcaacgttgaaataagtcgagatgtgcatcttggttcaggtcctattaaaaacactccatcgactggtaattctatcgaacgaaagaggcaaagggatagagaaaggcgtgcaacaatgtcggctgaacaaaggaatgagtacaataacaagcgtcgtcaaatgcgtcaacgaaataagggacaaaatgtgatgccagctatttcaggagatggcgacaaaaaagtaaatgtggatccagatgatgatagcgactggctgcatcggaacgagacattccagtcaaatgactatgtcgcaacgatagaccttctgccaccaggcagtgtgcatgaatctgttggtaccattggggaatcgggtatcggcgtgagggagtataggcttgaacgccttaggttgtataatcagacaccaaagcggaaagaggcaaagatagagtacatgagaaaacgtagagtgctacaggctgacactttgaatgttgtgtccatcgccatggaagacccaacatatacccctgaggttgtgcaccctgcaacggaaccttcaacagttaccgcctgtgactgggtcatccctgaattcgttaggacacctttcctaccagctcaaacacagaccgaggatgtcggttcatttgatatgtctactgaagcaataaaacgtaaacatcatgtgccgcgtggggaaagacaagctatcttagcccgtcgaaaccagcaatttcaagcatccattgcacggaacgtgactactttgaatggggatactatcggtgacgccaacaacaatgcacaatgtagcgttccatgccaagccgctaccttgccaacaaatggaagtgaaggcataaccgaacaagcaagtggggtggagcataca

SEQ ID NO: 34314 - DNA, 950 bp, Zea Mays
cccccaccgccaagccctcacctcgctcgatccaccatgcctccgcctcgcaagatccgccatgccagcgtctcggcttcccctccgtgcagccgcctgacccgccgcccgacccgccgcaaaacagccatgcccccgcctcggctagcccttcgcgcagatccgcagccgcccgacccgccaggacccgcctctccttcccctcggcgctcaaacaaccaagccgaggaaatgcacccacaaatgtggaagctccgcgcagccacacgaactgccatgcaaccacctcgcacgatctgccatgcccccgcctcgcacgatccaccatgccttcgcctcggcttctcctccgtgcaaccgcctgacccgtcaggaccccgcctctccttcccctccgcgctcaagcaaccaatccgagaaaatgcacccacaaatttggaagccgcggcaatggcgcccgatttggctatggcgttcatgatttggaaaccgcacaatctacgttgccgatttggaaagcacgatcttggtactgcaatcacaacaactatcccccaaatgtcgcgcccaccaacgaccagctgacttaggaacgtccaagcaggagcctactcctcatttgcccctgttcagaggacccccagatttggcaatgcaacattcggaacaatcgcgctcgatctggcaattgtgtgcatgatcttcgtcgccgatttggaaagcgcacgatctacgacgctgatttggaaagtgccttgccaaacgattccagcacaaatcccccaaatcgtgcacccaccatcgttaaaaaggtcacaattgccatcctgctccaaccttcctacaacgacggaaatcctgcgctcacactcctccagtgtgttcttttatttatgcaaatctgagactccaatgattatagttacatatcctcatacatagaaacccaa

SEQ ID NO: 34315 - DNA, 3863 bp, Zea Mays
cccgatccgcggctgcctccggcggatccagccgcttcctcccgccgcagatccgccgcggccgccatggagaagccatgctctctcctggtccacttcgacaagggctcggccgcgatggcgaacgagatcaaggcggatctggagggcagcgatggccccgccaaggccgacgccatgcgccgcgccatctcgctcctcctaaacggcgagacgctcccgcagctcttcatcaccatcgtccgctacgtgctcccctccgaggaccacaccgtgcagaagctcctcctcctctacctcgagatcatcgaccgccgggatccggccggccgcgccctgccggagatgatcctcatctgccagaacctccgcaacaacctgcagagtcccaacgagtacatccgcggcgtcacgctgcggttcctctgcaggctctccgagcccgaggtgctcgagccgctcgtgccgtccgtgcttgcgaacctcgagcacaggcaccacttcatcaggagacacgctgtctcctccgtatccgcgatctaccgcctcccgcatggggaccagctcatcccggacgcgccggagctcgtcgagcggttcctcgcatctgagcaggacgcgtccgcgcggaggaacgcattcctcatgctctgtgcatgtgcacaggaccgcgctgtcgcctacctgctctcaaacgccgaccgggttgctgagtggcccgatctactgcagatggccgttgtggatctcatccgcaaggtctgccgatcccagaaccgtgccaacaagggaaggtatatcaccatcattacctcgctgctctccacgcccagcacagcggttgtttatgaatgtgctggcgcgctggtgtcactctcttcagcacccacggcagtgcgagccgctgccaacacctactgccagttgctctcttcgcagagtgacaacaatgtgaagctcattctactggatcgcctcaacgagctgcacactttgcaccgggatgtcatggtgggggtggtaatggatgtgcttcgtgcactggccagccccaacttagatgtcaagagaaaggttcttgatttagttctcgatctgctcaccccgcgtaatgttgaggaggtggtgctttatctcaagaaggaggtggtcaagacgcaagctggagacctcgagaagggtggcgagtaccgtcagatgctggtgcaggccatccatgcctgtgctgttgagtactcagaggtggctgggtctgtagtacacctccttatggacttccttggagacaccaatgttgctgcagctgttgatgttgttctgtttgtacgtgagatcattgagaccaatccaaagctgcgtgtttccatgatccagaggctaattgatacattctaccagattcgagcatcccgggtctgctcatgtgctctctggattcttggggagtactccctctctctatcagaggttgaaagtgccattgctaccattaaacaatgtcttggggatctaccattctacactgtatctgatgaaggggaggcaactgattctgctaagccagccaaggcagtggtgaactctgtcactgtatcttccaggcggcctgttgttcttgcagatggcacttatgccacacaaagcgctgctactgagaccattttgactccatcagttgctcctgggtcattggcatcaaccctgaacctcagatcactcattctatcaggtgatttctttctggctgctgttgttgcatgtaccctggccaagcttgtgctgaggctggaagaagtgcagccatctaaggttgagtcaaacaaggcttgcactggagcattgctgatcatgacatcgattctgcagctgggccagtcttcttaccttccccacccaattgataatgattcatatgataggattgtgctgtgtgtgagattgctttgcaatactggtgatgatgtcaggaagatttggttgcagtcatgcagacagagctttgcgaaaatgcttgctgagaagcagttcagggagacagaggagatgaaggcaaaggcacagatctctcatgcccagccagatgatcttattgatttttaccacctgaagagcaggaagggcatgagccagcttgagttggaagatgaggtgcatgatgatttgaaggctgcaactggtgggtttaccaaggatgcagatgacgcaaacaagctcaaccgcattcttcaattgactgggttcagtgatcctgtgtatgctgaagcatttgtaacagttcaccattatgacattgtacttgatgttactgtaattaatcgcacaaaggagacacttcagaacttgtgcttggaattggctacaatgggagacctcaaacttgttgaccgccctcagaactacaccttggctcctgagtctagcaaacagatccgcgctaatatcaaggtttcatcaacagagactggagttatatttggcaacatagtttacgagacttcaaatgtgatggaacgatcagtggttgtcctaaatgatattcacatcgacatcatggattacatctcacctgctacctgtgctgatgttactttccggaacatgtgggcagaatttgaatgggaaaataaggtggcagtgaatactgtgattcaagacgagaaggaattcttgaatcacattatcaagtcaacaaacatgaagtgtctgacaccaccgtctgcactagacggagaatgtggtttccttgctgctaatctttatgcaaagagtgtgtttggtgaggatgctttggtgaacatcagcattgagaagcaacatgatggcaagctcagtggttacatccgaataaggagcaagacccagggaattgcactcagcttaggtgacaagattactctcaagcagaagggtggcagttaactttgacaagtgctgcagttgtatcatcatttttctcttttaggaaatccacgtgccagagataccagtgccgtggcattgaattgagtataaatgtttttttgtacaaaaggatcaaagaaacagataagacgacagttatgaggaagtcacggtgttagatccctgagcatgaagttctcggtcgaagatccatgttgctgtagtaacgatgctgttccaacttcctttgctgataaaatgacaatgtagaaatagttctgaagttcatgttgatttgtcgacaggtatcagatcttgggtatttttctgttgattcagttgtgtattcttggagctgaaagactcggaagaagtaatatatcggcaatagctagttccattaatcaaatatcatctggaagctatccatcgactacagtaatgttaaaccaggtcggagcatccatcttctaattttaggtcacgtacgccacctgcaaagaggcctacaaaagaggcttttggtatatcttgatgacaagaaagaaggacaagctcaatgtgctcaactatgctgggcccaggatgtggatcttaactagtacccaataaaattagaaagcaagaacaatgagatttacaatggtagcaaagtgtgttatctttatacataaacttcttaggagatggaatcatggtgtaaagcattttgtattgcagctactgctgacaaggaaaaaaataagccgacatgctaagctgagcgataagttcctcaattctttttgtcagtaccttaaggagtctgtagtcctatttttctttcagggttcgctgcagatttaaggtacacattacttgatctaaaccgtgcgttgcctttttttgagttgttaagcaacaaatggtccagttttacgatgcgttttacgttcaaaaatgactacgcgacatgcaaggaa

SEQ ID NO: 34316 - DNA, 3308 bp, Zea Mays
ctctcctccccctcctcccagatcccgatccgcggctgcctccggcggatccagccgcttcctcccgccgcagatccgccgcggccgccatggagaagccatgctctctcctggtccacttcgacaagggctcggccgcgatggcgaacgagatcaaggcggatctggagggcagcgatggccccgccaaggccgacgccatgcgccgcgccatctcgctcctcctaaacggcgagacgctcccgcagctcttcatcaccatcgtccgctacgtgctcccctccgaggaccacaccgtgcagaagctcctcctcctctacctcgagatcatcgaccgccgggatccggccggccgcgccctgccggagatgatcctcatctgccagaacctccgcaacaacctgcagagtcccaacgagtacatccgcggcgtcacgctgcggttcctctgcaggctctccgagcccgaggtgctcgagccgctcgtgccgtccgtgcttgcgaacctcgagcacaggcaccacttcatcaggagacacgctgtctcctccgtatccgcgatctaccgcctcccgcatggggaccagctcatcccggacgcgccggagctcgtcgagcggttcctcgcatctgagcaggacgcgtccgcgcggaggaacgcattcctcatgctctgtgcatgtgcacaggaccgcgctgtcgcctacctgctctcaaacgccgaccgggttgctgagtggcccgatctactgcagatggccgttgtggatctcatccgcaaggtctgccgatcccagaaccgtgccaacaagggaaggtatatcaccatcattacctcgctgctctccacgcccagcacagcggttgtttatgaatgtgctggcgcgctggtgtcactctcttcagcacccacggcagtgcgagccgctgccaacacctactgccagttgctctcttcgcagagtgacaacaatgtgaagctcattctactggatcgcctcaacgagctgcacactttgcaccgggatgtcatggtgggggtggtaatggatgtgcttcgtgcactggccagccccaacttagatgtcaagagaaaggttcttgatttagttctcgatctgctcaccccgcgtaatgttgaggaggtggtgctttatctcaagaaggaggtggtcaagacgcaagctggagacctcgagaagggtggcgagtaccgtcagatgctggtgcaggccatccatgcctgtgctgttgagtactcagaggtggctgggtctgtagtacacctccttatggacttccttggagacaccaatgttgctgcagctgttgatgttgttctgtttgtacgtgagatcattgagaccaatccaaagctgcgtgtttccatgatccagaggctaattgatacattctaccagattcgagcatcccgggtctgctcatgtgctctctggattcttggggagtactccctctctctatcagaggttgaaagtgccattgctaccattaaacaatgtcttggggatctaccattctacactgtatctgatgaaggggaggcaactgattctgctaagccagccaaggcagtggtgaactctgtcactgtatcttccaggcggcctgttgttcttgcagatggcacttatgccacacaaagcgctgctactgagaccattttgactccatcagttgctcctgggtcattggcatcaaccctgaacctcagatcactcattctatcaggtgatttctttctggctgctgttgttgcatgtaccctggccaagcttgtgctgaggctggaagaagtgcagccatctaaggttgagtcaaacaaggcttgcactggagcattgctgatcatgacatcgattctgcagctgggccagtcttcttaccttccccacccaattgataatgattcatatgataggattgtgctgtgtgtgagattgctttgcaatactggtgatgatgtcaggaagatttggttgcagtcatgcagacagagctttgcgaaaatgcttgctgagaagcagttcagggagacagaggagatgaaggcaaaggcacagatctctcatgcccagccagatgatcttattgatttttaccacctgaagagcaggaagggcatgagccagcttgagttggaagatgaggtgcatgatgatttgaaggctgcaactggtgggtttaccaaggatgcagatgacgcaaacaagctcaaccgcattcttcaattgactgggttcagtgatcctgtgtatgctgaagcatttgtaacagttcaccattatgacattgtacttgatgttactgtaattaatcgcacaaaggagacacttcagaacttgtgcttggaattggctacaatgggagacctcaaacttgttgaccgccctcagaactacaccttggctcctgagtctagcaaacagatccgcgctaatatcaaggtttcatcaacagagactggagttatatttggcaacatagtttacgagacttcaaatgtgatggaacgatcagtggttgtcctaaatgatattcacatcgacatcatggattacatctcacctgctacctgtgctgatgttactttccggaacatgtgggcagaatttgaatgggaaaataaggtatcagatcttgggtatttttctgttgattcagttgtgtattcttggagctgaaagactcggaagaagtaatatatcggcaatagctagttccattaatcaaatatcatctggaagctatccatcgactacagtaatgttaaaccaggtcggagcatccatcttctaattttaggtcacgtacgccacctgcaaagaggcctacaaaagaggcttttggtatatcttgatgacaagaaagaaggacaagctcaatgtgctcaactatgctgggcccaggatgtggatcttaactagtacccaataaaattagaaagcaagaacaatgagatttacaatggtagcaaagtgtgttatctttatacataaacttcttaggagatggaatcatggtgtaaagcattttgtattgcagctactgctgacaaggaaaaaaataagccgacatgctaagctgagcgataagttcctcaattctttttgtcagtaccttaaggagtctgtagtcctatttttctttcagggttcgctgcagatttaaggtacacattacttgatctaaaccgtgcgttgcctttttttgagttgttaagcaacaaatggtccagttttacgatgcgttttacgttcaaaaatgactacgcgacatgcaaggaa

SEQ ID NO: 34317 - DNA, 2919 bp, Zea Mays
tgcagatcttgtccataattcttctcataacatatccattcatgtccaatctacacggcctggagctcaaaatacttgttaacatagcctcaattctgaagaacgtgtttgctgtgagtaaatttcagccatctttcccgtttgcattggcttcctgctgtaaacaaataagtgctcccaaattcgagagtttagcaaatcttctaataatatataactagttgagtcatatgaaaaggatactttgttacaaacaaatgctaatgtttttgttttgttttgcataaaacaggccactattactattgcgtgcaacattttgcaaaatactgcagtgacacaaaagcagagaggcactgctaatggcatctctgttactatgatgtcaatgttcaaagctgcagctccggcagcagcaggaattattttttcatgggctcagaagcacatatatgggctattcttacctggtaagtgggacatacatggctcctccaattttgccattttttccttaggatttcagaaaggtaaccagatcttgttcctgacgctaaacatggtgtcaataattgggctagtgctgacattcaagccatttctctcccagccaatccaatgaagcattaataaatatgggtatatgaagttcgttacctatgaattacatctggagtgcattgtcaggttacacacaagaaatatggggatccatgacgaacaccatgtgacctttcagtagaatgtcataataatattgtgataaaatggttagctaccatggatgtttcatctacacaccagcttggtttgttatttatactaaggaagaacaaattctagtcttatgatcaactacagtcaggttttgaactgcaagagatcatatcttaagtggtacatacatttcgtcttatgtccaattaagtcatcaaatgtaaaggcttctctaaattttgtcttgtgtggacaccgatggaccagatgctctacctctatttatctataccttagagtaaaatacactagcacgctcaaaacttggaccaggtgctgtcatctaggttcaagttttcattttttatttttaggtcgctagacttatcaaaagatgtgtttggtttggcttttggctgtggcttttaccaaaaaaccaaaagccaaatcaaatagctcaatataaaaaactcggcaggggatggaaagaccgacatcccagtattatattaagaagagaccgaaacatggttccggctgagaaaatccccaaactatggctcctgatcactagcgggtcgtcaccatacactcttcaatggttgtggtgtggtggaaccacccagattattctagcttaagtgtctgagtcccaccttagaggcgatgatacacataaaccgaaataaattgtccgtccatcggatctagtccgataaaccacttacatcaaatagataatcactttctcactcaaaggtgagacagagagaaatacaataattcataacacaacatattaagaagtaccaaatgttattacaacatcggagttttaaaaacagtaaaccatagtttttcttgcagcggaattaagctaatgacaataattgggtagcattggcaaagcctaaccaagctactcctcctggacctgtctcatagaggtagcatcccactcaacagtcccgcccggtgaatgggtgaagggccaagtcacaccatcaaccatttcttgcagaataatgaaaattttggtgccataagcaaggtcgagtatactaatactcagcaaggcttacccgatgtgaggaatctattactctacctctagaccatgaggctttttggttgtggggtttggttgtcaaaagcactagctgagtctaagccaagctttagcttttcaggttctacaatattccatagactaagtaagcttctatctatccacacatggtagcaatcactaagtcaagcaacatctttttcaggtaactttatttccactaattactcaatttaatataatgggtcgagcagactcattagctgcgagaagcggacgatttgaatcgagttttaacctacaaccatgtggttttctatttttagttaaaagtttactttgtctagaacactacaaaattggttctactaattttggacctatatttcgcaagctatgcattgtgtaagtaatctgcataattttaaatgatataaaaactaaatagggaaataaaaacacgcttgcgcccaggcccctaagtttatctttaaccaaaccctttaaactaagtcctctgaacactattcacttgagtctacaggtttacagaaaaccccctaggtttcttttcttcttaactcgtgatccctagatcattgtaatagtaaccgcagggaagaacgtgttggagcggctcaccagtggcgatagagctccggtagagggatggtgaagtcggggagtccgaggcggtcacgtcgaggtgttgatcgttgcaggaggtgatcagagctacccgatccaagtgcgtaggtggcggagatcgacgacaacgagtaattcggctcgtcaatggtggcggtagcactcaaattggtcggtcgaggagcttcatcgaagtgtggcagagctacccgttgggcagtggtggtctgggctggcctgtccacattcgtcggtggaggtgtggggctgtgggctccggtgagcggtgacaagccagttcagagtggtagtgagtgggggagcgagtggaaaagcttcatggggctctaagtgtgtgtcggggttcttggtcaagactaggatggcttgggcagcgctggccacggtggccgtgcgccgaggacgaaaagcggacgaaggagctcagacaaaattctggcgaggaactggcgagggcgagtgtg

SEQ ID NO: 34318 - DNA, 3841 bp, Zea Mays
ttgaaacgtaaaatctaacgtgtcgttaccctattagggaaagagcatggcattaatttctctacccacagctcactcactaaatggggtctcaaaacggtcagattcaagagttgcctccacctctacatcctacaaatataggtgatcaacctcctccagttgagaaaacaaagaggcagtgccctgggtgccaactagatgaggtgaacaaggctagcaataaggtcccctacctcaacttctgcttcatctggatcatctgcctcactgctactctaccaatccaatcgttgttcccatatctatacttcatgatcagggacttgaaagttgcaaaagaagagcaagacattggattttatgctggttttgtcggggcaacatatttcctcggaagaaccataagtgctgtgccatggggcatatttgctgacaagtatggaaggaagccatgcattgtgattagcatcctctcagtgattgttttcaacacactctttggacttagcacaacttactggatggcaattgtaactaggggattgcttggattgctttgtggtatattgggacccatcaaggcctatgcttcagaagtcagtaggaaggaacatcaagctctagggatatcttttgttacatcatcacgagcgatagctcttgttattgggccatctattggaggctttcttgcacagcctgcacaaaagtacccgaaattgttctctgaagagtccatatttgggaggtttccatacttcctcccttgctttgtcatatcggtgctagcggttggatcatgtattgcatgcatttggcttccggaaacgctgcactttcatgatgatgaaaaagcagaatgtattcaagaattagaatcacaagttggtggttctaaatctacagagaatctgctaaagaactggccgttgatgtcagcaataatcctattttctatcttttctctccatgacactgcttatcttgagatattttcactctgggctgtgagcagcagaaaattccagggccttagctttacatcccaggatgttggtactgtgttcgccttctcaggactcagtgtactggtatatcaacttactatttatcccctcctttcgaagtattttggaccagtcaagatatttcggcctgcagtgatcttgtccataattcttctcataacatatccattcatgtccaatctacacggcctggagctcaaaatacttgttaacatagcctcaattctgaagaacgtgtttgctgccactattactattgcgtgcaacattttgcaaaatactgcagtgacacaaaagcagagaggcactgctaatggcatctctgttactatgatgtcaatgttcaaagctgcagctccggcagcagcaggaattattttttcatgggctcagaagcacatatatgggctattcttacctggtaaccagatcttgttcctgacgctaaacatggtgtcaataattgggctagtgctgacattcaagccatttctctcccagccaatccaatgaagcattaataaatatgggtatatgaagttcgttacctatgaattacatctggagtgcattgtcaggttacacacaagaaatatggggatccatgacgaacaccatgtgacctttcagtagaatgtcataataatattgtgataaaatggttagctaccatggatgtttcatctacacaccagcttggtttgttatttatactaaggaagaacaaattctagtcttatgatcaactacagtcaggttttgaactgcaagagatcatatcttaagtggtacatacatttcgtcttatgtccaattaagtcatcaaatgtaaaggcttctctaaattttgtcttgtgtggacaccgatggaccagatgctctacctctatttatctataccttagagtaaaatacactagcacgctcaaaacttggaccaggtgctgtcatctaggttcaagttttcattttttatttttaggtcgctagacttatcaaaagatgtgtttggtttggcttttggctgtggcttttaccaaaaaaccaaaagccaaatcaaatagctcaatataaaaaactcggcaggggatggaaagaccgacatcccagtattatattaagaagagaccgaaacatggttccggctgagaaaatccccaaactatggctcctgatcactagcgggtcgtcaccatacactcttcaatggttgtggtgtggtggaaccacccagattattctagcttaagtgtctgagtcccaccttagaggcgatgatacacataaaccgaaataaattgtccgtccatcggatctagtccgataaaccacttacatcaaatagataatcactttctcactcaaaggtgagacagagagaaatacaataattcataacacaacatattaagaagtaccaaatgttattacaacatcggagttttaaaaacagtaaaccatagtttttcttgcagcggaattaagctaatgacaataattgggtagcattggcaaagcctaaccaagctactcctcctggacctgtctcatagaggtagcatcccactcaacagtcccgcccggtgaatgggtgaagggccaagtcacaccatcaaccatttcttgcagaataatgaaaattttggtgccataagcaaggtcgagtatactaatactcagcaaggcttacccgatgtgaggaatctattactctacctctagaccatgaggctttttggttgtggggtttggttgtcaaaagcactagctgagtctaagccaagctttagcttttcaggttctacaatattccatagactaagtaagcttctatctatccacacatggtagcaatcactaagtcaagcaacatctttttcaggtaactttatttccactaattactcaatttaatataatgggtcgagcagactcattagctgcgagaagcggacgatttgaatcgagttttaacctacaaccatgtggttttctatttttagttaaaagtttactttgtctagaacactacaaaattggttctactaattttggacctatatttcgcaagctatgcattgtgtaagtaatctgcataattttaaatgatataaaaactaaatagggaaataaaaacacgcttgcgcccaggcccctaagtttatctttaaccaaaccctttaaactaagtcctctgaacactattcacttgagtctacaggtttacagaaaaccccctaggtttcttttcttcttaactcgtgatccctagatcattgtaatagtaaccgcagggaagaacgtgttggagcggctcaccagtggcgatagagctccggtagagggatggtgaagtcggggagtccgaggcggtcacgtcgaggtgttgatcgttgcaggaggtgatcagagctacccgatccaagtgcgtaggtggcggagatcgacgacaacgagtaattcggctcgtcaatggtggcggtagcactcaaattggtcggtcgaggagcttcatcgaagtgtggcagagctacccgttgggcagtggtggtctgggctggcctgtccacattcgtcggtggaggtgtggggctgtgggctccggtgagcggtgacaagccagttcagagtggtagtgagtgggggagcgagtggaaaagcttcatggggctctaagtgtgtgtcggggttcttggtcaagactaggatggcttgggcagcgctggccacggtggccgtgcgccgaggacgaaaagcggacgaaggagctcagacaaaattctggcgaggaactggcgagggcgagtgtg

SEQ ID NO: 34319 - DNA, 3758 bp, Zea Mays
cttccacacactctcatgttgctcgccccacctcgttctgatctcactcactaaatggggtctcaaaacggtcagattcaagagttgcctccacctctacatcctacaaatataggtgatcaacctcctccagttgagaaaacaaagaggcagtgccctgggtgccaactagatgaggtgaacaaggctagcaataaggtcccctacctcaacttctgcttcatctggatcatctgcctcactgctactctaccaatccaatcgttgttcccatatctatacttcatgatcagggacttgaaagttgcaaaagaagagcaagacattggattttatgctggttttgtcggggcaacatatttcctcggaagaaccataagtgctgtgccatggggcatatttgctgacaagtatggaaggaagccatgcattgtgattagcatcctctcagtgattgttttcaacacactctttggacttagcacaacttactggatggcaattgtaactaggggattgcttggattgctttgtggtatattgggacccatcaaggttacatcatcacgagcgatagctcttgttattgggccatctattggaggctttcttgcacagcctgcacaaaagtacccgaaattgttctctgaagagtccatatttgggaggtttccatacttcctcccttgctttgtcatatcggtgctagcggttggatcatgtattgcatgcatttggcttccggaaacgctgcactttcatgatgatgaaaaagcagaatgtattcaagaattagaatcacaagttggtggttctaaatctacagagaatctgctaaagaactggccgttgatgtcagcaataatcctattttctatcttttctctccatgacactgcttatcttgagatattttcactctgggctgtgagcagcagaaaattccagggccttagctttacatcccaggatgttggtactgtgttcgccttctcaggactcagtgtactggtatatcaacttactatttatcccctcctttcgaagtattttggaccagtcaagatatttcggcctgcagtgatcttgtccataattcttctcataacatatccattcatgtccaatctacacggcctggagctcaaaatacttgttaacatagcctcaattctgaagaacgtgtttgctgccactattactattgcgtgcaacattttgcaaaatactgcagtgacacaaaagcagagaggcactgctaatggcatctctgttactatgatgtcaatgttcaaagctgcagctccggcagcagcaggaattattttttcatgggctcagaagcacatatatgggctattcttacctggtaaccagatcttgttcctgacgctaaacatggtgtcaataattgggctagtgctgacattcaagccatttctctcccagccaatccaatgaagcattaataaatatgggtatatgaagttcgttacctatgaattacatctggagtgcattgtcaggttacacacaagaaatatggggatccatgacgaacaccatgtgacctttcagtagaatgtcataataatattgtgataaaatggttagctaccatggatgtttcatctacacaccagcttggtttgttatttatactaaggaagaacaaattctagtcttatgatcaactacagtcaggttttgaactgcaagagatcatatcttaagtggtacatacatttcgtcttatgtccaattaagtcatcaaatgtaaaggcttctctaaattttgtcttgtgtggacaccgatggaccagatgctctacctctatttatctataccttagagtaaaatacactagcacgctcaaaacttggaccaggtgctgtcatctaggttcaagttttcattttttatttttaggtcgctagacttatcaaaagatgtgtttggtttggcttttggctgtggcttttaccaaaaaaccaaaagccaaatcaaatagctcaatataaaaaactcggcaggggatggaaagaccgacatcccagtattatattaagaagagaccgaaacatggttccggctgagaaaatccccaaactatggctcctgatcactagcgggtcgtcaccatacactcttcaatggttgtggtgtggtggaaccacccagattattctagcttaagtgtctgagtcccaccttagaggcgatgatacacataaaccgaaataaattgtccgtccatcggatctagtccgataaaccacttacatcaaatagataatcactttctcactcaaaggtgagacagagagaaatacaataattcataacacaacatattaagaagtaccaaatgttattacaacatcggagttttaaaaacagtaaaccatagtttttcttgcagcggaattaagctaatgacaataattgggtagcattggcaaagcctaaccaagctactcctcctggacctgtctcatagaggtagcatcccactcaacagtcccgcccggtgaatgggtgaagggccaagtcacaccatcaaccatttcttgcagaataatgaaaattttggtgccataagcaaggtcgagtatactaatactcagcaaggcttacccgatgtgaggaatctattactctacctctagaccatgaggctttttggttgtggggtttggttgtcaaaagcactagctgagtctaagccaagctttagcttttcaggttctacaatattccatagactaagtaagcttctatctatccacacatggtagcaatcactaagtcaagcaacatctttttcaggtaactttatttccactaattactcaatttaatataatgggtcgagcagactcattagctgcgagaagcggacgatttgaatcgagttttaacctacaaccatgtggttttctatttttagttaaaagtttactttgtctagaacactacaaaattggttctactaattttggacctatatttcgcaagctatgcattgtgtaagtaatctgcataattttaaatgatataaaaactaaatagggaaataaaaacacgcttgcgcccaggcccctaagtttatctttaaccaaaccctttaaactaagtcctctgaacactattcacttgagtctacaggtttacagaaaaccccctaggtttcttttcttcttaactcgtgatccctagatcattgtaatagtaaccgcagggaagaacgtgttggagcggctcaccagtggcgatagagctccggtagagggatggtgaagtcggggagtccgaggcggtcacgtcgaggtgttgatcgttgcaggaggtgatcagagctacccgatccaagtgcgtaggtggcggagatcgacgacaacgagtaattcggctcgtcaatggtggcggtagcactcaaattggtcggtcgaggagcttcatcgaagtgtggcagagctacccgttgggcagtggtggtctgggctggcctgtccacattcgtcggtggaggtgtggggctgtgggctccggtgagcggtgacaagccagttcagagtggtagtgagtgggggagcgagtggaaaagcttcatggggctctaagtgtgtgtcggggttcttggtcaagactaggatggcttgggcagcgctggccacggtggccgtgcgccgaggacgaaaagcggacgaaggagctcagacaaaattctggcgaggaactggcgagggcgagtgtg

SEQ ID NO: 34320 - DNA, 3985 bp, Zea Mays
ctcatgaagtcatcacgatgcaataatattttatatagagcccatgtaaactagcctctatagtaggagtcaaagatgtgcaccgcgttatatccctatgtatctaatcatagccaacaccacacctatttaaacaagaacaataatagttttcttcaaaaaggaagagagagggggaaaggcagaaggaaagaactggagaagtcctcaaagagctcactcactaaatggggtctcaaaacggtcagattcaagagttgcctccacctctacatcctacaaatataggtgatcaacctcctccagttgagaaaacaaagaggcagtgccctgggtgccaactagatgaggtgaacaaggctagcaataaggtcccctacctcaacttctgcttcatctggatcatctgcctcactgctactctaccaatccaatcgttgttcccatatctatacttcatgatcagggacttgaaagttgcaaaagaagagcaagacattggattttatgctggttttgtcggggcaacatatttcctcggaagaaccataagtgctgtgccatggggcatatttgctgacaagtatggaaggaagccatgcattgtgattagcatcctctcagtgattgttttcaacacactctttggacttagcacaacttactggatggcaattgtaactaggggattgcttggattgctttgtggtatattgggacccatcaaggcctatgcttcagaagtcagtaggaaggaacatcaagctctagggatatcttttgttacatcatcacgagcgatagctcttgttattgggccatctattggaggctttcttgcacagcctgcacaaaagtacccgaaattgttctctgaagagtccatatttgggaggtttccatacttcctcccttgctttgtcatatcggtgctagcggttggatcatgtattgcatgcatttggcttccggaaacgctgcactttcatgatgatgaaaaagcagaatgtattcaagaattagaatcacaagttggtggttctaaatctacagagaatctgctaaagaactggccgttgatgtcagcaataatcctattttctatcttttctctccatgacactgcttatcttgagatattttcactctgggctgtgagcagcagaaaattccagggccttagctttacatcccaggatgttggtactgtgttcgccttctcaggactcagtgtactggtatatcaacttactatttatcccctcctttcgaagtattttggaccagtcaagatatttcggcctgcagtgatcttgtccataattcttctcataacatatccattcatgtccaatctacacggcctggagctcaaaatacttgttaacatagcctcaattctgaagaacgtgtttgctgccactattactattgcgtgcaacattttgcaaaatactgcagtgacacaaaagcagagaggcactgctaatggcatctctgttactatgatgtcaatgttcaaagctgcagctccggcagcagcaggaattattttttcatgggctcagaagcacatatatgggctattcttacctggtaaccagatcttgttcctgacgctaaacatggtgtcaataattgggctagtgctgacattcaagccatttctctcccagccaatccaatgaagcattaataaatatgggtatatgaagttcgttacctatgaattacatctggagtgcattgtcaggttacacacaagaaatatggggatccatgacgaacaccatgtgacctttcagtagaatgtcataataatattgtgataaaatggttagctaccatggatgtttcatctacacaccagcttggtttgttatttatactaaggaagaacaaattctagtcttatgatcaactacagtcaggttttgaactgcaagagatcatatcttaagtggtacatacatttcgtcttatgtccaattaagtcatcaaatgtaaaggcttctctaaattttgtcttgtgtggacaccgatggaccagatgctctacctctatttatctataccttagagtaaaatacactagcacgctcaaaacttggaccaggtgctgtcatctaggttcaagttttcattttttatttttaggtcgctagacttatcaaaagatgtgtttggtttggcttttggctgtggcttttaccaaaaaaccaaaagccaaatcaaatagctcaatataaaaaactcggcaggggatggaaagaccgacatcccagtattatattaagaagagaccgaaacatggttccggctgagaaaatccccaaactatggctcctgatcactagcgggtcgtcaccatacactcttcaatggttgtggtgtggtggaaccacccagattattctagcttaagtgtctgagtcccaccttagaggcgatgatacacataaaccgaaataaattgtccgtccatcggatctagtccgataaaccacttacatcaaatagataatcactttctcactcaaaggtgagacagagagaaatacaataattcataacacaacatattaagaagtaccaaatgttattacaacatcggagttttaaaaacagtaaaccatagtttttcttgcagcggaattaagctaatgacaataattgggtagcattggcaaagcctaaccaagctactcctcctggacctgtctcatagaggtagcatcccactcaacagtcccgcccggtgaatgggtgaagggccaagtcacaccatcaaccatttcttgcagaataatgaaaattttggtgccataagcaaggtcgagtatactaatactcagcaaggcttacccgatgtgaggaatctattactctacctctagaccatgaggctttttggttgtggggtttggttgtcaaaagcactagctgagtctaagccaagctttagcttttcaggttctacaatattccatagactaagtaagcttctatctatccacacatggtagcaatcactaagtcaagcaacatctttttcaggtaactttatttccactaattactcaatttaatataatgggtcgagcagactcattagctgcgagaagcggacgatttgaatcgagttttaacctacaaccatgtggttttctatttttagttaaaagtttactttgtctagaacactacaaaattggttctactaattttggacctatatttcgcaagctatgcattgtgtaagtaatctgcataattttaaatgatataaaaactaaatagggaaataaaaacacgcttgcgcccaggcccctaagtttatctttaaccaaaccctttaaactaagtcctctgaacactattcacttgagtctacaggtttacagaaaaccccctaggtttcttttcttcttaactcgtgatccctagatcattgtaatagtaaccgcagggaagaacgtgttggagcggctcaccagtggcgatagagctccggtagagggatggtgaagtcggggagtccgaggcggtcacgtcgaggtgttgatcgttgcaggaggtgatcagagctacccgatccaagtgcgtaggtggcggagatcgacgacaacgagtaattcggctcgtcaatggtggcggtagcactcaaattggtcggtcgaggagcttcatcgaagtgtggcagagctacccgttgggcagtggtggtctgggctggcctgtccacattcgtcggtggaggtgtggggctgtgggctccggtgagcggtgacaagccagttcagagtggtagtgagtgggggagcgagtggaaaagcttcatggggctctaagtgtgtgtcggggttcttggtcaagactaggatggcttgggcagcgctggccacggtggccgtgcgccgaggacgaaaagcggacgaaggagctcagacaaaattctggcgaggaactggcgagggcgagtgtg

SEQ ID NO: 34321 - DNA, 1225 bp, Zea Mays
tgcccttctcttttgtgagagaacaaatttaggcttccaagtctgccattcccttggaggaggcactggatctggaatgggcacgcttctcatttcaaagatcagagaggagtaccctgatcggatgatgctgacattttctgtctttccctcgcccaaggtgtcagacactgttgttgagccatacaatgcaaccctgtctgtccatcagttggttgagaacgctgatgaatgcatggttcttgacaacgaagcactttatgacatttgcttccgaactctgaagctgacgacccctagctttggagacttgaaccacttgatcagtgcaacgatgagtggtgtcacttgctgcctccgcttcccaggacagcttaactctgacctgcgcaagcttgcagtcaacctgatcccgttccctcggctccacttcttcatggttggctttgcgccactcacctcgcgtggctcgcagcagtaccgtgcgctcactgtccctgagctaacccagcagatgtgggatgccaagaacatgatgtgtgctgctgacccacgccatggtcgttatctcacagcctctgccatgttccgtggcaagatgagcactaaggaggttgatgagcaaatgattaatgtccagaacaagaactcgtcctattttgtggagtggatccccaacaacgtcaagtccagtgtttgtgatatccctccgcgtggcctctccatggcctccaccttcattggcaactccacgtccatccaggagatgaggaaggctttcttgcattggtacactggtgagggcatggatgagatggagttcaccgaagctgagagcaacatgaacgatctggtgtccgagtaccagcagtaccaggatgccactgctgatgaggaggcggaatacgaggacgaggaggccatccaagacgagtaagggtggtttgggccctgccacatttgtacccttgtttcctttcattccggggcttgcctatggtttgcttgttgtattcgctcaagttatgcggtatgtagtagtactttcgtgcgtagcatgctgtatgctaccacaaagactttgttcacctgcactgcttgatatgccagccatggcatatgtgacgagtatttcattattttatctgcttgcttgctcctgtgatggttccttcctatgacattgaatgcgaatttgcccattgctcacgttggatctgcatgg

SEQ ID NO: 34322 - DNA, 1664 bp, Zea Mays
gttctcggttcctatttcgggatttgggtgttttggttttgttcgtagaatttcagctaccggccttagatccagccatgagggagattctccacatccagggcggccagtgcggtaaccagatcggttccaagttctgggaggtcgtctgcgacgagcatggtatcgatcccaccggacgctatgtcggcacctccgacctccagctcgagcgcgtcaatgtctactacaacgaggcctcatgcggccgcttcgtgccgcgcgctgtgctcatggacctcgagcctggcaccatggacagcgtccgcaccggaccgtacggccagatcttccgccccgacaactttgtcttcggacagtctggcgcggggaacaactgggccaagggccactacacagagggcgcagagctcattgactccgtgcttgacgttgtcagaaaggaggctgagaactgcgactgcctccaaggcttccaagtctgccattcccttggaggaggcactggatctggaatgggcacgcttctcatttcaaagatcagagaggagtaccctgatcggatgatgctgacattttctgtctttccctcgcccaaggtgtcagacactgttgttgagccatacaatgcaaccctgtctgtccatcagttggttgagaacgctgatgaatgcatggttcttgacaacgaagcactttatgacatttgcttccgaactctgaagctgacgacccctagctttggagacttgaaccacttgatcagtgcaacgatgagtggtgtcacttgctgcctccgcttcccaggacagcttaactctgacctgcgcaagcttgcagtcaacctgatcccgttccctcggctccacttcttcatggttggctttgcgccactcacctcgcgtggctcgcagcagtaccgtgcgctcactgtccctgagctaacccagcagatgtgggatgccaagaacatgatgtgtgctgctgacccacgccatggtcgttatctcacagcctctgccatgttccgtggcaagatgagcactaaggaggttgatgagcaaatgattaatgtccagaacaagaactcgtcctattttgtggagtggatccccaacaacgtcaagtccagtgtttgtgatatccctccgcgtggcctctccatggcctccaccttcattggcaactccacgtccatccaggagatgaggaaggctttcttgcattggtacactggtgagggcatggatgagatggagttcaccgaagctgagagcaacatgaacgatctggtgtccgagtaccagcagtaccaggatgccactgctgatgaggaggcggaatacgaggacgaggaggccatccaagacgagtaagggtggtttgggccctgccacatttgtacccttgtttcctttcattccggggcttgcctatggtttgcttgttgtattcgctcaagttatgcggtatgtagtagtactttcgtgcgtagcatgctgtatgctaccacaaagactttgttcacctgcactgcttgatatgccagccatggcatatgtgacgagtatttcattattttatctgcttgcttgctcctgtgatggttccttcctatgacattgaatgcgaatttgcccattgctcacgttggatctgcatgg

SEQ ID NO: 34323 - DNA, 1370 bp, Zea Mays
cccggcggccgacggtgctttggagggaacgcgactgggccgcccgatccggtgccctagcccccccgcgcccactataaaatccgccccctttctgggcactcgctcatttcatttaccacaccaccttcctctcctcgctctccctattctggacggccgactcgcttctgtgaggcttccaagtctgccattcccttggaggaggcactggatctggaatgggcacgcttctcatttcaaagatcagagaggagtaccctgatcggatgatgctgacattttctgtctttccctcgcccaaggtgtcagacactgttgttgagccatacaatgcaaccctgtctgtccatcagttggttgagaacgctgatgaatgcatggttcttgacaacgaagcactttatgacatttgcttccgaactctgaagctgacgacccctagctttggagacttgaaccacttgatcagtgcaacgatgagtggtgtcacttgctgcctccgcttcccaggacagcttaactctgacctgcgcaagcttgcagtcaacctgatcccgttccctcggctccacttcttcatggttggctttgcgccactcacctcgcgtggctcgcagcagtaccgtgcgctcactgtccctgagctaacccagcagatgtgggatgccaagaacatgatgtgtgctgctgacccacgccatggtcgttatctcacagcctctgccatgttccgtggcaagatgagcactaaggaggttgatgagcaaatgattaatgtccagaacaagaactcgtcctattttgtggagtggatccccaacaacgtcaagtccagtgtttgtgatatccctccgcgtggcctctccatggcctccaccttcattggcaactccacgtccatccaggagatgaggaaggctttcttgcattggtacactggtgagggcatggatgagatggagttcaccgaagctgagagcaacatgaacgatctggtgtccgagtaccagcagtaccaggatgccactgctgatgaggaggcggaatacgaggacgaggaggccatccaagacgagtaagggtggtttgggccctgccacatttgtacccttgtttcctttcattccggggcttgcctatggtttgcttgttgtattcgctcaagttatgcggtatgtagtagtactttcgtgcgtagcatgctgtatgctaccacaaagactttgttcacctgcactgcttgatatgccagccatggcatatgtgacgagtatttcattattttatctgcttgcttgctcctgtgatggttccttcctatgacattgaatgcgaatttgcccattgctcacgttggatctgcatgg

SEQ ID NO: 34324 - DNA, 3029 bp, Zea Mays
ctcctccctctccagtcccgttgcacttcctcggtcccctccttcactccccccacccccaccaatggcgtctcctcgccgccgctccctcccactccgcttcctcatcttcatccctgcccccctcttcctagtcctcctcttccaccgctcctctcattctaccgccccgcttctccacaccgcaggctctggctccggccccagctctgatccccgccgcttctccctcctcatcaagctcctcgcctacgaccggccggccgcgtttcgccgctgcctccgctctctcgccgcagctgactacgatggggaccgcgtcgcgctccacgtcctcctcgaccaccgcccgcccaactcctcgttgccccccctcgccacgtcgcacgagatccttgacttcgtcgatgcgttcccgtggccgcacggagagaagcgcgtgcactaccgcgcctccaacgcggggctccaggcgcagtggatagaggcatggtggcctggctccgacgacgagttcgccttcgtcgtcgaggacgacctccaggtctcgccgctctactacaagttcctgaagcggctggtcctgaggtactactacgaccgcgagaactacagcccctacctgttcggcgcgtcgctccagcgccctcggttcgtcgcaggtaaacatggaaacaagatacagctggatagcgagactcggcttttcttgtatcagatggtaggcacgtggggtcaacttctctttccaaaaccatggaaagaatttcgattatggtatgatgaccacaaagccaaaggactcaaacctattctccaagaaaactacagggtggtataagaagatgggtgagagaatatggactccttggttcgttaaattcgtccactcacgtggatacttcaatatatacacaaacttcctgaaggaaagggccctgagcgtctcccatagggatgcaggtgtgaactacgagaaaagtgttgggccagattctactttgttggatgggaagaatcttgatttcaatttatgggaactgcagcctttaaagaagctaaagtggtatgatttctgcttcaatgaagctcttccagggagaattgttagaaaaaatagtgaactcggttctatgctcaaatccctgcaattaaaaagtactgttgttctcgtaactctgtactcaatagaagagagatttgcaagaaacttgatttgccatcttgacaaggcaggcatgaagaatactattttccttggtgacaattcagagtttctggatgaccttgctcatagaggatatcctgtcattgatggcgtcaattttcttcagagtatcagattgagtagtttgcagggctctgacggttttgttcaggaaacattggttatatcttatgtgataaaagcttgcctggacctgggatataatctatggctactaaatggaaatatgatttcacttggcaataagttgatcgagccatcagatcagtctgttgacttctttactgcagatgaagggttgatgtttataaggagctcgctagacatgaaaaacaaatggaatgaacttgccatgtcgagagtgaaagcgatgtgtacatctagtgatctgtctgtttccatcaaacagaagagttttgtccatatgctaactgaagtgatggcgagcagtgctggtgttaggctgggaaagctggatgaggctatgagagttattgagttagggcctaacacctcaaacagatcaatattagaagacaaaagtaatgtgcttttctggtctcgcagtagggcttcagattcagttcaaaagcaacttgaaaatatggatttatggttggttgactcagattcgtcttgtagttctgttgtttgtcaccaaaagcagaagtagccaggttgttttggcacatcacttttgcttcactgagaacaaaaatggtgccatcataggggatccatggtaaccagctaagtggcactaatatattttccaaaaatcatataatgacatgtctttagatgcatgaggggaatcagccatattgtttgatatttgtagattatgcgatgaagctgttcgatcaaatgtctgtttctgaattatgattacagttagctatgccaccacagataaccatcttggagttctgctcttgccatgaatgaattttgtgctgaacacggctatagttttgaggttctgaatacttggatccttttttggtattgtgagggctaacgaagtcttcagttaggtaacctgctaattcaactcacaggagcagttttggatattatatcctgctacgtaccatattgatagcaatgccccaactacaatccaatccctgcagacactcaaatcatgggaggctgaaagcggcatgtttcctttttgttcaatgtacaaagtactcactgcacctcccggcgccccctgtcggacagatgtagaaagcgtgtatctgaagaaaatccggcaggcagatgcggttggtgcgtgcattttcactggcagaagcaacgtccgcaggaaacccagctggaaagtggttcggcgattttgacagatcgatcagagaacccggagatgattgtgcagcagcaactagaaagtagcaagtgtgtgctgccgaagttgccagaagcgatttcccaaccagagttggcgctcaatgttttcttagcagcgccgatttcctccccacctgaacaaggtgtgcttgcggcatcatctgtcgctgtatccaacttggaacacaagcaagcatgtactatattatatatactaagctgcgacagaatggtccgccggaaaatgacgtgcaggtgagcaggtcccagaatggtccgttgcaccttagccgtatgacgacgtaaaaaaaatatatgcatcgtttcaggttgggatgtgttaaaagtacgaaaatgtaaatgaaataacagaaaaaagacgaatgaacgcaagcaataatcggaagaactgaaaggttttgtgtttgtattgatctgagcaacg

SEQ ID NO: 34325 - DNA, 3034 bp, Zea Mays
ctcctccctctccagtcccgttgcacttcctcggtcccctccttcactccccccacccccaccaatggcgtctcctcgccgccgctccctcccactccgcttcctcatcttcatccctgcccccctcttcctagtcctcctcttccaccgctcctctcattctaccgccccgcttctccacaccgcaggctctggctccggccccagctctgatccccgccgcttctccctcctcatcaagctcctcgcctacgaccggccggccgcgtttcgccgctgcctccgctctctcgccgcagctgactacgatggggaccgcgtcgcgctccacgtcctcctcgaccaccgcccgcccaactcctcgttgccccccctcgccacgtcgcacgagatccttgacttcgtcgatgcgttcccgtggccgcacggagagaagcgcgtgcactaccgcgcctccaacgcggggctccaggcgcagtggatagaggcatggtggcctggctccgacgacgagttcgccttcgtcgtcgaggacgacctccaggtctcgccgctctactacaagttcctgaagcggctggtcctgaggtactactacgaccgcgagaactacagcccctacctgttcggcgcgtcgctccagcgccctcggttcgtcgcaggtaaacatggaaacaagatacagctggatagcgagactcggcttttcttgtatcagatggtaggcacgtggggtcaacttctctttccaaaaccatggaaagaatttcgattatggtatgatgaccacaaagccaaaggactcaaacctattctccaaggcatgaaaactacagggtggtataagaagatgggtgagagaatatggactccttggttcgttaaattcgtccactcacgtggatacttcaatatatacacaaacttcctgaaggaaagggccctgagcgtctcccatagggatgcaggtgtgaactacgagaaaagtgttgggccagattctactttgttggatgggaagaatcttgatttcaatttatgggaactgcagcctttaaagaagctaaagtggtatgatttctgcttcaatgaagctcttccagggagaattgttagaaaaaatagtgaactcggttctatgctcaaatccctgcaattaaaaagtactgttgttctcgtaactctgtactcaatagaagagagatttgcaagaaacttgatttgccatcttgacaaggcaggcatgaagaatactattttccttggtgacaattcagagtttctggatgaccttgctcatagaggatatcctgtcattgatggcgtcaattttcttcagagtatcagattgagtagtttgcagggctctgacggttttgttcaggaaacattggttatatcttatgtgataaaagcttgcctggacctgggatataatctatggctactaaatggaaatatgatttcacttggcaataagttgatcgagccatcagatcagtctgttgacttctttactgcagatgaagggttgatgtttataaggagctcgctagacatgaaaaacaaatggaatgaacttgccatgtcgagagtgaaagcgatgtgtacatctagtgatctgtctgtttccatcaaacagaagagttttgtccatatgctaactgaagtgatggcgagcagtgctggtgttaggctgggaaagctggatgaggctatgagagttattgagttagggcctaacacctcaaacagatcaatattagaagacaaaagtaatgtgcttttctggtctcgcagtagggcttcagattcagttcaaaagcaacttgaaaatatggatttatggttggttgactcagattcgtcttgtagttctgttgtttgtcaccaaaagcagaagtagccaggttgttttggcacatcacttttgcttcactgagaacaaaaatggtgccatcataggggatccatggtaaccagctaagtggcactaatatattttccaaaaatcatataatgacatgtctttagatgcatgaggggaatcagccatattgtttgatatttgtagattatgcgatgaagctgttcgatcaaatgtctgtttctgaattatgattacagttagctatgccaccacagataaccatcttggagttctgctcttgccatgaatgaattttgtgctgaacacggctatagttttgaggttctgaatacttggatccttttttggtattgtgagggctaacgaagtcttcagttaggtaacctgctaattcaactcacaggagcagttttggatattatatcctgctacgtaccatattgatagcaatgccccaactacaatccaatccctgcagacactcaaatcatgggaggctgaaagcggcatgtttcctttttgttcaatgtacaaagtactcactgcacctcccggcgccccctgtcggacagatgtagaaagcgtgtatctgaagaaaatccggcaggcagatgcggttggtgcgtgcattttcactggcagaagcaacgtccgcaggaaacccagctggaaagtggttcggcgattttgacagatcgatcagagaacccggagatgattgtgcagcagcaactagaaagtagcaagtgtgtgctgccgaagttgccagaagcgatttcccaaccagagttggcgctcaatgttttcttagcagcgccgatttcctccccacctgaacaaggtgtgcttgcggcatcatctgtcgctgtatccaacttggaacacaagcaagcatgtactatattatatatactaagctgcgacagaatggtccgccggaaaatgacgtgcaggtgagcaggtcccagaatggtccgttgcaccttagccgtatgacgacgtaaaaaaaatatatgcatcgtttcaggttgggatgtgttaaaagtacgaaaatgtaaatgaaataacagaaaaaagacgaatgaacgcaagcaataatcggaagaactgaaaggttttgtgtttgtattgatctgagcaacg

SEQ ID NO: 34326 - DNA, 2573 bp, Zea Mays
ctcctccctctccagtcccgttgcacttcctcggtcccctccttcactccccccacccccaccaatggcgtctcctcgccgccgctccctcccactccgcttcctcatcttcatccctgcccccctcttcctagtcctcctcttccaccgctcctctcattctaccgccccgcttctccacaccgcaggctctggctccggccccagctctgatccccgccgcttctccctcctcatcaagctcctcgcctacgaccggccggccgcgtttcgccgctgcctccgctctctcgccgcagctgactacgatggggaccgcgtcgcgctccacgtcctcctcgaccaccgcccgcccaactcctcgttgccccccctcgccacgtcgcacgagatccttgacttcgtcgatgcgttcccgtggccgcacggagagaagcgcgtgcactaccgcgcctccaacgcggggctccaggcgcagtggatagaggcatggtggcctggctccgacgacgagttcgccttcgtcgtcgaggacgacctccaggtctcgccgctctactacaagttcctgaagcggctggtcctgaggtactactacgaccgcgagaactacagcccctacctgttcggcgcgtcgctccagcgccctcggttcgtcgcaggtaaacatggaaacaagatacagctggatagcgagactcggcttttcttgtatcagatggtaggcacgtggggtcaacttctctttccaaaaccatggaaagaatttcgattatggtatgatgaccacaaagccaaaggactcaaacctattctccaaggcatgaaaactacagggtggtataagaagatgggtgagagaatatggactccttggttcgttaaattcgtccactcacgtggatacttcaatatatacacaaacttcctgaaggaaagggccctgagcgtctcccatagggatgcaggtgtgaactacgagaaaagtgttgggccagattctactttgttggatgggaagaatcttgatttcaatttatgggaactgcagcctttaaagaagctaaagtggtatgatttctgcttcaatgaagctcttccagggagaattgttagaaaaaatagtgaactcggttctatgctcaaatccctgcaattaaaaagtactgttgttctcgtaactctgtactcaatagaagagagatttgcaagaaacttgatttgccatcttgacaaggcaggcatgaagaatactattttccttggtgacaattcagagtttctggatgaccttgctcatagaggatatcctgtcattgatggcgtcaattttcttcagagtatcagattgagtagtttgcagggctctgacggttttgttcaggaaacattggttatatcttatgtgataaaagcttgcctggacctgggatataatctatggctactaaatggaaatatgatttcacttggcaataagttgatcgagccatcagatcagtctgttgacttctttactgcagatgaagggttgatgtttataaggagctcgctagacatgaaaaacaaatggaatgaacttgccatgtcgagagtgaaagcgatgtgtacatctagtgatctgtctgtttccatcaaacagaagagttttgtccatatgctaactgaagtgatggcgagcagtgctggtgttaggctgggaaagctggatgaggctatgagagttattgagttagggcctaacacctcaaacagatcaatattagaagacaaaagtaatgtgcttttctggtctcgcagtagggcttcagattcagttcaaaagcaacttgaaaatatggatttatggttggttgactcagattcgtcttgtagttctgttgtttgtcaccaaaagcagaagtagccaggttgttttggcacatcacttttgcttcactgagaacaaaaatggtgccatcataggggatccatgcacctcccggcgccccctgtcggacagatgtagaaagcgtgtatctgaagaaaatccggcaggcagatgcggttggtgcgtgcattttcactggcagaagcaacgtccgcaggaaacccagctggaaagtggttcggcgattttgacagatcgatcagagaacccggagatgattgtgcagcagcaactagaaagtagcaagtgtgtgctgccgaagttgccagaagcgatttcccaaccagagttggcgctcaatgttttcttagcagcgccgatttcctccccacctgaacaaggtgtgcttgcggcatcatctgtcgctgtatccaacttggaacacaagcaagcatgtactatattatatatactaagctgcgacagaatggtccgccggaaaatgacgtgcaggtgagcaggtcccagaatggtccgttgcaccttagccgtatgacgacgtaaaaaaaatatatgcatcgtttcaggttgggatgtgttaaaagtacgaaaatgtaaatgaaataacagaaaaaagacgaatgaacgcaagcaataatcggaagaactgaaaggttttgtgtttgtattgatctgagcaacg

SEQ ID NO: 34327 - DNA, 3060 bp, Zea Mays
ctcctccctctccagtcccgttgcacttcctcggtcccctccttcactccccccacccccaccaatggcgtctcctcgccgccgctccctcccactccgcttcctcatcttcatccctgcccccctcttcctagtcctcctcttccaccgctcctctcattctaccgccccgcttctccacaccgcaggctctggctccggccccagctctgatccccgccgcttctccctcctcatcaagctcctcgcctacgaccggccggccgcgtttcgccgctgcctccgctctctcgccgcagctgactacgatggggaccgcgtcgcgctccacgtcctcctcgaccaccgcccgcccaactcctcgttgccccccctcgccacgtcgcacgagatccttgacttcgtcgatgcgttcccgtggccgcacggagagaagcgcgtgcactaccgcgcctccaacgcggggctccaggcgcagtggatagaggcatggtggcctggctccgacgacgagttcgccttcgtcgtcgaggacgacctccaggtctcgccgctctactacaagttcctgaagcggctggtcctgaggtactactacgaccgcgagaactacagcccctacctgttcggcgcgtcgctccagcgccctcggttcgtcgcaggtaaacatggaaacaagatacagctggatagcgagactcggcttttcttgtatcagatggtaggcacgtggggtcaacttctctttccaaaaccatggaaagaatttcgattatggtatgatgaccacaaagccaaaggactcaaacctattctccaaggcatgaaaactacagggtggtataagaagatgggtgagagaatatggactccttgggatgcaggtgtgaactacgagaaaagtgttgggccagattctactttgttggatgggaagaatcttgatttcaatttatgggaactgcagcctttaaagaagctaaagtggtatgatttctgcttcaatgaagctcttccagggagaattgttagaaaaaatagtgaactcggttctatgctcaaatccctgcaattaaaaagtactgttgttctcgtaactctgtactcaatagaagagagatttgcaagaaacttgatttgccatcttgacaaggcaggcatgaagaatactattttccttggtgacaattcagagtttctggatgaccttgctcatagaggatatcctgtcattgatggcgtcaattttcttcagagtatcagattgagtagtttgcagggctctgacggttttgttcaggaaacattggttatatcttatgtgataaaagcttgcctggacctgggatataatctatggctactaaatggaaatatgatttcacttggcaataagttgatcgagccatcagatcagtctgttgacttctttactgcagatgaagggttgatgtttataaggagctcgctagacatgaaaaacaaatggaatgaacttgccatgtcgagagtgaaagcgatgtgtacatctagtgatctgtctgtttccatcaaacagaagagttttgtccatatgctaactgaagtgatggcgagcagtgctggtgttaggctgggaaagctggatgaggctatgagagttattgagttagggcctaacacctcaaacagatcaatattagaagacaaaagtaatgtgcttttctggtctcgcagtagggcttcagattcagttcaaaagcaacttgaaaatatggatttatggttggttgactcagattcgtcttgtagttctgttgtttgtcaccaaaagcagaagtagccaggttgttttggcacatcacttttgcttcactgagaacaaaaatggtgccatcataggggatccatggtaaccagctaagtggcactaatatattttccaaaaatcatataatgacatgtctttagatgcatgaggggaatcagccatattgtttgatatttgtagattatgcgatgaagctgttcgatcaaatgtctgtttctgaattatgattacagttagctatgccaccacagataaccatcttggagttctgctcttgccatgaatgaattttgtgctgaacacggctatagttttgaggttctgaatacttggatccttttttggtattgtgagggctaacgaagtcttcagttaggtaacctgctaattcaactcacaggagcagttttggatattatatcctgctacgtaccatattgatagcaatgccccaactacaatccaatccctgcagacactcaaatcatgggaggctgaaagcggcatgtttcctttttgttcaatgtacaaagtactcactggtctgtactctcattctgcaccaacgcaatgttgtctgtgttgaaagctgtttaatcatgaacatgtggcacgacaaaatctgccagatatgcgtatagctaactagaatcacctcccggcgccccctgtcggacagatgtagaaagcgtgtatctgaagaaaatccggcaggcagatgcggttggtgcgtgcattttcactggcagaagcaacgtccgcaggaaacccagctggaaagtggttcggcgattttgacagatcgatcagagaacccggagatgattgtgcagcagcaactagaaagtagcaagtgtgtgctgccgaagttgccagaagcgatttcccaaccagagttggcgctcaatgttttcttagcagcgccgatttcctccccacctgaacaaggtgtgcttgcggcatcatctgtcgctgtatccaacttggaacacaagcaagcatgtactatattatatatactaagctgcgacagaatggtccgccggaaaatgacgtgcaggtgagcaggtcccagaatggtccgttgcaccttagccgtatgacgacgtaaaaaaaatatatgcatcgtttcaggttgggatgtgttaaaagtacgaaaatgtaaatgaaataacagaaaaaagacgaatgaacgcaagcaataatcggaagaactgaaaggttttgtgtttgtattgatctgagcaacg

SEQ ID NO: 34328 - DNA, 3039 bp, Zea Mays
cccaactccgtcgatccgcctcctcctccctctccagtcccgttgcacttcctcggtcccctccttcactccccccacccccaccaatggcgtctcctcgccgccgctccctcccactccgcttcctcatcttcatccctgcccccctcttcctagtcctcctcttccaccgctcctctcattctaccgccccgcttctccacaccgcaggctctggctccggccccagctctgatccccgccgcttctccctcctcatcaagctcctcgcctacgaccggccggccgcgtttcgccgctgcctccgctctctcgccgcagctgactacgatggggaccgcgtcgcgctccacgtcctcctcgaccaccgcccgcccaactcctcgttgccccccctcgccacgtcgcacgagatccttgacttcgtcgatgcgttcccgtggccgcacggagagaagcgcgtgcactaccgcgcctccaacgcggggctccaggcgcagtggatagaggcatggtggcctggctccgacgacgagttcgccttcgtcgtcgaggacgacctccaggtctcgccgctctactacaagttcctgaagcggctggtcctgaggtactactacgaccgcgagaactacagcccctacctgttcggcgcgtcgctccagcgccctcggttcgtcgcaggtaaacatggaaacaagatacagctggatagcgagactcggcttttcttgtatcagatggtaggcacgtggggtcaacttctctttccaaaaccatggaaagaatttcgattatggtatgatgaccacaaagccaaaggactcaaacctattctccaaggcatgaaaactacagggtggtataagaagatgggtgagagaatatggactccttggttcgttaaattcgtccactcacgtggatacttcaatatatacacaaacttcctgaaggaaagggccctgagcgtctcccatagggatgcaggtgtgaactacgagaaaagtgttgggccagattctactttgttggatgggaagaatcttgatttcaatttatgggaactgcagcctttaaagaagctaaagtggtatgatttctgcttcaatgaagctcttccagggagaattgttagaaaaaatagtgaactcggttctatgctcaaatccctgcaattaaaaagtactgttgttctcgtaactctgtactcaatagaagagagatttgcaagaaacttgatttgccatcttgacaaggcaggcatgaagaatactattttccttggtgacaattcagagtttctggatgaccttgctcatagaggatatcctgtcattgatggcgtcaattttcttcagagtatcagattgagtagtttgcagggctctgacggttttgttcaggaaacattggttatatcttatgtgataaaagcttgcctggacctgggatataatctatggctactaaatggaaatatgatttcacttggcaataagttgatcgagccatcagatcagtctgttgacttctttactgcagatgaagggttgatgtttataaggagctcgctagacatgaaaaacaaatggaatgaacttgccatgtcgagagtgaaagcgatgtgtacatctagtgatctgtctgtttccatcaaacagaagagttttgtccatatgctaactgaagtgatggcgagcagtgctggtgttaggctgggaaagctggatgaggctatgagagttattgagttagggcctaacacctcaaacagatcaatattagaagacaaaagtaatgtgcttttctggtctcgcagtagggcttcagattcagttcaaaagcaacttgaaaatatggatttatggttggttgactcagattcgtcttgtagttctgttgtttgtcaccaaaagcagaagtagccaggttgttttggcacatcacttttgcttcactgagaacaaaaatggtgccatcataggggatccatggtaaccagctaagtggcactaatatattttccaaaaatcatataatgacatgtctttagatgcatgaggggaatcagccatattgtttgatatttgtagattatgcgatgaagctgttcgatcaaatgtctgtttctgaattatgattacagttagctatgccaccacagataaccatcttggagttctgctcttgccatgaatgaattttgtgctgaacacggctatagttttgaggttctgaatacttggatccttttttggtattgtgagggctaacgaagtcttcagttaggtaacctgctaattcaactcacaggagcagttttggatattatatcctgctacgtaccatattgatagcaatgccccaactacaatccaatccctgcagacactcaaatcatgggaggctgaaagcggcatgtttcctttttgttcaatcacctcccggcgccccctgtcggacagatgtagaaagcgtgtatctgaagaaaatccggcaggcagatgcggttggtgcgtgcattttcactggcagaagcaacgtccgcaggaaacccagctggaaagtggttcggcgattttgacagatcgatcagagaacccggagatgattgtgcagcagcaactagaaagtagcaagtgtgtgctgccgaagttgccagaagcgatttcccaaccagagttggcgctcaatgttttcttagcagcgccgatttcctccccacctgaacaaggtgtgcttgcggcatcatctgtcgctgtatccaacttggaacacaagcaagcatgtactatattatatatactaagctgcgacagaatggtccgccggaaaatgacgtgcaggtgagcaggtcccagaatggtccgttgcaccttagccgtatgacgacgtaaaaaaaatatatgcatcgtttcaggttgggatgtgttaaaagtacgaaaatgtaaatgaaataacagaaaaaagacgaatgaacgcaagcaataatcggaagaactgaaaggttttgtgtttgtattgatctgagcaacg

SEQ ID NO: 34329 - DNA, 2998 bp, Zea Mays
agtaaaagtaagtaaacaaacaagctagtagtaaatattctactcaatctacaataaaggatgccatggcaggtccttgccaaaaaatataataggataaacaaagatgtcaggttaactaactaactatggatcttcaggttcgtcaagccctaattaatactaacttgtgtagaagtaggaacagaggttattgctaggtggaatccgcgcattgtaaaaatcacctgactcctaactaggaggggaatataaatccaacaagagcacaaggaacacactgtggcaagcacaagcttggggggcgggccggtacagagcactgcctaggccgctgttgcacattttgcacgtctcatctgcttgtccatttccatccaggtcccccagggcaacaactgtgcaccgctcgctgccttctctaccgtgaccgagagggtgagagctcccagcccttcctcctgtagccaagatatatacctaaaggttgaacaagcagcagcagaggcaaagccgttagccaatctgctgttgcgtgttgcaccgatcaacgtcggttcccagcgcttgctcgtcaagcgtgtcctgctgctgttctctgctcctgcttgccgcgagagctcctctcgctcatctacccaaggtcctctcggcgccgagatgtccgacagcaacgacttcgtcgagctgctatgggagaacggccaggcggtggtgcacgggaggaggaagcagcatccccaggccgccttcccgcccttcacctgcggcgcggccagcagcagtagagctcaagaaaaccagccgggtactaccgacccggtctcgctgttcaagacgggaggcctcttcgccgacttctcgtccggcctagacgccgcccgtggcaacggtgaccttgacgacaccgtgccctggatccactgccccatcgtcgaggaagacagcgccgcacccgcacctgccctcgcggagggctacagcccagatttcttctcggagctccatgcagcggcgttagcagcggcggcggcagagacgaacctcagccctctgccaccaccggtccagcacaacagaagcaccccggttgccaccaccagcagaggaccagaaccctcgaaggaagccccgcgcataccagtaccaggtccaggcagcaggcccgagccacaatctgagttcgcggccaccaggaaacctcggccggagagcggtggagagggattgatgaacttctccctcttctctaggcctgcagccttggtccgggcaagcctacagaggccaccgccaccgcagacaggcactgacaaggtgtccaatgtcaccacgagcacccgcgtggagtcgacggttctacagtcggctagtgggccaagaatcgcccctgtgttcacggaccagaggacggcgtggtcacaatccaaggaggtgcggttttcatgcgcaccagcgctggcggctggtaacctgcaccaggatatgcctctgggaagacctggcaacaacatgactccccaggggaaaatggagaccaaaaaggcttgtgaggttgcagtcgctactccatcgctctgctccggcaatggcgagtcctggcgcgaacaaaagaggaagagtcaggccgaatgttctgcaagtcaagacgatgatcttgatgatgagtccggtgggatgcgaggatcaggcggcagaggtacgaagcgcagccgcaccgcggaggtgcacaatttgtccgaaaggaggagaagggacaggatcaatgagaaaatgcgcgccctgcaagagctcatccccaactgcaacaaggcatttggtaaatcggtagcaacagatgcatcacctttcttgcagattgacaaagcctccatgctggatgaagcgatcgagtacctcaaaaccctccagcttcaagttcagatgatggccatgggaagtggactgtgcattcctcccatgctgctgccgcgagccatgcagctgcaaattccttcaattgctcatttccatcatctcggcatgggattgggttatgggatgggtgtcctcgatatgaacagcacagcggcagttccatttcagcccatccctggtgctcactatacttgtccgatgatcccaggcacgccaccacaaggtcttggaattggaatgcctggcacaaacacgatgccagtgtttggactccctgggcaagcaatccatccctcagcgtctagcgtacagccattcccatcgttggcgggtcttcctgttaggccaaacctggcacctcaagtcccagccgtcatggctaacatggtgcaggagcaacagcaaggcgtagcgactcagcagcagcagagtctgaataatgaagctcaacagaaagcaaataccggagatccacaaatactacaaaaatagatgaagagatcttcgccagtaatcagtttctggatggtggtggcaacaggactaatactatagggagaaatgaggctgaaacataaaaacggtcagcaagtgccagtgtgtaacctgactcgagctaaacttgacacaaatcatggaacttggcagagcgttattatcctaatagataacatggctgatgattttcaggtctcgactaacaagctgcaggtgtgaatatcagcaccaactcatcatggaagagcttaacgagtttcatgattcacgaagcagatctatcacttgaaaaaggtccaatcaatcaagatggatttggtggcgggatgtctagcttagcgagctaagatgctccaaagttttgtgtaaaatgtagatggaaccttgttacaagtaacatttcttggcagcgatgccgttttcaggtgttttttttttttgttgcttcactgaagttttcttgagtcaatatatcttattttcccagaccttaagtgatcatatgcacaaagatatctgtgtggctctgctttaactctatctcttcacaaataataatgagctaataactgttcagagctgc

SEQ ID NO: 34330 - DNA, 2757 bp, Zea Mays
agtaaaagtaagtaaacaaacaagctagtagtaaatattctactcaatctacaataaaggatgccatggcaggtccttgccaaaaaatataataggataaacaaagatgtcaggttaactaactaactatggatcttcaggtcccccagggcaacaactgtgcaccgctcgctgccttctctaccgtgaccgagagggtgagagctcccagcccttcctcctgtagccaagatatatacctaaaggttgaacaagcagcagcagaggcaaagccgttagccaatctgctgttgcgtgttgcaccgatcaacgtcggttcccagcgcttgctcgtcaagcgtgtcctgctgctgttctctgctcctgcttgccgcgagagctcctctcgctcatctacccaaggtcctctcggcgccgagatgtccgacagcaacgacttcgtcgagctgctatgggagaacggccaggcggtggtgcacgggaggaggaagcagcatccccaggccgccttcccgcccttcacctgcggcgcggccagcagcagtagagctcaagaaaaccagccgggtactaccgacccggtctcgctgttcaagacgggaggcctcttcgccgacttctcgtccggcctagacgccgcccgtggcaacggtgaccttgacgacaccgtgccctggatccactgccccatcgtcgaggaagacagcgccgcacccgcacctgccctcgcggagggctacagcccagatttcttctcggagctccatgcagcggcgttagcagcggcggcggcagagacgaacctcagccctctgccaccaccggtccagcacaacagaagcaccccggttgccaccaccagcagaggaccagaaccctcgaaggaagccccgcgcataccagtaccaggtccaggcagcaggcccgagccacaatctgagttcgcggccaccaggaaacctcggccggagagcggtggagagggattgatgaacttctccctcttctctaggcctgcagccttggtccgggcaagcctacagaggccaccgccaccgcagacaggcactgacaaggtgtccaatgtcaccacgagcacccgcgtggagtcgacggttctacagtcggctagtgggccaagaatcgcccctgtgttcacggaccagaggacggcgtggtcacaatccaaggaggtgcggttttcatgcgcaccagcgctggcggctggtaacctgcaccaggatatgcctctgggaagacctggcaacaacatgactccccaggggaaaatggagaccaaaaaggcttgtgaggttgcagtcgctactccatcgctctgctccggcaatggcgagtcctggcgcgaacaaaagaggaagagtcaggccgaatgttctgcaagtcaagacgatgatcttgatgatgagtccggtgggatgcgaggatcaggcggcagaggtacgaagcgcagccgcaccgcggaggtgcacaatttgtccgaaaggaggagaagggacaggatcaatgagaaaatgcgcgccctgcaagagctcatccccaactgcaacaaggcatttggtaaatcggtagcaacagatgcatcacctttcttgcagattgacaaagcctccatgctggatgaagcgatcgagtacctcaaaaccctccagcttcaagttcagatgatggccatgggaagtggactgtgcattcctcccatgctgctgccgcgagccatgcagctgcaaattccttcaattgctcatttccatcatctcggcatgggattgggttatgggatgggtgtcctcgatatgaacagcacagcggcagttccatttcagcccatccctggtgctcactatacttgtccgatgatcccaggcacgccaccacaaggtcttggaattggaatgcctggcacaaacacgatgccagtgtttggactccctgggcaagcaatccatccctcagcgtctagcgtacagccattcccatcgttggcgggtcttcctgttaggccaaacctggcacctcaagtcccagccgtcatggctaacatggtgcaggagcaacagcaaggcgtagcgactcagcagcagcagagtctgaataatgaagctcaacagaaagcaaataccggagatccacaaatactacaaaaatagatgaagagatcttcgccagtaatcagtttctggatggtggtggcaacaggactaatactatagggagaaatgaggctgaaacataaaaacggtcagcaagtgccagtgtgtaacctgactcgagctaaacttgacacaaatcatggaacttggcagagcgttattatcctaatagataacatggctgatgattttcaggtctcgactaacaagctgcaggtgtgaatatcagcaccaactcatcatggaagagcttaacgagtttcatgattcacgaagcagatctatcacttgaaaaaggtccaatcaatcaagatggatttggtggcgggatgtctagcttagcgagctaagatgctccaaagttttgtgtaaaatgtagatggaaccttgttacaagtaacatttcttggcagcgatgccgttttcaggtgttttttttttttgttgcttcactgaagttttcttgagtcaatatatcttattttcccagaccttaagtgatcatatgcacaaagatatctgtgtggctctgctttaactctatctcttcacaaataataatgagctaataactgttcagagctgc

SEQ ID NO: 34331 - DNA, 3054 bp, Zea Mays
tctgcatcctgaaagatctttcatacaaacccctagtgatagtaaaagtaagtaaacaaacaagctagtagtaaatattctactcaatctacaataaaggatgccatggcaggtccttgccaaaaaatataataggataaacaaagatgtcaggttaactaactaactatggatcttcaggtcccccagggcaacaactgtgcaccgctcgctgccttctctaccgtgaccgagagggtgagagctcccagcccttcctcctgtagccaagatatatacctaaaggttgaacaagcagcagcagaggcaaagccgttagccaatctgctgttgcgtgttgcaccgatcaacgtcggttcccagcgcttgctcgtcaagcgtgtcctgctgctgttctctgctcctgcttgccgcgagagctcctctcgctcatctacccaaggtccgacagcaacgacttcgtcgagctgctatgggagaacggccaggcggtggtgcacgggaggaggaagcagcatccccaggccgccttcccgcccttcacctgcggcgcggccagcagcagtagagctcaagaaaaccagccgggtactaccgacccggtctcgctgttcaagacgggaggcctcttcgccgacttctcgtccggcctagacgccgcccgtggcaacggtgaccttgacgacaccgtgccctggatccactgccccatcgtcgaggaagacagcgccgcacccgcacctgccctcgcggagggctacagcccagatttcttctcggagctccatgcagcggcgttagcagcggcggcggcagagacgaacctcagccctctgccaccaccggtccagcacaacagaagcaccccggttgccaccaccagcagaggaccagaaccctcgaaggaagccccgcgcataccagtaccaggtccaggcagcaggcccgagccacaatctgagttcgcggccaccaggaaacctcggccggagagcggtggagagggattgatgaacttctccctcttctctaggcctgcagccttggtccgggcaagcctacagaggccaccgccaccgcagacaggcactgacaaggtgtccaatgtcaccacgagcacccgcgtggagtcgacggttctacagtcggctagtgggccaagaatcgcccctgtgttcacggaccagaggacggcgtggtcacaatccaaggaggtgcggttttcatgcgcaccagcgctggcggctggtaacctgcaccaggatatgcctctgggaagacctggcaacaacatgactccccaggggaaaatggagaccaaaaaggcttgtgaggttgcagtcgctactccatcgctctgctccggcaatggcgagtcctggcgcgaacaaaagaggaagagtcaggccgaatgttctgcaagtcaagacgatgatcttgatgatgagtccggtgggatgcgaggatcaggcggcagaggtacgaagcgcagccgcaccgcggaggtgcacaatttgtccgaaaggaggagaagggacaggatcaatgagaaaatgcgcgccctgcaagagctcatccccaactgcaacaaggtacgacgatccatttctaccatcttttaattaggccccgtttgatctgattagtccctctattttagtcacatttagtccataaattaccaaatggtaggacttaaacagagactaaattgttctagtctcttaagaggtgactaaaaaaactaaaccatataaattctaccttttgcccttcctttatttcagttgcactaacgacgggcgaatgctacgagattgacaaagcctccatgctggatgaagcgatcgagtacctcaaaaccctccagcttcaagttcaggtgacactaaaaccacctaattggaaatgtagcacggttctttcagatagatgcaaacataaatgcactgacaagatggtggctatctgacacgcagatgatggccatgggaagtggactgtgcattcctcccatgctgctgccgcgagccatgcagctgcaaattccttcaattgctcatttccatcatctcggcatgggattgggttatgggatgggtgtcctcgatatgaacagcacagcggcagttccatttcagcccatccctggtgctcactatacttgtccgatgatcccaggcacgccaccacaaggtcttggaattggaatgcctggcacaaacacgatgccagtgtttggactccctgggcaagcaatccatccctcagcgtctagcgtacagccattcccatcgttggcgggtcttcctgttaggccaaacctggcacctcaagtcccagccgtcatggctaacatggtgcaggagcaacagcaaggcgtagcgactcagcagcagcagagtctgaataatgaagctcaacagaaagcaaataccggagatccacaaatactacaaaaatagatgaagagatcttcgccagtaatcagtttctggatggtggtggcaacaggactaatactatagggagaaatgaggctgaaacataaaaacggtcagcaagtgccagtgtgtaacctgactcgagctaaacttgacacaaatcatggaacttggcagagcgttattatcctaatagataacatggctgatgattttcaggtctcgactaacaagctgcaggtgtgaatatcagcaccaactcatcatggaagagcttaacgagtttcatgattcacgaagcagatctatcacttgaaaaaggtccaatcaatcaagatggatttggtggcgggatgtctagcttagcgagctaagatgctccaaagttttgtgtaaaatgtagatggaaccttgttacaagtaacatttcttggcagcgatgccgttttcaggtgttttttttttttgttgcttcactgaagttttcttgagtcaatatatcttattttcccagaccttaagtgatcatatgcacaaagatatctgtgtggctctgctttaactctatctcttcacaaataataatgagctaataactgttcagagctgc

SEQ ID NO: 34332 - DNA, 2683 bp, Zea Mays
cctatgcctactgtataaattcattctgcatcctgaaagatctttcatacaaacccctagtgatagtaaaagtaagtaaacaaacaagctagtagtaaatattctactcaatctacaataaaggatgccatggcaggtccttgccaaaaaatataataggataaacaaagatgtcaggttaactaactaactatggatcttcaggtcccccagggcaacaactgtgcaccgctcgctgccttctctaccgtgaccgagagggtgagagctcccagcccttcctcctgtagccaagatatatacctaaaggttgaacaagcagcagcagaggcaaagccgttagccaatctgctgttgcgtgttgcaccgatcaacgtcggttcccagcgcttgctcgtcaagcgtgtcctgctgctgttctctgctcctgcttgccgcgagagctcctctcgctcatctacccaaggtcctctcggcgccgagatgtccgacagcaacgacttcgtcgagctgctatgggagaacggccaggcggtggtgcacgggaggaggaagcagcatccccaggccgccttcccgcccttcacctgcggcgcggccagcagcagtagagctcaagaaaaccagccgggtactaccgacccggtctcgctgttcaagacgggaggcctcttcgccgacttctcgtccggcctagacgccgcccgtggcaacggtgaccttgacgacaccgtgccctggatccactgccccatcgtcgaggaagacagcgccgcacccgcacctgccctcgcggagggctacagcccagatttcttctcggagctccatgcagcggcgttagcagcggcggcggcagagacgaacctcagccctctgccaccaccggtccagcacaacagaagcaccccggttgccaccaccagcagaggaccagaaccctcgaaggaagccccgcgcataccagtaccaggtccaggcagcaggcccgagccacaatctgagttcgcggccaccaggaaacctcggccggagagcggtggagagggattgatgaacttctccctcttctctaggcctgcagccttggtccgggcaagcctacagaggccaccgccaccgcagacaggcactgacaaggtgtccaatgtcaccacgagcacccgcgtggagtcgacggttctacagtcggctagtgggccaagaatcgcccctgtgttcacggaccagaggacggcgtggtcacaatccaaggaggtgcggttttcatgcgcaccagcgctggcggctggtaacctgcaccaggatatgcctctgggaagacctggcaacaacatgactccccaggggaaaatggagaccaaaaaggcttgtgaggttgcagtcgctactccatcgctctgctccggcaatggcgagtcctggcgcgaacaaaagaggaagagtcaggccgaatgttctgcaagtcaagacgatgatcttgatgatgagtccggtgggatgcgaggatcaggcggcagaggtacgaagcgcagccgcaccgcggaggtgcacaatttgtccgaaaggaggagaagggacaggatcaatgagaaaatgcgcgccctgcaagagctcatccccaactgcaacaagattgacaaagcctccatgctggatgaagcgatcgagtacctcaaaaccctccagcttcaagttcagatgatggccatgggaagtggactgtgcattcctcccatgctgctgccgcgagccatgcagctgcaaattccttcaattgctcatttccatcatctcggcatgggattgggttatgggatgggtgtcctcgatatgaacagcacagcggcagttccatttcagcccatccctggtgctcactatacttgtccgatgatcccaggcacgccaccacaaggtcttggaattggaatgcctggcacaaacacgatgccagtgtttggactccctgggcaagcaatccatccctcagcgtctagcgtacagccattcccatcgttggcgggtcttcctgttaggccaaacctggcacctcaagtcccagccgtcatggctaacatggtgcaggagcaacagcaaggcgtagcgactcagcagcagcagagtctgaataatgaagctcaacagaaagcaaataccggagatccacaaatactacaaaaatagatgaagagatcttcgccagtaatcagtttctggatggtggtggcaacaggactaatactatagggagaaatgaggctgaaacataaaaacggtcagcaagtgccagtctcgactaacaagctgcaggtgtgaatatcagcaccaactcatcatggaagagcttaacgagtttcatgattcacgaagcagatctatcacttgaaaaaggtccaatcaatcaagatggatttggtggcgggatgtctagcttagcgagctaagatgctccaaagttttgtgtaaaatgtagatggaaccttgttacaagtaacatttcttggcagcgatgccgttttcaggtgttttttttttttgttgcttcactgaagttttcttgagtcaatatatcttattttcccagaccttaagtgatcatatgcacaaagatatctgtgtggctctgctttaactctatctcttcacaaataataatgagctaataactgttcagagctgc

SEQ ID NO: 34333 - DNA, 2676 bp, Zea Mays
cgtagatttcatcctatgcctactgtataaattcattctgcatcctgaaagatctttcatacaaacccctagtgatagtaaaagtaagtaaacaaacaagctagtagtaaatattctactcaatctacaataaaggatgccatggcaggtccttgccaaaaaatataataggataaacaaagatgtcaggttaactaactaactatggatcttcaggtcccccagggcaacaactgtgcaccgctcgctgccttctctaccgtgaccgagagggtgagagctcccagcccttcctcctgtagccaagatatatacctaaaggttgaacaagcagcagcagaggcaaagccgttagccaatctgctgttgcgtgttgcaccgatcaacgtcggttcccagcgcttgctcgtcaagcgtgtcctgctgctgttctctgctcctgcttgccgcgagagctcctctcgctcatctacccaaggtccgacagcaacgacttcgtcgagctgctatgggagaacggccaggcggtggtgcacgggaggaggaagcagcatccccaggccgccttcccgcccttcacctgcggcgcggccagcagcagtagagctcaagaaaaccagccgggtactaccgacccggtctcgctgttcaagacgggaggcctcttcgccgacttctcgtccggcctagacgccgcccgtggcaacggtgaccttgacgacaccgtgccctggatccactgccccatcgtcgaggaagacagcgccgcacccgcacctgccctcgcggagggctacagcccagatttcttctcggagctccatgcagcggcgttagcagcggcggcggcagagacgaacctcagccctctgccaccaccggtccagcacaacagaagcaccccggttgccaccaccagcagaggaccagaaccctcgaaggaagccccgcgcataccagtaccaggtccaggcagcaggcccgagccacaatctgagttcgcggccaccaggaaacctcggccggagagcggtggagagggattgatgaacttctccctcttctctaggcctgcagccttggtccgggcaagcctacagaggccaccgccaccgcagacaggcactgacaaggtgtccaatgtcaccacgagcacccgcgtggagtcgacggttctacagtcggctagtgggccaagaatcgcccctgtgttcacggaccagaggacggcgtggtcacaatccaaggaggtgcggttttcatgcgcaccagcgctggcggctggtaacctgcaccaggatatgcctctgggaagacctggcaacaacatgactccccaggggaaaatggagaccaaaaaggcttgtgaggttgcagtcgctactccatcgctctgctccggcaatggcgagtcctggcgcgaacaaaagaggaagagtcaggccgaatgttctgcaagtcaagacgatgatcttgatgatgagtccggtgggatgcgaggatcaggcggcagaggtacgaagcgcagccgcaccgcggaggtgcacaatttgtccgaaaggaggagaagggacaggatcaatgagaaaatgcgcgccctgcaagagctcatccccaactgcaacaagattgacaaagcctccatgctggatgaagcgatcgagtacctcaaaaccctccagcttcaagttcagatgatggccatgggaagtggactgtgcattcctcccatgctgctgccgcgagccatgcagctgcaaattccttcaattgctcatttccatcatctcggcatgggattgggttatgggatgggtgtcctcgatatgaacagcacagcggcagttccatttcagcccatccctggtgctcactatacttgtccgatgatcccaggcacgccaccacaaggtcttggaattggaatgcctggcacaaacacgatgccagtgtttggactccctgggcaagcaatccatccctcagcgtctagcgtacagccattcccatcgttggcgggtcttcctgttaggccaaacctggcacctcaagtcccagccgtcatggctaacatggtgcaggagcaacagcaaggcgtagcgactcagcagcagcagagtctgaataatgaagctcaacagaaagcaaataccggagatccacaaatactacaaaaatagatgaagagatcttcgccagtaatcagtttctggatggtggtggcaacaggactaatactatagggagaaatgaggctgaaacataaaaacggtcagcaagtgccagtctcgactaacaagctgcaggtgtgaatatcagcaccaactcatcatggaagagcttaacgagtttcatgattcacgaagcagatctatcacttgaaaaaggtccaatcaatcaagatggatttggtggcgggatgtctagcttagcgagctaagatgctccaaagttttgtgtaaaatgtagatggaaccttgttacaagtaacatttcttggcagcgatgccgttttcaggtgttttttttttttgttgcttcactgaagttttcttgagtcaatatatcttattttcccagaccttaagtgatcatatgcacaaagatatctgtgtggctctgctttaactctatctcttcacaaataataatgagctaataactgttcagagctgc

SEQ ID NO: 34334 - DNA, 3091 bp, Zea Mays
atgttgattgctctattcaatcacaacattataaaattgaaatgcgcaaaatcaattaagctcactgtcagcatatttggatctatctcctgtaatgtgccaaatgaagatcagtttgacacattacaccaacaagtccaacagatagtgacaaaatttgagatgaaaaggatcttgaatagcagggctctaataacatgcaaaaaggtgaggcgactcacagagagaatgtctaatgcctccccactatcattttatctaaaaaaggagcaatgggggaaggcagccgcgagaccaggtggacgatttgtgagcaaagggaatggggggaaggctgccatggatggaagggcgcggagggagcgcggctgccatgaagggggagcggggcgcgacagccatggatggaagctttgtgggcgattcgcggcggatttgggagaactaagctgtcatggatggaagcgtgatttgggaggccgagttccctggcactgctgggggagcggggcgcggctgctggattggaagcgtgagcttgcgacctcgcgtgatttgtgggcgattcacggcggatccatcgcggctaccatggatggaagcgtgatttgggagatcgagttccctggcgccaggatgtgtgatttgggagatcgaattccctggcacgaaggttatttgggaaggaccttccctggcacggctgggggagcggggcacggctgccatggattggaagcgaagcagctcacactgtccaatccaatccagcctacagacgatggtattgggcctccagatacgccttctgatgtcctgggctccaggctcaccaacggtcccgtgacaaacctacaggctacagcattgcggttcgctgcacaccacactgccgctccgtcgccgagccgcatgagcacgggaggcggcaccaccttgcgcgagctgacggccctcctctccacgctgcgccgcgcgcgactccaacaccccgctcacgctgcgcagctccacgcccgcctcctcatctctgctggcgcgcgtcctcacccgcacccggtcctcctcacgcagctcgtctccctctacgccgccgcgggccgcctcgccgacgcgctccgcgccttccgcgcccatctacccagcgccaacctgcacacctatgccgtcctcgtctccgccttcgcgcggccgtacccggacctcgcgttctccctcttctcgggctcgcgccgccagctccgccccagcccccatgtcatctccgccgtgctcgccgcatgcgccggcctccagcctctctgcggacgccaggtccacacgtgcgcggccaaggtcgtaccgcccggcgatgtgttcgtctacaccgggatggtcgacgtgtacgccaagggcggggacatggagtcgtccagaaaggtgttcgatgaaatgctgaaccggggcgcggcgtcgtggaacgcgctcctcgttggttacgccaggaacaagatgtgcctcgaagccctgtcggtgttcagggagttggccgcgcaggggcgggaggtgtctctcgatcaggtgagcgtgtcgagtgtgctcagcgcttgcgctgtggcaggggccctgaactatggtcgccaggtacacgcgtgcgctaccaagggatgttgtcacctggaacatcatcattcgtagctgcattcatgacaatcggttcaaggaagcttgtgtgctgttccggtccatggtcaggaacggtaccttgccggatgatgtagcctttgctactgtgttgcaggcatcagcgtgtatgtcggcatgggctataggagcaagcatgcatgcctccgtcgtgaagacagggttcttatacagtgatggcgtcactagctcgctaatcaccatgtattccaaatgtggctgcttggacgatgcacaccgagcatttgtgggggcaaaagatcatctgcatataatgtcctggacggccatgataactgcactgcagcagcatggacatggcatgcaggcaattgatgtatttgagaatatgctagagaatggcattcctcctgaccacatcacatttgtgagtgttctctcttcctgtagccacagcggacttgttgagcaaggacgcaggtacttcgattcgatgactcgagttcataagatcacaccacagaatgagcactatgcgtgcatggttgacatgtttgggcgagcaggccttctaactgaggcaaagcgattcattcaccagatgggacctaagcaagatgcatcagtccttggggcactcctttgggcttgcatgaactgcagggaccttgagatgggtaaggaggttgccaagaagctttttgtgattgagccaggtaataccgggaactatgtcctgcttgctaatatctatacgtcacatggaagattggaggaggcaaaggaggtgcggaggtggatgatgtttcaggagttaaggaaggaaaagggatgcagtttaatcaacaattgagaaccaaatctgtaccttatgaatacttcagcaaagacacaattaaggcaataaggcctactggagtttctgcatactcaagggttcatgggcatccaaggctcccagcagtggaatctgcaaggtatggttcattcgaaccatatacgaagaagtttacttccttattagtgagagcagaagacagaaaatgcagaacagttgtatagtgtttcaaaggtgttgcctacgcacgtccagccgtctccagaaaatgaggaaatagagcagtacagcatctcttgcaagaacttctactgtggtgccatcatgttggatcacatttttttggcagtcagatgagagcctcagggtcaggttaaggttccaagtttgttttcttccacatgagaccttgtttcgatgcacttgtatcaaactcaattcaagtttaaattataaaccaatccactccaacactccaacacacatggatcgagcttcagctctagctccttgccggagccctcccaaataacgtgccaaaaagcagtttcaccctaagagcaggagccaattagaggtcaggagccagagcctgaaaaagtgatgttg

SEQ ID NO: 34335 - DNA, 3197 bp, Zea Mays
atgttgattgctctattcaatcacaacattataaaattgaaatgcgcaaaatcaattaagctcactgtcagcatatttggatctatctcctgtaatgtgccaaatgaagatcagtttgacacattacaccaacaagtccaacagatagtgacaaaatttgagatgaaaaggatcttgaatagcagggctctaataacatgcaaaaaggtgaggcgactcacagagagaatgtctaatgcctccccactatcattttatctaaaaaaggagcaatgggggaaggcagccgcgagaccaggtggacgatttgtgagcaaagggaatggggggaaggctgccatggatggaagggcgcggagggagcgcggctgccatgaagggggagcggggcgcgacagccatggatggaagctttgtgggcgattcgcggcggatttgggagaactaagctgtcatggatggaagcgtgatttgggaggccgagttccctggcactgctgggggagcggggcgcggctgctggattggaagcgtgagcttgcgacctcgcgtgatttgtgggcgattcacggcggatccatcgcggctaccatggatggaagcgtgatttgggagatcgagttccctggcgccaggatgtgtgatttgggagatcgaattccctggcacgaaggttatttgggaaggaccttccctggcacggctgggggagcggggcacggctgccatggattggaagcgaagcagctcacactgtccaatccaatccagcctacagacgatggtattgggcctccagatacgccttctgatgtcctgggctccaggctcaccaacggtcccgtgacaaacctacaggctacagcattgcggttcgctgcacaccacactgccgctccgtcgccgagccgcatgagcacgggaggcggcaccaccttgcgcgagctgacggccctcctctccacgctgcgccgcgcgcgactccaacaccccgctcacgctgcgcagctccacgcccgcctcctcatctctgctggcgcgcgtcctcacccgcacccggtcctcctcacgcagctcgtctccctctacgccgccgcgggccgcctcgccgacgcgctccgcgccttccgcgcccatctacccagcgccaacctgcacacctatgccgtcctcgtctccgccttcgcgcggccgtacccggacctcgcgttctccctcttctcgggctcgcgccgccagctccgccccagcccccatgtcatctccgccgtgctcgccgcatgcgccggcctccagcctctctgcggacgccaggtccacacgtgcgcggccaaggtcgtaccgcccggcgatgtgttcgtctacaccgggatggtcgacgtgtacgccaagggcggggacatggagtcgtccagaaaggtgttcgatgaaatgctgaaccggggcgcggcgtcgtggaacgcgctcctcgttggttacgccaggaacaagatgtgcctcgaagccctgtcggtgttcagggagttggccgcgcaggggcgggaggtgtctctcgatcagggatgttgtcacctggaacatcatcattcgtagctgcattcatgacaatcggttcaaggaagcttgtgtgctgttccggtccatggtcaggaacggtaccttgccggatgatgtagcctttgctactgtgttgcaggcatcagcgtgtatgtcggcatgggctataggagcaagcatgcatgcctccgtcgtgaagacagggttcttatacagtgatggcgtcactagctcgctaatcaccatgtattccaaatgtggctgcttggacgatgcacaccgagcatttgtgggggcaaaagatcatctgcatataatgtcctggacggccatgataactgcactgcagcagcatggacatggcatgcaggcaattgatgtatttgagaatatgctagagaatggcattcctcctgaccacatcacatttgtgagtgttctctcttcctgtagccacagcggacttgttgagcaaggacgcaggtacttcgattcgatgactcgagttcataagatcacaccacagaatgagcactatgcgtgcatggttgacatgtttgggcgagcaggccttctaactgaggcaaagcgattcattcaccagatgggacctaagcaagatgcatcagtccttggggcactcctttgggcttgcatgaactgcagggaccttgagatgggtaaggaggttgccaagaagctttttgtgattgagccaggtaataccgggaactatgtcctgcttgctaatatctatacgtcacatggaagattggaggaggcaaaggaggtgcggaggtggatgatgtttcaggagttaaggaaggaaaagggatgcagtttaatcaacaattgagaaccaaatctgtaccttatgaatacttcagcaaaggtgaggtttctattgtctcaaggatggtacctgcacttgtcaaacataaaagctcgctacctattttatctagacacaattaaggcaataaggcctactggagtttctgcatactcaagggttcatgggcatccaaggctcccagcagtggaatctgcaaggtatggttcattcgaaccatatacgaagaagtttacttccttattagtgagagcagaagacagaaaatgcagaacagttgtatagtgtttcaaaggtgttgcctacgcacgtccagccgtctccagaaaatgaggaaatagagcagtacagcatctcttgcaagaacttctactgtggtgccatcatgttggatcacatttttttggcagtcagatgagagcctcagggtcaggttaaggttccaagtttgttttcttccacatgagaccttgtttcgatgcacttgtatcaaactcaattcaagtttaaattataaaccaatccactccaacactccaacacacatggatcgaggtagaaaaagtgtatctaagtgtgtagatgtttatcccttggcaatattcctgtttgagcttcctcttcttttatccgtggctactcagagttgtatctgtggtagagataaaggaatatgaaacgtgacatagtgtgtagatgtttatttaagctttgtgtctccatgtttctagtttttactaaggtgaaattacctagttctggattttaataccaaacagggagcagg

SEQ ID NO: 34336 - DNA, 865 bp, Zea Mays
gtgcgctcagctctcccacacattcgcatctcctccccggcccgtcgccatgatatatactcgcctcgcatgatgcccagcgccgcccggcgcccgcccgtgcatgattaattaggtcgcgcgctagctgtgcggactgctaggagctagctccatcgtcgtccggttgttattcctccttctcaacacacattgcccgttgccaacatcatccttccagcttcctggccgacgagcagtgccttcatatatacaaacgaaagcatgcaccatcttcggcccgcagaaggacggcggcggcggcggcaagaggtcgcagcaaccaaacccagcgacgatggtacggcacgtcgacgacgccgccgagagggccaagctgcacggggaggtgatggcgtgcgcctacgaagacgtgcaggtcatgtggtccatgctcgaccagacaacaaggattggggatctcagtggcagctcgtgaccgccggcaattgtccgttcatgcattttcctagagccacaaaggtggagatgcagacatggtgtacatagcaaaatatcttctcaccaaacatcccccccccccacccacccacttgctttcttgggccttgaattggaagagctatttgcgccgatcaattgagcccagaaccaagtgcccgttttgtacgtagcaagatttattagcttttcttttggagtttccagctcagttgagagtttgaatcctcagcactcttctctttgaggtactcgattggagtgatgtacattgccacgcaggaaaaactggcatttgtgtcagcccagttaatttttatcggcattcagcacagcccaagaaaattaacgggatatttggttt

SEQ ID NO: 34337 - DNA, 843 bp, Zea Mays
gttttggtgccactacaggggaacgaagctgatggtagattaccttattggttgcccaatacatctgtagtccaaagatgtcgtctccaaagaaacattttcttggagtgttaactgctattttagtcttaccaacacgagtggtgtgatggcaactcttcttgtattcctgtccgttggtttagttggtgctactgatggtataggcttccatttaactgggaaggtagtaaactagagtggcatgccctttgccattggtatttatggatttttctactctgggcattcagtatttccaaacatctaccagtcaatgtctgatcactctaagttccctgtggcactattcatatggtatgcttggctatattcatgtttcggtttaccttgttactgaataatgaatattttttcgcaaggtgtgatggtattttcgcaaggcttctacctgttgcatatggcccttggatagttccttttttgcatttagcatgcaatccattctttgttcttatcccttctaacttcaagtcaccaccactagccgcaatcacattgctttgtttattttccagtgagctagctcttttggcctctaattctttttatctgtgtagtactatattcatccagtcagtagatatgaattctgctctttgaaggatgtgcacagtgcactgctatcttgaacctggcgatattagccagtgcgccgtgagaccaaagaagagtagcatctgtgaagttcatataattgaaagtcaaactcattgggaatggtccacttgaatgttaacgtttgagaagatgtacctaacaactggttgccacctccatggg

SEQ ID NO: 34338 - DNA, 1872 bp, Zea Mays
gacgacgcaggcgaacggctgacgaacctgggaggcccaaatccggcccgtcgcggaccgcctcgagtggcgaccctgatccatcctcaacaggcacgcgcactgtctctctcgtatcactctccattctacctctctcttccccaatccaggccagccaaccctagcgcaccggcgatggcgtcggacccggcccctgacgacgcggccgcggccgtgaatgggcacggcaacgacaacggacacggtaacggcccgtccccgtcgaagcgcccccgggcggtgatctcggaagccgagatccgcgtcgagttcgcacaccacgacgcagccgtggcgcgcgtcaacaacggcagcttcggctgctgcccggcctcggtcctcgccgcgcaggcccactggcagcgcctcttcctcgcgcagcccgacgccttctacttccacgttctccagcagggccttctccgctcgcgcgccgccgtcgccgaggtggtgggcgctggcgacgtctccgaggtctccctcgtcgataacgccaccacggccgccgccatcgtcctgcagcacgcagcctggagcttcgccgagggtcacttcgcgcgcggggatgcggtgctgatgctccactacgcctatggtgcggtcaagaagtccatccacgcgtacgtcgcgcgtgcgggggccaccgtcgtcgaggtgcccctcccattccccgtcgcgtccgccgacgcaatcattgccgagttccgtgctgcgctcgcggtcgccaaggaaggagggcgtagggtcaggctcgcagtcatcgaccacattacctccatgcccagtgtcgtcatcccagtcaaggagctcgtcgccatctgtcgagaagagggcgttgacaaggtatttgttgacgctgcccactctattgggcaggtgcctgtggacgtgcgcgacattggagccgatttctatacaagcaaccttcataagtggttcttttgcccccctgctgtggcctttttgcatactcgcaaggatgacccgatagcctcccaactccatcaccctgttgtttcccatgagtatgggaatgggctgcctatggagagcggatggattggaacacgggattacagtgcccagcttgttgtgtccgaggctatagattttgtgaatcgatttgagggtggaattgaggctatacgaaaccggaatcatgagaaagttattgagatgggtaggatgcttgctgaggcatgggggacttttcttggctcacctccggaactgtgtggtagcatggttatggtggggatgcctggttgccttggtgttgagagtgatgatgatgcaatgagagtgaggacaatgttgagaaaggatttccaggtggaggtgccggtatactacaactcaagaagggtggaaggacaggagatgacaaaggataaaaatggtgatccagtgacagggtatgtgaggatctcacaccaggtttacaatgtcacagaggactatgagagactgagggatgttgtcaataaacttgtttctgaagggttcaccagcagcaagttgcggccttctgagaagcaagaagcttaggtgtaatgaccttccagccaggtagcatccacctgaaggcgctgtggccgactacttaggtgtggaccggatcagcgcagccagtacggcttcgtgatcgtgacgttgaagaatgtagtgtaccgccaggaactgacatgtgttgtatttggcgttcagtgtaagtaacaataatgccctggcatgttgtcttctctcacattttgggagctgctgtaacctcagaataatctggaatataaggatatttacagctgctgtagagcaataaataaataaaaa

SEQ ID NO: 34339 - DNA, 2032 bp, Zea Mays
gttttctacggcctttcggccgtttcgcagtcgatgggccgtgggaccctcgccgcgcccgtccacgcagcagacgacgcaggcgaacggctgacgaacctgggaggcccaaatccggcccgtcgcggaccgcctcgagtggcgaccctgatccatcctcaacaggcacgcgcactgtctctctcgtatcactctccattctacctctctcttccccaatccaggccagccaaccctagcgcaccggcgatggcgtcggacccggcccctgacgacgcggccgcggccgtgaatgggcacggcaacgacaacggacacggtaacggcccgtccccgtcgaagcgcccccgggcggtgatctcggaagccgagatccgcgtcgagttcgcacaccacgacgcagccgtggcgcgcgtcaacaacggcagcttcggctgctgcccggcctcggtcctcgccgcgcaggcccactggcagcgcctcttcctcgcgcagcccgacgccttctacttccacgttctccagcagggccttctccgctcgcgcgccgccgtcgccgaggtggtgggcgctggcgacgtctccgaggtctccctcgtcgataacgccaccacggccgccgccatcgtcctgcagcacgcagcctggagcttcgccgagggtcacttcgcgcgcggggatgcggtgctgatgctccactacgcctatggtgcggtcaagaagtccatccacgcgtacgtcgcgcgtgcgggggccaccgtcgtcgaggtgcccctcccattccccgtcgcgtccgccgacgcaatcattgccgagttccgtgctgcgctcgcggtcgccaaggaaggagggcgtagggtcaggctcgcagtcatcgaccacattacctccatgcccagtgtcgtcatcccagtcaaggagctcgtcgccatctgtcgagaagagggcgttgacaaggtatttgttgacgctgcccactctattgggcaggtgcctgtggacgtgcgcgacattggagccgatttctatacaagcaaccttcataagtggttcttttgcccccctgctgtggcctttttgcatactcgcaaggatgacccgatagcctcccaactccatcaccctgttgtttcccatgagtatgggaatgggctgcctatggagagcggatggattggaacacgggattacagtgcccagcttgttgtgtccgaggctatagattttgtgaatcgatttgagggtggaattgaggctatacgaaaccggaatcatgagaaagttattgagatgggtaggatgcttgctgaggcatgggggacttttcttggctcacctccggaactgtgtggtagcatggttatggtggggatgcctggttgccttggtgttgagagtgatgatgatgcaatgagagtgaggacaatgttgagaaaggatttccaggtggaggtgccggtatactacaactcaagaagggtggaaggacaggagatgacaaaggataaaaatggtgatccagtgacagggtatgtgaggatctcacaccaggtttacaatgtcacagaggactatgagagactgagggatgttgtcaataaacttgtttctgaagggttcaccagcagcaagttgcggccttctgagaagacatagtcccacagcccatagttgaaaagcatgacgcatggatgctcaatttcacacacctattgcttacttcacactgtgacaactatagtgcaagaagcttaggtgtaatgaccttccagccaggtagcatccacctgaaggcgctgtggccgactacttaggtgtggaccggatcagcgcagccagtacggcttcgtgatcgtgacgttgaagaatgtagtgtaccgccaggaactgacatgtgttgtatttggcgttcagtgtaagtaacaataatgccctggcatgttgtcttctctcacattttgggagctgctgtaacctcagaataatctggaatataaggatatttacagctgctgcaataaataaataaaaa

SEQ ID NO: 34340 - DNA, 1633 bp, Zea Mays
tgaattgaactgccaataaataaattgtcgaactgtatgtacagtaccgtcaaaaagcagtaagtataagtaaacctgggcggtacgttctcaaacagtcaacagggcaaagtaaccaatcaggccgtccaacgggagcaaaatcagttccatcagcatcaccattataaccaatgagttccacacatctccacacagccacgatccaagcacaccataacggatcagttccccatcagcgtagccacgattgaagcgcgccataatttcggttgatgaatagtggaatccatcatactgcagttttacacacgtccgccaattgctatggttcaaacatgctaacagacttacaagaaacaagtatccctattgacaaaacatgataaatacaaatgaaaaatgcttagacgcagatacatatggatatctccaacattagtcccaaagcaattagtccagactgaattgtagaaaatgtaaacaattatctaacattaagtctgaaagcaattaaacgagactgaatattacaaaaatataatatagaatatagaatgaaataaaaaagcagtgaccttttcaaaataggagattcacgggtagctgcgacctaaatataatatagaatatagaatatagaacagcgtgtaaatttgtgtagctgcgacctaaatttttgcacgcttcagactcatggagcgattagtaactctcagttcattggagttctcaattattattacaagactgaaaatcgagctgggtgaagcggacgtcaacggtattaacgtgcgtttcaggatcttcagttcgattggtgtcaggatttcttcgatttattatgcaagcacagaatataaaacgttgctcgtaatagaaggagcgcaggacgacttaaaaattgtttgaacataattacgattgtaccttgggaatcgcgtcgtagctccatgtttttgttgtagatctccgtgctcgatgcaaaaatccggcgtgcgtagcggaccaacaggagcggaagcaacgcatacaggaacacggaacaagatgagggaggagaacccggggccaaaaacatcaacccccgtgcgatctcctcccccggcacgcaataatcatctttttattattgcctggcctcgcctcttccaggcggcatatctcatagatctactaataattatcgaaattgatccaataattatcagcgcagagacatcatccatcgaggtggagcaggactgcagaccgagagatcccgccgcctccatctatcgtcgcctcagatccgctccgaaccgaacgacgacgacttcgcgatttctccagatctggatccagaagcagaacatgcgatgctcgaccaccaaaacaaaacaacaagaaccttgcaggcaaggactaaccgatacaggatccaacgcgggtttgccgaatccagcaatcagatatgagcctgcacaacatgaagcaaacggatttcctgataaatcgaaacaaagtagctcaccgagagcactcggggaggcaaggtctcaaggaggacggccatcctggatctggaggacgagatgaggttgcgtgcaggaggggaacgcgtccaacaatggtttgttcttggttatcgaat

SEQ ID NO: 34341 - DNA, 2608 bp, Zea Mays
gtttaatttaatcactcttaattttatgtatgctcttttcatgatgcaaataaggcacataaaataaggaattcactatatatatattccttgtatacaattttgaaggcggtggcaaaagatgatagtacaactgtctaatttacagcttggcaagtgatttttacatggcacgaggcagactggtagagacgacaagtgattttaaatggcacaagttgttgaggcagaggcttgcaacggaatggtgttgtacctctaagactaaatctatgacagtttatccatctctatacctatatattcaaacttcacttttctaacaatataatctacaacacataacagtacataccgtgtaaaataattcttttggataaactatgggtacggacgatctaacagtagagtcagatcgtgcaagggttgtcgagacgttgcaaatcgaatgaggacaagtctaagctcatgttcaccctcgtccaaacagaggagtatttgtagccttcagttggttggagggttcagctgataaaaacaaagcaaaattcagcagcaaatgaattagcacaattagatgcaatgctcgattatgaatataattatgccaaattaataatgatctatttaccacaaaaaaactggaaaagaagtagaatcctatgtctatgtttcttctaagtttttcatattatccaatgttggaaaagaagcagaattcaaatttgtatgctccttctagctttctcctgttgtccaatattgtccaaagaaagtttcacatgtcgtccaatgttgtctcaggtccatgtgccatccatgtaaagattgtccacaacaaatcatgtaaaataagagatttatactatagattatactgattgcagagtaaaatttgacatatagaatgaaatgagatagttgttgaagatagctaaggcctaatatgcagttcttattatgtacactagatcatgtaaaataagagatttattatttatactatggattatactgattgcagagtaaagtttaaaatatagaataaaataaggtagttgttgaaggcagtctaaggcctaatgtgcagttcttattatgtacactctaagggcatgtttgattccataatgctaaagtttagcactacatctttagtaaactttagctcttgtaaatccaaacatgagtgctaaaatatactagaagatattaaaagtaaaatgctaaagtttaacatacattagcactttatctctttaagtgatgctaaagtttagcacaatgaaactaaacatgccctagtactgtctatcaaaaaattaaactacattatttatgttaattatgatcctatcttggctctctaaaaactataggatttttattaattatgatcctacttaggttcaagaaagatagtaattactaattagctactcataattattttcttgaatccaaatacatgttgctaatagtttaactgattgttagcaatatttttctagtagctaataatagtactattttactagtcgagtgaaatttgttaaggactagtttgggaacctcatttatccaagtcctcttgaaaaatagaaattccttaagaaaatgaagttcctaaactagtcctaataggggtaatagtagttacatagtagttatgacatattagctagtagttaactattagtagtagccatgatctaagagcctgtttaggtgctaaaacaaacattaataaagttcaatcacattccaagctagttaaaagtgactaaaataataaaaatatgtcattttagtcactttggctgaacttgtttggatccaaagagcctccaagtatcttaactttaagtagatttactataaacaaaaatattattataataattatacttaatatcataaatgttagtaaattttttataattttactctaaatgaagtcattcttaataggagtttcataagagttttatttttattaataatacgtcacgtaaacaaataagataacacaatatacaatttaataaagaaaaatacgagatttagtgttttttgagatggtagctttggaaacagtgttttcctcttcccattgagaacgccctttcgcacggaacatgtcagtacgactttggacaaaattcaaattatcaccacttctagaaaacgtgaatgccatcttttttttttgttttctacatatatcacttctataaaggagattgctgataattcggtatgaattataaattatagaactcctaggccctacaacatttttttactagagaaattttattatcaaaaaataaaaataaactggattatatgaaattcttgcatttttctgacaaaagattcagtgtaaattcccgtggatcataaaaatctaggaagaaattcttacttgtaaaataaagagtctaggcaaaaatgagaagccacttcgatgaaagagacgtgaactaagcaaaaacaaaaacaaaaactctctgttctctaaactgcaaattctaagacgttgagtatatgtacaaattcttacatgtttggtttgctaccgaccagacctagtcaaatatcagag

SEQ ID NO: 34342 - DNA, 1019 bp, Zea Mays
ctttgtaccattcgccgccctctgtaccattcgccgctctctacgcgccgtggatccgccacctcaactcctcccattaccgcgcccgcgccatcaaaatctgccgcagatctcctctccccattaccgcggtccatggatttctcgagtcagtgggaggtctgccatccatggaaggtccgccacctcctccttggcccgcggcaaaaatggcgtgggagccagatctcctctcccattaccgcgcccgcatgatatggaaggtcccagatattctctccccattaccacgggcggcttcgggttcggcctcagcaacgtggcggtcgacggcggatctgggcgcgcactacgaggcgaacaacaacgtgctggcctccttcgccagccagctcctcgctaacgcccccgcgctgccatgggatgatcgtgccggcgggaggacgccgtcagacgagatggacgacgagctatacggtgtcgccggctgcgacagccacgtcgtggcgagcttgcggtgccccagccaatccagggccatggcggtctggtcgtcatccaagaagtcgtacgatatctgtaccagcgccggcggatcagtaaccgtgccggcccatgacacataccacctcgccggggccgggctctccaacgagggaggcctccactacccgctcgccgcctgcagtggagccaacgcgtccgcggtggcgacgagggagttgtcgctgacgctgtgctccaactccatcgcttcctcgaacagcacgctaaacacgacggagctaagactggaggaagctaagtctcttgcagaaaagctttgtgatggccctctttcaagtgctgcaaatttgtggatcctgagagcttctatggagataaattcgttggcgactgcttctggcagctctccattgaataaggagaacttgagctctctgtttgatctgtttggcacatggtcatgcttgttttcccgcctttctccggagtcccatcccattgctgagtgcatt

SEQ ID NO: 34343 - DNA, 4581 bp, Zea Mays
cgatcgccatctgctcagctgtgatttgtgagcgcaaagcccgacatctataaatatcccgcatccatccatccagccagccattgcaaccaccggccgggctgggagcactcagcactgcgacgaggagagaggagacggagacggatgcttattcctgtgcctgccttgctgcgaagcgctgagatgaatccgctgctgctgaatgtgattgtgtgtgcgattattgggccctggcaggtgagtgaggcgctgctggtatgcatgagctaggaggtaaggaacaaccatacgagggcgagcagagcagagagcacacggcgcgccgagctagcagcattgcccaatctcgcggcggggagagattcgtgagcgcggaggcgcgaatcttcgacgcagcgacggcagccatgccggagtcctggagacccgccgaggcgaatgcctcgtcgcagccggcggcaggcacgtccggcccctcggctcagagccctggcaatgacgccaagggacgcgcggcgggggaaacccccggcgcggcggaggcggcggcgacgcgagtgccgttccacaagctgttcgcgttcgccgactccaccgacgtggcgctcatgctcctgggcgcgctcggggccgtggccaacggcgccgcgatgcccttcatgaccgtgctcttcggcaacctcatcgacgccttcggcggcgcgctcagcatccacgacgtcgtcaaccgggtgtccatggtctctctcgatttcgtctacctcgccatcgcctccgccgtcgcttccttcgtccctgttttccgtccgaccagaggtgacctgctggatgatcaccggcgagcgccaggcggcgcggatacggaacctgtacctcaagacgatcctgaggcaagagatcgccttcttcgacaagtacaccagcaccggcgaggtggtgggcaggatgtcgggcgacaccgtgctgatccaggacgccatgggcgagaaggtcggcaagttcatccagctggtggtgaccttcttcggcggcttcatcgtcgccttcgcgcagggctggctgctgaccctggtcatgatggcgaccatcccgccgctcgtcgtggccggcgcggtcatgtccaacgtcgtcaccaagatggcgtccctgggccaggcggcgtacgcggagtcgtcggtggtggtggagcagaccatcggttccatcaggacggttgcgtctttcaccggcgagaaacgggcggtggagaagtacaacaagtccctgaagagcgcgtacaagtccagcgtccgggaggggctcgccactgggcttggcatgggcacggtcatgctgctcctcttctgcggctactcgctggggatttggtctggcgctaagctgatcctggagaaggggtacaccggagccaaggtcatgaacgtgatctttgcggtcctcactggctctctggctctaggtcaagcgtctccaagcatgaaagcgtttgccggcgggcaggccgctgcatacaagatgttcgagacgatcaacagagcgccggaaatcgacgcgtacagcaccacaggaaggaagctggaggacatccggggggaaatcgagttcagggacgtccatttctcctatccgacgaggcctgacgagccgatattcaggggtttctccctcgccatacccagcggcacgacgatcgcgctggtaggccagagcgggagcggtaaatccactgtcatcagcctgatcgagcggttctacgaccctcagctcggcgacgttctgatagatggcgtcaatctcaaggagttccagctgaggtggatcagaagcaaaatcggccttgtcagccaggaaccagtccttttcgctgccagcataaaggagaacatagcctacggcaaagccagcgcgacagatcaggaagtcagagctgccgctgagcttgccaatgctgccaagttcatagataaaatgcctcagggtttcgatacctcggttggcgagcatgggacacagctctctggtggacagaagcagaggatcgccatcgcaagggctattctgaaagatccaagaattctactgttagatgaagctacaagtgcgctggacgccgagtctgaaaggatcgtgcaggaagctcttgacagggtcatgtcgaataggacgactgtcatagtcgcacaccgtctgagcaccgttagaaacgctgacaccattgccgtcattcatcaaggaacactagttgaaaagggcccacacaatgagcttctaagagatccagaaggagcttacagccaactgataaagctacaggaagcaaaccagcagaacaaccggaagggtgatggcaatgctcgtctaggcaaacagatgtcgatgaacaagtcagctagcaggaggttgtcccgtgataacagtagccaccattcgttctcggtgccgttcggtatgcctcttgggattgaaattcaggatggttcatccaacaaactgtgcgacgagatgccacaggaagtgcctctcagccggctcgcgtctcttaacaagccagagatcccggtcctcgtactaggttccattgcctcggtcatcagcggagttatcttcccgatcttcgcgatactcctgtcaaatgtgataaaggcgttctatgagcccccacatctcctaaggagggactcacagttctgggcttccatgttcctggtgtttggtgcggtgtacttcctgtcgctccccgtcagttcctaccttttctccatagcggggtgcaggctgatcagaaggatccggctgatgacgtttgagaaggtggtgaatatggaggtcgaatggtttgatcacccagaaaactcgagcggagcgatcggtgcaaggctgtcagctgatgcggccaaagttagaggacttgtgggagacgcgctccaattggttgtgcagaactcttcgacactagttgctggtttggtaattgcattcgtatcaaactgggagctatctctaatcatcttagctttgataccactcattggcctaaatggatggatccagatgaagtttattcagggcttcagcgcagactcaaagatgatgtatgaggaggcaagccaggtggctaatgatgcagtaagcagcataagaacagtggcctcattctcagctgaagagaaggtcatggatttgtacaagaagaaatgtgaaggtcccctaagaacaggaatcaggacagggattataagtggcatcggttttggagtttcctttttcttgctgtttggggtctatgcagctagcttctatgccggtgctcggcttgtcgaggacaggaagacaacctttcctaaagttttcagggtttttcttgctcttgcaatggcggcaattggagtgtcgcaatcaagtacccttacatcggattcttccaaagcaaaatcagcggcgtcctctatatttgcaatcgtagaccgaaaatcaaggatagacccaagtgaggatgcaggggtgactgctgagacactacgaggaaatatcgaattccagcacgttagcttcaggtatcctaccaggccagatgtccagatcttccgggacctttgcctgacaattcatgctggaaagactgttgcgcttgttggggagagtgggagtggcaaatcaacggcaatttcattgctccagaggttctatgacccagatgtaggccacatactactagatggcgtggacatacgcaagttccagcttcggtggttaaggcagcaaatgggcctggtcagtcaagaaccggccttgtttaacgacacgataagggcaaacattgcctatggaaaagatggacaggcaacagaatctgagatcgtatctgccgcacaactggcaaacgctcacaagttcatcagctcggcgctccagggatatgacacaatggttggagagcgtggagctcagctgtcaggagggcagaagcagcgcgtggccatcgcccgtgcgatcgtgaaggaccctcggatcctgcttctggacgaagcgaccagcgcactggatgccgagtccgagcggatcgtccaggacgcgctggacagggtgatggtgaaccggacaacagtggtcgtcgcccaccgtctgtcgacgatacagaatgcggatctgatcgccgtcgtcaggaacggggttatcatcgagaagggaaagcacgacgccttggtcaacgtcaaggatggcgcgtacgcgtccctcgtcgcccttcactcggcagcctcttcatagctgcaggtggtaggtagcatgggatcctgcaaacgtctgctgaaacatatatatatatatggacagaggcacagagctgccacaacctgtgtagcaagtcaggtgctagtatctgttcctctatttgatgacacacataattgcttattatacctaagcggggaaatggtacaaatagcaagggccaaatgtaaatgcaaggagctggtccttaagatagttaatatatatatatatatatatataatttatattattatttttgaaacgaaccagataggagagttgccgattatattaataaaggagaag

SEQ ID NO: 34344 - DNA, 4359 bp, Zea Mays
cgatcgccatctgctcagctgtgatttgtgagcgcaaagcccgacatctataaatatcccgcatccatccatccagccagccattgcaaccaccggccgggctgggagcactcagcactgcgacgaggagagaggagacggagacggatgcttattcctgtgcctgccttggtgagtgaggcgctgctggtatgcatgagctaggaggtaaggaacaaccatacgagggcgagcagagcagagagcacacggcgcgccgagctagcagcattgcccaatctcgcggcggggagagattcgtgagcgcggaggcgcgaatcttcgacgcagcgacggcagccatgccggagtcctggagacccgccgaggcgaatgcctcgtcgcagccggcggcaggcacgtccggcccctcggctcagagccctggcaatgacgccaagggacgcgcggcgggggaaacccccggcgcggcggaggcggcggcgacgcgagtgccgttccacaagctgttcgcgttcgccgactccaccgacgtggcgctcatgctcctgggcgcgctcggggccgtggccaacggcgccgcgatgcccttcatgaccgtgctcttcggcaacctcatcgacgccttcggcggcgcggatacggaacctgtacctcaagacgatcctgaggcaagagatcgccttcttcgacaagtacaccagcaccggcgaggtggtgggcaggatgtcgggcgacaccgtgctgatccaggacgccatgggcgagaaggtcggcaagttcatccagctggtggtgaccttcttcggcggcttcatcgtcgccttcgcgcagggctggctgctgaccctggtcatgatggcgaccatcccgccgctcgtcgtggccggcgcggtcatgtccaacgtcgtcaccaagatggcgtccctgggccaggcggcgtacgcggagtcgtcggtggtggtggagcagaccatcggttccatcaggacggttgcgtctttcaccggcgagaaacgggcggtggagaagtacaacaagtccctgaagagcgcgtacaagtccagcgtccgggaggggctcgccactgggcttggcatgggcacggtcatgctgctcctcttctgcggctactcgctggggatttggtctggcgctaagctgatcctggagaaggggtacaccggagccaaggtcatgaacgtgatctttgcggtcctcactggctctctggctctaggtcaagcgtctccaagcatgaaagcgtttgccggcgggcaggccgctgcatacaagatgttcgagacgatcaacagagcgccggaaatcgacgcgtacagcaccacaggaaggaagctggaggacatccggggggaaatcgagttcagggacgtccatttctcctatccgacgaggcctgacgagccgatattcaggggtttctccctcgccatacccagcggcacgacgatcgcgctggtaggccagagcgggagcggtaaatccactgtcatcagcctgatcgagcggttctacgaccctcagctcggcgacgttctgatagatggcgtcaatctcaaggagttccagctgaggtggatcagaagcaaaatcggccttgtcagccaggaaccagtccttttcgctgccagcataaaggagaacatagcctacggcaaagccagcgcgacagatcaggaagtcagagctgccgctgagcttgccaatgctgccaagttcatagataaaatgcctcagggtttcgatacctcggttggcgagcatgggacacagctctctggtggacagaagcagaggatcgccatcgcaagggctattctgaaagatccaagaattctactgttagatgaagctacaagtgcgctggacgccgagtctgaaaggatcgtgcaggaagctcttgacagggtcatgtcgaataggacgactgtcatagtcgcacaccgtctgagcaccgttagaaacgctgacaccattgccgtcattcatcaaggaacactagttgaaaagggcccacacaatgagcttctaagagatccagaaggagcttacagccaactgataaagctacaggaagcaaaccagcagaacaaccggaagggtgatggcaatgctcgtctaggcaaacagatgtcgatgaacaagtcagctagcaggaggttgtcccgtgataacagtagccaccattcgttctcggtgccgttcggtatgcctcttgggattgaaattcaggatggttcatccaacaaactgtgcgacgagatgccacaggaagtgcctctcagccggctcgcgtctcttaacaagccagagatcccggtcctcgtactaggttccattgcctcggtcatcagcggagttatcttcccgatcttcgcgatactcctgtcaaatgtgataaaggcgttctatgagcccccacatctcctaaggagggactcacagttctgggcttccatgttcctggtgtttggtgcggtgtacttcctgtcgctccccgtcagttcctaccttttctccatagcggggtgcaggctgatcagaaggatccggctgatgacgtttgagaaggtggtgaatatggaggtcgaatggtttgatcacccagaaaactcgagcggagcgatcggtgcaaggctgtcagctgatgcggccaaagttagaggacttgtgggagacgcgctccaattggttgtgcagaactcttcgacactagttgctggtttggtaattgcattcgtatcaaactgggagctatctctaatcatcttagctttgataccactcattggcctaaatggatggatccagatgaagtttattcagggcttcagcgcagactcaaagatgatgtatgaggaggcaagccaggtggctaatgatgcagtaagcagcataagaacagtggcctcattctcagctgaagagaaggtcatggatttgtacaagaagaaatgtgaaggtcccctaagaacaggaatcaggacagggattataagtggcatcggttttggagtttcctttttcttgctgtttggggtctatgcagctagcttctatgccggtgctcggcttgtcgaggacaggaagacaacctttcctaaagttttcagggtttttcttgctcttgcaatggcggcaattggagtgtcgcaatcaagtacccttacatcggattcttccaaagcaaaatcagcggcgtcctctatatttgcaatcgtagaccgaaaatcaaggatagacccaagtgaggatgcaggggtgactgctgagacactacgaggaaatatcgaattccagcacgttagcttcaggtatcctaccaggccagatgtccagatcttccgggacctttgcctgacaattcatgctggaaagactgttgcgcttgttggggagagtgggagtggcaaatcaacggcaatttcattgctccagaggttctatgacccagatgtaggccacatactactagatggcgtggacatacgcaagttccagcttcggtggttaaggcagcaaatgggcctggtcagtcaagaaccggccttgtttaacgacacgataagggcaaacattgcctatggaaaagatggacaggcaacagaatctgagatcgtatctgccgcacaactggcaaacgctcacaagttcatcagctcggcgctccagggatatgacacaatggttggagagcgtggagctcagctgtcaggagggcagaagcagcgcgtggccatcgcccgtgcgatcgtgaaggaccctcggatcctgcttctggacgaagcgaccagcgcactggatgccgagtccgagcggatcgtccaggacgcgctggacagggtgatggtgaaccggacaacagtggtcgtcgcccaccgtctgtcgacgatacagaatgcggatctgatcgccgtcgtcaggaacggggttatcatcgagaagggaaagcacgacgccttggtcaacgtcaaggatggcgcgtacgcgtccctcgtcgcccttcactcggcagcctcttcatagctgcaggtggtaggtagcatgggatcctgcaaacgtctgctgaaacatatatatatatatggacagaggcacagagctgccacaacctgtgtagcaagtcaggtgctagtatctgttcctctatttgatgacacacataattgcttattatacctaagcggggaaatggtacaaatagcaagggccaaatgtaaatgcaaggagctggtccttaagatagttaatatatatatatatatatatataatttatattattatttttgaaacgaaccagataggagagttgccgattatattaataaaggagaag

SEQ ID NO: 34345 - DNA, 4481 bp, Zea Mays
cgatcgccatctgctcagctgtgatttgtgagcgcaaagcccgacatctataaatatcccgcatccatccatccagccagccattgcaaccaccggccgggctgggagcactcagcactgcgacgaggagagaggagacggagacggatgcttattcctgtgcctgccttgctgcgaagcgctgagatgaatccgctgctgctgaatgtgattgtgtgtgcgattattgggccctggcaggtgagtgaggcgctgctggtatgcatgagctaggaggtaaggaacaaccatacgagggcgagcagagcagagagcacacggcgcgccgagctagcagcattgcccaatctcgcggcggggagagattcgtgagcgcggaggcgcgaatcttcgacgcagcgacggcagccatgccggagtcctggagacccgccgaggcgaatgcctcgtcgcagccggcggcaggcacgtccggcccctcggctcagagccctggcaatgacgccaagggacgcgcggcgggggaaacccccggcgcggcggaggcggcggcgacgcgagtgccgttccacaagctgttcgcgttcgccgactccaccgacgtggcgctcatgctcctgggcgcgctcggggccgtggccaacggcgccgcgatgcccttcatgaccgtgctcttcggcaacctcatcgacgccttcggcggcgcgctcagcatccacgacgtcgtcaaccgggtgtccatggtctctctcgatttcgtctacctcgccatcgcctccgccgtcgcttccttcgtccaggtgacctgctggatgatcaccggcgagcgccaggcggcgcggatacggaacctgtacctcaagacgatcctgaggcaagagatcgccttcttcgacaagtacaccagcaccggcgaggtggtgggcaggatgtcgggcgacaccgtgctgatccaggacgccatgggcgagaaggtcggcaagttcatccagctggtggtgaccttcttcggcggcttcatcgtcgccttcgcgcagggctggctgctgaccctggtcatgatggcgaccatcccgccgctcgtcgtggccggcgcggtcatgtccaacgtcgtcaccaagatggcgtccctgggccaggcggcgtacgcggagtcgtcggtggtggtggagcagaccatcggttccatcaggacggttgcgtctttcaccggcgagaaacgggcggtggagaagtacaacaagtccctgaagagcgcgtacaagtccagcgtccgggaggggctcgccactgggcttggcatgggcacggtcatgctgctcctcttctgcggctactcgctggggatttggtctggcgctaagctgatcctggagaaggggtacaccggagccaaggtcatgaacgtgatctttgcggtcctcactggctctctggctctaggtcaagcgtctccaagcatgaaagcgtttgccggcgggcaggccgctgcatacaagatgttcgagacgatcaacagagcgccggaaatcgacgcgtacagcaccacaggaaggaagctggaggacatccggggggaaatcgagttcagggacgtccatttctcctatccgacgaggcctgacgagccgatattcaggggtttctccctcgccatacccagcggcacgacgatcgcgctggtaggccagagcgggagcggtaaatccactgtcatcagcctgatcgagcggttctacgaccctcagctcggcgacgttctgatagatggcgtcaatctcaaggagttccagctgaggtggatcagaagcaaaatcggccttgtcagccaggaaccagtccttttcgctgccagcataaaggagaacatagcctacggcaaagccagcgcgacagatcaggaagtcagagctgccgctgagcttgccaatgctgccaagttcatagataaaatgcctcagggtttcgatacctcggttggcgagcatgggacacagctctctggtggacagaagcagaggatcgccatcgcaagggctattctgaaagatccaagaattctactgttagatgaagctacaagtgcgctggacgccgagtctgaaaggatcgtgcaggaagctcttgacagggtcatgtcgaataggacgactgtcatagtcgcacaccgtctgagcaccgttagaaacgctgacaccattgccgtcattcatcaaggaacactagttgaaaagggcccacacaatgagcttctaagagatccagaaggagcttacagccaactgataaagctacaggaagcaaaccagcagaacaaccggaagggtgatggcaatgctcgtctaggcaaacagatgtcgatgaacaagtcagctagcaggaggttgtcccgtgataacagtagccaccattcgttctcggtgccgttcggtatgcctcttgggattgaaattcaggatggttcatccaacaaactgtgcgacgagatgccacaggaagtgcctctcagccggctcgcgtctcttaacaagccagagatcccggtcctcgtactaggttccattgcctcggtcatcagcggagttatcttcccgatcttcgcgatactcctgtcaaatgtgataaaggcgttctatgagcccccacatctcctaaggagggactcacagttctgggcttccatgttcctggtgtttggtgcggtgtacttcctgtcgctccccgtcagttcctaccttttctccatagcggggtgcaggctgatcagaaggatccggctgatgacgtttgagaaggtggtgaatatggaggtcgaatggtttgatcacccagaaaactcgagcggagcgatcggtgcaaggctgtcagctgatgcggccaaagttagaggacttgtgggagacgcgctccaattggttgtgcagaactcttcgacactagttgctggtttggtaattgcattcgtatcaaactgggagctatctctaatcatcttagctttgataccactcattggcctaaatggatggatccagatgaagtttattcagggcttcagcgcagactcaaagatgatgtatgaggaggcaagccaggtggctaatgatgcagtaagcagcataagaacagtggcctcattctcagctgaagagaaggtcatggatttgtacaagaagaaatgtgaaggtcccctaagaacaggaatcaggacagggattataagtggcatcggttttggagtttcctttttcttgctgtttggggtctatgcagctagcttctatgccggtgctcggcttgtcgaggacaggaagacaacctttcctaaagttttcagggtttttcttgctcttgcaatggcggcaattggagtgtcgcaatcaagtacccttacatcggattcttccaaagcaaaatcagcggcgtcctctatatttgcaatcgtagaccgaaaatcaaggatagacccaagtgaggatgcaggggtgactgctgagacactacgaggaaatatcgaattccagcacgttagcttcaggtatcctaccaggccagatgtccagatcttccgggacctttgcctgacaattcatgctggaaagactgttgcgcttgttggggagagtgggagtggcaaatcaacggcaatttcattgctccagaggttctatgacccagatgtaggccacatactactagatggcgtggacatacgcaagttccagcttcggtggttaaggcagcaaatgggcctggtcagtcaagaaccggccttgtttaacgacacgataagggcaaacattgcctatggaaaagatggacaggcaacagaatctgagatcgtatctgccgcacaactggcaaacgctcacaagttcatcagctcggcgctccagggatatgacacaatggttggagagcgtggagctcagctgtcaggagggcagaagcagcgcgtggccatcgcccgtgcgatcgtgaaggaccctcggatcctgcttctggacgaagcgaccagcgcactggatgccgagtccgagcggatcgtccaggacgcgctggacagggtgatggtgaaccggacaacagtggtcgtcgcccaccgtctgtcgacgatacagaatgcggatctgatcgccgtcgtcaggaacggggttatcatcgagaagggaaagcacgacgccttggtcaacgtcaaggatggcgcgtacgcgtccctcgtcgcccttcactcggcagcctcttcatagctgcaggtggtagcaagtcaggtgctagtatctgttcctctatttgatgacacacataattgcttattatacctaagcggggaaatggtacaaatagcaagggccaaatgtaaatgcaaggagctggtccttaagatagttaatatatatatatatatatatataatttatattattatttttgaaacgaaccagataggagagttgccgattatattaataaaggagaag

SEQ ID NO: 34346 - DNA, 4415 bp, Zea Mays
aaaattgacagtatttaaacctaaatatttataattaaatttctggtaatagaagaagacaggctgactctcgtgcgacccgatttcattccaatcgatcgccatctgctcagctgtgatttgtgagcgcaaagcccgacatctataaatatcccgcatccatccatccagccagccattgcaaccaccggccgggctgggagcactcagcactgcgacgaggagagaggagacggagacggatgcttattcctgtgcctgccttggtgagtgaggcgctgctggtatgcatgagctaggaggtaaggaacaaccatacgagggcgagcagagcagagagcacacggcgcgccgagctagcagcattgcccaatctcgcggcggggagagattcgtgagcgcggaggcgcgaatcttcgacgcagcgacggcagccatgccggagtcctggagacccgccgaggcgaatgcctcgtcgcagccggcggcaggcacgtccggcccctcggctcagagccctggcaatgacgccaagggacgcgcggcgggggaaacccccggcgcggcggaggcggcggcgacgcgagtgccgttccacaagctgttcgcgttcgccgactccaccgacgtggcgctcatgctcctgggcgcgctcggggccgtggccaacggcgccgcgatgcccttcatgaccgtgctcttcggcaacctcatcgacgccttcggcggcgcgctcagcatccacgacgtcgtcaaccgggtgtccatggtctctctcgatttcgtctacctcgccatcgcctccgccgtcgcttccttcgtccaggtgacctgctggatgatcaccggcgagcgccaggcggcgcggatacggaacctgtacctcaagacgatcctgaggcaagagatcgccttcttcgacaagtacaccagcaccggcgaggtggtgggcaggatgtcgggcgacaccgtgctgatccaggacgccatgggcgagaaggtcggcaagttcatccagctggtggtgaccttcttcggcggcttcatcgtcgccttcgcgcagggctggctgctgaccctggtcatgatggcgaccatcccgccgctcgtcgtggccggcgcggtcatgtccaacgtcgtcaccaagatggcgtccctgggccaggcggcgtacgcggagtcgtcggtggtggtggagcagaccatcggttccatcaggacggttgcgtctttcaccggcgagaaacgggcggtggagaagtacaacaagtccctgaagagcgcgtacaagtccagcgtccgggaggggctcgccactgggcttggcatgggcacggtcatgctgctcctcttctgcggctactcgctggggatttggtctggcgctaagctgatcctggagaaggggtacaccggagccaaggtcatgaacgtgatctttgcggtcctcactggctctctggctctaggtcaagcgtctccaagcatgaaagcgtttgccggcgggcaggccgctgcatacaagatgttcgagacgatcaacagagcgccggaaatcgacgcgtacagcaccacaggaaggaagctggaggacatccggggggaaatcgagttcagggacgtccatttctcctatccgacgaggcctgacgagccgatattcaggggtttctccctcgccatacccagcggcacgacgatcgcgctggtaggccagagcgggagcgctgaggtggatcagaagcaaaatcggccttgtcagccaggaaccagtccttttcgctgccagcataaaggagaacatagcctacggcaaagccagcgcgacagatcaggaagtcagagctgccgctgagcttgccaatgctgccaagttcatagataaaatgcctcagggtttcgatacctcggttggcgagcatgggacacagctctctggtggacagaagcagaggatcgccatcgcaagggctattctgaaagatccaagaattctactgttagatgaagctacaagtgcgctggacgccgagtctgaaaggatcgtgcaggaagctcttgacagggtcatgtcgaataggacgactgtcatagtcgcacaccgtctgagcaccgttagaaacgctgacaccattgccgtcattcatcaaggaacactagttgaaaagggcccacacaatgagcttctaagagatccagaaggagcttacagccaactgataaagctacaggaagcaaaccagcagaacaaccggaagggtgatggcaatgctcgtctaggcaaacagatgtcgatgaacaagtcagctagcaggaggttgtcccgtgataacagtagccaccattcgttctcggtgccgttcggtatgcctcttgggattgaaattcaggatggttcatccaacaaactgtgcgacgagatgccacaggaagtgcctctcagccggctcgcgtctcttaacaagccagagatcccggtcctcgtactaggttccattgcctcggtcatcagcggagttatcttcccgatcttcgcgatactcctgtcaaatgtgataaaggcgttctatgagcccccacatctcctaaggagggactcacagttctgggcttccatgttcctggtgtttggtgcggtgtacttcctgtcgctccccgtcagttcctaccttttctccatagcggggtgcaggctgatcagaaggatccggctgatgacgtttgagaaggtggtgaatatggaggtcgaatggtttgatcacccagaaaactcgagcggagcgatcggtgcaaggctgtcagctgatgcggccaaagttagaggacttgtgggagacgcgctccaattggttgtgcagaactcttcgacactagttgctggtttggtaattgcattcgtatcaaactgggagctatctctaatcatcttagctttgataccactcattggcctaaatggatggatccagatgaagtttattcagggcttcagcgcagactcaaagatgatgtatgaggaggcaagccaggtggctaatgatgcagtaagcagcataagaacagtggcctcattctcagctgaagagaaggtcatggatttgtacaagaagaaatgtgaaggtcccctaagaacaggaatcaggacagggattataagtggcatcggttttggagtttcctttttcttgctgtttggggtctatgcagctagcttctatgccggtgctcggcttgtcgaggacaggaagacaacctttcctaaagttttcagggtttttcttgctcttgcaatggcggcaattggagtgtcgcaatcaagtacccttacatcggattcttccaaagcaaaatcagcggcgtcctctatatttgcaatcgtagaccgaaaatcaaggatagacccaagtgaggatgcaggggtgactgctgagacactacgaggaaatatcgaattccagcacgttagcttcaggtatcctaccaggccagatgtccagatcttccgggacctttgcctgacaattcatgctggaaagactgttgcgcttgttggggagagtgggagtggcaaatcaacggcaatttcattgctccagaggttctatgacccagatgtaggccacatactactagatggcgtggacatacgcaagttccagcttcggtggttaaggcagcaaatgggcctggtcagtcaagaaccggccttgtttaacgacacgataagggcaaacattgcctatggaaaagatggacaggcaacagaatctgagatcgtatctgccgcacaactggcaaacgctcacaagttcatcagctcggcgctccagggatatgacacaatggttggagagcgtggagctcagctgtcaggagggcagaagcagcgcgtggccatcgcccgtgcgatcgtgaaggaccctcggatcctgcttctggacgaagcgaccagcgcactggatgccgagtccgagcggatcgtccaggacgcgctggacagggtgatggtgaaccggacaacagtggtcgtcgcccaccgtctgtcgacgatacagaatgcggatctgatcgccgtcgtcaggaacggggttatcatcgagaagggaaagcacgacgccttggtcaacgtcaaggatggcgcgtacgcgtccctcgtcgcccttcactcggcagcctcttcatagctgcaggtggtagcaagtcaggtgctagtatctgttcctctatttgatgacacacataattgcttattatacctaagcggggaaatggtacaaatagcaagggccaaatgtaaatgcaaggagctggtccttaagatagttaatatatatatatatatatatataatttatattattatttttgaaacgaaccagataggagagttgccgattatattaataaaggagaag

SEQ ID NO: 34347 - DNA, 1171 bp, Zea Mays
cgccacggtaccacccgccgctaacctctatcgcgttcaccatcagggcaccaccgcctccattacccccgccccctgctgccacgtccaccaccacggcaccaccgccgcccccagcgcgcgcggcccaccactaacagccagcttgggtggccgctccttccctcccttgcctcaaaggacttcttcccacgcgatgttaggagcagacatgaggcggcgagagtccagcatcggagatctccgccgccatgtaggcactgcccagcaccttgcggcccgaaaaccgtcgatctaatgccctgccctccttctccgatgccttcgccctcgcctcaggcagggtccctctcccgccttgcctggctctacgtggtcggtcggttgtggcgggatgtgcagacaggacgatcgtgtccggcctcctcgagaagagctccagcaacatctagaaggtgctcttgatggaggacaagcttaggaaccttggatgcaaggtgattggaaagaaaactattgaggtggagatggacctgaccaaggccaagagcgagaggtacctatgggggaacaacactgcagctatgaactccgacaagaagcagcagtttacactgggtttggctccagtctcaaaagaaacgtctgtttcagtaagctgatggtgcctcgaagaagccaatcaaagtactaattactaaaggtcacttgcaggatagcaaactcatacagtaatactgttgtttgtcgatcttaacaaatttcattcaagaatcaggccatgatgatgttcaaaagagttgtcagcagttcatgacatctggtagcacgacaactagcaatgtatggatgaattgaaggaaataaagaaggcagacaatcttatagaaactctgcatcttgaaactaccatggtttagaaagaagctggatgcatcctttatgttggtgtcttcttatcaccaagcagtaatgtgaagcaaggtcatttgttgactaagaacggttgaacacaaattagtgaagagttcattgcactagagatggaggatggaaaggtggtagatttcaatatggctttgatactatttcccccccttacaatcttgtacggaacaaacaatgtatgtggatactattgtaattcaagaatttatttctaaataataaa

SEQ ID NO: 34348 - DNA, 1203 bp, Zea Mays
cgccacggtaccacccgccgctaacctctatcgcgttcaccatcagggcaccaccgcctccattacccccgccccctgctgccacgtccaccaccacggcaccaccgccgcccccagcgcgcgcggcccaccactaacagccagcttgggtggccgctccttccctcccttgcctcaaaggacttcttcccacgcgatgttaggagcagacatgaggcggcgagagtccagcatcggagatctccgccgccatgtaggcactgcccagcaccttgcggcccgaaaaccgtcgatctaatgccctgccctccttctccgatgccttcgccctcgcctcaggcagggtccctctcccgccttgcctggctctacgtggtcggtcggttgtggcgggatgtgcagacaggacgatcgtgtccggcctcctcgagaagagctccagcaacatctagaaggtgctcttgatggaggacaagcttaggaaccttggatgcaaggtgattggaaagaaaactattgaggtggagatggacctgaccaaggccaagagcgagaggtacctatgggggaacaacactgcagctatgaactccgacaagaagcagcagtttacactgggtttggctccagtctcaaaagaaacgtctgtttcagtaagctgatggttgcaacttttaccagatcaggaatttgtaggtgcctcgaagaagccaatcaaagtactaattactaaaggtcacttgcaggatagcaaactcatacagtaatactgttgtttgtcgatcttaacaaatttcattcaagaatcaggccatgatgatgttcaaaagagttgtcagcagttcatgacatctggtagcacgacaactagcaatgtatggatgaattgaaggaaataaagaaggcagacaatcttatagaaactctgcatcttgaaactaccatggtttagaaagaagctggatgcatcctttatgttggtgtcttcttatcaccaagcagtaatgtgaagcaaggtcatttgttgactaagaacggttgaacacaaattagtgaagagttcattgcactagagatggaggatggaaaggtggtagatttcaatatggctttgatactatttcccccccttacaatcttgtacggaacaaacaatgtatgtggatactattgtaattcaagaatttatttctaaataataaa

SEQ ID NO: 34349 - DNA, 1809 bp, Zea Mays
cgccacggtaccacccgccgctaacctctatcgcgttcaccatcagggcaccaccgcctccattacccccgccccctgctgccacgtccaccaccacggcaccaccgccgcccccagcgcgcgcggcccaccactaacagccagcttgggtggccgctccttccctcccttgcctcaaaggacttcttcccacgcgatgttaggagcagacatgaggcggcgagagtccagcatcggagatctccgccgccatgtaggcactgcccagcaccttgcggcccgaaaaccgtcgatctaatgccctgccctccttctccgatgccttcgccctcgcctcaggcagggtccctctcccgccttgcctggctctacgtggtcggtcggttgtggcgggatgtgcagacaggacgatcgtgtccggcctcctcgagaagagctccagcaacatctagaaggtgctcttgatggaggacaagcttaggaaccttggatgcaaggtgattggaaagaaaactattgaggtggagatggacctgaccaaggccaagagcgagaggtacctatgggggaacaacactgcagctatgaactccgacaagaagcagcagtttacactgggtttggctccagtctcaaaagaaacgtctgtttcagtaagctgatggtcggtcacccaaaggacccattatctatttttattaatgttaatatattaaaaactggttagagtaaacatacatattatgctatcatgtacatatatgcctctatgagacataaatatatgtgtcatgtttcaactttcatgaatttttttcctcaacgagtaacatactagtgataataacaaaattatttaaaataataaccattatatataacttataaattatcatgatagatttggttatatattttaacttaaatatttgacatatggtataactataagttcataagtgcatatataaattctttgacatgaaaaacaagaaatattgatacatggggggcaattggtgtcgattgcagatggctacatctttctagaattcatatttctttgtagcaaatagtcattataataacaagtattaatatcctctccaggttagcaatactaaccattatagatctctgtttatttatattgtcccttcatacatattaatgtacatacacatcctttctttctcgttattccaatccctcctggacatagatacaacaaatatgatttgttccgtagaatcacaaactcttttgtacaggttgcaacttttaccagatcagaatttgtaggtgcctcgaagaagccaatcaaagtactaattactaaaggtcacttgcaggatagcaaactcatacagtaatactgttgtttgtcgatcttaacaaatttcattcaagaatcaggccatgatgatgttcaaaagagttgtcagcagttcatgacatctggtagcacgacaactagcaatgtatggatgaattgaaggaaataaagaaggcagacaatcttatagaaactctgcatcttgaaactaccatggtttagaaagaagctggatgcatcctttatgttggtgtcttcttatcaccaagcagtaatgtgaagcaaggtcatttgttgactaagaacggttgaacacaaattagtgaagagttcattgcactagagatggaggatggaaaggtggtagatttcaatatggctttgatactatttcccccccttacaatcttgtacggaacaaacaatgtatgtggatactattgtaattcaagaatttatttctaaataataaa

SEQ ID NO: 34350 - DNA, 1684 bp, Zea Mays
cgccacggtaccacccgccgctaacctctatcgcgttcaccatcagggcaccaccgcctccattacccccgccccctgctgccacgtccaccaccacggcaccaccgccgcccccagcgcgcgcggcccaccactaacagccagcttgggtggccgctccttccctcccttgcctcaaaggacttcttcccacgcgatgttaggagcagacatgaggcggcgagagtccagcatcggagatctccgccgccatgtaggcactgcccagcaccttgcggcccgaaaaccgtcgatctaatgccctgccctccttctccgatgccttcgccctcgcctcaggcagggtccctctcccgccttgcctggctctacgtggttgtggcgggatgtgcagacaggacgatcgtgtccggcctcctcgagaagagctccaatctagaaggtgctcttgatggaggacaagcttaggaaccttggatgcaaggtgattggaaagaaaactattgaggtggagatggacctgaccaaggccaagagcgagaggtacctatgggggaacaacactgcagctatgaactccgacaagaagcagcagtttacactgggtttggctccagtctcaaaagaaacgtctgtttcagtaagctgatggtcggtcacccaaaggacccattatctatttttattaatgttaatatattaaaaactggttagagtaaacatacatattatgctatcatgtacatatatgcctctatgagacataaatatatgtgtcatgtttcaactttcatgaatttttttcctcaacgagtaacatactagtgataataacaaaattatttaaaataataaccattatatataacttataaattatcatgatagatttggttatatattttaacttaaatatttgacatatggtataactataagttcataagtgcatatataaattctttgacatgaaaaacaagaaatattgatacatggggggcaattggtgtcgattgcagatggctacatctttctagaattcatatttctttgtagcaaatagtcattataataacaagtattaatatcctctccaggttagcaatactaaccattatagatctctgtttatttatattgtcccttcatacatattaatgtacatacacatcctttctttctcgttattccaatccctcctggacatagatacaacaaatatgatttgttccgtagaatcacaaactcttttgtacaggttgcaacttttaccagatcaggtatgatttcccacaaaaaatgaaccctgcttttttatagtccttgtcaatgcactcaacttaatagtttttcccatagcgccccttaattgggcagagaaaaagtagaatccatcactatgttttattaaacactatgtacgtatccatgtatgttgttgtgtaaacatttgcatatgtatataaccatacacacagacataatgtgttagtacacataatgcatgcacatggatcttattagttgtctcctagcctgcagcatcgcataatatgacttcaaattattttcattgcatttcaattaatagtatacttcattatcatttttccctttttcacatttttaataatctgtatattgggttgttcattttctagaaccaggctgagtattgatgtta

SEQ ID NO: 34351 - DNA, 1689 bp, Zea Mays
cgccacggtaccacccgccgctaacctctatcgcgttcaccatcagggcaccaccgcctccattacccccgccccctgctgccacgtccaccaccacggcaccaccgccgcccccagcgcgcgcggcccaccactaacagccagcttgggtggccgctccttccctcccttgcctcaaaggacttcttcccacgcgatgttaggagcagacatgaggcggcgagagtccagcatcggagatctccgccgccatgtaggcactgcccagcaccttgcggcccgaaaaccgtcgatctaatgccctgccctccttctccgatgccttcgccctcgcctcaggcagggtccctctcccgccttgcctggctctacgtggttgtggcgggatgtgcagacaggacgatcgtgtccggcctcctcgagaagagctccagcaacatctagaaggtgctcttgatggaggacaagcttaggaaccttggatgcaaggtgattggaaagaaaactattgaggtggagatggacctgaccaaggccaagagcgagaggtacctatgggggaacaacactgcagctatgaactccgacaagaagcagcagtttacactgggtttggctccagtctcaaaagaaacgtctgtttcagtaagctgatggtcggtcacccaaaggacccattatctatttttattaatgttaatatattaaaaactggttagagtaaacatacatattatgctatcatgtacatatatgcctctatgagacataaatatatgtgtcatgtttcaactttcatgaatttttttcctcaacgagtaacatactagtgataataacaaaattatttaaaataataaccattatatataacttataaattatcatgatagatttggttatatattttaacttaaatatttgacatatggtataactataagttcataagtgcatatataaattctttgacatgaaaaacaagaaatattgatacatggggggcaattggtgtcgattgcagatggctacatctttctagaattcatatttctttgtagcaaatagtcattataataacaagtattaatatcctctccaggttagcaatactaaccattatagatctctgtttatttatattgtcccttcatacatattaatgtacatacacatcctttctttctcgttattccaatccctcctggacatagatacaacaaatatgatttgttccgtagaatcacaaactcttttgtacaggttgcaacttttaccagatcaggtatgatttcccacaaaaaatgaaccctgcttttttatagtccttgtcaatgcactcaacttaatagtttttcccatagcgccccttaattgggcagagaaaaagtagaatccatcactatgttttattaaacactatgtacgtatccatgtatgttgttgtgtaaacatttgcatatgtatataaccatacacacagacataatgtgttagtacacataatgcatgcacatggatcttattagttgtctcctagcctgcagcatcgcataatatgacttcaaattattttcattgcatttcaattaatagtatacttcattatcatttttccctttttcacatttttaataatctgtatattgggttgttcattttctagaaccaggctgagtattgatgtta

SEQ ID NO: 34352 - DNA, 1693 bp, Zea Mays
cgccacggtaccacccgccgctaacctctatcgcgttcaccatcagggcaccaccgcctccattacccccgccccctgctgccacgtccaccaccacggcaccaccgccgcccccagcgcgcgcggcccaccactaacagccagcttgggtggccgctccttccctcccttgcctcaaaggacttcttcccacgcgatgttaggagcagacatgaggcggcgagagtccagcatcggagatctccgccgccatgtaggcactgcccagcaccttgcggcccgaaaaccgtcgatctaatgccctgccctccttctccgatgccttcgccctcgcctcaggcagggtccctctcccgccttgcctggctctacgtggtcggttgtggcgggatgtgcagacaggacgatcgtgtccggcctcctcgagaagagctccagcaacatctagaaggtgctcttgatggaggacaagcttaggaaccttggatgcaaggtgattggaaagaaaactattgaggtggagatggacctgaccaaggccaagagcgagaggtacctatgggggaacaacactgcagctatgaactccgacaagaagcagcagtttacactgggtttggctccagtctcaaaagaaacgtctgtttcagtaagctgatggtcggtcacccaaaggacccattatctatttttattaatgttaatatattaaaaactggttagagtaaacatacatattatgctatcatgtacatatatgcctctatgagacataaatatatgtgtcatgtttcaactttcatgaatttttttcctcaacgagtaacatactagtgataataacaaaattatttaaaataataaccattatatataacttataaattatcatgatagatttggttatatattttaacttaaatatttgacatatggtataactataagttcataagtgcatatataaattctttgacatgaaaaacaagaaatattgatacatggggggcaattggtgtcgattgcagatggctacatctttctagaattcatatttctttgtagcaaatagtcattataataacaagtattaatatcctctccaggttagcaatactaaccattatagatctctgtttatttatattgtcccttcatacatattaatgtacatacacatcctttctttctcgttattccaatccctcctggacatagatacaacaaatatgatttgttccgtagaatcacaaactcttttgtacaggttgcaacttttaccagatcaggtatgatttcccacaaaaaatgaaccctgcttttttatagtccttgtcaatgcactcaacttaatagtttttcccatagcgccccttaattgggcagagaaaaagtagaatccatcactatgttttattaaacactatgtacgtatccatgtatgttgttgtgtaaacatttgcatatgtatataaccatacacacagacataatgtgttagtacacataatgcatgcacatggatcttattagttgtctcctagcctgcagcatcgcataatatgacttcaaattattttcattgcatttcaattaatagtatacttcattatcatttttccctttttcacatttttaataatctgtatattgggttgttcattttctagaaccaggctgagtattgatgtta

SEQ ID NO: 34353 - DNA, 1705 bp, Zea Mays
gcgctaaccgccacggtaccacccgccgctaacctctatcgcgttcaccatcagggcaccaccgcctccattacccccgccccctgctgccacgtccaccaccacggcaccaccgccgcccccagcgcgcgcggcccaccactaacagccagcttgggtggccgctccttccctcccttgcctcaaaggacttcttcccacgcgatgttaggagcagacatgaggcggcgagagtccagcatcggagatctccgccgccatgtaggcactgcccagcaccttgcggcccgaaaaccgtcgatctaatgccctgccctccttctccgatgccttcgccctcgcctcaggcagggtccctctcccgccttgcctggctctacgtggtcggtcggttgtggcgggatgtgcagacaggacgatcgtgtccggcctcctcgagaagagctccagcaacatctagaaggtgctcttgatggaggacaagcttaggaaccttggatgcaaggtgattggaaagaaaactattgaggtggagatggacctgaccaaggccaagagcgagaggtacctatgggggaacaacactgcagctatgaactccgacaagaagcagcagtttacactgggtttggctccagtctcaaaagaaacgtctgtttcagtaagctgatggtcggtcacccaaaggacccattatctatttttattaatgttaatatattaaaaactggttagagtaaacatacatattatgctatcatgtacatatatgcctctatgagacataaatatatgtgtcatgtttcaactttcatgaatttttttcctcaacgagtaacatactagtgataataacaaaattatttaaaataataaccattatatataacttataaattatcatgatagatttggttatatattttaacttaaatatttgacatatggtataactataagttcataagtgcatatataaattctttgacatgaaaaacaagaaatattgatacatggggggcaattggtgtcgattgcagatggctacatctttctagaattcatatttctttgtagcaaatagtcattataataacaagtattaatatcctctccaggttagcaatactaaccattatagatctctgtttatttatattgtcccttcatacatattaatgtacatacacatcctttctttctcgttattccaatccctcctggacatagatacaacaaatatgatttgttccgtagaatcacaaactcttttgtacaggttgcaacttttaccagatcaggtatgatttcccacaaaaaatgaaccctgcttttttatagtccttgtcaatgcactcaacttaatagtttttcccatagcgccccttaattgggcagagaaaaagtagaatccatcactatgttttattaaacactatgtacgtatccatgtatgttgttgtgtaaacatttgcatatgtatataaccatacacacagacataatgtgttagtacacataatgcatgcacatggatcttattagttgtctcctagcctgcagcatcgcataatatgacttcaaattattttcattgcatttcaattaatagtatacttcattatcatttttccctttttcacatttttaataatctgtatattgggttgttcattttctagaaccaggctgagtattgatgtta

SEQ ID NO: 34354 - DNA, 513 bp, Zea Mays
caaggcttaacatctttctatcaacctaaacagtaagcacattcatgaacatctcagatcattgaagttgtcactaatccaagtttgaaggctgtcacaaacttcattaagaacaaaatcacaggaatgtttcttctccttgttaagtttttttttgtttattttgtccttgatatgtggccatgtcaagctatcctcattaggttttaggacaacaaaatgcttttgccatccttaaattgtgccataatttatttattttcttcttttatctatgcgcagattatttgaaggagactgttcgtgatacatttagatttgtcaggtgctgtgttgcggttccttatgaattttgtgctcattgtatttattccctttttgtagccctttgctaagcttagtcttgaagtaaactttgcagagacttttgtgatgtaattgatgagactatggatgagacttttgtgatgtaattgatgagactatggatttaaatattgttatgtgattgtg

SEQ ID NO: 34355 - DNA, 339 bp, Zea Mays
attgttttcaggccttccaacctttaaagcttagaaagtacactctgttttcaaggcttaacatctttctatcaacctaaacagtaagcacattcatgaacatctcagattatttgaaggagactgttcgtgatacatttagatttgtcaggtgctgtgttgcggttccttatgaattttgtgctcattgtatttattccctttttgtagccctttgctaagcttagtcttgaagtaaactttgcagagacttttgtgatgtaattgatgagactatggatgagacttttgtgatgtaattgatgagactatggatttaaatattgttatgtgattgtg

SEQ ID NO: 34356 - DNA, 3703 bp, Zea Mays
agcaatgaacatagagctagctaagaggatcaaactgaggggagcgttcattgacctggctgctacgcggaggcctggtggacgtagcagcagcaaggccgcgtggatttgtcccatttgttttgtttaatagtaatataatcgtggacagagcagaggcttttgcgtgtgcgtttaccagttgcccatccgggttacatctcacggaatctgaggctgaggcgacggagcgcaagcaagcaagcaagcgaaagggcagggctgcctgccacacaagagacaagggaagaggagaagggtagacgagtagacgactgtgatgaggctagaagaagagcaggcaggagctataagtaccccgcccccttccaccctctccttccacctccctcccttgctgcctcatccattccagagctgcgaagacagacagacagagagaaagagggatcgacggagcaaggcggggccgtgtccggtcacacacgagcgagccctctcggccgcgcgtttgtgaatggtgaacggcgagcggcgggcggacgcggagtgcacgcgggcgtcgctgctggggaggtatgagatcgggcggaccctcggcgagggcaacttcggcaaggtgaagtacgcgcgccacatcgccagcggcggccacttcgccatcaagatcctcgaccgcagcaagatcctctccctccgcatcgacgaccagatcaggagggagatcgggacgctcaagctgctcaagcacccgaatgtcgtccgcttgcacgaggtgcgtggcacaccgaacttgcttcaaacctcccctttcgtatcgttccttcatttcttcttggattggatccttctcctcctcgctccttccagctccagctggaccaattccccttgtctgctggactggtaagataggatccgatcccgtatacttccattccatgacgctagaaaatgaacttgctgtgctccgtaagggattattaggctagctgtccagttgtactgtcctgcaagtaacggaccatctggcttttacttggaaccaaaggattagcggtttttgcttgcgcggccgggatgagactctttcgtcacacacacacacaaacacaaaacaaaggatctcttttctctctgctagctctcgtcgcttgcttctcaacgctgttcacgcggaaaacaccggcgggagctttggctgacgtccggtccttcgatccacgccgcacggcatctccgccggagtttttactccggccgctaccggaatatgagcccctgtcctgggcataaagcggtttcgcctcgccacgccacatgcacctgcaagtagagagagaggcctgtcgagactcgagagtctatagttcacgggctcttcgcctctcggggttccaaagccaaagggggaaaaaaaaaggaaggaagaaggctcacgggctcctggaattacgctcaggaaaaaaaatcgcgagaaaacgatacgatttttcgccaggttttttgtgaaattgcttgtagtaataataacaaggaaaaaaaagtcatgtcctttgattctgtgacgaaaaccacatgcattccaagcgagacatctcaggccacagtttcacacagtcgcagtgtgccggatacgaaagcgatcccatccggagcgtcaggtccgtgaccgtctcgtctccacttgtacaaatgaaaccgaccaccggccgggacggttcccgtttcggcacagtagagcaacacggcacacgaagggggcgggcccaccgcgcgcggtacgcatgcctcttgggctacccgtcgagccatgtggccggcttcctggtggccccgccacgtcggcctcacacggtcccggtacatctggccaggcaggtactgctggagtattatgcatgcatcgtcgtgagctgggtgcaccaagtcaccccacaccgcgtgggcctgcccgcgacgcaacacttgtcgcacgggccccgcacacgtgttccgcggggcccccttggctgctcctctatcctcccccccgggccgctggccgcggccaccaactctgtgcgccttggtgtgaccggtggtctctgtgctcccaagctgagcagcagcaatcgccgttccggaggccggagcacagagacgagacccgccgagcagtttgggttttttttttttttgatgatttggtgcacctacctaaagaagcctttggcatcgagtacgcctagtaccaccaccaccaccaaagaagccttgagcatgcagggttgctgccagtaaaacgaagatctacatggtgcttgagtttgtcaacggcggcgagctcttcgacaagatcgctatcaaggggaaactgtccgaacacgagggcaggaggctcttccagcagctaatcgacggcgtcagctattgccatgacagaggtgtctaccaccgagacctcaagccagagaatgtccttgttgatcggaagggcaccatcaagatctctgacttcggcctcagcgctctacctcaacatctcgggagtgacggacttctgcacacaacatgtggcagccccaactacatagctcctgaggttctgcaaaacagaggctatgacggctccttgtcagatctctggtcgtgtggggtgatcctctacgtgatgcttgttggctgccttcccttcgacgacaggaacctcgtcgttctttatcagaagattttcaagggagactgtcagatccccaagtggctttcgcctgccgcgcaggaccttctcaagaggatcctccaaccgaatccgatgaagaggatcaacgtcgcggggatcagggagcacgagtggttcaagaaggactacgtgcctgctgttccgcacgatgatgacgaagacgtccttcctagtccagctccctcgataaagccaatcgatgagccggcgcaagagaagtgttctcctatcaacgcttttcagttgatcgggatggcctcttcccttgacctttctggtttcttcgaggaagaggatgcagcgcaaagaaagattcggttcacttcgacgcacccacccaaggatctatttgacaagatcgagagcgttgtcatggagatgggattcaaagtccataggggggcaggcaagctcaaggtcttgaagaatagcaagtgttccaggaacccgtcatcattgttggtgtgcaccgaggtgtttgagctcggtccatcattatatgtcgtagagcttaggaaatcccacggagactctacgttgtatagacagctgtgcgaaaggctctccgatgagctaggtgcctgcaagacagaccagatcgcgaggactgaatcatcgagtgacgacctctcgagcgtcgatggcgaagcgttccctctatctgggttctgatcatattgctttccctgtgttgttttgggaacaggggatgaggaacatgctcgttcctgatgcaattctagattaggatcatgaatatagtgtacaaagccagcggcggcggcggtgcaaattagccaccgggttgaatataaataatatatatatatgatatgttgcatcttctaatcctcggattctcgttctgatccataactaactgctccatccgtcctaaaatagtatttattttagagtttttatatctatattcaactacatgatgataatagacacatatatatagaacacatacatcaa

SEQ ID NO: 34357 - DNA, 1427 bp, Zea Mays
ctcaattcagaagctttagcacaactacagcacgatgcttgcagcaagcacaaaactagactgcagtctgcagtggccactggatgagaaaactaagatgagttccttgcagacccaacatgcagcgagtgaagacgcatccgtttgatcaaagcagagttcaattctctgctgtctttatattaagtcttgctgccatgatgctgagacttgttacttccgagagcagtctttgtgtttgatatccttcctgttgggtctgcaaaagtccagcctttgggtgatgctagtttcagagagtacagcaattccttcatcgttgtcatgctcacttgagttggatccactactgagggatcttgttgagaagaaactaagcctgaagaggaatgtgactgcaatggctaccgagctcagggatgccaggaacaggcttgcttcacaggaactgttgctggctcaggagatagaagccagaaaggttgctgagctaaagacgagaaatttggaggatgaggtgagcaagctgcagaaatgcttaggggacaaagatgagcagttgcgtgcatcgctatgtagcgcagatcaggatgatggtgtggccaagccgggagaggatataagggcgctatctgctcactgggtaaacagaagcaaggaactggaatcacagcatcggaggacagcccaggagctgaagaggagggtaatgagacttgaactctgcatcctagaaccatatggaaactccataggctaagaaatcagatggccgtgcagcagcccacttgtagtggctcaggcgagaagcgcaatctctgggagagctcagccttcaagctcatagcatccgtgtcaatgttggtcctatttacacttgcaaaccgatgagctctcacggtctcgcttttgcgtacagaaaatataaacgttcatgtttgaatgtttgaattgctgtgaaacggacatttgttctcaacatccattcatgctagttacgtccataacaataaaaatgaatttctaggtccttaagcttgttaagtagcgcatcacagtggtcggtatagtcccaaaaataggcttgcagtgcaccatttttataagtttagaggatgtggtacatcacttaacaagttgaagtgtctagaaatgtattttcaaagtttgtggacctaagtatcatcctttgacgactttaaagggccactgatgcaactaactctttttaatacgcgtatgtttaaaacatacatttatatatgtatatacattttagggatcattaaaaattaccgttcttttaatcacttgttcattcacttttcacttcaacacattatcaaaacttttcctctcaagaacaagagaataacataggcacaaaggcctatgtagtcctagatatgttcaaatactgggtcagg

SEQ ID NO: 34358 - DNA, 1611 bp, Zea Mays
ctcaattcagaagctttagcacaactacagcacgatgcttgcagcaagcacaaaactagactgcagtctgcagtggccactggatgagaaaactaagatgagttccttgcagacccaacatgcagcgagtgaagacgcatccgtttgatcaaagcagagttcaattctctgctgtctttatattaagtcttgctgccatgatgctgagacttgttacttccgagagcagtctttgtgtttgatatccttcctgttgggtctgcaaaagtccagcctttgggtgatgctagtttcagagagtacagcaattccttcatcgttgtcatgctcacttgagttggatccactactgagggatcttgttgagaagaaactaagcctgaagaggaatgtgactgcaatggctaccgagctcagggatgccaggaacaggcttgcttcacaggaactgttgctggctcaggagatagaagccagaaaggttgctgagctaaagacgagaaatttggaggatgaggtgagcaagctgcagaaatgcttaggggacaaagatgagcagttgcgtgcatcgctatgtagcgcagatcagttccgcaatgagttggatggtttcagatcacaacttccagtgatgacaacgctgctgcactgctcatatttgttaggaaagctgaatgataggaacaattcgatgagtgagggtgaatttccggtgaacaatttagcagaacagctcaatcatcttgaaaagtgcctcgagagcagggatcccacactaagacaattcaaagattgttactctttgagaaccgagtctgacatcacggatgcctttgccagagttgcatttgataacgatgatggtgtggccaagccgggagaggatataagggcgctatctgctcactgggtaaacagaagcaaggaactggaatcacagctaagaaatcagatggccgtgcagcagcccacttgtagtggctcaggcgagaagcgcaatctctgggagagctcagccttcaagctcatagcatccgtgtcaatgttggtcctatttacacttgcaaaccgatgagctctcacggtctcgcttttgcgtacagaaaatataaacgttcatgtttgaatgtttgaattgctgtgaaacggacatttgttctcaacatccattcatgctagttacgtccataacaataaaaatgaatttctaggtccttaagcttgttaagtagcgcatcacagtggtcggtatagtcccaaaaataggcttgcagtgcaccatttttataagtttagaggatgtggtacatcacttaacaagttgaagtgtctagaaatgtattttcaaagtttgtggacctaagtatcatcctttgacgactttaaagggccactgatgcaactaactctttttaatacgcgtatgtttaaaacatacatttatatatgtatatacattttagggatcattaaaaattaccgttcttttaatcacttgttcattcacttttcacttcaacacattatcaaaacttttcctctcaagaacaagagaataacataggcacaaaggcctatgtagtcctagatatgttcaaatactgggtcagg

SEQ ID NO: 34359 - DNA, 1708 bp, Zea Mays
agggtctcaattcagaagctttagcacaactacagcacgatgcttgcagcaagcacaaaactagactgcagtctgcagtggccactggatgagaaaactaagatgagttccttgcagacccaacatgcagcgagtgaagacgcatccgtttgatcaaagcagagttcaattctctgctgtctttatattaagtcttgctgccatgatgctgagacttgttacttccgagagcagtctttgtgtttgatatccttcctgttgggtctgcaaaagtccagcctttgggtgatgctagtttcagagagtacagcaattccttcatcgttgtcatgctcacttgagttggatccactactgagggatcttgttgagaagaaactaagcctgaagaggaatgtgactgcaatggctaccgagctcagggatgccaggaacaggcttgcttcacaggaactgttgctggctcaggagatagaagccagaaaggttgctgagctaaagacgagaaatttggaggatgaggtgagcaagctgcagaaatgcttaggggacaaagatgagcagttgcgtgcatcgctatgtagcgcagatcagttccgcaatgagttggatggtttcagatcacaacttccagtgatgacaacgctgctgcactgctcatatttgttaggaaagctgaatgataggaacaattcgatgagtgagggtgaatttccggtgaacaatttagcagaacagctcaatcatcttgaaaagtgcctcgagagcagggatcccacactaagacaattcaaagattgttactctttgagaaccgagtctgacatcacggatgcctttgccagagttgcatttgataacgatgatggtgtggccaagccgggagaggatataagggcgctatctgctcactgggtaaacagaagcaaggaactggaatcacagttggatcagcatcggaggacagcccaggagctgaagaggagggtaatgagacttgaactctgcatcctagaaccatatggaaactccataggctaagaaatcagatggccgtgcagcagcccacttgtagtggctcaggcgagaagcgcaatctctgggagagctcagccttcaagctcatagcatccgtgtcaatgttggtcctatttacacttgcaaaccgatgagctctcacggtctcgcttttgcgtacagaaaatataaacgttcatgtttgaatgtttgaattgctgtgaaacggacatttgttctcaacatccattcatgctagttacgtccataacaataaaaatgaatttctaggtccttaagcttgttaagtagcgcatcacagtggtcggtatagtcccaaaaataggcttgcagtgcaccatttttataagtttagaggatgtggtacatcacttaacaagttgaagtgtctagaaatgtattttcaaagtttgtggacctaagtatcatcctttgacgactttaaagggccactgatgcaactaactctttttaatacgcgtatgtttaaaacatacatttatatatgtatatacattttagggatcattaaaaattaccgttcttttaatcacttgttcattcacttttcacttcaacacattatcaaaacttttcctctcaagaacaagagaataacataggcacaaaggcctatgtagtcctagatatgttcaaatactgggtcagg

SEQ ID NO: 34360 - DNA, 1005 bp, Zea Mays
tgtttccctagctttgtttatcccacaccttgttttccacttaatttttgggtagttttgctattgctccacttgttttgggaaattaatgttatattatgaacatgttccagttatgctattgctttaattattgttcatgacaagatcattgtgttaattggaacatggagcttaacttgagatatccgcgctaccacaagggtggaatgagacacccttggctaactaattaggaaagctagtggaggactaccttacccgaaaggggcaagggcgatagaggagctgcgtataggaggttcttgggtcgatcatgctgcggtggcttttcggacgagggattcctatattacccttctcagaaaccgtagcgggttttctaaagctagtggaactttgcaaaggcctcgtagtggatccctagccattcacctcggaagtgtctaagggccttacaaaccctggctagctgggatacacgacttgtgggtaaatggcgcaacctctgtagagtgtaaaactggtatatcagccgtgctcacggtcaagagtgactcaggactttcgcatgattaatttatagaattaaacttaatctgtcgtatgcattgcatcacggtgttattatcaattgtgatctcttatttttttggattggtatctacttatacttagtaactgctaataaaattttgaccaactctaaaagtaatgctcaactctaaccatctcctttggtaagccttacacttcacataagccccgctgcaagtgagctcatgcacattattccccacaacttgttgagcgatgaacgtatgtgagctcacctttgctatactcacattcccctaggttaaggacaggtaccacaggatgaggcgcatgaaggatgtcgtgatggtgttcgtgacaggtctaggccgtcatctgctagtcaactatggttgctggattgtggtcttcgtatgatgtaatcatttatctattttgtacagaact

SEQ ID NO: 34361 - DNA, 495 bp, Zea Mays
cccctatccgtccaatgagctcgcgcctagcctcctttcgcgcggagtataaaaccgggtcctcctctcgtccagccacccatgggcgccaaggcctctgattgtgtcgccaccgggggccatgaggcagggagacccgccgtccgccaccatggctaaacacgcgcacacgccgtcgcgcggacctggccatggcaatagggtattcgctggtaatcgggaaaggtgtgcgtggcatcatcaggcaaaaaacggcgacctcgatagatgaattcctcgccgaaggtggagctccaccgcaggtccgtcgcacgtcgtggccaaggcatttgcgctactagaatcacggttaaggacaggtaccacaggatgaggcgcatgaaggatgtcgtgatggtgttcgtgacaggtctaggccgtcatctgctagtcaactatggttgctggattgtggtcttcgtatgatgtaatcatttatctattttgtacagaact

SEQ ID NO: 34362 - DNA, 832 bp, Zea Mays
acccgaccagggatggacgtaaactcgtaagctaccgagggtagggataatcgtccaggtcttattgttgtttaaagccgccccgccacagcaggcaggttagttcctgtgtcgttgctgccggagagttcttggcgaagagaccttaggataagttgctaaaacaaacggaggggaggatcgacccgttcagtagaattccgaagaaagactgttggcagcaggtggagacatttctttggcccccttccaaataaatgcgggcagggtagagctcggcagagggttcgagaatagggtagggtcctgtcctaataaagataaataaaggggcgggtccctttatgcatgcatcttcgtacaagtggaggccggaaagatcaaatcaatagaaccgctcacatcacagtagtcgtagttgcgtaaaggccatggggggcaaccataacataaggcaatgactttcacggatctctctctatctatagatataacgaacgggcgggttcgaaaggtagggttttttacggtcgggtcccctaccactagtctggctagccttcttcgggcaggaagcaggccgggcccgacgggcgggcatctcccacaacgcaagctacattgttcgccaccacccgagaagcaaaagattcgagagtcaaggcagaaaagacaagcatagtggtctaatgacaagggccgacgacggaagctcgggacggagccgtatgatgcggaagtctcacgtacggttccctgagaagggagtggctacccactggagcttcgaccaaccaccaccggtcaattccgctttggggccacccctgac

SEQ ID NO: 34363 - DNA, 1371 bp, Zea Mays
ttcagttttctgccttgaatatcttcatattttattgatgtttcatgtggttttccttatgtcagtaactcattatagaataattagggcaaaaactctagaagtttgtcacagaaaaaaatactttcatcttctgaatgttcctaacaagtacagtttcatgatccatgtgttacaaatattcagaaaaatacttttgctctgtgcttgatgtaattccacactgtattttccttttatctactcatgattaattgaagtattatttcttctaaaagaatgttttgtgctaatttattttcagagcgtgtctacttcttgattgggttgtttcctttactgagggtctagagaacttggttgcatatgctagaatgctacatggtatctgtgctcactaatagtccaaggttttcttaggtaaattagctattgttttcctttaaaaactttgtcccaaaatgattcaagactggtatttggttggtttaattaattatatcttgtacattctctgtgaggggtacaactaagaacctcaaaaagaatagcgaacaagtaattggtcatgcattatgttgttagtcattgtatgctcagttaactactcattttccacctatagaagaaagttctttaataggaagctaaccctcttactttgttgcgaggctttttcaatatttgacaagttcagtaagttaggtgtttttattttggagtctgtaggtacgtaatgcttatgtactgttttagttgactagtgataaaagttttaactgatattaacattgacaatacatgggtgatagatgaggctaagcatctaatttttattcctgtcaaagtttttattaatcatcatcagtttgaattctttctgtcttaggacatccaacatgatatactgggaaggaaaagatttttacacccttgtgaattcgagccactttttcatcaaattctgctagaagcattacttttgcactctccgtcttgtttgcagtttggtattttcttctttgaaaaacaagaatcgtgactgcaatggcaaatggaaggtgaaggcccttttgattgacaacttaggaaaagatggaatggaactcaaattttgatggtcggtcaagtgtgtagacttgaaatcatatatacctagttaggctcaactttagcgcaaactgttggtgaccatgttttttagttagtattttagtttggatttagagtacacttatgtatgagttatttagcaatgcttatttatgagatattgaatgatacttatctacattatattaactataatgttattaaatatatgtgtgtatgtatattataatgtggtatctcaaaaatgattataaattg

SEQ ID NO: 34364 - DNA, 872 bp, Zea Mays
ccatatttcagttttctgccttgaatatcttcatattttattgatgtttcatgtggttttccttatgtcagtaactcattatagaataattagggcaaaaactctagaagtttgtcacagaaaaaaatactttcatcttctgaatgttcctaacaagtacagtttcatgatccatgtgttacaaatattcagaaaaatacttttgctctgtgcttgatgtaattccacactgtattttccttttatctactcatgattaattgaagtattatttcttctaaaagaatgttttgtgctaatttattttcagagcgtgtctacttcttgattgggttgtttcctttactgagggtctagagaacttggttgcatatgctagaatgctacatggacatccaacatgatatactgggaaggaaaagatttttacacccttgtgaattcgagccactttttcatcaaattctgctagaagcattacttttgcactctccgtcttgtttgcagtttggtattttcttctttgaaaaacaagaatcgtgactgcaatggcaaatggaaggtgaaggcccttttgattgacaacttaggaaaagatggaatggaactcaaattttgatggtcggtcaagtgtgtagacttgaaatcatatatacctagttaggctcaactttagcgcaaactgttggtgaccatgttttttagttagtattttagtttggatttagagtacacttatgtatgagttatttagcaatgcttatttatgagatattgaatgatacttatctacattatattaactataatgttattaaatatatgtgtgtatgtatattataatgtggtatctcaaaaatgattataaattg

SEQ ID NO: 34365 - DNA, 681 bp, Zea Mays
atgcctcctggctcgccgtcgtcgcccacagaccccacctcttccaaggtggttcctccgcctagttactgtagtcatggctcccctgccatcattctctccttcctctattgtctccttcctccagacagagaggcggcactggtacaggtgctaccgggcgaggtggagcctaatcgcatcccatggaggaccaccctccaatggatccaggacgtgaggcaccaaatcaatggagccgcgcaggtggtaccagcgaggtggagcccggtcgcatcccatggaggacaaccttccaattgatccagggcgtgaggcaccaattcagtggagagaaaaacaagaatcgtgactgcaatggcaaatggaaggtgaaggcccttttgattgacaacttaggaaaagatggaatggaactcaaattttgatggtcggtcaagtgtgtagacttgaaatcatatatacctagttaggctcaactttagcgcaaactgttggtgaccatgttttttagttagtattttagtttggatttagagtacacttatgtatgagttatttagcaatgcttatttatgagatattgaatgatacttatctacattatattaactataatgttattaaatatatgtgtgtatgtatattataatgtggtatctcaaaaatgattataaattg

SEQ ID NO: 34366 - DNA, 791 bp, Zea Mays
atgcctcctggctcgccgtcgtcgcccacagaccccacctcttccaaggtggttcctccgcctagttactgtagtcatggctcccctgccatcattctctccttcctctattgtctccttcctccagacagagaggcggcactggtacaggtgctaccgggcgaggtggagcctaatcgcatcccatggaggaccaccctccaatggatccaggacgtgaggcaccaaatcaatggagggtcgtttctccgcctagcaaccacagccacgactcccctgacatcattctctccctcctctgttgtcttcgtttcccttctctgctgctgggagagagaggtggcacagccgcgcaggtggtaccagcgaggtggagcccggtcgcatcccatggaggacaaccttccaattgatccagggcgtgaggcaccaattcagtggagagaaaaacaagaatcgtgactgcaatggcaaatggaaggtgaaggcccttttgattgacaacttaggaaaagatggaatggaactcaaattttgatggtcggtcaagtgtgtagacttgaaatcatatatacctagttaggctcaactttagcgcaaactgttggtgaccatgttttttagttagtattttagtttggatttagagtacacttatgtatgagttatttagcaatgcttatttatgagatattgaatgatacttatctacattatattaactataatgttattaaatatatgtgtgtatgtatattataatgtggtatctcaaaaatgattataaattg

SEQ ID NO: 34367 - DNA, 1140 bp, Zea Mays
atgcctcctggctcgccgtcgtcgcccacagaccccacctcttccaaggtggttcctccgcctagttactgtagtcatggctcccctgccatcattctctccttcctctattgtctccttcctccagacagagaggcggcactggtacaggtgctaccgggcgaggtggagcctaatcgcatcccatggaggaccaccctccaatggatccaggacgtgaggcaccaaatcaatggaggtaagtggcgtcggatctggcagtttccatgtcgtccccccatctcctggctcgccgctgtcgatcccccaaattttccagggtcgtttctccgcctagcaaccacagccacgactcccctgacatcattctctccctcctctgttgtcttcgtttcccttctctgctgctgggagagagaggtggcacagccgcgcaggtggtaccagcgaggtggagcccggtcgcatcccatggaggacaaccttccaattgatccagggcgtgaggcaccaattcagtggagaggtaagcgacgccggatctggcagctttcaggttgtcccccctcccccagcgcgcagacacattctcctgcaagcatcgtcgagctcaattttcaggatgtcatgtgactaataccagcaggcagcagactaggtttagtcagatggcagtagagcgtgtctacttcttgattgggttgtttcctttactgagggtctagagaacttggttgcatatgctagaatgctacatggtatctgtgctcactaatagtccaaggttttcttagaaaaacaagaatcgtgactgcaatggcaaatggaaggtgaaggcccttttgattgacaacttaggaaaagatggaatggaactcaaattttgatggtcggtcaagtgtgtagacttgaaatcatatatacctagttaggctcaactttagcgcaaactgttggtgaccatgttttttagttagtattttagtttggatttagagtacacttatgtatgagttatttagcaatgcttatttatgagatattgaatgatacttatctacattatattaactataatgttattaaatatatgtgtgtatgtatattataatgtggtatctcaaaaatgattataaattg

SEQ ID NO: 34368 - DNA, 810 bp, Zea Mays
atgcctcctggctcgccgtcgtcgcccacagaccccacctcttccaaggtggttcctccgcctagttactgtagtcatggctcccctgccatcattctctccttcctctattgtctccttcctccagacagagaggcggcactggtacaggtgctaccgggcgaggtggagcctaatcgcatcccatggaggaccaccctccaatggatccaggacgtgaggcaccaaatcaatggagagaggtggcacagccgcgcaggtggtaccagcgaggtggagcccggtcgcatcccatggaggacaaccttccaattgatccagggcgtgaggcaccaattcagtggagagagcgtgtctacttcttgattgggttgtttcctttactgagggtctagagaacttggttgcatatgctagaatgctacatggtatctgtgctcactaatagtccaaggttttcttagaaaaacaagaatcgtgactgcaatggcaaatggaaggtgaaggcccttttgattgacaacttaggaaaagatggaatggaactcaaattttgatggtcggtcaagtgtgtagacttgaaatcatatatacctagttaggctcaactttagcgcaaactgttggtgaccatgttttttagttagtattttagtttggatttagagtacacttatgtatgagttatttagcaatgcttatttatgagatattgaatgatacttatctacattatattaactataatgttattaaatatatgtgtgtatgtatattataatgtggtatctcaaaaatgattataaattg

SEQ ID NO: 34369 - DNA, 556 bp, Zea Mays
atgcctcctggctcgccgtcgtcgcccacagaccccacctcttccaaggtggttcctccgcctagttactgtagtcatggctcccctgccatcattctctccttcctctattgtctccttcctccagacagagaggcggcactggtacaggtgctaccgggcgaggtggagcctaatcgcatcccatggaggaccaccctccaatggatccaggacgtgaggcaccaaatcaatggagaaaaacaagaatcgtgactgcaatggcaaatggaaggaaaagatggaatggaactcaaattttgatggtcggtcaagtgtgtagacttgaaatcatatatacctagttaggctcaactttagcgcaaactgttggtgaccatgttttttagttagtattttagtttggatttagagtacacttatgtatgagttatttagcaatgcttatttatgagatattgaatgatacttatctacattatattaactataatgttattaaatatatgtgtgtatgtatattataatgtggtatctcaaaaatgattataaattg

SEQ ID NO: 34370 - DNA, 584 bp, Zea Mays
atgcctcctggctcgccgtcgtcgcccacagaccccacctcttccaaggtggttcctccgcctagttactgtagtcatggctcccctgccatcattctctccttcctctattgtctccttcctccagacagagaggcggcactggtacaggtgctaccgggcgaggtggagcctaatcgcatcccatggaggaccaccctccaatggatccaggacgtgaggcaccaaatcaatggagaaaaacaagaatcgtgactgcaatggcaaatggaaggtgaaggcccttttgattgacaacttaggaaaagatggaatggaactcaaattttgatggtcggtcaagtgtgtagacttgaaatcatatatacctagttaggctcaactttagcgcaaactgttggtgaccatgttttttagttagtattttagtttggatttagagtacacttatgtatgagttatttagcaatgcttatttatgagatattgaatgatacttatctacattatattaactataatgttattaaatatatgtgtgtatgtatattataatgtggtatctcaaaaatgattataaattg

SEQ ID NO: 34371 - DNA, 1402 bp, Zea Mays
atgcctcctggctcgccgtcgtcgcccacagaccccacctcttccaaggtggttcctccgcctagttactgtagtcatggctcccctgccatcattctctccttcctctattgtctccttcctccagacagagaggcggcactggtacaggtgctaccgggcgaggtggagcctaatcgcatcccatggaggaccaccctccaatggatccaggacgtgaggcaccaaatcaatggagccgcgcaggtggtaccagcgaggtggagcccggtcgcatcccatggaggacaaccttccaattgatccagggcgtgaggcaccaattcagtggagagagcgtgtctacttcttgattgggttgtttcctttactgagggtctagagaacttggttgcatatgctagaatgctacatggtatctgtgctcactaatagtccaaggttttcttaggtaaattagctattgttttcctttaaaaactttgtcccaaaatgattcaagactggtatttggttggtttaattaattatatcttgtacattctctgtgaggggtacaactaagaacctcaaaaagaatagcgaacaagtaattggtcatgcattatgttgttagtcattgtatgctcagttaactactcattttccacctatagaagaaagttctttaataggaagctaaccctcttactttgttgcgaggctttttcaatatttgacaagttcagtaagttaggtgtttttattttggagtctgtaggtacgtaatgcttatgtactgttttagttgactagtgataaaagttttaactgatattaacattgacaatacatgggtgatagatgaggctaagcatctaatttttattcctgtcaaagtttttattaatcatcatcagtttgaattctttctgtcttaggacatccaacatgatatactgggaaggaaaagatttttacacccttgtgaattcgagccactttttcatcaaattctgctagaagcattacttttgcactctccgtcttgtttgcagtttggtattttcttctttgaaaaacaagaatcgtgactgcaatggcaaatggaaggtgaaggcccttttgattgacaacttaggaaaagatggaatggaactcaaattttgatggtcggtcaagtgtgtagacttgaaatcatatatacctagttaggctcaactttagcgcaaactgttggtgaccatgttttttagttagtattttagtttggatttagagtacacttatgtatgagttatttagcaatgcttatttatgagatattgaatgatacttatctacattatattaactataatgttattaaatatatgtgtgtatgtatattataatgtggtatctcaaaaatgattataaattg

SEQ ID NO: 34372 - DNA, 1512 bp, Zea Mays
atgcctcctggctcgccgtcgtcgcccacagaccccacctcttccaaggtggttcctccgcctagttactgtagtcatggctcccctgccatcattctctccttcctctattgtctccttcctccagacagagaggcggcactggtacaggtgctaccgggcgaggtggagcctaatcgcatcccatggaggaccaccctccaatggatccaggacgtgaggcaccaaatcaatggagggtcgtttctccgcctagcaaccacagccacgactcccctgacatcattctctccctcctctgttgtcttcgtttcccttctctgctgctgggagagagaggtggcacagccgcgcaggtggtaccagcgaggtggagcccggtcgcatcccatggaggacaaccttccaattgatccagggcgtgaggcaccaattcagtggagagagcgtgtctacttcttgattgggttgtttcctttactgagggtctagagaacttggttgcatatgctagaatgctacatggtatctgtgctcactaatagtccaaggttttcttaggtaaattagctattgttttcctttaaaaactttgtcccaaaatgattcaagactggtatttggttggtttaattaattatatcttgtacattctctgtgaggggtacaactaagaacctcaaaaagaatagcgaacaagtaattggtcatgcattatgttgttagtcattgtatgctcagttaactactcattttccacctatagaagaaagttctttaataggaagctaaccctcttactttgttgcgaggctttttcaatatttgacaagttcagtaagttaggtgtttttattttggagtctgtaggtacgtaatgcttatgtactgttttagttgactagtgataaaagttttaactgatattaacattgacaatacatgggtgatagatgaggctaagcatctaatttttattcctgtcaaagtttttattaatcatcatcagtttgaattctttctgtcttaggacatccaacatgatatactgggaaggaaaagatttttacacccttgtgaattcgagccactttttcatcaaattctgctagaagcattacttttgcactctccgtcttgtttgcagtttggtattttcttctttgaaaaacaagaatcgtgactgcaatggcaaatggaaggtgaaggcccttttgattgacaacttaggaaaagatggaatggaactcaaattttgatggtcggtcaagtgtgtagacttgaaatcatatatacctagttaggctcaactttagcgcaaactgttggtgaccatgttttttagttagtattttagtttggatttagagtacacttatgtatgagttatttagcaatgcttatttatgagatattgaatgatacttatctacattatattaactataatgttattaaatatatgtgtgtatgtatattataatgtggtatctcaaaaatgattataaattg

SEQ ID NO: 34373 - DNA, 797 bp, Zea Mays
atgcctcctggctcgccgtcgtcgcccacagaccccacctcttccaaggtggttcctccgcctagttactgtagtcatggctcccctgccatcattctctccttcctctattgtctccttcctccagacagagaggcggcactggtacaggtgctaccgggcgaggtggagcctaatcgcatcccatggaggaccaccctccaatggatccaggacgtgaggcaccaaatcaatggagccgcgcaggtggtaccagcgaggtggagcccggtcgcatcccatggaggacaaccttccaattgatccagggcgtgaggcaccaattcagtggagagagcgtgtctacttcttgattgggttgtttcctttactgagggtctagagaacttggttgcatatgctagaatgctacatggtatctgtgctcactaatagtccaaggttttcttagaaaaacaagaatcgtgactgcaatggcaaatggaaggtgaaggcccttttgattgacaacttaggaaaagatggaatggaactcaaattttgatggtcggtcaagtgtgtagacttgaaatcatatatacctagttaggctcaactttagcgcaaactgttggtgaccatgttttttagttagtattttagtttggatttagagtacacttatgtatgagttatttagcaatgcttatttatgagatattgaatgatacttatctacattatattaactataatgttattaaatatatgtgtgtatgtatattataatgtggtatctcaaaaatgattataaattg

SEQ ID NO: 34374 - DNA, 1024 bp, Zea Mays
atgcctcctggctcgccgtcgtcgcccacagaccccacctcttccaaggtggttcctccgcctagttactgtagtcatggctcccctgccatcattctctccttcctctattgtctccttcctccagacagagaggcggcactggtacaggtgctaccgggcgaggtggagcctaatcgcatcccatggaggaccaccctccaatggatccaggacgtgaggcaccaaatcaatggaggtaagtggcgtcggatctggcagtttccatgtcgtccccccatctcctggctcgccgctgtcgatcccccaaattttccagggtcgtttctccgcctagcaaccacagccacgactcccctgacatcattctctccctcctctgttgtcttcgtttcccttctctgctgctgggagagagaggtggcacagccgcgcaggtggtaccagcgaggtggagcccggtcgcatcccatggaggacaaccttccaattgatccagggcgtgaggcaccaattcagtggagaggtaagcgacgccggatctggcagctttcaggttgtcccccctcccccagcgcgcagacacattctcctgcaagcatcgtcgagctcaattttcaggatgtcatgtgactaataccagcaggcagcagactaggtttagtcagatggcagtagaaaaacaagaatcgtgactgcaatggcaaatggaaggtgaaggcccttttgattgacaacttaggaaaagatggaatggaactcaaattttgatggtcggtcaagtgtgtagacttgaaatcatatatacctagttaggctcaactttagcgcaaactgttggtgaccatgttttttagttagtattttagtttggatttagagtacacttatgtatgagttatttagcaatgcttatttatgagatattgaatgatacttatctacattatattaactataatgttattaaatatatgtgtgtatgtatattataatgtggtatctcaaaaatgattataaattg

SEQ ID NO: 34375 - DNA, 771 bp, Zea Mays
ttcaatattttaacgccagattaaatattaatagactctatttgcatctggtctaatttcaccatctcatcaatacaacatcatttttattcataatgtttacatcctgacttaggttgtaggtcggagatcaagtctccactctccggggatataacggcgatccgaatcgatttactcagctgaggatctctaaccacacgacatatgtagcacttaacccttgcatatgtcaaccgttcccacggatcctccactacatgaacaggtccacgccacccgagagcacaccaccccttttaggcgatcctttgccaggagggtacgtgccactctcgccatctctccactcccagtgcgcgattgtcttttcatgtatggaatagccgggttcaagcttaccctgtcccatttccagggcatgtggctagttaagatagtccttgatcaacaggcctacatacgcatccaatccttagctaacctgggtagaacatcacctattcctagcccaagtcccgatttaagtactttcatccttaggattgtttatgttcctaggatgaaaagagcatcaaagggaactttgtagtaagatcccaccacgctctcaatgaaaatattcttgcaggtagaagtcatctttcctcaggataacccctgagctaggcagtattgcaaaagacaacctctatccacaagatctaagcagggctaagcatttttgaaaatcatattttgatacttcaccagaagtatctataaaggtat

SEQ ID NO: 34376 - DNA, 3352 bp, Zea Mays
ctttaaaggaaactagaaatatgttgaaagtctctcttttatttgttgcttcaactttcagttttaagttttggatctaagttctgaataccaaattcttaattatcaatatggatttagaaagatatactcgataagggattgaaattattactggaagtaactttattctcaaaactttggagaactttttataaatcctaaaatagaaatttgagacgttacattcacacctacacaattcaacatcattatcatagttgttacaaccaggtagcagtgtacttccaagtttgttctttgtatatcaccaccttggatgcttgctacctctgttttacagaatttaaaggagtcctagcggacattgtcgcaaaatggattccagaacacgcaaagaggcaatgttcctacgttggattgtgaaatgaccgtgcctttaccctgtggttgcaattgtgcatttcccctaggatgttggatgatctgaggcatgccagcttgtcattgaagatgcaaggttacatacttgtacgacattgtgacctgtgtagctaagtagtctatgtcgcagtgacatttaacgacacacccttcctactaactgacgttttgtttcatatgtactctctatcctcaaaacaatgctttgttgaatattttgcatgtcgttgcaatgcacggccatctacctagtcaaataattaagttgatgttgatgcctccctggccaaggaatctcctatcgattgaatgttatctttttctttactgggactaatggggatttctattactccttgttatcttctcctaatataagaggacgacatctatcggcaacgactatcgtgcaagcaatttttaagtgtaagtgtgtaaatgtaatacccaagtaaatggatttataaaatgtgtaagaattgggaattataaaaggtttatttgattacttgtttgtttttcctcatgtttgcatactcaaatcatggggtcatattaactactaacaattacattaaataaaagaaatagtgcatcatgttggagtttattggtttgtgtatttaataataatagtaataataataataacaataaaagtatattaatgatgaaaatgaggattaacctaattggaaacctgagaattcaaaacggggtcttgaaatcagtttgaacatttgaaaaattggaaaacaaaaagaataaaaaaaagaaaagaaccctcgtgccaggcccaaagtccttactgcggcccaactttctccccgcgacgtggcccagttggatgtctacgccgaccactgggtccgctggtcagccatgcgccttcactgcgttgcacgacgacaagtgggaccacctgcgcagccacacaccgcgcaagtgccatgccacccttgcacttacgcatgggcctgcttgtcagtctcactagctgcgatgggcgtgttcatgtcgtcgaacgctgtcacacgaaacccacatgttaggcgagcgatgtagatcttcctcctcccctgtaacaaactttcgccaagttcgccgctcgatggaccgcagctggcaactcaaccaaccttcctggtgactataaaacgcagcgtcaaaccctaactccccatgccttcttttgtcgcactcaattccatcgccactagtgagggaagggttcggctgaacgccgccgcagtcgatcctcgacctcgtctctgttgaggactcggagtcgggcagtgaagcttcgccgttgttcctagcgggcgttcgtagcggggccgggcgagaccggtcatcgggacagcttcaattgctcaccgacaatcgtgcatagtctcgggtccacctatcgtcgtggccagcaccacccaagcacccattcgcggtaaggagcgtaccattgtgttcatcgtaccttgttctctgtataaccccaaaccacgatagaatagcagcactgcggtgccggttcgcccaactccgggcatcccccgccgtggttggtggcggcgccgccgccgtgggggtagcgtggtagaggcgcgttctgggccatcgattttgcgatgaactgttaagattagaagagtctgtgtgatggtcggaacagtaggatcgggatgaacggcccggatctccccgagcgtaccgattcggttagagtaaactgaactgtccgattcgaatcatacgcgtgggaatcaatcgttggggttttaaatctggtctgttggttgccgatctaacggccacgggcgcataccgtttcagtgcggggctgatttaatttgaaccatctatataggatcgtggggatcgtagcgtgggatacctcttcggcccgatcgttttgcgaaagagtccctaggcttaataaaaatcaacctaccatcctttctcagtggaaataaattacacccgagccctagaatttgcagttgtgccccggtattccctagaatttgtgcccacggtccaaaagacattttatataaaaataaatggagaaaattgtttttagtataaaaaacaaatttaaggagtttacaaaattcataacttgaccatttttaactccttttttacccattccagttgcattaattttgtattaatattatttatcatctaataagcctgttttatcatgaaacatagattaaaattatccacgtagtttattccgtaccaaaaacttgaaacttcgtaaaatcataactttttaaccgtaaatccaaatttagtgattctcgaacccacgatctcgttatggtgcgtagaatattatcatacattatattcctctatttggtgtgatgttaatttcttctataccatgtttgtttgtattgttgcgagtagacgagcaagtgaccgaggaccccggtacctgtggcagaacctcccaagctattgggcccacatgcacctgtccttgtctcaaagacctcagacggctatgcatgtgcaccaaataacttaacaggatccgtctgagtgccccaaggacctcggataaaccacttacaactagaaccgcgggattaagtaacacaaatcacacacacaacatttttgcagcggaaatcttagtaccaaattttacaggttacaaaaattttacattgtacatgaccggggtgattacaaaggtgattcaaagaaataactttaaactgttataaattatttataagtttaaaatatatgctagctcaagtgaccatcctcaataagaagataaagatggggtatacttatataagaaggccgagcccaccggcacttaacaccatcaacagcagcacaaaactataacctgaaaaacaacagggaataaaaccctgag

SEQ ID NO: 34377 - DNA, 611 bp, Zea Mays
cccatggccgaacaggttcaaaacgttgagggcaacggggcgattggtgtgtggggtacttaccagccgattgagctatgaaggaacccaacaacgacgtgacgtggacgacaacggagatggatccatggtgagcaattggttgtgttccggttgatgccttagcccgcgaaggccacggataggtgcggtgtgtatcggcgatggaccctcatccccccacgaaccccgaacagcggcataggcgatttccccagcggcggcggtcttcttcaacttcacggcaacggcgcccaaagcattgctggagtatggcccaagggggcacaattatatagctgcggggaaacgcaattggccgagaatcccgatgatttggttagggagccccggattccgcgtggcatggaccggtagtagcatcgctccaaacatgacgtgagatggaaggagctcctgacatggggacaccacaagccaacgtcgggatcatgagaatgacgcgatgggcccacatgtcggcatcaaggcaggcttggtcatgctggcaggctgagcaagggagagtgggccgaggacacaggagattcagcccaggtaagggcttcact

SEQ ID NO: 34378 - DNA, 1379 bp, Zea Mays
gtacatggttcgcattcggtttaccttccaaaaccgggtgtgatagttgccttactaggacatattataactgatggtggaataaaggtagatccaggcaagagaagtgaaatactaaattggaagcaaccgaaggatgtgtcaaagatcaggagttttcttcgattagcaggatattatataagatttattgaaggcttctccaagttagtgaaacctcttacttcactgatggagaaaggcaaagagtttaaatgggttgaggcttgtgagaaatgtttttaagaactcaaggaaacgctaaccactgcaccagttttggtaatgccagatatttcacgctttgaagatttggaggcactgcatgattggaaataagtgcaaaatcttcactgatcacaaaagtttaaaatacatattcactcagaaggaactcaatctaaaacatcaaagatggcttgagttaataaaagattatgatttggaccaatatcatccaggaaaagtgaacatcatggtagatgctttgagccgtaaaggtcaagtgaatagtgttagtgcatatctgttgcagcaagagttatgttgggagacggaacaacttaacgttggtatggttaataatatagaggcaacaatcatggaagtggaatctacattggagcaagaaattcataaagggcaagaatcagatgagaagattaaggaaattaagactcagattagtttgggtaaagccccagatttcactgaagatgagcaagacacagtttggtttaaaaagaggatatgtgtaccagaagttgaacaccttcgccagcttattttgggagaaggtcatgattcagcgcattctatacaccctagaagtactaagatgtaccaggatttgaaagaaaaatattggtggtatggtttgaaaagagatgttgctactcatgttgcactacgtgacgtgtgtcaatgagttaaggcagaacatcaaagaccagcaggtttgctacaacctcttaaagtgcctgaatggaaatggaaagaaattggtctggatttatagtcgggctaccccgtacacgtgatggttatgattccatatgggttattgtagacatgttaactagggttgcacacttcatacctatgtagaccacatactcatgagctcagttggcataactattagacttgagattccgaggtacttcaccaaattggtcttcgggtttctcgtaacctcattgctattcatagcaatacatacaaataaacaagtagtacataaaaataacattacaccaaacatgagaacaaacagcgaggtcataggttcgagaatcgctaaattcagagttacggttaaagagttatgattttctgaa

SEQ ID NO: 34379 - DNA, 1584 bp, Zea Mays
agtgcttaactttgtagacttaatcttatttaatgtatggtctcatccctggaataactttatataaataagtaattttactaagatagaccctagttaggtaagtaatctactgagataggtttagttagggagcaataggcccttaagcatagtgctccaccctaaaacctagaatgcacctgtgtgtctttacctgttatttaacctatgttctctctattgtatatgtttggtgtaatgttcttttgttattgtccaagtgtgctgaatgaatgattgctttgcatagacaacgagtagtctgaggtacccgagcgtgttgcaggatacttccctgaccagcaacctggtgaaggcaagtgtcttctgacccattatgtcctacttactttataattcactgtcccgcatatcaggatcaacctaaggattgactagtgttctgtttttcctgtccttggttatcctttgggaattggttgctatgattagtattatgctactgctttactttaatcaatgaacatgatgagaatatttatgatatgttgatgatgatatcttgattatgatgatgaacttgtgatactttaggggacttgggctgtttcccgagtacctctctataaggatctgtttgttggatgatcacctgggaaaatagtacaaccatgagggtggaatgtgacgcccttagctgattaatcagatgaatctagggatgtagtttgcttcgccatcgtacagtaaatgggggctagggcatagtgcttgctctgctaagggtgggtgccgacgttcattcgattttggttttgtaagtcacccaccttagggagaagtactgttttgtacgactagtgaaacctaacgggcgactatacaccaggggaatctttgtaagggctacgtagagtatcccttgccattcacctcggtagtgaagatcgggtctgtacaacctaggctgggaagggatcacaactcatgggtaaagtgtgcaacctctgcatagtgttagaactggtacattagtcatgctcatggtcatgaacagccttgggagctcctttggttagagttactctagatacttttattgtgatgcttaatgatgatggttatatttacggtacttggatttttctcttggagggagtactacatgggttaataacttgagattattgataaaacttggctttcctactagtaataaatacctgaccaactaaaagcaactactttgagcttaaccccgcatacaactagtccactttaatcaaacgggacatttgttgagtacgctgatgtgtactcacccttgcttaaaaacaccaaaccccaagttgtttccattgcaaccagtgctcgggagaagatgaaggcaacctggaggactttcaggagttttaggacttcgatgagttctagattagattagtggcaaacccctagtcagttgcctgtgaaggccatatattactgcgtttcgttcagcactttgattatgacttaagttaatgactttgtggatgtcttggacattgtgatgtaataaagtacttattttcgttatta

SEQ ID NO: 34380 - DNA, 2143 bp, Zea Mays
ctctgcgcaaggaaccagtgagcaagaggtataagatgaataaaatttcacaatccgccacctatagactatgtttaattttgtatagatccatacactagttcttccattgtaaaatatgtatttctagcacaagttacgtagagttttgtattattacctttatgattatgtgttatatgtgttaaaatatttctttcccgcaatgtttgtatttctgtaaatcagtgtatattataattgttctcattatttggatgtagatttgatataacaagagattaaaagaatagtagaccacctcctcttgaatcaaatatacaaggaaaattactatataattacattctctatgatttaaatttataaataggactcatatgttcatgcgcaatatatgcgtattagttattcactaagaggtagtacagtttctgttgatgttagaacaatatagttgtaaccgtggccaacataatttaaataatagagttaaattagtagtttaatttagttttcttaatactaaggatatgtgacttgtaaataacaatgcaagagtagtataacttccttttagaaagcaagaatttaactaaaatgtgactcgtgctttccggtacaaataattaattagtaagtaatccaattccatagagtttggtttgcgctacatctattatttttaaatgaatttatatagtatcatattcatagttaacttgtcacataatcttttctagggaatagtgcagtaaaataaatattatttcatgtcataagcaagtagagtgatcaccagtgtatttcagttgaaaatatagttacgaatgaagtttcatgaatggatgtttttattttaataatcatgatttgtatgatgtatgttttatttgtggaatggtgcatgcttatttattggtgtatgttttctttttgtatgtgagatgtgcgactttattagaagctaattgtgtggtaaaggaaccgaattcgtttgaggaatatccgcatgacacttttgagcaaggcaaatggattatccctctgtatttcttattgtacccaaataatacaatcaacaagatttacttttggatatatgcataatttgatgggtttgcttaaacaggattacttagaaatacaaaccttatttcttgattaacctgggttaaacaccatgcttagtaattatgctattgctcaactttatcattatgatgtcactcttttaagatattattgttccagagatgaaatttatactattgttgttaattcaataattaaacaagatcattttgtattaaacggaacatggagtgaccacctaggaaaacagtgtaaccacgaatgctatcatggctttggctttggtaaatagctttatagacttggtgcttagcaaccttacctgacagatgggcaagagggggcgacagtggtttggtggcagctcacgttaacatggggtggtagtcttggctaaggtgtctcacctagagggtcaccaatactgacgtggaaaccttagcgggtggctttatactaaggatattttgtgaaagcctcatagtggatccgtagccattcaactcggcagtgtttaagggtccatacaacccacgctagaggggatacatggcttgtggtaaagttgtaccacctctgtagagtgtaaaactgatatgtcagtcgtgctcatggttaagagcagcctggaccctcacatgataattgaacttaaagatggagactaaatcatggccccttggtttaaaatggtttgcttaagtggtttcacttaagttcttttcagatataatcattatggccatgattaatttgggtttaggatacacttataaatagtaaattaggtgttattaataaaatattgaccaactaaaatgcttaccgcataaccatagcctaccttgttaactttgcataattcctcccatttgttgagcccccaccgtaagtgagctcacccttgctaaattttttatcagaagttgatgaggaagacattgacgaagacgttgacaagtactgagtctagcgacgctccagtcatcttcctgtaggagatcacccatgttatttatgttgtacttttattatgatattgtttaag

SEQ ID NO: 34381 - DNA, 2765 bp, Zea Mays
ctaagttttgtcttttgaatactaatctcttactgttattatctatttactttggagacacatatttttcaaaggaattaatttattttagaagtcattttatctccaatcttttggagaaacttttaaaatctcaaaataggatttcgggtgttacaaccatcatgcgtccgctcacaaaattttcaaggatttcctcgggcgtcatcttggtgtacctgggattctcacggatcaaatttacaatgttaggatcaagaacggtaaatgaacatagcattaggcgcacaatgttgtgatccatccatcttgtacttccatagttgcggatttggtttagaagggtcttgatcctattatacgtcttagttggctcttcacctctcttcatggagaaccttccaaattcaccttcaatgagctacatcttggtgatcgtcgtcatatcattgccctcgtgaacgatcttgagagtgtccaaatctatttagcattgtcaagaccactcactttgttatattcctccctgtatagagaagttaacaacacagtagtaacttgggcatttttgtgaatcatttcttgcatataaataacattgcaattctcatcatcactatcaaaaatatgcattccattttctactatgtcccaaatgctaggatgaagagaaaataaatgactacgcattttgtgactccaccaagaatgatcctccccatcaaagtgaggaagcttgccatgaggaatagataataaatgagcattggcattgtaaggaatgcgagagtaattaaaagacgttctagtatagtttgtttgaccgtcttttttctttgaagaagaggagtcatcatcgtcctttggtgaagatgaagaagcatcgctgtcgtagtagacgatcttcttcatgcacttcttcttcttcatatccttcttcttgttgttcgaacccaagtcaatgggcttgtctcccttgggctcgttgttgatcgtctccttctcaccggtcaccttgcccttccctttagcatcgtcgctagccatctctttgggttgttagacccaacgaaagagaccggctctaatgccaattgagagcacttagaggggtgggagtgaataggtgatcctgaaaaaatagctaaaaacaacacaaacatggtctaaaagttagagttagtgcaaattaaaccaagtctgaaaggagaaaaagagagagagagaggttcacttcacttgattgctctatcaagatatgaattaaacttagagcaataccataagtgagaatagagaacttaggaagaaggaaaatcacaataacataaaagagacatgaggcacaacgattttatcctgtggttcgtccaaagcctatctccacattgtggtgtcctcctttggaaaagagttgcaatcaacccctctcaagtgatccaaagatcaaacttgagtgtcacagtttcttccttatatcagtattcccatttctaaggaacctccacaacttggagtctctcacagccttacaatatgatcacaatcaaaacatagagtaagggagggatacagaatacacacacaaaagcacaatgcagcaacacacacaagaaatctaatgaaatgagcgtaagaacacagtatcacaattacaaacaaaaaatggagctcagatctcactaaaatcactagaatacatggtcgcagagttttgaagtgttggtgtgctcttgagatgcttggggccccgttgaaggcaccaaggagtcccttttatagccctaaggggcctaggagtcattgcttttccatttggaagatccaaaaccttcctgtctccgagcgcaatggactgtcttgtgagccactagatagagaataataacgttcgacagattagcttgattggcgcccttccttttctaggggcaccatactgtctagtgacggcaccggactgtctagtgacccaatctagtcgttgaagtgttgggcgaatgtcatactagccattggaggggctgtacggtgcacaccgaaccgttcggtgattttttagtaaaattcctgagactgaagactttgttcgttcgggcaaccggtctgtccgatgcaccatcggatcgtccagtgagtccgagacttgcccagatttggctttccttagccaaattcctccaacttcttttggctttcttggatagcttccctacgatttatataacataattagcacttaatccaattgactaagtgtaggaaacatacattttcttctcagattcaccaggacttgcaatatgcccaaaactaagtccaaaagtcacttttcttgcataaatgagttagtagccaaaccaaggtgcaagaaacatggtataatgtatgtgcaacttattcaaatacttaaacctcatgtttttgtagttttacacaaagttgcacttttggccttccatttggctcatttggacttgatctcttcacttcgcctttgatgaacctatgctcatactcatatggatgtagttagtccaagattgcgtgttgagcatttaatcaccaaaacatgtagaaatggccctatggcacctttcacttacccctcgacttatgcccgaatgtgacgtattccttaccaatcatggggtcgaggttggaaaaccatttggagctctcgatcatgtggcgcgaacaatcggaatccatgagccacgtgttttccaagcttccatcctgcatcaatagaaacacacatggtg

SEQ ID NO: 34382 - DNA, 599 bp, Zea Mays
gccgctctcatcccctcaccagaaaccgcagtgtgtctccctctcctcttccccactctcgctcttcactgcggcagcgccatcaatggagtttgatggttgtcgtcggccgtttctccctcacccaacgccctctctcctccctctctctataaaacccaacgccgagccctagggattcggttcccgatcatcgagctcgatccccacacctcctcctcactactcactgaccagagcgccgggggagcccctgctcgccattaaagccttaccgctgtccggagtttgtcgacgaccacctgacgacgtcctctacttctcctcgtcgacccccaccgccgaaacctgaccccttggatgaccctcgccggttccccctgctcacacgacatctctatgtagagaacgcaagaaccagaggttgaagaagttgactgtatggtagagaaaccgaattcatttgaggaaaacccgcgaacacttttgagcaagaaggtgatgatgatgactttgatgaagatcttgatgagtattgagtctagcgacgcctcggtcttctccttagtttacctgaattccttttgatcttaagtggg

SEQ ID NO: 34383 - DNA, 779 bp, Zea Mays
gcggcgtagggcgggcggggtgcgtgggtagatgggcagtgcatcgctcgcccgcctactggctactcctcaccggccccattcctccacccgccactataaatctctctgcttccgaccagccttgcttcgcccgttccagcgacgcactactgcggcgaaatcccgctcccgcgttccccatcctccggccgcctcgcttcggcctccctccggaaggtgtcttaaatcatggcgactggccaacttttctcaaaaactacccaagcattattctacaattacaagcaacttcccatccaacggatgcttgattttgacttcctctgtgggagagaaacaccttctgttgctggaataatcaatcctggttctgatggttttcagaaacttttctttggacaagaggaaattgctattccggttcatcccacagttgaagctgcatgcagtgcacacccaacagctgatgtatttatcaactttgcatccttccggagtgctgctgcttcttcaatgtcagctttgaagcagccaacaataagggttgtagccattatcgctgagggtgttcctgaatcagatgccaagcagctaattagttatgcacgtgctaataacaaagtcatcattggacctgcaacagttggaggaattcaagctggtgctttcaagattggtgataccgctggaaccattgataacataattcagtgcaagctttacaggcctggatctgttggttttgtgtctaaatcgaattaccccggctacggagg

SEQ ID NO: 34384 - DNA, 637 bp, Zea Mays
ctctattaagccaaagcttccccggcttctgaagatagaggacatatcttcgtgctctctggtgtcttaaatcatggcgactggccaacttttctcaaaaactacccaagcattattctacaattacaagcaacttcccatccaacggatgcttgattttgacttcctctgtgggagagaaacaccttctgttgctggaataatcaatcctggttctgatggttttcagaaacttttctttggacaagaggaaattgctattccggttcatcccacagttgaagctgcatgcagtgcacacccaacagctgatgtatttatcaactttgcatccttccggagtgctgctgcttcttcaatgtcagctttgaagcagccaacaataagggttgtagccattatcgctgagggtgttcctgaatcagatgccaagcagctaattagttatgcacgtgctaataacaaagtcatcattggacctgcaacagttggaggaattcaagctggtgctttcaagattggtgataccgctggaaccattgataacataattcagtgcaagctttacaggcctggatctgttggttttgtgtctaaatcgcaagagcagcaacaaacatttttcgccctcaagtaa

SEQ ID NO: 34385 - DNA, 1268 bp, Zea Mays
tccacccttcccatctgcacaaccttctcatcttcctcgtacctccgccagctgcttctcccatagtcgccacaccttgttcctctcccatctagccttatctctctcggctcctcctacgctggctatctccctcacatggcctctcttcccatggcgccttgccacgagctcccctacgagcagcttccccgggaagcacaacatctctcccagccatggcgttcgactttctgctggccgagctctagccgagccccctccatggcacccagttcgctcccttaggcgctctgcatctccggccacaacggttcctcctcgaccaccatcttcaccatcaacgaccgcgcttccctagttccaaggatgcctacaactcgtccctggccgatacccgagcatctcccctgtgtaccctcgcctagttcgcggagctgcagcggccacaccgtctcttcctccgcaacgagccctcgacatgttcgacaaaatgtcgcagcaagccccgtcgacatgtgcagtgtcgcagcgagcagcagcctcgagaccccctcctcgtcgcgtgcgccgacccgatctgcgcagccttggtcgcgatgtcgtaaaacccggtgagctctttgctgtcctcatagtcccacgctcctcgattgattaaaatgaccaaatcagtgaactgtgtaataaaatgtgtgttgtaatcacaacccctcgtcctcgcgccttgctcaccactcgttcgacgaaatgcttcattcgtgggcgacatgcacaacccaaatccgatcgacatacgcatgaaggatgtgacgttggagcgaagccacaagaagatgagacttatcccgaagaagatgaatgatcaagtggacgttcgtctagcggatgtcgtctaacctaacactaacctagtgttggattccaggtgaagatctaggcctgctgatgatggtggctaagtgctagtgggctcggccttctatatagttctcatccctactgtttcttgaagattatcgctaagctagcgtgtatttcaaaactatggttacatctatcttgtccaaagttatattctttgaaatcaagttttgtacttattcccatctcttatttgtaaagttattcttatttgtaaagttattgtaatatttttcctctgccaaaaactccaatatggcagtatgatattgtgtatttacttaatctgcgatcatggttgtgagttgatttatcgaggtcctttgggatgctcgacgatctat

SEQ ID NO: 34386 - DNA, 1269 bp, Zea Mays
tccacccttcccatctgcacaaccttctcatcttcctcgtacctccgccagctgcttctcccatagtcgccacaccttgttcctctcccatctagccttatctctctcggctcctcctacgctggctatctccctcacatggcctctcttcccatggcgccttgccacgagctcccctacgagcagcttccccgggaagcacaacatctctcccagccatggcgttcgactttctgctggccgagctctagccgagccccctccatggcacccagttcgctcccttaggcgctctgcatctccggccacaacggttcctcctcgaccaccatcttcaccatcaacgaccgcgcttccctagttccaaggatgcctacaactcgtccctggccgatacccgagcatctcccctgtgtaccctcgcctagttcgcggagctgcagcggccacaccgtctcttcctccgcaacgagccctcgacatgttcgacaaaatgtcgcagcaagccccgtcgacatgtgcagtgtcgcagcgagcagcagcctcgagaccccctcctcgtcgcgtgcgccgacccgatctgcgcagccttggtcgcgatgtcgtaaaacccggtgagctctttgctgtcctcatagtcccacgctcctcgattgattaaaatgaccaaatcagtgaactgtgtaataaaatgtgtgttgtaatcacaacccctcgtcctcgcgccttgctcaccactcgttcgacgaaatgcttcattcgtgggcgacatgcacaacccaaatccgatcgacatacgcatgaaggatgtgacgttggagcgaagccacaagaagatgagacttatcccgaagaagatgaatgatcaagtggacgttcgtctagcggatgtcgtctaacctaacactaacctagtgttggattccagggtgaagatctaggcctgctgatgatggtggctaagtgctagtgggctcggccttctatatagttctcatccctactgtttcttgaagattatcgctaagctagcgtgtatttcaaaactatggttacatctatcttgtccaaagttatattctttgaaatcaagttttgtacttattcccatctcttatttgtaaagttattcttatttgtaaagttattgtaatatttttcctctgccaaaaactccaatatggcagtatgatattgtgtatttacttaatctgcgatcatggttgtgagttgatttatcgaggtcctttgggatgctcgacgatctat

SEQ ID NO: 34387 - DNA, 1137 bp, Zea Mays
tgccggtgtccacgcgcgccccggtgcggccgccacgaccgcggacacgtgccgggcctcgcacacgcgtcccccacggccccctcgcatcattaaaaccgcggtgcccgcgccacggatccccggcacttcattccggtttccggatagcttacctcccatcgacggtcggtgagccgttggtgagtggcgagacagcgggtgcgctgggcaagaacaggcgacgaagaagatgagcacgctggacacgcggacgctcaaggacgagctgacgagcatggacaggaagtgcctcgtggacctcggccacccgctgctcaaccgcgtcgccgacagcttcatccgcgccgctggggtcggggcggccagggccgtctccagggaggcctacgtcgtcaccgtcgaagggagactcgtccgggctagacgccgacggcggcaagcggagccatttctccagcatcagaggtgacgacggccagaggtcgctcgacgcagtggtaaaaacggccggcaaggaggccttccagtgggccggagtctactcagggctcacgtacgcgctgcgggaggccaggggatgccacgactggaagaacagcgccatcgcaggcgccatcgctggggcggcggtggcgctcacgggtgacgccggcggccactccgacaagctcgtcaacttcgccatcaccggcgccgcgctctccagcgccgggagcttgctctccggcatattctgattggcccccagggctgcacccgcctgacacgggttcgctgcccggttgagcccttcatccgaggggttttagcatgaaaggttgatttcaggccagcaatgaaatatgtattcctagggccctgccggtctagcactgtgcgcttccagtgtaatcgttgcttcgtgtacgagtttcagacatttcgaaatatcttctccgagttccggtggtttgacatgtgcaaacattttggtagggcttaagtgcttaaatttgtcgccatgttttggcatgtccaacgagtgacaataatgccgtggctaaaaaccaaaaccacgttacagttgtggctaaaaaccaaataaaccaaaaatcatgccatgattgtggctaaaaaccaaatacatagtcaaac

SEQ ID NO: 34388 - DNA, 966 bp, Zea Mays
cagacgcatgcatgatgcatcgagcccccccagctcgcagtcgcaccggaggaatgctaactggagagccacgcctgccgcggaggaccgggactaactacgagctgccgcggccgttcctggtgcaggtccagggtagagagagagagaggggatggtgtgagggagggaagggagcaaaggcaaagcagccaacgaccagagagacacggaggctcagagagagagagcgaggaagaagaagagaagaagaagatggagcaagaggaagcgtgctcctcctcgctgcggcagtgcaggatttgccacgacgaggaggacgagcggcgctccgccatggagtcgccctgcgcctgctccggctccctcaagtacgctcacaggggatgcgtgcagaggtggtgcgacgagaagggaagcgccgtctgcgagatttgcctccagaactttgagccaggctacaccgttcctcccaagaaaacccaacctgctgatgtcgcggtgaccatcaggtatacttgctgcgggcgagcgggatcctgcttccgttctacctcgtcatgaggctcatctccgtgatacagcaggggcagaggcagtaccgcctccggctgctccaggagcagaggagacacgcgttgaggtcgggccggctgcacggccaggaacagcaacaacagcatgtcatcctggttcgctgaggaacgagccattcattcaccttgccttggtgtccatacattccattcatccgtcgtacgcgtacaaggttgtaagatgtaccgctccatttttttctttttgttcaggcctttacaagcctaaaaaaagcttatatgtaccaccacttcatttgtaaaccctcaaaatttgttgctgagaagatcgacatatcatgtatagaattgtaaaaagaaacaaacaaaaaaaaaggggaaaagagaactggcgcaatgttcgattacc

SEQ ID NO: 34389 - DNA, 2314 bp, Zea Mays
cagacgcatgcatgatgcatcgagcccccccagctcgcagtcgcaccggaggaatgctaactggagagccacgcctgccgcggaggaccgggactaactacgagctgccgcggccgttcctggtgcaggtccagggtagagagagagagaggggatggtgtgagggagggaagggagcaaaggcaaagcagccaacgaccagagagacacggaggctcagagagagagagcgaggaagaagaagagaagaagaagatggagcaagaggaagcgtgctcctcctcgctgcggcagtgcaggatttgccacgacgaggaggacgagcggcgctccgccatggagtcgccctgcgcctgctccggctccctcaagtacgctcacaggggatgcgtgcagaggtggtgcgacgagaagggaagcgccgtctgcgagatttgcctccagaactttgagccaggctacaccgttcctcccaagaaaacccaacctgctgatgtcgcggtgaccatcaggtgcctccttctctatctctctctggtaactgtgcgcattaaggctatctatcagggcgaatgctgtgcttaattgtaggtggtcactggtcagctgtagttgttccataatatagtaactgtcatcagaacatccacttcgcccatttcattcattcatccattccttcgttcatttttgtttggcatcaacctcatctcatctgaaccgagcgcggttgctggccaacccatctttatctcccattccatcgattgattaaacggaatctgccagcgcgacgggcactttaggcgaccaagaccaaccacccgctcttgatagctcgtcgtcgcatccgcatactacccaccagcaaaattccaagacgcgtcccaggcggcggcccccctcgttctcatccgctgacgcagcacagcatgcgctctcacccaagcccctgatccggtcgccaccatctccagaccaagcaagagaccaaagcgctctgatcgaacagtggtgctggtggcctggcgcacattccattctggcagtggcagtggcagggcagctgtctatgtctatcgcagcatgttgttcttcgggattcccgaggcggtcgggggtgggagcccctgtgtttgtgtgtgtgtggcgtggctgccaggtgggtccggcccagctgtttccgttagccaggccaaccaccgggtcccaactcccaatcattctttcgccccgcatgagatgatgatgccctcgcactgttgctgcacctcttctgctgtagtggactacaaatgcaagccgtgccctgcactgcactcactcctccctgctgtcctgcacccgttggcacaggagtcaagcccgtccgttcttgttcatcggtggttgcaggcagcacggccgatcaccgcgtctgcacttttaatttgtaatgtgactgacggagaaaatttgtggaatctgtcgatcctggttggctgtctgtctgtctggtcagctcagcaaccaccaccgatgatcagtttacgaccactacctacctaccattaccactaccagccagagcctggcaaccaccacgcgcgttgctgatctgggctttcgtggtgcatgcgcagagacagcgtgggggtgcccaggccgcagcacgagcctgaagaggaggaggagcaggagctggtggacgtggcgttgatcggagccagcgacccggagtacgccgagtgcgcgcgcgccgccggcaggagcgcgtcctggtgccgctcggtggccgtcacgttcacggtcgtcctgctgctgaggcacctggtcaccgtggtcacggtcggggcggccaaccagttcgccttcggcctcctcacggtatacttgctgcgggcgagcgggatcctgcttccgttctacctcgtcatgaggctcatctccgtgatacagcaggggcagaggcagtaccgcctccggctgctccagaggagacacgcgttgaggtcgggccggctgcacggccaggaacagcaacaacagcatgtcatcctggttcgctgaggaacgagccattcattcaccttgccttggtgtccatacattccattcatccgtcgtacgcgtacaaggttgtaagatgtaccgctccatttttttctttttgttcaggcctttacaagcctaaaaaaagcttatatgtaccaccacttcatttgtaaaccctcaaaatttgttgctgagaagatcgacatatcatgtatagaattgtaaaaagaaacaaacaaaaaaaaaggggaaaagagaactggcgcaatgttcgattacc

SEQ ID NO: 34390 - DNA, 1927 bp, Zea Mays
atcacttcaatgtatgcataggaatgcaatgtgtaggtactctatcttcatacctctgggggtataaaaccacatcatctgcaaatctcacttcaatgaatgcatatgaatgcaatgcatatgtcctctgccttcatacctctaagggtatgaagccgcatcgtaccccttctcgggcaacgtacgatgctaagttgtaccggtacggtcggaccataggtcacgacaaaacttcatatgcaaatgagtcatgcaatgtatatggcatgctacatttatcaataaacttcacttccttcagatacaacacaaacctcaaataatacttcatttaccttcagatacaataccaacctcaaataatacttcatttaccttcaggggtgtgaattaatctcatgagtcatactcaaatcataatcatcatcaatatatgattgagcatcagtataatgcaagcaagtaaagcatcaccatagagtccaattatgaaagaatctgatacttctgaatattagagtgtaggcgatagaaataataggtcagaacggaagcaaccaccgctacattcacttgccttcatcgaagaagaagaaatgtactagacatgatctggagtgtagccacctgctagtgggcataaaacttagtacaaatatttcacaaacatttgccatcaatcaacaaaacactcctacacttgaaaccaagacccagtggaaagactcccaccctgaaccacatgccatacagcagcaacgctgtttgttaattttgtatctttaaaattaaaacagcggtgatatcaaacaaatactctaggagtatctacacaaaatactctacaacttcagtattcaatagataattaaattctgccatctacaagttctaaaacatctgacaagataactgactgaatctgtttttagacagcagtatgattaactttaaaattcgatatctccaaaactgctgaaccaaaaattatgaaattcttctggaagtaagaacttttatccctctacaaaagtctccatagttggaagagccaattcggccatttactagatgaaacccaccagtgaacagacccactcatttttgtcaggtaaacaggaacagccacagtaaaacaaacataactggagtttcacaaatcatatgaatgcactctttaacaatctggaaagcttataaaattatctacaactttttttaccaacccacagtttaattctgttgataaaattgcctaaatcttaagagaacagattctgcacagaattatgggactgaaaaactgctatagtaaaactgcaataactttctggtcggatgtccgattgaggtgttcttcgcggccacggaaagatctacaaattatctacgactcatacatagactttttatttttttgaggccactaagaccacggaaaactggcatgaacagaaactgtcgaatctgccattctgcagaaaactaaattcgagatcaaaacctaaccccacatcaaatcctacctataatcctttaattcccatgatccacaacctccaaaagcctataattacagggaggaacaaggatctcatccatacctagggtttatccaagaaatcttcaagaggagatggggaagaacatctccttgatcctctcttcctcttcaattcaacgtgcccctccttttctcgctccttgctgcgtagggggagatcttggggaggaagcaatggaggatggctgccatagggggagggggcgtccagccaagggggagaaaaaggggtggcggccaagagggggggtgaagggaaaaaaaaggggtggccacctagggtttttgtgggagaaagaaacgacgcctcagatgacttctatctttgcatccaatggcccacaaccctttacctcatccacg

SEQ ID NO: 34391 - DNA, 1250 bp, Zea Mays
tcgcggctgccgtcgtcgagcaagaccaagagctgcagataccttaatgaaggcagtgatggtgacaatgctccagaaacaagcagtgatgtaagcaatgagagtgacaatgacaatgacaatgaaaggtctattggaagaacaacccaatgtttagtagaaaatatttgcaccgatcaagaaaggttgtccagtgatgactgtgattccagtaaccaggaacctccccctgttttccaatatatggagcatgatgcaccatatggaagacaaccattagcagatatgatttcagtatttgcatgtaagtttcctgatctaaatacatacaagagctgtgatcttctcccgtccagttggatctctgtagcctggtatcccatataccggataccaacaggacctacgctacaagatctagatgcttgctttttaacattccattcattgtcaacaacacctgatggtacgataagcggttgtcctgagacaaataacttacataacagtaaagttgcttctgttcctgggaagatcacactgcctctgatcggcctagcatcttacaaattaaatggttccttgtggacgtcaaatcagcaccatgagcagcagttgactacgtcgcttctgaaagctgctgatgactggctttgccagcggcaagtagatcacccagattaccgcttcttcctcacacactaaattggatgtccatccaaactacctacctactgaacatcacagctcgatgcccactattttattcaatgaacttacattatcactttatatagtccacaatcacaagtaccagtatgctctgtaatatcatttttggggcttagtttatgttagtcccatattggtatctaggcaggattagttggtgactgttttggggttgtactgtaggaaccaattagacatagatcacctatattacgttcagtaccaattgcgggtgtgggtgatctgcaatcgggctaagtaggagattgattggcaatatacatttggcgtacttcaaaggcggttctaggatatattgatgatggcgataaaaatatttttctacttccctctgtgtgtttgatatattgtaacccatgtagtgctgctgctggattgttattatatgtattaccccgagaacgtatcatgtgttaccacaggttaggctgtgtgacatcatgtgatgaaattttggtttgaaatgaaattggcactaaggtggttggactttttcg

SEQ ID NO: 34392 - DNA, 1252 bp, Zea Mays
tctatgggtcgcggctgccgtcgtcgagcaagaccaagagataccttaatgaaggcagtgatggtgacaatgctccagaaacaagcagtgatgtaagcaatgagagtgacaatgacaatgacaatgaaaggtctattggaagaacaacccaatgtttagtagaaaatatttgcaccgatcaagaaaggttgtccagtgatgactgtgattccagtaaccaggaacctccccctgttttccaatatatggagcatgatgcaccatatggaagacaaccattagcagatatgatttcagtatttgcatgtaagtttcctgatctaaatacatacaagagctgtgatcttctcccgtccagttggatctctgtagcctggtatcccatataccggataccaacaggacctacgctacaagatctagatgcttgctttttaacattccattcattgtcaacaacacctgatggtacgataagcggttgtcctgagacaaataacttacataacagtaaagttgcttctgttcctgggaagatcacactgcctctgatcggcctagcatcttacaaattaaatggttccttgtggacgtcaaatcagcaccatgagcagcagttgactacgtcgcttctgaaagctgctgatgactggctttgccagcggcaagtagatcacccagattaccgcttcttcctcacacactaaattggatgtccatccaaactacctacctactgaacatcacagctcgatgcccactattttattcaatgaacttacattatcactttatatagtccacaatcacaagtaccagtatgctctgtaatatcatttttggggcttagtttatgttagtcccatattggtatctaggcaggattagttggtgactgttttggggttgtactgtaggaaccaattagacatagatcacctatattacgttcagtaccaattgcgggtgtgggtgatctgcaatcgggctaagtaggagattgattggcaatatacatttggcgtacttcaaaggcggttctaggatatattgatgatggcgataaaaatatttttctacttccctctgtgtgtttgatatattgtaacccatgtagtgctgctgctggattgttattatatgtattaccccgagaacgtatcatgtgttaccacaggttaggctgtgtgacatcatgtgatgaaattttggtttgaaatgaaattggcactaaggtggttggactttttcg

SEQ ID NO: 34393 - DNA, 1808 bp, Zea Mays
ccacctcctctcccgacttcccgagtcccgctacgcagccgtcgcctcctactccctttgcgactcctcgcccacatccagcacttgcacatcagcaacctcaaccgcaagggaggtggcgaggctgagcgccagccgccatgtctgtccccggcgtcgcctccccgatcgccgaccgcttctactgccccccaccgcaccgccacctccttgacaagcaacacagacagcatccgccactaactgcctcggcggccgaggagccggcgaagccgacgccggagctcgggcgagacccttccccgtcgccttcgccggctaccaacctcgagagtttcatcgcctccaccgccgtccgcgttcccgcgcggtgctctcctcgaacgccggggtgccgggcaggagcgccgtactacgagctcgcggatctgtgggaggcgttcggggagtggagcgcgtacggcgccggcgtgccgctgctgctcaatggcacggatggcgtcgtgcagtactacgtgccattcctgtccgctatccagctctatgggtcgcggctgccgtcgaagagcaagaccaagagctgcagataccttaatgaaggcagtgatggtgacaatgctccagaaacaagcagtgatgtaagcaatgagagtgacaatgacaatgacaatgaaaggtctattggaagaacaacccaatgtttagtagaaaatatttgcaccgatcaagaaaggttgtccagtgatgactgtgattccagtaaccaggaacctccccctgttttccaatatatggagcatgatgcaccatatggaagacaaccattagcagatatgatttcagtatttgcatgtaagtttcctgatctaaatacatacaagagctgtgatcttctcccgtccagttggatctctgtagcctgttgattgcaggtatcccatataccggataccaacaggacctacgctacaagatctagatgcttgctttttaacattccattcattgtcaacaacacctgatggtacgataagcggttgtcctgagacaaataacttacataacagtaaagttgcttctgttcctgggaagatcacactgcctctgatcggcctagcatcttacaaattaaatggttccttgtggacgtcaaatcagcaccatgagcagcagttgactacgtcgcttctgaaagctgctgatgactggctttgccagcggcaagtagatcacccagattaccgcttcttcctcacacactaaattggatgtccatccaaactacctacctactgaacatcacagctcgatgcccactattttattcaatgaacttacattatcactttatatagtccacaatcacaagtaccagtatgctctgtaatatcatttttggggcttagtttatgttagtcccatattggtatctaggcaggattagttggtgactgttttggggttgtactgtaggaaccaattagacatagatcacctatattacgttcagtaccaattgcgggtgtgggtgatctgcaatcgggctaagtaggagattgattggcaatatacatttggcgtacttcaaaggcggttctaggatatattgatgatggcgataaaaatatttttctacttccctctgtgtgtttgatatattgtaacccatgtagtgctgctgctggattgttattatatgtattaccccgagaacgtatcatgtgttaccacaggttaggctgtgtgacatcatgtgatgaaattttggtttgaaatgaaattggcactaaggtggttggactttttcg

SEQ ID NO: 34394 - DNA, 3096 bp, Zea Mays
ctctctccacctcctctcccgacttcccgagtcccgctacgcagccgtcgcctcctactccctttgcgactcctcgcccacatccagcacttgcacatcagcaacctcaaccgcaagggaggtggcgaggctgagcgccagccgccatgtctgtccccggcgtcgcctccccgatcgccgaccgcttctactgccccccaccgcaccgccacctccttgacaagcaacacagacagcatccgccactaactgcctcggcggccgaggagccggcgaagccgacgccggagctcgggcgagacccttccccgtcgccttcgccggctaccaacctcgagagtttcatcgcctccaccgccgtccgcgttcccgcgcggtgctctcctcgaacgccggggtgccgggcaggagcgccgtactacgagctcgcggatctgtgggaggcgttcggggagtggagcgcgtacggcgccggcgtgccgctgctgctcaatggcacggatggcgtcgtgcagtactacgtgccattcctgtccgctatccagctctatgggtcgcggctgccgtcgaagagcaagaccaagaggttgtgattgaactgaccagatgaacgattcatcgtctgaactgttctgactgtgttcactaatggtgactattcttgaaaaccagagcatatcagcatgcctgtacttgcttgaaaaaaacatcaatcatagtaccattctcctggcatttcactgattatatagatctgtttccagatcaagttatataataccatggtcgaggtgtctctgaccagctcctgagagctataattccagctaacaatgaatctggtaaaaccccaaaccaatgcaaggaactggccgtgaaatttgctcttaaacatcaaagaattgtgctccaccctgcaactacatcacgtttccataaaaagcattaagttaatccagactattatggagcatggtgagcaatataaatttgcctatggtgaattcatttcttatgcttctttcagatttctcaaaaaaaaacggccataatttcacttgcattattgattaaaaaataggctgtcagaattgttagaacaaaaataatgaaggtgttactgcactgcttgctattttaagtctctgaaccatcaggtttcaacttggctgatattttttttgttggcttctctcgaagctgaaagtttatcttgaaggagttggacttccctgaaatgttttagaccttataaaccacagttcctttagaacacactgattaatttttcaggaataaaagcctctgatttatatttatttaagtttattttggtgagagctgtcttaccgagtcatcaggtcacaggttcgaagcagcctctacgcattcgtggagggaaggtttgccttggtttatcctttaccaaatcccattcatgtgggagcctccggcacttggtgttcccttatgtttcttatttgaggagtttttttagataatggaggtaatctctggtttcagcaacaactagggatgaagtgctacttaaaaatgtgggcactaggatttgaaccttggtaggtggtgtcatgcatccacaatctgaactgacacaaactggtttgttcagataaaagaagttattttgtggtgaaacaataaatgaataaatcagaatgcatgactgtttcagctttctatgaattggactagcagagatgtcttagaaataatgttcattttttcagtaatgcatgaatacatcaattgttactattattgtgtacttttctggtcaactttctcttggacattccttcaaaaaaacattcccttagataattatgatcttttggaactgttttttgttttcagctgcagataccttaatgaaggcagtgatggtgacaatgctccagaaacaagcagtgatgtaagcaatgagagtgacaatgacaatgacaatgaaaggtctattggaagaacaacccaatgtttagtagaaaatatttgcaccgatcaagaaaggttgtccagtgatgactgtgattccagtaaccaggaacctccccctgttttccaatatatggagcatgatgcaccatatggaagacaaccattagcagatatgatttcagtatttgcatgtaagtttcctgatctaaatacatacaagagctgtgatcttctcccgtccagttggatctctgtagcctggtatcccatataccggataccaacaggacctacgctacaagatctagatgcttgctttttaacattccattcattgtcaacaacacctgatggtacgataagcggttgtcctgagacaaataacttacataacagtaaagttgcttctgttcctgggaagatcacactgcctctgatcggcctagcatcttacaaattaaatggttccttgtggacgtcaaatcagcaccatgagcagcagttgactacgtcgcttctgaaagctgctgatgactggctttgccagcggcaagtagatcacccagattaccgcttcttcctcacacactaaattggatgtccatccaaactacctacctactgaacatcacagctcgatgcccactattttattcaatgaacttacattatcactttatatagtccacaatcacaagtaccagtatgctctgtaatatcatttttggggcttagtttatgttagtcccatattggtatctaggcaggattagttggtgactgttttggggttgtactgtaggaaccaattagacatagatcacctatattacgttcagtaccaattgcgggtgtgggtgatctgcaatcgggctaagtaggagattgattggcaatatacatttggcgtacttcaaaggcggttctaggatatattgatgatggcgataaaaatatttttctacttccctctgtgtgtttgatatattgtaacccatgtagtgctgctgctggattgttattatatgtattaccccgagaacgtatcatgtgttaccacaggttaggctgtgtgacatcatgtgatgaaattttggtttgaaatgaaattggcactaaggtggttggactttttcg

SEQ ID NO: 34395 - DNA, 2727 bp, Zea Mays
ctctctctccacctcctctcccgacttcccgagtcccgctacgcagccgtcgcctcctactccctttgcgactcctcgcccacatccagcacttgcacatcagcaacctcaaccgcaagggaggtggcgaggctgagcgccagccgccatgtctgtccccggcgtcgcctccccgatcgccgaccgcttctactgccccccaccgcaccgccacctccttgacaagcaacacagacagcatccgccactaactgcctcggcggccgaggagccggcgaagccgacgccggagctcgggcgagacccttccccgtcgccttcgccggctaccaacctcgagagtttcatcgcctccaccgccgtccgcgttcccgcgcggtgctctcctcgaacgccggggtgccgggcaggagcgccgtactacgagctcgcggatctgtgggaggcgttcggggagtggagcgcgtacggcgccggcgtgccgctgctgctcaatggcacggatggcgtcgtgcagtactacgtgccattcctgtccgctatccagctctatgggtcgcggctgccgtcgaagagcaagaccaagaggttgtgattgaactgaccagatgaacgattcatcgtctgaactgttctgactgtgttcactaatggtgactattcttgaaaaccagagcatatcagcatgcctgtacttgcttgaaaaaaacatcaatcatagtaccattctcctggcatttcactgattatatagatctgtttccagatcaagttatataataccatggtcgaggtgtctctgaccagctcctgagagctataattccagctaacaatgaatctggtaaaaccccaaaccaatgcaaggaactggccgtgaaatttgctcttaaacatcaaagaattgtgctccaccctgcaactacatcacgtttccataaaaagcattaagttaatccagactattatggagcatggtgagcaatataaatttgcctatggtgaattcatttcttatgcttctttcagatttctcaaaaaaaaacggccataatttcacttgcattattgattaaaaaataggctgtcagaattgttagaacaaaaataatgaaggtgttactgcactgcttgctattttaagtctctgaaccatcaggtttcaacttggctgatattttttttgttggcttctctcgaagctgaaagtttatcttgaaggagttggacttccctgaaatgttttagaccttataaaccacagttcctttagaacacactgattaatttttcaggaataaaagcctctgatttatatttatttaagtttattttggtgagagctgtcttaccgagtcatcaggtcacaggttcgaagcagcctctacgcattcgtggagggaaggtttgccttggtttatcctttaccaaatcccattcatgtgggagcctccggcacttggtgttcccttatgtttcttatttgaggagtttttttagataatggagctgcagataccttaatgaaggcagtgatggtgacaatgctccagaaacaagcagtgatgtaagcaatgagagtgacaatgacaatgacaatgaaaggtctattggaagaacaacccaatgtttagtagaaaatatttgcaccgatcaagaaaggttgtccagtgatgactgtgattccagtaaccaggaacctccccctgttttccaatatatggagcatgatgcaccatatggaagacaaccattagcagatatgatttcagtatttgcatgtaagtttcctgatctaaatacatacaagagctgtgatcttctcccgtccagttggatctctgtagcctggtatcccatataccggataccaacaggacctacgctacaagatctagatgcttgctttttaacattccattcattgtcaacaacacctgatggtacgataagcggttgtcctgagacaaataacttacataacagtaaagttgcttctgttcctgggaagatcacactgcctctgatcggcctagcatcttacaaattaaatggttccttgtggacgtcaaatcagcaccatgagcagcagttgactacgtcgcttctgaaagctgctgatgactggctttgccagcggcaagtagatcacccagattaccgcttcttcctcacacactaaattggatgtccatccaaactacctacctactgaacatcacagctcgatgcccactattttattcaatgaacttacattatcactttatatagtccacaatcacaagtaccagtatgctctgtaatatcatttttggggcttagtttatgttagtcccatattggtatctaggcaggattagttggtgactgttttggggttgtactgtaggaaccaattagacatagatcacctatattacgttcagtaccaattgcgggtgtgggtgatctgcaatcgggctaagtaggagattgattggcaatatacatttggcgtacttcaaaggcggttctaggatatattgatgatggcgataaaaatatttttctacttccctctgtgtgtttgatatattgtaacccatgtagtgctgctgctggattgttattatatgtattaccccgagaacgtatcatgtgttaccacaggttaggctgtgtgacatcatgtgatgaaattttggtttgaaatgaaattggcactaaggtggttggactttttcg

SEQ ID NO: 34396 - DNA, 1511 bp, Zea Mays
agtaaaggaaacgcagccgcagcctttgccgacgccggggtgccgggcaggagcgccgtactacgagctcgcggatctgtgggaggcgttcggggagtggagcgcgtacggcgccggcgtgccgctgctgctcaatggcacggatggcgtcgtgcagtactacgtgccattcctgtccgctatccagctctatgggtcgcggctgccgtcgaagagcaagaccaagaggttgtgattgaactgaccagatgaacgattcatcgtctgaactgttctgactgtgttcactaatgctgcagataccttaatgaaggcagtgatggtgacaatgctccagaaacaagcagtgatgtaagcaatgagagtgacaatgacaatgacaatgaaaggtctattggaagaacaacccaatgtttagtagaaaatatttgcaccgatcaagaaaggttgtccagtgatgactgtgattccagtaaccaggaacctccccctgttttccaatatatggagcatgatgcaccatatggaagacaaccattagcagatatgatttcagtatttgcatgtaagtttcctgatctaaatacatacaagagctgtgatcttctcccgtccagttggatctctgtagcctggtatcccatataccggataccaacaggacctacgctacaagatctagatgcttgctttttaacattccattcattgtcaacaacacctgatggtacgataagcggttgtcctgagacaaataacttacataacagtaaagttgcttctgttcctgggaagatcacactgcctctgatcggcctagcatcttacaaattaaatggttccttgtggacgtcaaatcagcaccatgagcagcagttgactacgtcgcttctgaaagctgctgatgactggctttgccagcggcaagtagatcacccagattaccgcttcttcctcacacactaaattggatgtccatccaaactacctacctactgaacatcacagctcgatgcccactattttattcaatgaacttacattatcactttatatagtccacaatcacaagtaccagtatgctctgtaatatcatttttggggcttagtttatgttagtcccatattggtatctaggcaggattagttggtgactgttttggggttgtactgtaggaaccaattagacatagatcacctatattacgttcagtaccaattgcgggtgtgggtgatctgcaatcgggctaagtaggagattgattggcaatatacatttggcgtacttcaaaggcggttctaggatatattgatgatggcgataaaaatatttttctacttccctctgtgtgtttgatatattgtaacccatgtagtgctgctgctggattgttattatatgtattaccccgagaacgtatcatgtgttaccacaggttaggctgtgtgacatcatgtgatgaaattttggtttgaaatgaaattggcactaaggtggttggactttttcg

SEQ ID NO: 34397 - DNA, 664 bp, Zea Mays
gatgcccataattcatggacatgatatatatagttctgggttacatactggatgtttcttatgaccactgacaaatgtcatggaatgcccataaaggcccatacttcatagcaaatgcaaatacaacagattcaatacattgtgttcttcaacacacaacttcaacagaaatgcccatacttcatcagccttgcctacttgagcactacaactacaagcaaaacgatggccaacaacaggaatagtgttacattcacacatccgcacacaagacaaatgcagcttcccattccttccctgttgttgccaactttgtccttcacctcattcagatttttctctaagctaacaattcttctcacaatcttaggaacttctattgtcgaagctgctgcaacgatcgaggaagtcattggtagatatccgttataatgaaagaacaccacatattcttcctcgaaccaatacctagtacatgttccctgccgccgtcgagcttgcccagagggggagccgtcgcaccgtgctacgccatcagcccgtaggtagtcccttgccgtcgtttgcttcgctccgccagcaccgtgctcgccgtcgttcgctctactagcgcagtgcttgccctctaattcagttagggttggggtgatggggaaagtgcaag

SEQ ID NO: 34398 - DNA, 636 bp, Zea Mays
tactgtcctgaggttgagggggtccagaggtgctggtcactaacccccggcgcaagactaaccgtttccaggacatcccagagttgaaggcacgtcatgtgttattgctgctctgtcaatttataaatcacatggaggtggtccggttgcctgtatactatccttctcaactagaaaaggaagatccgaagctctacgcaaataatgtcagaaaactaatagcaatggagggcaatttagttctttctaatattgggctggcagagaagcgcgtgtaccatgcagcactgactggaagtagtctacctggcgctagacatgagaaagatgattgaaagacgttgcgtcgctttttctgtaatagacagacgaggagcacttaaaaatgtaactgtgtgcgtgtttttttatatctgtaatgtggcactttctttgtttgaggaggttgttgagtacccttctcatactacattgtacaaaaacgatgtccattatagttagatgaggttcgtgctctcgtacgcggtccttcagatttcgatttcgagtgctactgttttttttttcttgaatacgcaggagagctgcgtatttttgtattaagaagaagaataaaaaggggagaaaaaaccccgg

SEQ ID NO: 34399 - DNA, 1100 bp, Zea Mays
caacagcaagagcaccaagccgccatcgccagattggatcttcgctaacaggagatcatcccgcacacgaacgacaaccttaggggagccggcggcaaaaacatcagaccggaagatcgcccacccaagctccatcacctggacttcccttggtgctgtagctgaaaggatccaagaggtttgtcaagataagaataccccaatgatgttgttgtttcccgagggaactactacaaatggggattaccttcttccatttaagactggagcctttcttgcaggtgcaccagtgcagccagtcattttgaaatacccttacaggagatttagtccagcatgggattcaatggatggagcacgtcatgtgttattgctgctctgtcaatttataaatcacatggaggtggtccggttgcctgtatactatccttctcaactagaaaaggaagatccgaagctctacgcaaataatgtcagaaaactaatagcaatggaggtaggctaaacccaaaactgagtcaaacaaccatgcaaagatcaaacaacctcttcgtaatatatgtatccaccgagggttggagagtatgattggcctcccacctgtaaaggccccaagagctcgagaaggctcgattctaatccctatggatggctctgctgtcggaaaaaatattgccaagtatggggacgaaggggcaatttagttctttctaatattgggctggcagagaagcgcgtgtaccatgcagcactgactggaagtagtctacctggcgctagacatgagaaagatgattgaaagacgttgcgtcgctttttctgtaatagacagacgaggagcacttaaaaatgtaactgtgtgcgtgtttttttatatctgtaatgtggcactttctttgtttgaggaggttgttgagtacccttctcatactacattgtacaaaaacgatgtccattatagttagatgaggttcgtgctctcgtacgcggtccttcagatttcgatttcgagtgctactgttttttttttcttgaatacgcaggagagctgcgtatttttgtattaagaagaagaataaaaaggggagaaaaaaccccgg

SEQ ID NO: 34400 - DNA, 1951 bp, Zea Mays
cagcacctcagctccctcacgcagcactccctgctctcccacgcgtcgctctctctcgctggacgtcatctcccagccgatccctcccatggctgcctctcctccatctccctccctccctgtgtggtgtccagccgatgctctctcccatggacgccctccccctcttgcagcaagtcagcaaccccatctcctctgccctccatccccagctcgcccctcaaccatggatactgccagccctggcactcgccctctgcacgccattgctctccttcctgcagcaagccccatctctactggcgctctaattttcagtcatcccgcatggccggcgtcctccccattttctacaggtacgttaattaatcacgtgatgtggagaataagagatgggttgatcacaagatgatgctaatggacgaagctaaagatgataaatcaaccaagtgccaggatgggaggtgctcgccaagcgagtatcatctaacaacactgacgtagtgtttattctaggcaagccccggtgcatttaccccttccttgtatttttaaaaagacttttatacacttaagtctaatgaaatgtgcattaagttttaggaattgcttgaaaactatttgatgcattgactaccttgatatccattcctattataggtacttctttggaagtatcaaatattgtttacaaaaatgcttagccctgcttagatcttgtagatagaggttgtcttttgcaataatgcctagctcaggggttatcctgtgaaaggatggtttctgcctacaagaatattttcattgggagcatggtgggatcttactgcaaagttccctataatgctcttttcatccttaggaacacaaaacaatcctaatggtggaagtacttaactcgagacttgggctaggaacaggtgatgctccacccaggttaattaaggattgaatgcgtatgtaggcctatatgatcaaggactatcttaactggccacatgccctagatatgggacagggtaagcttgaacccggctattccatacatgaaaagacaatcgcgcattgggagtggagagatggcgagagtggcacgtaccctcctagcaaaggaccacctaaaaggggtggtgtgctctcgggtggcgtggacctattcatgcagtggaggatccatgggaatggtatacatatgcaagagttacgagaaacatatgtcgtgtggttagaggtcctcagctgagtaaatcaattcggatcgctgttatatccccggacagtggagacttgatctctgacctgcaacctaggttagcatgtaaacattattaataaaaatgatgttgtattgatgagatggtgaaattagactagatgcaactagagtctattaatatttaatctggcattataatattgaaagttaggactcactttagtaagctatttctgcaaaagtatctaagttgattcttgctaaagccttttccttgattcctatttaaccagcatatccttgagagtcatttttccttagtcgggtaagacttgcaaaagtacacttcgtactcagggtttttgaacccatgttgttgcaggtactagatttgtgttgctatggatggtgttaagcaccggtgggcacgaccttcttataagcctaagtacctctcctatacttcttattgaggattatcattgagctagcatatatttcaaaattataaataatttataacatttcaaagtttatttctttgaatcacttttgtaatcacttcgataaacataatgtaaatttgttgtaacttgtaacttttgtaataaagaaattccgctgcaaaaatgttggtgtgtgatttgtgtttacttaatcttgtgatcctggttgtgagtggtttatccgggtccttgggacactcgaacggatcctgttaagttacccggtgca

SEQ ID NO: 34401 - DNA, 762 bp, Zea Mays
ctttctccttatcttctccaccgcctaactccctcaaccttatcccctatacacagcacctcagctccctcacgcagcactccctgctctcccacgcgtcgctctctctcgctggacgtcatctcccagccgatccctcccatggctgcctctcctccatctccctccctccctgtgtggtgtccagccgatgctctctcccatggacgccctccccctcttgcagcaagtcagcaaccccatctcctctgccctccatccccagctcgcccctcaaccatggatactgccagccctggcactcgccctctgcacgccattgctctccttcctgcagcaagccccatctctactggcgctctaattttcagtcatcccgcatggccggcgtcctccccattttctacaggtactagatttgtgttgctatggatggtgttaagcaccggtgggcacgaccttcttataagcctaagtacctctcctatacttcttattgaggattatcattgagctagcatatatttcaaaattataaataatttataacatttcaaagtttatttctttgaatcacttttgtaatcacttcgataaacataatgtaaatttgttgtaacttgtaacttttgtaataaagaaattccgctgcaaaaatgttggtgtgtgatttgtgtttacttaatcttgtgatcctggttgtgagtggtttatccgggtccttgggacactcgaacggatcctgttaagttacccggtgca

SEQ ID NO: 34402 - DNA, 833 bp, Zea Mays
atttcttagtctttgagcaaatgaacagagagagagtatagttttgcagcggttcattgcacgcacacatgcttagagacagaggaggaggaaaccccgtgcttcttaaaaacatatccacgctcacattctgctatcgtacaaacaccgtttctatacaggccaaggcgacaagcttcgtccagctctgcatcaaagaaggaaggaagttatggaccgcacctactacaagggcggcatcaaggcgtactggaagcgccggggctactaccgcatcgacgccgccgctgcgcagcgccggccgccgctccccaccgcggagctcggaggtggcgtgggtgtcgcccaggcccagccgccggcgccgacgctggagggtgcctcggggcggcgccgatgccgcgggtggcgcgtgcgccgcggccagctgcggcggcggctgctccgcgcgctgtcgccgcgccggtggctcatgcggctccgcgacgcgtacgtgtccgccatgctgcggctggcgtcctcccccgccgtcgggtacggcgccggccagccctactgcggcacggcggccttcgcgcggccggcgcagctcaaggagtacgaagataaggtgctggtggagatctacaggtccatactcgcgggcggcgggcctggccccatcgccgtcactaccggcagcaacggcgccggtgcgcctgccgccgccacactacggctaccgacggctgctgcttgagcttgagcggcagatgaagcatagtatacaggaaaacataatgatcataattatggctcaaggaccgagttaccacaacagaagagacattaag

SEQ ID NO: 34403 - DNA, 1076 bp, Zea Mays
tcaggcgtgggttctccggactcctatacggtttacacacgcgtgcagaggccaaggcgacaagcttcgtccagctctgcatcaaagaaggaaggaagttatggaccgcacctactacaagggcggcatcaaggcgtactggaagcgccggggctactaccgcatcgacgccgccgctgcgcagcgccggccgccgctccccaccgcggagctcggaggtggcgtgggtgtcgcccaggcccagccgccggcgccgacgctggagggtgcctcggggcggcgccgatgccgcgggtggcgcgtgcgccgcggccagctgcggcggcggctgctccgcgcgctgtcgccgcgccggtggctcatgcggctccgcgacgcgtacgtgtccgccatgctgcggctggcgtcctcccccgccgtcgggtacggcgccggccagccctactgcggcacggcggccttcgcgcggccggcgcagctcaaggagtacgaagataaggtgctggtggagatctacaggtccatactcgcgggcggcgggcctggccccatcgccgtcactaccggcagcaacggcgccggtgcgcctgccgccgccacactacggctaccgacggctgctgcttgagcttgagcggcagatgaagcatgtatttattcttcttgcttttactctttatgtcgcgacgttgtaacttcggtgcgcctcacaagcatttcatttcttcttcgtaaactagttaaatgtccatgcgttacaacgggaatatataatacacgataacctatgttcaaatgtgtattatattgtcatgtaaaaaggtttcgtaatcaatttgtgatccaaactatacataaattttgttattttaatttagttatttcatcattacattgcaaccatcaataccatgtaaattttgtccgtacgttgcgacgaaacacaaattattcaataaaacattagtacacaacgattacagtttgccagcttctgaatatcacaagatttataaggtcaaattaagttatgctcttttgtactttgttaaaaaacaagatttataaggtcaaat

SEQ ID NO: 34404 - DNA, 1480 bp, Zea Mays
ctaacctttcgccggagcccggaagagtgaagtatacgatgagatttcgggtatgcgagtgtcaggcgtgggttctccggactcctatacggtttacacacgcgtgcaggtttaattgtaccgcatgtttttcgtgtaatagagatctagtcctctcaatccttttcacgtgccacgtacacaccgtcttaaaatataaaatataaggcgtaactattttttcgtgtcctataatataaaacgttgttctttaaatacacacgtacattgtagtaatatagagaattaaatatatttcttagtctttgagcaaatgaacagagagagagtatagttttgcagcggttcattgcacgcacacatgcttagagacagaggaggaggaaaccccgtgcttcttaaaaacatatccacgctcacattctgctatcgtacaaacaccgtttctatacaggccaaggcgacaagcttcgtccagctctgcatcaaagaaggaaggaagttatggaccgcacctactacaagggcggcatcaaggcgtactggaagcgccggggctactaccgcatcgacgccgccgctgcgcagcgccggccgccgctccccaccgcggagctcggaggtggcgtgggtgtcgcccaggcccagccgccggcgccgacgctggagggtgcctcggggcggcgccgatgccgcgggtggcgcgtgcgccgcggccagctgcggcggcggctgctccgcgcgctgtcgccgcgccggtggctcatgcggctccgcgacgcgtacgtgtccgccatgctgcggctggcgtcctcccccgccgtcgggtacggcgccggccagccctactgcggcacggcggccttcgcgcggccggcgcagctcaaggagtacgaagataaggtgctggtggagatctacaggtccatactcgcgggcggcgggcctggccccatcgccgtcactaccggcagcaacggcgccggtgcgcctgccgccgccacactacggctaccgacggctgctgcttgagcttgagcggcagatgaagcatgtatttattcttcttgcttttactctttatgtcgcgacgttgtaacttcggtgcgcctcacaagcatttcatttcttcttcgtaaactagttaaatgtccatgcgttacaacgggaatatataatacacgataacctatgttcaaatgtgtattatattgtcatgtaaaaaggtttcgtaatcaatttgtgatccaaactatacataaattttgttattttaatttagttatttcatcattacattgcaaccatcaataccatgtaaattttgtccgtacgttgcgacgaaacacaaattattcaataaaacattagtacacaacgattacagtttgccagcttctgaatatcacaagatttataaggtcaaattaagttatgctcttttgtactttgttaaaaaacaagatttataaggtcaaat

SEQ ID NO: 34405 - DNA, 1321 bp, Zea Mays
ggaaccccttggaagatttaaagattctgcaatcaattgacaattatcctgaaaggtcctagcaagtagtacgtgcggtgttgaggcaggcgggcctacctgtgggcggcaaaccacgtgccgattcgggcgtgtgtcgcctaacctttcgccggagcccggaagagtgaagtatacgatgagatttcgggtaactctcagtcccatcgaataaacccaaacctaaactataacaaatagtagcactgaaaataggttgtatggaggactgggcagtaacggtttcgtttgccaggccaaggcgacaagcttcgtccagctctgcatcaaagaaggaaggaagttatggaccgcacctactacaagggcggcatcaaggcgtactggaagcgccggggctactaccgcatcgacgccgccgctgcgcagcgccggccgccgctccccaccgcggagctcggaggtggcgtgggtgtcgcccaggcccagccgccggcgccgacgctggagggtgcctcggggcggcgccgatgccgcgggtggcgcgtgcgccgcggccagctgcggcggcggctgctccgcgcgctgtcgccgcgccggtggctcatgcggctccgcgacgcgtacgtgtccgccatgctgcggctggcgtcctcccccgccgtcgggtacggcgccggccagccctactgcggcacggcggccttcgcgcggccggcgcagctcaaggagtacgaagataaggtgctggtggagatctacaggtccatactcgcgggcggcgggcctggccccatcgccgtcactaccggcagcaacggcgccggtgcgcctgccgccgccacactacggctaccgacggctgctgcttgagcttgagcggcagatgaagcatgtatttattcttcttgcttttactctttatgtcgcgacgttgtaacttcggtgcgcctcacaagcatttcatttcttcttcgtaaactagttaaatgtccatgcgttacaacgggaatatataatacacgataacctatgttcaaatgtgtattatattgtcatgtaaaaaggtttcgtaatcaatttgtgatccaaactatacataaattttgttattttaatttagttatttcatcattacattgcaaccatcaataccatgtaaattttgtccgtacgttgcgacgaaacacaaattattcaataaaacattagtacacaacgattacagtttgccagcttctgaatatcacaagatttataaggtcaaattaagttatgctcttttgtactttgttaaaaaacaagatttataaggtcaaat

SEQ ID NO: 34406 - DNA, 1217 bp, Zea Mays
cggaaccccttggaagatttaaagattctgcaatcaattgacaattatcctgaaaggtcctagcaagtagtacgtgcggtgttgaggcaggcgggcctacctgtgggcggcaaaccacgtgccgattcgggcgtgtgtcgcctaacctttcgccggagcccggaagagtgaagtatacgatgagatttcgggccaaggcgacaagcttcgtccagctctgcatcaaagaaggaaggaagttatggaccgcacctactacaagggcggcatcaaggcgtactggaagcgccggggctactaccgcatcgacgccgccgctgcgcagcgccggccgccgctccccaccgcggagctcggaggtggcgtgggtgtcgcccaggcccagccgccggcgccgacgctggagggtgcctcggggcggcgccgatgccgcgggtggcgcgtgcgccgcggccagctgcggcggcggctgctccgcgcgctgtcgccgcgccggtggctcatgcggctccgcgacgcgtacgtgtccgccatgctgcggctggcgtcctcccccgccgtcgggtacggcgccggccagccctactgcggcacggcggccttcgcgcggccggcgcagctcaaggagtacgaagataaggtgctggtggagatctacaggtccatactcgcgggcggcgggcctggccccatcgccgtcactaccggcagcaacggcgccggtgcgcctgccgccgccacactacggctaccgacggctgctgcttgagcttgagcggcagatgaagcatgtatttattcttcttgcttttactctttatgtcgcgacgttgtaacttcggtgcgcctcacaagcatttcatttcttcttcgtaaactagttaaatgtccatgcgttacaacgggaatatataatacacgataacctatgttcaaatgtgtattatattgtcatgtaaaaaggtttcgtaatcaatttgtgatccaaactatacataaattttgttattttaatttagttatttcatcattacattgcaaccatcaataccatgtaaattttgtccgtacgttgcgacgaaacacaaattattcaataaaacattagtacacaacgattacagtttgccagcttctgaatatcacaagatttataaggtcaaattaagttatgctcttttgtactttgttaaaaaacaagatttataaggtcaaat

SEQ ID NO: 34407 - DNA, 655 bp, Zea Mays
ttattattataaatgaataaatgaacatatatgaaagatattgcgtttaagcatgatgattcatcttacatatcaataggatatttctcctccttcatatattaagtttataaacatacattcgtctctagaaaaatggtttagagcgaaggtgaggcaaagagaagattacacacaacaatttttcgggcctccaaaaaggtactttatgcagggcactgttcgtctatttatagggagtcgtacaacttcgtacggtattatatttatgcccttagagattacacactgggtttacaaataatacaaggacaatactatcttttgctctcagtgtttaagatgacacattctccttgcatcatcttcttgcgttattatgacgaagctaccttcgttgctcttccattgttccgtatcgaagctattctagttccgaagctcctgtaatgagtagagaacaggcacaacatggccgaaacacctctcgaagatccttggccacggtgaggtggaaggatggctgctttggtcaccagataatggagtggcacttgatgaattggagagagctaacttggtggctggggagaagagctttggcttgcaacacagaccacagagacaccagaggaacaactagagctggatcact

SEQ ID NO: 34408 - DNA, 274 bp, Zea Mays
atgagccttccctacccagccgtcatgtccctccgttccctgatctatctaaacaaatgaagaagaagagaaggggcctgctcctgtcgctagatctggtctgcccaacaaaaaccgaagtctggaggagtggccaaccctcatattgctgctccttgttcttatattcgaattgtgctgcagcttggctttggaaaagctaggtgaaaataaggagagaagggaggaggtcgtggtctccttgaggtcaagaacatgtaccgcatgatgagga

SEQ ID NO: 34409 - DNA, 461 bp, Zea Mays
atgagccttccctacccagccgtcatgtccctccgttccctgatctatctaaacaaatgaagaagaagagaaggggcctgctcctgtcgctagatctgcttggctttggaaaagctaggtgaaaataaggagagaagggaggaggtcgtggtctccttgaggtgtgctaattggatatgtctgctcgagggatgggagtagctgcacttcacacacatagatgacactttaaccgacgtttggcttgctactaatttaagtgaatggaagagaagtctttaactagcttgttttaccttttttttaattagtgcttttgctttgtcttagaggtgatgtgtcaaaattcaatctattttggcataacagtgtagttctagtagcaccctagagttgttttcttaataactgtggggagttttcatcttctcaatatagtatgaattttcggggtgttataa

SEQ ID NO: 34410 - DNA, 358 bp, Zea Mays
atcgtttcttgttatcttgggtatcacatgagccttccctacccagccgtcatgtccctccgttccctgatctatctaaacaaatgaagaagaagagaaggggcctgctcctgtcgctagatctggtctgcccaacaaaaaccgaagtctggaggagtggccaaccctcatattgctgctccttgttcttatattcgaattgtgctgcagcttggctttggaaaagctaggtgaaaataaggagagaagggaggaggtcgtggtctccttgaggttgcagtgctctgtatcagacttaattcattgtcgccttattggtaaaggcatggaaatgtagcggtggtttgctacagttttg

SEQ ID NO: 34411 - DNA, 936 bp, Zea Mays
tttggtccctagcatattccgtgcccgtttgtgccatcatctcccgcgccgcgcgcgagtgcaacctctataaaagaagccacagtgcagcgtcgaagctcacaagcagcgagatctcgatcaaacagcttctctgatctcgctcagaagcgaggacatcagacattattgcaattgtatttgcacagcagcgagatctcgctcagaagagactctgaagagataacgagctgcgcttcttcgtcctcgatcaactagcttctctggtcgcttccatatggagagagctgcgtcaagctgcgctagcctcctagcacaaaggaggtgctactccgtggccgcggtcgtggtgaagggatgcgggcggaaggccgtggagaaggtggccaagcgcatcatgggcaaggaggtgaacaccgcggctgcctccggggagaagacgccgtgggtgccggacccagtcactggctactaccgcccggcgggtggcgccaaggaggtggacgcggcggagcttcgcgccaggctgctcaccaagaggatcgccaactgaatcaatctagctgcagagcagtgcggctgagattatttagcgccagttcatctcttgggcctagagcatgacggtgctgtatctttttgaggcataactagggaatggtcaggatcgctaacagttgtggcaaagcactcattgcagacaagaaagatggtagtgaggttccatacacttcggacaaggagcatgagccaccacgtgagctgactggtgatccttggtgatagctctaccacacccaccctggacaagccatgcacaacctaggtccctccaaccatgtcacctgtggacgatggccagcctatcgacctagccctagcgaccaccacagaggtgcctgcgctgaacctgtggcaacgcctaccatggacaag

SEQ ID NO: 34412 - DNA, 2662 bp, Zea Mays
cgagatctcgatcaaacagcttctctgatctcgctcagaagcgaggacatcagacattattgcaattgtatttgcacagcagcgagatctcgctcagaagagactctgaagagataacgagctgcgcttcttcgtcctcgatcaactagcttctctggtcgcttccatatggagagagctgcgtcaagctgcgctagcctcctagcacaaaggaggtgctactccgtggccgcggtcgtggtgaagggatgcgggcggaaggccgtggagaaggtggccaagcgcatcatgggcaaggaggtgaacaccgcggctgcctccggggagaagacgccgtgggtgccggacccagtcactggctactaccgcccggcgggtggcgccaaggaggtggacgcggcggagcttcgcgccaggctgctcaccaagaggatcgccaactgaatcaatctagctgcagagcagtgcggctgagattatttagcgccagttcatctcttgggcctagagcatgacggtgctgtatctttttgaggcataactaggtgagtgcccgtgcgttgcaacggaaacacataataacctaacgtagtctgaaacaaatattatggtctgaaacatatatagagttgcaaagatgggtccaggaattgaggcgaacacagatccgaatttcccaggatagtgaaaatgacccatgattattatagaaaacataagtattcacattctgagatataaaatagcataagagtggaacgagggcgtccacattgttcgtggccccgcccctgctccatctcatgggcctcgctcctgccactcaagcacgaaagaagccccgacgtcgcattctggccctcgacgccatccgcgatatgaccttccgcttcctctgtcgagcgtgcttgttcctagcttccctcccgcctctgcatcggattcccgtgatgaggctggaaagttataccgtgagcttagcttccccatcgacgtaccatccgcgtcctccgatcggtcgcgcgtggagcttctggaacctcaggtgcatctggcttccgcgcaggccacatcccgtccgcccaaggttcgtaaggcttcaacctagaaagcaagcaaaaaaacccaataccttacatttttggaaatagaatggaatagaatgaccaaatttataccttattcatgaagtgtgcttcagctctagcgtactaacctcctgcataaagctaccgttgtagaaaccaccacatctatttccgttctgcatgggggagttcctttatacatttcaaatctaggtagtgtgccaattatgttgctgaaaccttcacaagttcacatgcatgcagcttcaagttcggaccgtctgaataaagttatccctgcataaacagggggttagagaagtggactcacatatccagtttctgtattgaagcaaacaatattctggtgaccttgagcatatgcaaagcactgtagcaaagtgagcactgaaacagaaatgaatagcaaaatattatcacatcaagcaaccttccatgggggtgctctgcaagcgcctgcttaaagtggttccagaaaatgacttagtaaaacaattaaatatgcctacttgatggcattgctcaacattgtttatataccattctccaacaaaacgcttgacgtacttgagcgtgtcgggatgactgattgtaaaccgtgctcaactcatgtgaacactcaggtgaaactctcaacagcttagggctggccaatcagcacatacggaaataattttagggcttagggttggccacaagaaactactatcatgtatcatacaaagtacttttttctcgaacacgtaggagagctacacatcattttataaaagaggaaaaaaaacaggggaaaagaatcccttacaagaaacccacttcaatccccaaccttgggagaaaggagttgagaaaacaaagacgaatccgcgcctgagacaaacaggatcgacctctagaaaggagagagttaaaccatccctccttcacgaccaaaaaccacccaccccactcactaaagcctagagcttagcagctcctgccaaacaccacaatctaacttcttctctgctgaagttctaggccaccgaaagagaaggagaggcacactcaaaagaagtaaacaaggctactgaattgtttgatttcttaattgtcagaccactcaatcacacaaatatcaaatggcaaatgagtctagctacatttcacacagggaacacacttggctacacaaacagacattcaattgaaacttgtattctacatggaaggttagacaaagtgagagatggcaaactaatagtcttttggatgcatgtcgccaaaattccatacaatgcaacatcgtaatcgaagcaagaagcaaaagtgggaacaaacaaatacctcactttccatgggcaataaactcctcacaccatgctgctcaaatttcgatgccagaaactgccctccagcaactaaccatggtgtcatagccattgaaatgtcaacgactaaaaatagcaacgatgttaattgaggtgatagaagaccctgtaaaatagtgtgttcattagtttcccctctgctctataacatttatccatagcacaacaatcatatgattcgtg

SEQ ID NO: 34413 - DNA, 2026 bp, Zea Mays
ctggcatgtgccccttggacatgttccaagagccttcttccctgattccgtggccaccatcatttggtccctagcatattccgtgcccgtttgtgccatcatctcccgcgccgcgcgcgagtgcaacctctataaaagaagccacagtgcagcgtcgaagctcacaagcagcgagatctcgatcaaacagcttctctgatctcgctcagaagcgaggacatcagacattattgcaattgtatttgcacagcagcgagatctcgctcagaagagactctgaagagataacgagctgcgcttcttcgtcctcgatcaactagcttctctggtcgcttccatatggagagagctgcgtcaagctgcgctagcctcctagcacaaaggaggtgctactccgtggccgcggtcgtggtgaagggatgcgggcggaaggccgtggagaaggtggccaagcgcatcatgggcaaggaggtgaacaccgcggctgcctccggggagaagacgccgtgggtgccggacccagtcactggctactaccgcccggcgggtggcgccaaggaggtggacgcggcggagcttcgcgccaggctgctcaccaagaggatcgccaactgaatcaatctagctgcagagcagtgcggctgagattatttagcgccagttcatctcttgggcctagagcatgacggtgctgtatctttttgaggcataactagcttcaagttcggaccgtctgaataaagttatccctgcataaacagggggttagagaagtggactcacatatccagtttctgtattgaagcaaacaatattctggtgaccttgagcatatgcaaagcactgtagcaaagtgagcactgaaacagaaatgaatagcaaaatattatcacatcaagcaaccttccatgggggtgctctgcaagcgcctgcttaaagtggttccagaaaatgacttagtaaaacaattaaatatgcctacttgatggcattgctcaacattgtttatataccattctccaacaaaacgcttgacgtacttgagcgtgtcgggatgactgattgtaaaccgtgctcaactcatgtgaacactcaggtgaaactctcaacagcttagggctggccaatcagcacatacggaaataattttagggcttagggttggccacaagaaactactatcatgtatcatacaaagtacttttttctcgaacacgtaggagagctacacatcattttataaaagaggaaaaaaaacaggggaaaagaatcccttacaagaaacccacttcaatccccaaccttgggagaaaggagttgagaaaacaaagacgaatccgcgcctgagacaaacaggatcgacctctagaaaggagagagttaaaccatccctccttcacgaccaaaaaccacccaccccactcactaaagcctagagcttagcagctcctgccaaacaccacaatctaacttcttctctgctgaagttctaggccaccgaaagagaaggagaggcacactcaaaagaagtaaacaaggctactgaattgtttgatttcttaattgtcagaccactcaatcacacaaatatcaaatggcaaatgagtctagctacatttcacacagggaacacacttggctacacaaacagacattcaattgaaacttgtattctacatggaaggttagacaaagtgagagatggcaaactaatagtcttttggatgcatgtcgccaaaattccatacaatgcaacatcgtaatcgaagcaagaagcaaaagtgggaacaaacaaatacctcactttccatgggcaataaactcctcacaccatgctgctcaaatttcgatgccagaaactgccctccagcaactaaccatggtgtcatagccattgaaatgtcaacgactaaaaatagcaacgatgttaattgaggtgatagaagaccctgtaaaatagtgtgttcattagtttcccctctgctctataacatttatccatagcacaacaatcatatgattcgtg

SEQ ID NO: 34414 - DNA, 776 bp, Zea Mays
ctctcacatcacatctgaaacagaaacagctagaagacatattcaacagattcagagaaagcacatatatatagatatatatagagagagagaggcaaaaaaagagcgagagagagctgccgattaattaccaacccggccagcttccatggagagagttgcatcaagctactgcgtcagcctcctagcacaaaggagggcctacactgtggccgcggccatggctaagaagggagccgccgcacggagggtcgacgagaagaaggcggcggccgcgctgaccaagcgcgtgatgggcaagaaggaagtgaacacggctgccgctgcggcagctgaggagaaggcgtgggtgccggaccctgtcaccggctactatcgcccagcaggtagcgccaaggaggttgacgcggcggagctacgcgccaagctgctgacggaggctgcggccaactgattaatcaagcagtcactttgtcgagctacagcatgagttggctcacttggctgtccacctagcttctcctgctttaatattcgcgctcgttgatccccgagctcgttggcctagagccttttatacactgaatgatacatatataatatataacaggaacatatccaatacacatgagtttttgatacacatatggtgcatataaattaacaaagtccacacaaaattcatacttattctttctatcttactctaattatatacaaaagtttaaatttaaattcattatactttagttgtagctgtaataaaaaagataaaa

SEQ ID NO: 34415 - DNA, 1534 bp, Zea Mays
agcatatggtgttaaacataatccccaattttaaactattggaattgtggattatacaaattatgacgatatgaaatacgcgattaggaagcttgatgactcacagttcaggaatgcattttcaagagcatatatcagggtgagggagtatgatgctagatcacgaagcagaagccgtagccactcgtactctagaagccccagctacagcaggagcaggagtccaaaatctgtttctcagtcaccctcatctgtggatgaaaggtttgcttttgtttttcctagatttggccatgcggcgatctgggggctgcattgatataatactggatgttttgagaatcggagtggatggtttgggacttcggatagtagagatggattgtgatgcatgtatgacaagtgggctacaatcagtcctaggagcaagataggctgacagtaagaaaatgtgaagtaaagcttgtggtgttattaaaacaaatgtctactattaagttcaatgaccccatatagatggacagtaatttataggtttgtgtttttgtttaactaatgctgccaccttagtaaaaatttctatggcgccttttgcattttggctctctttagccatttccttgtcaaggttcacactagccgaagttgacattacaacaaaattcagtatacacattgctttgtttgcttatttgtattccagttatgagctaattacctgataggctgaaaatctatattatttttctgagagtattaccataaacaccaaaatgtgtccttacattgcagcttcgctcctgtttcagttcattcatatgccgtggaatgttgcctctttattcacatctcgagttgccagtttaatttttatcacaattttatatcagatattagagtgctactaacacatcattaagtaatggaatttgtttcttgtaccttctgcagatcgctatcaagatctcgatccccaatttcttctccttctcatgcaagatatgcgacaagccctaggagcagaagcgcatcccgttctcggtctcctgtgagatccgattgaactttgagagcccttgaagcagtgagcagccccagggagaagaaaggaacttgagagtatgccgtgccatcacaatggtccgagtgattatgctgttgccactgctccctcacatttaagaggtttcctcttatttagacggagcatttaattaacattatcttgctaaagagagacttatgcgtagtctacttgtgtactcgttcgtttgtcctcatgttcttggcttcaggaactctggttttttatcattgtacccatagtaaaacctagatgtagttggggtatgccgtatgcgtctatattcggttggtcgaatgtaaatctggatgcatatatgcatctgtttggtttcatttaggcctttccttggtttcgtgattaatgacaacataagcttattgctgtgatcaaagtatattttgtagaggtaattaaagctagtcacacaataatggagattgcttagac

SEQ ID NO: 34416 - DNA, 1651 bp, Zea Mays
ccggttttgtttgacgatagttgagtagacccctggcaatccacccttgcacggttcttttaggttttttgttcgtcatttgcagctgccattctgcctaaattgtttaagcgaacctcctccggggctctctttgttgaagttcgccacggtggcccatgtcagtgtgatgtaaggttggagttggagctgcaatgacataaaacatagaagccttgatgcatgattgaatacgaaaacaatgagcaggcgcaacagccgtaccatctatgtaggcaatctccctggggacatccgtgagagggaggttgaggatctcttctacaagtatggccgtattttggatattgacttgaaaatacctccgagacctcctggatacgcattcgttgagtttgaggatccacgtgatgctgatgatgcaatttatggccgtgatgggtataactttgatggctacaggttgagggttgaattagctcatggtggcagaggccagtcttattcttatgatcgttcaagcagctatagcagtgcatgccgtggaggtgtttctaggcgctctgatttccgtgttatggtcactggtttaccctcatcggcatcgtggcaagatctgaaggaccacatgcggcgcgctggtgatgtctgtttctctgatgtataccgtgaggctggagaaactattggaattgtggattatacaaattatgacgatatgaaatacgcgattaggaagcttgatgactcacagttcaggaatgcattttcaagagcatatatcagggtgagggagtatgatgctagatcacgaagcagaagccgtagccactcgtactctagaagccccagctacagcaggagcaggagtccaaaatctgtttctcagtcaccctcatctgtggatgaaagatttggccatgcggcgatctgggggctgcattgatataatactggatgttttgagaatcggagtggatggtttgggacttcggatagtagagatggattgtgatgcatgtatgacaagtgggctacaatcagtcctaggagcaagataggctgacaatcgctatcaagatctcgatccccaatttcttctccttctcatgcaagatatgcgacaagccctaggagcagaagcgcatcccgttctcggtctcctgtgagatccgattgaactttgagagcccttgaagcagtgagcagccccagggagaagaaaggaacttgagagtatgccgtgccatcacaatggtccgagtgattatgctgttgccactgctccctcacatttaagaggtttcctcttatttagacggagcatttaattaacattatcttgctaaagagagacttatgcgtagtctacttgtgtactcgttcgtttgtcctcatgttcttggcttcaggaactctggttttttatcattgtacccatagtaaaacctagatgtagttggggtatgccgtatgcgtctatattcggttggtcgaatgtaaatctggatgcatatatgcatctgtttggtttcatttaggcctttccttggtttcgtgattaatgacaacataagcttattgctgtgatcaaagtatattttgtagaggtaattaaagctagtcacacaataatggagattgcttagac

SEQ ID NO: 34417 - DNA, 2261 bp, Zea Mays
gtccctacctttcctctgattgcgtgggatctcaactcaatctctccttatatagttatatgtagctgttgagttcgttccggttttgtttgacgatagttgagtagacccctggcaatccacccttgcacggttcttttaggttttttgttcgtcatttgcagctgccattctgcctaaattgtttaagcgaacctcctccggggctctctttgttgaagttcgccacggtggcccatgtcagtgtgatgtaaggttggagttggagctgcaatgacataaaacatagaagccttgatgcatgattgaatacgaaaacaatgagcaggcgcaacagccgtaccatctatgtaggcaatctccctggggacatccgtgagagggaggttgaggatctcttctacaagtatggccgtattttggatattgacttgaaaatacctccgagacctcctggatacgcattcgttgagtttgaggatccacgtgatgctgatgatgcaatttatggccgtgatgggtataactttgatggctacaggttgagggttgaattagctcatggtggcagaggccagtcttattcttatgatcgttcaagcagctatagcagtgcatgccgtggaggtgtttctaggcgctctgatttccgtgttatggtcactggtttaccctcatcggcatcgtggcaagatctgaaggaccacatgcggcgcgctggtgatgtctgtttctctgatgtataccgtgaggctggagaaactattggaattgtggattatacaaattatgacgatatgaaatacgcgattaggaagcttgatgactcacagttcaggaatgcattttcaagagcatatatcagggtgagggagtatgatgctagatcacgaagcagaagccgtagccactcgtactctagaagccccagctacagcaggagcaggagtccaaaatctgtttctcagtcaccctcatctgtggatgaaaggtttgcttttgtttttcctagatttggccatgcggcgatctgggggctgcattgatataatactggatgttttgagaatcggagtggatggtttgggacttcggatagtagagatggattgtgatgcatgtatgacaagtgggctacaatcagtcctaggagcaagataggctgacagtaagaaaatgtgaagtaaagcttgtggtgttattaaaacaaatgtctactattaagttcaatgaccccatatagatggacagtaatttataggtttgtgtttttgtttaactaatgctgccaccttagtaaaaatttctatggcgccttttgcattttggctctctttagccatttccttgtcaaggttcacactagccgaagttgacattacaacaaaattcagtatacacattgctttgtttgcttatttgtattccagttatgagctaattacctgataggctgaaaatctatattatttttctgagagtattaccataaacaccaaaatgtgtccttacattgcagcttcgctcctgtttcagttcattcatatgccgtggaatgttgcctctttattcacatctcgagttgccagtttaatttttatcacaattttatatcagatattagagtgctactaacacatcattaagtaatggaatttgtttcttgtaccttctgcagatcgctatcaagatctcgatccccaatttcttctccttctcatgcaagatatgcgacaagccctaggagcagaagcgcatcccgttctcggtctcctgtgagatccgattgaactttgagagcccttgaagcagtgagcagccccagggagaagaaaggaacttgagagtatgccgtgccatcacaatggtccgagtgattatgctgttgccactgctccctcacatttaagaggtttcctcttatttagacggagcatttaattaacattatcttgctaaagagagacttatgcgtagtctacttgtgtactcgttcgtttgtcctcatgttcttggcttcaggaactctggttttttatcattgtacccatagtaaaacctagatgtagttggggtatgccgtatgcgtctatattcggttggtcgaatgtaaatctggatgcatatatgcatctgtttggtttcatttaggcctttccttggtttcgtgattaatgacaacataagcttattgctgtgatcaaagtatattttgtagaggtaattaaagctagtcacacaataatggagattgcttagac

SEQ ID NO: 34418 - DNA, 3714 bp, Zea Mays
atggcggcccacgaggccacagcacgcctgcagcctgcaggctgcaacgtcgcggtctaccgcacgaatctcgaagcgtcccgcacccacatttgcccatcgccagctatatcaccacgaccacgggactcctgtcgcaggttccagtattccaccacgcggcgtcgcctgccgaaccccgaaccttctcgaggtcgaggcccctcccctttcgccaggagaaaacaatgagcaggcgcaacagccgtaccatctatgtaggcaatctccctggggacatccgtgagagggaggttgaggatctcttctacaagtatggccgtattttggatattgacttgaaaatacctccgagacctcctggatacgcattcgttgagtttgaggatccacgtgatgctgatgatgcaatttatggccgtgatgggtataactttgatggctacaggttgagggttgaattagctcatggtggcagaggccagtcttattcttatgatcgttcaagcagctatagcagtgcatgccgtggaggtgtttctaggcgctctgatttccgtgttatggtcactggtttaccctcatcggcatcgtggcaagatctgaaggaccacatgcggcgcgctggtgatgtctgtttctctgatgtataccgtgaggctggagaaactattggaattgtggattatacaaattatgacgatatgaaatacgcgattaggaagcttgatgactcacagttcaggaatgcattttcaagagcatatatcagggtgagggagtatgatgctagatcacgaagcagaagccgtagccactcgtactctagaagccccagctacagcaggagcaggagtccaaaatctgtttctcagtcaccctcatctgtggatgaaaggtatgtgaatctatgtcatttagaaatgtacatttgtgaaactgagagtgctaatattgttcgaaggaacccgattgtcaaataaatggtgaaagcaatcagatcttgttgtgaatcatcattgatgtattctgcactacacctatggcgctaaaaatatttgaatatgacatgtcatcattttgtatacaagcttaaagcagggccatggtggatgtaacaactgataggagattgcacattaacttaattatttcctactatctgatacactttcgtcaaacaacgaaatgcctttccagagctgagactgccttatacaaacttctacaaatacagcttaagtttttaagtgtgtgctctaccctaaccttatagaacatgctgaaggtttggctcacaaacttctagataaatctttcaatgtcgtagcagggagtattagatccatcagaagcttgccaaattgagagggtatataaagaggtgttaccagaactttccttctttcaaaacaatagttttgtcgccttttcctgtcgtatcagtcgtctacatagcatgccaaaacccctctgtttctttttcctcatggaaaagcttcagtccccttcttatttatcaacttcatacaacattaacccatagttatcatggcagcgcgtaggcgctgactaggcatccaagcggtcggcagtggatgccatgcctcgtcgcctcgcctgaacccagttaggcgatggtaagacatctcctagaagcccacctagctgttgaactaggctttaatgggtctgccttgtgcactatacgcccagtttcctcttctttcctctgctgccaccaccgttagagccgctagatcgctcacgccggctgcctgccgcgtgcctgtgccgcgcgcccgcgtggcctacacagtgcaccgcccacaagtcgcctacaccagcgttgctcgtgcgtcgtgccgcctgagctcgaccatggatgcttgctacttgctggatttatatttatttgctagtttttcatatatcatgtgatatatgactatatgttgcatttttgctgctggagaaaagggcgtcttggcagcacctaggcggttgtctagaacctaggcgtctaggtgaccggctggcgagaccgtggcgccatgataaccatgcattagcctagagctcttttttctgagttgtaacaacatattttcgtgttttatattttaaacgtagaaaaagactacagataaaattcaccccagattttaatgataataacaatatatttcaaaagatttttttctgttttttgttaaagcaagaggaaaaacaaagtaaggtgccagaattttaacttgatatactttggaacacctactaaaatcatctgtgttatgttatttttttgatgtattgatatctctttaaattagtataactttttgtgttgtactgatttctctttaaaatagtatgacataaatttgctctgtggttcaatgattaaacataccgagcttgttggctaacctccattgttcaaggtttgcttttgtttttcctagatttggccatgcggcgatctgggggctgcattgatataatactggatgttttgagaatcggagtggatggtttgggacttcggatagtagagatggattgtgatgcatgtatgacaagtgggctacaatcagtcctaggagcaagataggctgacagtaagaaaatgtgaagtaaagcttgtggtgttattaaaacaaatgtctactattaagttcaatgaccccatatagatggacagtaatttataggtttgtgtttttgtttaactaatgctgccaccttagtaaaaatttctatggcgccttttgcattttggctctctttagccatttccttgtcaaggttcacactagccgaagttgacattacaacaaaattcagtatacacattgctttgtttgcttatttgtattccagttatgagctaattacctgataggctgaaaatctatattatttttctgagagtattaccataaacaccaaaatgtgtccttacattgcagcttcgctcctgtttcagttcattcatatgccgtggaatgttgcctctttattcacatctcgagttgccagtttaatttttatcacaattttatatcagatattagagtgctactaacacatcattaagtaatggaatttgtttcttgtaccttctgcagatcgctatcaagatctcgatccccaatttcttctccttctcatgcaagatatgcgacaagccctaggagcagaagcgcatcccgttctcggtctcctgtgagatccgattgaactttgagagcccttgaagcagtgagcagccccagggagaagaaaggaacttgagagtatgccgtgccatcacaatggtccgagtgattatgctgttgccactgctccctcacatttaagaggtttcctcttatttagacggagcatttaattaacattatcttgctaaagagagacttatgcgtagtctacttgtgtactcgttcgtttgtcctcatgttcttggcttcaggaactctggttttttatcattgtacccatagtaaaacctagatgtagttggggtatgccgtatgcgtctatattcggttggtcgaatgtaaatctggatgcatatatgcatctgtttggtttcatttaggcctttccttggtttcgtgattaatgacaacataagcttattgctgtgatcaaagtatattttgtagaggtaattaaagctagtcacacaataatggagattgcttagac

SEQ ID NO: 34419 - DNA, 2147 bp, Zea Mays
atggcggcccacgaggccacagcacgcctgcagcctgcaggctgcaacgtcgcggtctaccgcacgaatctcgaagcgtcccgcacccacatttgcccatcgccagctatatcaccacgaccacgggactcctgtcgcaggttccagtattccaccacgcggcgtcgcctgccgaaccccgaaccttctcgaggtcgaggcccctcccctttcgccaggagaaaacaatgagcaggcgcaacagccgtaccatctatgtaggcaatctccctggggacatccgtgagagggaggttgaggatctcttctacaagtatggccgtattttggatattgacttgaaaatacctccgagacctcctggatacgcattcgttgagtttgaggatccacgtgatgctgatgatgcaatttatggccgtgatgggtataactttgatggctacaggttgagggttgaattagctcatggtggcagaggccagtcttattcttatgatcgttcaagcagctatagcagtgcatgccgtggaggtgtttctaggcgctctgatttccgtgttatggtcactggtttaccctcatcggcatcgtggcaagatctgaaggaccacatgcggcgcgctggtgatgtctgtttctctgatgtataccgtgaggctggagaaactattggaattgtggattatacaaattatgacgatatgaaatacgcgattaggaagcttgatgactcacagttcaggaatgcattttcaagagcatatatcagggtgagggagtatgatgctagatcacgaagcagaagccgtagccactcgtactctagaagccccagctacagcaggagcaggagtccaaaatctgtttctcagtcaccctcatctgtggatgaaagatttggccatgcggcgatctgggggctgcattgatataatactggatgttttgagaatcggagtggatggtttgggacttcggatagtagagatggattgtgatgcatgtatgacaagtgggctacaatcagtcctaggagcaagataggctgacagtaagaaaatgtgaagtaaagcttgtggtgttattaaaacaaatgtctactattaagttcaatgaccccatatagatggacagtaatttataggtttgtgtttttgtttaactaatgctgccaccttagtaaaaatttctatggcgccttttgcattttggctctctttagccatttccttgtcaaggttcacactagccgaagttgacattacaacaaaattcagtatacacattgctttgtttgcttatttgtattccagttatgagctaattacctgataggctgaaaatctatattatttttctgagagtattaccataaacaccaaaatgtgtccttacattgcagcttcgctcctgtttcagttcattcatatgccgtggaatgttgcctctttattcacatctcgagttgccagtttaatttttatcacaattttatatcagatattagagtgctactaacacatcattaagtaatggaatttgtttcttgtaccttctgcagatcgctatcaagatctcgatccccaatttcttctccttctcatgcaagatatgcgacaagccctaggagcagaagcgcatcccgttctcggtctcctgtgagatccgattgaactttgagagcccttgaagcagtgagcagccccagggagaagaaaggaacttgagagtatgccgtgccatcacaatggtccgagtgattatgctgttgccactgctccctcacatttaagaggtttcctcttatttagacggagcatttaattaacattatcttgctaaagagagacttatgcgtagtctacttgtgtactcgttcgtttgtcctcatgttcttggcttcaggaactctggttttttatcattgtacccatagtaaaacctagatgtagttggggtatgccgtatgcgtctatattcggttggtcgaatgtaaatctggatgcatatatgcatctgtttggtttcatttaggcctttccttggtttcgtgattaatgacaacataagcttattgctgtgatcaaagtatattttgtagaggtaattaaagctagtcacacaataatggagattgcttagac

SEQ ID NO: 34420 - DNA, 3204 bp, Zea Mays
atggcggcccacgaggccacagcacgcctgcagcctgcaggctgcaacgtcgcggtctaccgcacgaatctcgaagcgtcccgcacccacatttgcccatcgccagctatatcaccacgaccacgggactcctgtcgcaggttccagtattccaccacgcggcgtcgcctgccgaaccccgaaccttctcgaggtcgaggcccctcccctttcgccaggagaaaacaatgagcaggcgcaacagccgtaccatctatgtaggcaatctccctggggacatccgtgagagggaggttgaggatctcttctacaagtatggccgtattttggatattgacttgaaaatacctccgagacctcctggatacgcattcgttgagtttgaggatccacgtgatgctgatgatgcaatttatggccgtgatgggtataactttgatggctacaggttgagggttgaattagctcatggtggcagaggccagtcttattcttatgatcgttcaagcagctatagcagtgcatgccgtggaggtgtttctaggcgctctgatttccgtgttatggtcactggtttaccctcatcggcatcgtggcaagatctgaaggaccacatgcggcgcgctggtgatgtctgtttctctgatgtataccgtgaggctggagaaactattggaattgtggattatacaaattatgacgatatgaaatacgcgattaggaagcttgatgactcacagttcaggaatgcattttcaagagcatatatcagggtgagggagtatgatgctagatcacgaagcagaagccgtagccactcgtactctagaagccccagctacagcaggagcaggagtccaaaatctgtttctcagtcaccctcatctgtggatgaaaggtatgtgaatctatgtcatttagaaatgtacatttgtgaaactgagagtgctaatattgttcgaaggaacccgattgtcaaataaatggtgaaagcaatcagatcttgttgtgaatcatcattgatgtattctgcactacacctatggcgctaaaaatatttgaatatgacatgtcatcattttgtatacaagcttaaagcagggccatggtggatgtaacaactgataggagattgcacattaacttaattatttcctactatctgatacactttcgtcaaacaacgaaatgcctttccagagctgagactgccttatacaaacttctacaaatacagcttaagtttttaagtgtgtgctctaccctaaccttatagaacatgctgaaggtttggctcacaaacttctagataaatctttcaatgtcgtagcagggagtattagatccatcagaagcttgccaaattgagagggtatataaagaggtgttaccagaactttccttctttcaaaacaatagttttgtcgccttttcctgtcgtatcagtcgtctacatagcatgccaaaacccctctgtttctttttcctcatggaaaagcttcagtccccttcttatttatcaacttcatacaacattaacccatagttatcatggcagcgcgtaggcgctgactaggcatccaagcggtcggcagtggatgccatgcctcgtcgcctcgcctgaacccagttaggcgatggtaagacatctcctagaagcccacctagctgttgaactaggctttaatgggtctgccttgtgcactatacgcccagtttcctcttctttcctctgctgccaccaccgttagagccgctagatcgctcacgccggctgcctgccgcgtgcctgtgccgcgcgcccgcgtggcctacacagtgcaccgcccacaagtcgcctacaccagcgttgctcgtgcgtcgtgccgcctgagctcgaccatggatgcttgctacttgctggatttatatttatttgctagtttttcatatatcatgtgatatatgactatatgttgcatttttgctgctggagaaaagggcgtcttggcagcacctaggcggttgtctagaacctaggcgtctaggtgaccggctggcgagaccgtggcgccatgataaccatgcattagcctagagctcttttttctgagttgtaacaacatattttcgtgttttatattttaaacgtagaaaaagactacagataaaattcaccccagattttaatgataataacaatatatttcaaaagatttttttctgttttttgttaaagcaagaggaaaaacaaagtaaggtgccagaattttaacttgatatactttggaacacctactaaaatcatctgtgttatgttatttttttgatgtattgatatctctttaaattagtataactttttgtgttgtactgatttctctttaaaatagtatgacataaatttgctctgtggttcaatgattaaacataccgagcttgttggctaacctccattgttcaaggtttgcttttgtttttcctagatttggccatgcggcgatctgggggctgcattgatataatactggatgttttgagaatcggagtggatggtttgggacttcggatagtagagatggattgtgatgcatgtatgacaagtgggctacaatcagtcctaggagcaagataggctgacaatcgctatcaagatctcgatccccaatttcttctccttctcatgcaagatatgcgacaagccctaggagcagaagcgcatcccgttctcggtctcctgtgagatccgattgaactttgagagcccttgaagcagtgagcagccccagggagaagaaaggaacttgagagtatgccgtgccatcacaatggtccgagtgattatgctgttgccactgctccctcacatttaagaggtttcctcttatttagacggagcatttaattaacattatcttgctaaagagagacttatgcgtagtctacttgtgtactcgttcgtttgtcctcatgttcttggcttcaggaactctggttttttatcattgtacccatagtaaaacctagatgtagttggggtatgccgtatgcgtctatattcggttggtcgaatgtaaatctggatgcatatatgcatctgtttggtttcatttaggcctttccttggtttcgtgattaatgacaacataagcttattgctgtgatcaaagtatattttgtagaggtaattaaagctagtcacacaataatggagattgcttagac

SEQ ID NO: 34421 - DNA, 705 bp, Zea Mays
atgggagaagatggggaggagagaggagggacgggtgggctggacgagcaccaaaggcgaggaaaaatctggacgcgagtattaggagggcgcaggggagcaagctggagatggaacacgcagaagctcggtggagcagagggcaagcagggacggcacgctagtgaagaagatgcgttgggggaaaggagcggcgttgggatcaggcgccatgggagccgctcggctgggagcatccatgggaggggtctcgggcgccgagcagggggcttcagggtgcggcgtaggggcacacgcggtcaagcgaacttgagttggagtcagggagcaggaaatcagggcgacggcgcgtgcacagagaggcgaccgcgccatgggcgttcgcgggcggacgaactaagaagcttgagggagctcgaccaccaggagaaaaatgtcgggctggggcagagaaaatcgtgcgtcatgaagcttgacgagagaggcgcggctgggggcgggtccgagctagacgacggcacccagggcgagcgccagggagggtgccgtgagggagatagagaaatccagggcggtggagagctcgctgcaagcagccgagcagaggaagggcgtagctgccatgggaactaagcgcgcgcagaaacagggaacagggaggagcgtcgggcggaggaagaagacgtgcggcgaggagataagaag

SEQ ID NO: 34422 - DNA, 1077 bp, Zea Mays
ggtaatcaattttcaaggaaagaaaagcatcaacggtttagcacacaactcctatcacctaatgcatcaaacaaggtgataaagattttaaaacacaaggaggtggcaaatgcaccggggcttgcctgaataacactaggttagtgttgttaggtggcgtccacttgacgaccatcctttgtcttcgcattgctctgattatccatcttcaggttaatccaccagcatcagcttgcaaattagtccgcgcttggggtcgacttgactcatcttccacttcacgcaattatttatcgtacctcatgagatgcatgatgcacatgtatgagcacgagtataacgagtataatataaataatctacactaaaaagaatgaaacacttaaaatcaagcattaaaatcaattaacaagcattaagcatcatgaatatcacagcagggcatcgactacatccattaaccaaattgacataataacactagaacatctatttttattcctaactttttactaactctttaaactatgtatcttaattactggttttatcgatttatcgatcatcacaacatacacatgctaaattaataacatttattgagataaacaattctatttaacctatttataaacctagttgactggaatacgaatcaacttaccctgactaatttgacgagataatcggaagcacgactacgggttccggttgacgtcatccaggggccttttttcttcggtaatcaattgctgaagatcttttcctcgactgaataattttgatgaatcgaacttgagtcgcgcaggatgttcgagctttttgtcgcgcacttggtaaacaccacgctgttggcttcgtcttcacctgacgcttgagatttcttgatgacgcgcggaacgacgacgacacaggagggtgacgtatatagagctacacacacgacacgacgacgaatgacgctaaccggcgaaatcaacgacacgatgagaattaaggccaaacaagccaaggggacgcgctggcgagcaggaaactgcgcgagcacaacacgaaacgatgccccgcctggccaag

SEQ ID NO: 34423 - DNA, 1028 bp, Zea Mays
cttcacgcgattatttatcgtacctcatgagatgcatgatgcacatatatgagcacgagtataacgagtataatatagataatctacactaaaaaggatgaaacacttaaaatcaagcaataaaatcaattaacaagcattaagcatcatgaatatcacaacagggcatcgactacatccattaaccaaattgacataataacactagaacatctatttttattcttagctttttactaactctttaaactgtatcttaattacttgttttaccgatttatcgatcatcacaacatacgcatgctaaattaataacatttattgagatcaacaattctatttaacctatttatagacctagttgactagaatacgaataaacttaccctgactaatttgacgagataatcggaagcacgactacgggttccagttaacatcatctaggggccttcttttcttcggtaatcaattgttgaagatcttttcctcgactgaataattttgatgaatcgaacttgagtcgcgcaagatgttcgagctttttgtcgcgcacttggtgaactccacgctgctggcttcgtcttcacccgacgcttgggatttcttgatgacgcgcagaacgacgacagcacaggagggtgacgtatatagagctacacacgcgacgcgacggcgaatgacgctaaccggcaaaatcgacgatgcaatgagaattaaggccaaacgaggcgaggggacgcgctggcaagcaggaaactgtgcgagcacaacacggaatgatgccccgcctggccgagctgaaggaagcgcggaccggggacagaatgggcaccaggggcgagttcacagcaacagacacttgacaacaaccgacgcagccggataactaaaaatactgcgacagccaagaatcggttcagaaactacgaccggcacgcaagagaagagctcgacgcggaaactcgacatgccgttgcgagtagagaacttcgcgcgcacaacaacgcgatggaggagaactgaac

SEQ ID NO: 34424 - DNA, 727 bp, Zea Mays
aacctcggatttcaccaccaccacgctgttttggttcttggagccaccgtcgccctcgtccttagtatccatggctgtaggtagagctggaacggaagccggagccatggctcgccgctgatgcgtcaggccaggtcgtcaggggccctacgcgcccacacgaaccccaccagaattccccccaatcttcctccagaagaagaccatgcgggcggacagatgacgttcagcaacgaaattcgcaggggtagaagagaatcaaaggagcgcactagagtggtcgaagacttcgcaagaaaaaagatcaattctgcaatagaaaacccacggattggtaacagaaccctatagaaccgaaggagtcttaagaatcgtcgcgaatgggccaatggaaaatacaaatactcgaccaggcaacgagggaatccgcggaacactcatacgcaagacgaatctgcaaccacaacaaaaagacgcaaaagaacccgcaagaacctgacaagccatgtcaatcacgcaggatcaaaccagcggggggcgaaggcttaccgaggatcgtcagatggagaatcgggcatcagtccgggcggatcgccatggcggaaatttgtgggaatcaggatcgggggccggggcacgatcgctcgggtctgtggctcaaaagtggaggcgagggcgaggagagaatttgtcaaaatgggtctcctcgttgccgctctaaaaaaaa

SEQ ID NO: 34425 - DNA, 3543 bp, Zea Mays
aatacatagttagcacttgcatgataaatacttaggtagagaataaagatgaattacagtttctgcatgactaaaccacaagtagttatgtatgtccttcatcgatctatccaaaaatgggaaagctaccataaaatccaataaaaccatagagggtcaggaagatgttggacacattttatcatatggctatataaactttgtcaaattatgaaaggtctacatgtttctggaaattcaaagttgatatatgatatatctgatttaagcttagtcaaattatgcattacttttgtacaaactatacaggtattcataattcaaagtgctttcacactaaattcgtgttatagctgtactgtgtaaacactgttgtgagaaaacaatggtcaaagtctagttttctataccggtaaaaaggtctactttttgaacaccgtgccaaaataaaatacacctacatacttggatagagagaatatttgcttggatactaaccaagaccactgaaatacatgtaagcaataagattcgtcacataaaataacattaaacaattgccatgcattgtgctttcaagcaattgtaagatttatacttttattgccatatattctaataaagtaaaatcaacggtgtgtataggagactggtatagtctaaggcaaaaatggcaaaaatggacggtgtctagtttctagttttggtcaatatcgtgttgtacaaaaagggcgtttatgttttcatagaatcaagggtgtgtcagtaggcgaagggttcttgcacctttttcttcttaatacaatgatatgcaggcctcctcctacgtgttaaagaaaaaaaactggggcatcaaggtcatattagatatcttggattccttttatagcatgcatatggtgtcacaaaagcaacgtttttctcacaattgagtgaagagctaattctgtctaatggtgtacctttgctagatgctatgttttccattttaacttcactgaaaagtttgacaagataccagatgggtacattcatacctgtgccacaatcgtcatcaactaagagatcaccggtttgaactcccttattttgtttatctgcaaaatattggaagaaatgttgtcattaaaaacgaaacctggtgcaaaattaacacaaacacggataaattggtgtcctatccctaaaaaaagaagacaaattggatgccagaccatggtagtatgacaatatctggtgcttgttgatgtacaaggacgcatccacactgtcctcatgcctcttcctctttctcctcttcatgatactgtttccatggcctttatgaatctgcatcgattctgacatagtaccatttgctttgcttgctgcctgttgtaattcattctgtttcttgattagagcaagctccttgtcatacttcgatatttgagatgaaagctccctcatacgcaactctaaccagtggcatctccactgaattggacgaacagaattgctccactcagccatcacctttttccttctgaagagtaatcacatgtcacaaaatttgtataaaaattaagcatgttgagtaaaacaatacaacaagatataataagaatataggaagtactccctccatttcaaattataagatgttttgaattttctagatatacagtttttgttatccactcaggtatacactatgtccagataaataataaaatcaatatatctagaaaagccaaaacgtcttataatttagaacaaatatggtagttgcttgttccaattatattctagtcatacccataaatgacagataagctagcactttgaagcattcataagagtagctcaattatcggtttccttgttcatgactacacattatagtttttttactaaatcatgtatatgagaaataagcatgcacaaatcagaaccataatttaaaaaagaggcataagaataaaaatatacaatgtctaccgacaggcacaaaaggaatgcatattggtctacaacaataaaaaatcatcaatgttggcttgggttagccataaaatcaaagcagggtgaagaaagtggcaccaagcatctagcattatatgtgacaagcggatacaacagaagtttaggagcaagttttataggacggcgattaaacctgctatgttgtatgatgtaaaatgcctacaaaaatatgtcatgttcaatacataaatgttacaaaaatgtgtatgttgtattggatttgtggctatacaaaaaggggtcaagtccagaatgatgatatacgtgataggctataggtagcaccaattaaagaaaagcttctccaacaccaattgagatattttggacatttccaacagagacctctagagtattcaatacgtagtgtcatactaaagcacgatagtaatggaaggagatgcaggggaagtccgaaattgacatagcaaaagaccataaaaaaagacttgcaagtatggaatgtacctaaaggtttagccttaaatagaagtgaatcgaaaaagctatctacatgcctgaaccttgatgtgtggcttctgttagtttcaactctagcctaccccaacatgcttgtaactaaaatgctatattgttgttgttgctgctggcttgggtttgaatcccaagctggaaacttcttttccaaatacagactgtcatgtttaacatataccatgtagtaaaacaccaagatgaacttttcagaaagctaaagaaaaaggtaacactgacaaaaggactttctaaccagaaggatattggtgttctgtgtcaatatgtagtgttttgatctactactggattgacagacatatggtcacccataaatccatgacgattatcatggaattaatgtacctggtagctgaaacaaagtcctggttgaacaagcataattgtaaattcataatacttctgaataagatgccatttgcttaattatctttctaaatagctacctgacaaatagaagatcataggagtaaccagtaattaccttttcttatcgtgataagcatacttagcataagtggcacggcatttcttaggacagaacatatatttttttctggctgttgctacctgcttctatttttcagaagaattggtcagaaattatacctgtcctaatctaagtgttattatcaccttataagtttttaacatttcatatataaatgacaaacgaaatgtaggccataaaaggaaaatttcgatgagaaggtacaaatcaataaacatacaagacaccacattacgttactgaatcatatctttctgttttaggtacattgatgatcctacgtttcttgtcgcttccgcagtcaggatggtgcaataattacaacatagtataacagttgaaaccctactacaaccttccgttttgtcagcaggggcgcaggagagaaaatcaatcactgaaacacaaaagcacataacaacctagcatagtcttacacatgttcattcttccatgtaccaggagtgcacaataatgacataagtagcatt

SEQ ID NO: 34426 - DNA, 542 bp, Zea Mays
aggaaattgtggagaagcaagctcctggattgatgaaggaagctgagcggtttctaattctcagcaatattgataggctgtggaaagagcatctgcaggcactaaagtttgtccaacaagctgttggtttaaggggttatgcccaacgagatccccttattgagtataaacttgagggatataatcttttcttagacatgatggctcaaatcaggaggaatgttatttattctgtatatcagttcaaaccagtagtgaagaaccaagaaggggaagcatcccaaaaggtgtcaaaaaagaaactggacaaaggagctaacaaacttggtgctgcccaagctgcgtcatgatcttcctgtgagaaacgttgctggtgcttttagttgcagtggctgcagtctccacgtgtacaaagatggtctatactcgataccgtatgagaaatgtacttcatgcatgtttttgcaggattagcatgaacaggcacgcagaattccgaatgtactagtagaagatatttgctggtagcagtgccaactgac

SEQ ID NO: 34427 - DNA, 533 bp, Zea Mays
aggaaattgtggagaagcaagctcctggattgatgaaggaagctgagcggtttctaattctcagcaatattgataggctgtggaaagagcatctgcaggcactaaagtttgtccaacaagctgttggtttaaggggttatgcccaacgagatccccttattgagtataaacttgagggatataatcttttcttagacatgatggctcaaatcaggaggaatgttatttattctgtatatcagttcaaaccagtagtgaagaaccaagaaggggaagcatcccaaaaggtgtcaaaaaagaaactggacaaaggagctaacaaacttggtgctgcccaagctgcgtcatgatcttcctgtgagaaacgttgctggtgcttttagttgcagtggctgcagtctccacgtgtacaaagatggtctatactcgataccgtatgagaaatgtacttcatgcatggattagcatgaacaggcacgcagaattccgaatgtactagtagaagatatttgctggtagcagtgccaactgac

SEQ ID NO: 34428 - DNA, 984 bp, Zea Mays
cacctacctgtccaaaatttggtgttaaccccgttgcccacctctgtctccactgcataatcaaacaaggcctaagtacaacccttaatcgagatcccaaaatctgcccaggcctcgtactaagagtgatcaaacaaccagggtacatggcctcaagtctggaaagatgctgaaagaatttcgaggtcattcttcatatgtaaattatgccatcttcactactgacggtagccgtgtcattacagcttccagtgattgtactgttaaggtctgggatactaaaacaacagattgcttgcatactttcaagccaccacctcctttgaggggaggagatgcatctgttaattctgtccatttatttccaaaaaatactgatcacattgttgtctgcaataagacttcatcaatattcatcatgactttacaaggacaggttgtgaagagtttctcatcaggtaagcgagaagggggagattttgttgcagcttcagtttcaccaaaaggagaatggatatattgtgttggtgaagacatgaacatgtattgctttagctaccaatctggtaaactggagcatctgatgaaggtgcatgagaaggatgtcataggcattacgcaccatcctcacaggaacttagtagccaccattgctgaggattgtatgatgaagatatggaagccttgactttttttctttttaaaaaaaccttgaaccgatgattaaataggatgtattttgttttgtaatttagataactggtaggcgctacagctatggactcgttggtgcttatgttgccccatgtcttactaccattgtatcctgtactagatttagggacctttcaatggtgtaaacacagcttactacgactcctcgctacaagttcattatggttaatttggttatagcacgctggatgctgattgtgtccgcaggcatatagcagtcgaaaattagcagttactataataattgaa

SEQ ID NO: 34429 - DNA, 902 bp, Zea Mays
gttgaattgtcattgtcatgttttgcttctttcattctcttgggaacaaagagtttatgggtacatggcctcaagtctggaaagatgctgaaagaatttcgaggtcattcttcatatgtaaattatgccatcttcactactgacggtagccgtgtcattacagcttccagtgattgtactgttaaggtctgggatactaaaacaacagattgcttgcatactttcaagccaccacctcctttgaggggaggagatgcatctgttaattctgtccatttatttccaaaaaatactgatcacattgttgtctgcaataagacttcatcaatattcatcatgactttacaaggacaggttgtgaagagtttctcatcaggtaagcgagaagggggagattttgttgcagcttcagtttcaccaaaaggagaatggatatattgtgttggtgaagacatgaacatgtattgctttagctaccaatctggtaaactggagcatctgatgaaggtgcatgagaaggatgtcataggcattacgcaccatcctcacaggaacttagtagccaccattgctgaggattgtatgatgaagatatggaagccttgactttttttctttttaaaaaaaccttgaaccgatgattaaataggatgtattttgttttgtaatttagataactggtaggcgctacagctatggactcgttggtgcttatgttgccccatgtcttactaccattgtatcctgtactagatttagggacctttcaatggtgtaaacacagcttactacgactcctcgctacaagttcattatggttaatttggttatagcacgctggatgctgattgtgtccgcaggcatatagcagtcgaaaattagcagttactataataattgaa

SEQ ID NO: 34430 - DNA, 1555 bp, Zea Mays
agcagccgctcccgacttttaccttcctacctggtgctgtagcatccgccgcctcccgcagaacccgaagatggcgtcgtcggcgtcgaccctcgaaatcgaggcccgcgacgtggttaagatagtgctgcagttctgcaaggagaattcgctgcagcagacgttccagacgctgcaaaacgagtgccaggtctccctcaacactgttgacagcatcgacaccttcattgccgacatcaatgccgggcgttgggatgctgtgcttccccaggtcgcacagctcaagctgccacgcaagaagctcgaggacctctatgagcagattgtgttggagatggctgagctccgtgagcttgacacggcccgtgccatcctccgtcagacgcaggtcatgggtgttatgaagcaggagcagcctgagcggtacctccgccttgagcacctccttgtccgcacatactttgaccccaatgaggcctaccaagaatccaccaaggagaagcggcgagcactgattgctcaagctgttgcttcagaagtctcagtagtaccgccatctcgtcttatggcactgattggtcaggctttgaagtggcaacagcaccaaggattgttgcctcctggcacacagtttgatttatttagaggaactgctgcaatgaagcaggatgaagaagaaacataccctacttccttatctcatcaaataaagggtacatggcctcaagtctggaaagatgctgaaagaatttcgaggtcattcttcatatgtaaattatgccatcttcactactgacggtagccgtgtcattacagcttccagtgattgtactgttaaggtctgggatactaaaacaacagattgcttgcatactttcaagccaccacctcctttgaggggaggagatgcatctgttaattctgtccatttatttccaaaaaatactgatcacattgttgtctgcaataagacttcatcaatattcatcatgactttacaaggacaggttgtgaagagtttctcatcaggtaagcgagaagggggagattttgttgcagcttcagtttcaccaaaaggagaatggatatattgtgttggtgaagacatgaacatgtattgctttagctaccaatctggtaaactggagcatctgatgaaggtgcatgagaaggatgtcataggcattacgcaccatcctcacaggaacttagtagccaccattgctgaggattgtatgatgaagatatggaagccttgactttttttctttttaaaaaaaccttgaaccgatgattaaataggatgtattttgttttgtaatttagataactggtaggcgctacagctatggactcgttggtgcttatgttgccccatgtcttactaccattgtatcctgtactagatttagggacctttcaatggtgtaaacacagcttactacgactcctcgctacaagttcattatggttaatttggttatagcacgctggatgctgattgtgtccgcaggcatatagcagtcgaaaattagcagttactataataattgaa

SEQ ID NO: 34431 - DNA, 1839 bp, Zea Mays
agcagccgctcccgacttttaccttcctacctggtgctgtagcatccgccgcctcccgcagaacccgaagatggcgtcgtcggcgtcgaccctcgaaatcgaggcccgcgacgtggttaagatagtgctgcagttctgcaaggagaattcgctgcagcagacgttccagacgctgcaaaacgagtgccaggtcgcacagctcaagctgccacgcaagaagctcgaggacctctatgagcagattgtgttggagatggctgagctccgtgagcttgacacggcccgtgccatcctccgtcagacgcaggtcatgggtgttatgaagcaggagcagcctgagcggtacctccgccttgagcacctccttgtccgcacatactttgaccccaatgaggcctaccaagaatccaccaaggagaagcggcgagcactgattgctcaagctgttgcttcagaagtctcagtagtaccgccatctcgtcttatggcactgattggtcaggctttgaagtggcaacagcaccaaggattgttgcctcctggcacacagtttgatttatttagaggaactgctgcaatgaagcaggatgaagaagaaacataccctacttccttatctcatcaaataaagtttgggaagaaaactcatcctgaatgtgctcgattttcacctgatggtcagtaccttgtttcatgctcagttgatggaataattgaagtctgggattatcttagtggaaagcttaaaaaggatcttcaatatcaagccgatgaaagctttatgatgcacgaggaacctgtgctgtgtgttgattttagtagggattctgaaatgctggcatctggatcacaggatggaaagattaaggtttggcgtatacgaactggtcagtgcttgcgacgccttgagcgtgcacattcgaaaggtgttacaagtgttacattttcacgtgatggaacccaaatattgagtacatcctttgacactaccgcgagggtacatggcctcaagtctggaaagatgctgaaagaatttcgaggtcattcttcatatgtaaattatgccatcttcactactgacggtagccgtgtcattacagcttccagtgattgtactgttaaggtctgggatactaaaacaacagattgcttgcatactttcaagccaccacctcctttgaggggaggagatgcatctgttaattctgtccatttatttccaaaaaatactgatcacattgttgtctgcaataagacttcatcaatattcatcatgactttacaaggacaggttgtgaagagtttctcatcaggtaagcgagaagggggagattttgttgcagcttcagtttcaccaaaaggagaatggatatattgtgttggtgaagacatgaacatgtattgctttagctaccaatctggtaaactggagcatctgatgaaggtgcatgagaaggatgtcataggcattacgcaccatcctcacaggaacttagtagccaccattgctgaggattgtatgatgaagatatggaagccttgactttttttctttttaaaaaaaccttgaaccgatgattaaataggatgtattttgttttgtaatttagataactggtaggcgctacagctatggactcgttggtgcttatgttgccccatgtcttactaccattgtatcctgtactagatttagggacctttcaatggtgtaaacacagcttactacgactcctcgctacaagttcattatggttaatttggttatagcacgctggatgctgattgtgtccgcaggcatatagcagtcgaaaattagcagttactataataattgaa

SEQ ID NO: 34432 - DNA, 1870 bp, Zea Mays
cgcctctcctctccctctccagcagccgctcccgacttttaccttcctacctggtgctgtagcatccgccgcctcccgcagaacccgaagatggcgtcgtcggcgtcgaccctcgaaatcgaggcccgcgacgtggttaagatagtgctgcagttctgcaaggagaattcgctgcagcagacgttccagacgctgcaaaacgagtgccaggtctccctcaacactgttgacagcatcgacaccttcattgccgacatcaatgccgggcgttgggatgctgtgcttccccaggtcgcacagctcaagctgccacgcaagaagctcgaggacctctatgagcagattgtgttggagatggctgagctccgtgagcttgacacggcccgtgccatcctccgtcagacgcaggtcatgggtgttatgaagcaggagcagcctgagcggtacctccgccttgagcacctccttgtccgcacatactttgaccccaatgaggcctaccaagaatccaccaaggagaagcggcgagcactgattgctcaagctgttgcttcagaagtctcagtagtaccgccatctcgtcttatggcactgattggtcaggctttgaagtggcaacagcaccaaggattgttgcctcctggcacacagtttgatttatttagaggaactgctgcaatgaagcaggatgaagaagaaacataccctacttccttatctcatcaaataaagtttgggaagaaaactcatcctgaatgtgctcgattttcacctgatggtcagtaccttgtttcatgctcagttgatggaataattgaagtctgggattatcttagtggaaagcttaaaaaggatcttcaatatcaagccgatgaaagctttatgatgcacgaggaacctgtgctgtgtgttgattttagtagggattctgaaatgctggcatctggatcacaggatggaaagattaaggtttggcgtatacgaactggtcagtgcttgcgacgccttgagcgtgcacattcgaaagggtacatggcctcaagtctggaaagatgctgaaagaatttcgaggtcattcttcatatgtaaattatgccatcttcactactgacggtagccgtgtcattacagcttccagtgattgtactgttaaggtctgggatactaaaacaacagattgcttgcatactttcaagccaccacctcctttgaggggaggagatgcatctgttaattctgtccatttatttccaaaaaatactgatcacattgttgtctgcaataagacttcatcaatattcatcatgactttacaaggacaggttgtgaagagtttctcatcaggtaagcgagaagggggagattttgttgcagcttcagtttcaccaaaaggagaatggatatattgtgttggtgaagacatgaacatgtattgctttagctaccaatctggtaaactggagcatctgatgaaggtgcatgagaaggatgtcataggcattacgcaccatcctcacaggaacttagtagccaccattgctgaggattgtatgatgaagatatggaagccttgactttttttctttttaaaaaaaccttgaaccgatgattaaataggatgtattttgttttgtaatttagataactggtaggcgctacagctatggactcgttggtgcttatgttgccccatgtcttactaccattgtatcctgtactagatttagggacctttcaatggtgtaaacacagcttactacgactcctcgctacaagttcattatggttaatttggttatagcacgctggatgctgattgtgtccgcaggcatatagcagtcgaaaattagcagttactataataattgaa

SEQ ID NO: 34433 - DNA, 1926 bp, Zea Mays
aatcaccagagcgcctctcctctccctctccagcagccgctcccgacttttaccttcctacctggtgctgtagcatccgccgcctcccgcagaacccgaagatggcgtcgtcggcgtcgaccctcgaaatcgaggcccgcgacgtggttaagatagtgctgcagttctgcaaggagaattcgctgcagcagacgttccagacgctgcaaaacgagtgccaggtctccctcaacactgttgacagcatcgacaccttcattgccgacatcaatgccgggcgttgggatgctgtgcttccccaggtcgcacagctcaagctgccacgcaagaagctcgaggacctctatgagcagattgtgttggagatggctgagctccgtgagcttgacacggcccgtgccatcctccgtcagacgcaggtcatgggtgttatgaagcaggagcagcctgagcggtacctccgccttgagcacctccttgtccgcacatactttgaccccaatgaggcctaccaagaatccaccaaggagaagcggcgagcactgattgctcaagctgttgcttcagaagtctcagtagtaccgccatctcgtcttatggcactgattggtcaggctttgaagtggcaacagcaccaaggattgttgcctcctggcacacagtttgatttatttagaggaactgctgcaatgaagcaggatgaagaagaaacataccctacttccttatctcatcaaataaagtttgggaagaaaactcatcctgaatgtgctcgattttcacctgatggtcagtaccttgtttcatgctcagttgatggaataattgaagtctgggattatcttagtggaaagcttaaaaaggatcttcaatatcaagccgatgaaagctttatgatgcacgaggaacctgtgctgtgtgttgattttagtagggattctgaaatgctggcatctggatcacaggatggaaagattaaggtttggcgtatacgaactggtcagtgcttgcgacgccttgagcgtgcacattcgaaaggtgttacaagtgttacattttcacgtgatggaacccaaatattgaggtacatggcctcaagtctggaaagatgctgaaagaatttcgaggtcattcttcatatgtaaattatgccatcttcactactgacggtagccgtgtcattacagcttccagtgattgtactgttaaggtctgggatactaaaacaacagattgcttgcatactttcaagccaccacctcctttgaggggaggagatgcatctgttaattctgtccatttatttccaaaaaatactgatcacattgttgtctgcaataagacttcatcaatattcatcatgactttacaaggacaggttgtgaagagtttctcatcaggtaagcgagaagggggagattttgttgcagcttcagtttcaccaaaaggagaatggatatattgtgttggtgaagacatgaacatgtattgctttagctaccaatctggtaaactggagcatctgatgaaggtgcatgagaaggatgtcataggcattacgcaccatcctcacaggaacttagtagccaccattgctgaggattgtatgatgaagatatggaagccttgactttttttctttttaaaaaaaccttgaaccgatgattaaataggatgtattttgttttgtaatttagataactggtaggcgctacagctatggactcgttggtgcttatgttgccccatgtcttactaccattgtatcctgtactagatttagggacctttcaatggtgtaaacacagcttactacgactcctcgctacaagttcattatggttaatttggttatagcacgctggatgctgattgtgtccgcaggcatatagcagtcgaaaattagcagttactataataattgaa

SEQ ID NO: 34434 - DNA, 2314 bp, Zea Mays
cgtcagtccaactccatctcctcgttttcttcagcgcccgttagggagtcggccatgggatgcttttcatgctgctgtgtggcagatgacgacaacgttggcaggaggaagaagcatgacgatccctatgttcctatccctgctcatgtttataattttggacctagccggttcccagccccaacccctgtcatctccactggcagagctcagccaattgcagtaccggccattcatctggaagagctgaaggaaattacaaaaaacttcagcagtgatgccctcattggcgagggctcgtatgccagagtctattttggtgtgctgaaagatgggacgaaatctgcagtgaagaagcttgactccagcaaacagcctgatcaagaattccttgtgcaggtttcagctgtctcaagattgaagcatgagaatgttgtccaactcgtcggatactgcgccgaagggagcacccgcgtccttgcttatgagtatgcaactaggggatcattgcatgatatcctccatggtaaaaagggtgtcaaaggagcccagccagggccagtcctgtcatggatgcagcgagctaggattgccgtatgtgctgctcggggtctcgagttcctccacgagaaggccgatcctcgagtggtccaccgcgacatcaagtcaagcaacatactgctctttgaccatgatgttgcgaagatcggggacttcgacatctcaaaccaggcccctgacatggctgcgcgcctccactctactcgcgttcttggcacctttggctaccatgcaccagaatatgccatgactggacagcttagcacgaagagtgatgtctacagctttggagttgtgctgctggagcttttaaccggtcgcaagccagttgaccacacactgccccgtggccagcagagccttgtgacatgggctacaccgaggcttagtgaagacaaggtgaggcaatgcgtcgatccaaggctcggagacgaataccctccaaaggctgtagccaagatggctgctgtggccgccctctgcgtgcaatacgagggtgaattccgtcccaacatgagcatcgtcgtcaaggctctgaaccccttgctgcacagccggtctggcaaccgccctactgcctcgtcggcctcccacgctgccgagcgatccggactgtgatttctcatcgctgcgacaactttgggttcacgaaaaaggaccgtcttgtggagcgttggtgttgctgtgtcgtgactgccaaagccttggcgcagagaagagctttgccatgcagctgtgtattgtaaattgttttgtaagcgatgcgcctcctggtttgtgtgccctgtcatcatcctattctattctagaaaatggtgtacgatggatcatggatgataccaactatttggtctcttttggaatgcgaaaatgcagcacttggcttcctatgtgtgtagatcagctttgttgttctattgctacaaaccaggaatactacagtatgaatattacaactactggcagccggcatatgtaacagagaagcatgcacaacagggcaggacaggaaccgctcctggactgttgtcctagtcctaattgtgattgaaccaaaattgaattctatttcgattattagctagctagcgtatctatggttcaaaatgttttctcagacagcagccacgagacgagcgcagcacctcgatctccaactagggaagctgcatatctatggttcaacatcagcttcttcatcggagtcggcggctaggacatcggcagccgtcgtctgctccctgttagcttgttcaccagagtcggcagctgggacatcgacagccatcgtctgctctctgttagcttgttcaccgaaatcggcagctcggatatcttgttcatcggagtaggcagctaggacatcttgttcaccggagtcggcaggtgggacatcgacagtcgtggtctgctccctgttagcttgttcaccggagtcggcagctaggatatcttgttcaccggagtcggcagctgggatatcggcagccgtggtctgctccctgttagcttgttcaccggagacggcagctgggaagcctgggatatcttgttcaccggagtcggcagctgggacatcggcagccgtggtttgctccatgttagcttgttcaccggagtcggcagctgggacatcatgttcaccggagtcgacatctgggacatcggcagccgtggtctgctccctcttagcttgttcaccggaatcgggagctgggacatcttgttcaccagagtcggcagcagggatatc

SEQ ID NO: 34435 - DNA, 3321 bp, Zea Mays
aagccaggccaggcaacccacaacacaaggagaaggggaagggcggcgagggaagggctccgcgtcgtgtcccttctcttcctcctcctcctcctcctctctccaacaccccatccatcagcgctgccctccgcattgctcttgatcccatccagtacatcgattctccccccaagatcaaaggccggaggaggaagaaagggagtcggccatgggatgcttttcatgctgctgtgtggcagatgacgacaacgttggcaggaggaagaagcatgacgatccctatgttcctatccctgctcatggttgtcacttctctctctcttcttttcattacttcttgtatcatggtcgcgacgattaatttgtgaatttcaataaaaaaagttaattgtgtgatataatcaaggcactgacttcacaaaatgtggatgtcactacctgatcgaacaatgcaaaggggtggtactctatctgttttcgatgatcaattaattcgcagaaacttctttgtcataagaaatgcagttacctttctgacgttagcttacccagctttctgcctttcttaaacaaagagggaatgataaacatgccagtcaattgtactcgttcgtgcacctaaattcattcgtattcagtcctcgttacattacattattttgttaagaaaactattctaaaggaccagcatgctatgaattcttcacgaacttgagtcatgatctgtgtttcgtttctgttgaatccttattacgtactacttgtttggttgattttctctatccaaattcgatatagtctttggcacgactaaatatgatttacttcactggaaacctacctgtcctggtgtgtcaaataatgtatccaaaaagatctatgcgaattgattgctgatggttgtactgaactctgcaatgtgattgccaactatttggactgtggtggtactaaagggttttgttgtgtaccctatgacacaaaaatcctgttcccctgaaacatacaagatattgttttagttattttacaggtctggttcaacggaaacataaatatttaaacaaacatttatcatgcttgctagtaccacaaaaagggcttcctgagcatatatcacgatggtcatttctttttttttcctttatgcagtttataattttggacctagccggttcccagccccaacccctgtcatctccactggcagagctcagccaattgcagtaccggccattcatctggaagagctgaaggaaattacaaaaaacttcagcagtgatgccctcattggcgagggctcgtatgccagagtctattttggtgtgctgaaagatgggacgaaatctgcagtgaagaagcttgactccagcaaacagcctgatcaagaattccttgtgcaggtttcagctgtctcaagattgaagcatgagaatgttgtccaactcgtcggatactgcgccgaagggagcacccgcgtccttgcttatgagtatgcaactaggggatcattgcatgatatcctccatggtaaaaagggtgtcaaaggagcccagccagggccagtcctgtcatggatgcagcgagctaggattgccgtatgtgctgctcggggtctcgagttcctccacgagaaggccgatcctcgagtggtccaccgcgacatcaagtcaagcaacatactgctctttgaccatgatgttgcgaagatcggggacttcgacatctcaaaccaggcccctgacatggctgcgcgcctccactctactcgcgttcttggcacctttggctaccatgcaccagaatatgccatgactggacagcttagcacgaagagtgatgtctacagctttggagttgtgctgctggagcttttaaccggtcgcaagccagttgaccacacactgccccgtggccagcagagccttgtgacatgggctacaccgaggcttagtgaagacaaggtgaggcaatgcgtcgatccaaggctcggagacgaataccctccaaaggctgtagccaagatggctgctgtggccgccctctgcgtgcaatacgagggtgaattccgtcccaacatgagcatcgtcgtcaaggctctgaaccccttgctgcacagccggtctggcaaccgccctactgcctcgtcggcctcccacgctgccgagcgatccggactgtgatttctcatcgctgcgacaactttgggttcacgaaaaaggaccgtcttgtggagcgttggtgttgctgtgtcgtgactgccaaagccttggcgcagagaagagctttgccatgcagctgtgtattgtaaattgttttgtaagcgatgcgcctcctggtttgtgtgccctgtcatcatcctattctattctagaaaatggtgtacgatggatcatggatgataccaactatttggtctcttttggaatgcgaaaatgcagcacttggcttcctatgtgtgtagatcagctttgttgttctattgctacaaaccaggaatactacagtatgaatattacaactactggcagccggcatatgtaacagagaagcatgcacaacagggcaggacaggaaccgctcctggactgttgtcctagtcctaattgtgattgaaccaaaattgaattctatttcgattattagctagctagcgtatctatggttcaaaatgttttctcagacagcagccacgagacgagcgcagcacctcgatctccaactagggaagctgcatatctatggttcaacatcagcttcttcatcggagtcggcggctaggacatcggcagccgtcgtctgctccctgttagcttgttcaccagagtcggcagctgggacatcgacagccatcgtctgctctctgttagcttgttcaccgaaatcggcagctcggatatcttgttcatcggagtaggcagctaggacatcttgttcaccggagtcggcaggtgggacatcgacagtcgtggtctgctccctgttagcttgttcaccggagtcggcagctaggatatcttgttcaccggagtcggcagctgggatatcggcagccgtggtctgctccctgttagcttgttcaccggagacggcagctgggaagcctgggatatcttgttcaccggagtcggcagctgggacatcggcagccgtggtttgctccatgttagcttgttcaccggagtcggcagctgggacatcatgttcaccggagtcgacatctgggacatcggcagccgtggtctgctccctcttagcttgttcaccggaatcgggagctgggacatcttgttcaccagagtcggcagcagggatatc

SEQ ID NO: 34436 - DNA, 3326 bp, Zea Mays
aagccaggccaggcaacccacaacacaaggagaaggggaagggcggcgagggaagggctccgcgtcgtgtcccttctcttcctcctcctcctcctcctctctccaacaccccatccatcagcgctgccctccgcattgctcttgatcccatccagtacatcgattctccccccaagatcaaaggccggaggaggaagaaaggttagggagtcggccatgggatgcttttcatgctgctgtgtggcagatgacgacaacgttggcaggaggaagaagcatgacgatccctatgttcctatccctgctcatggttgtcacttctctctctcttcttttcattacttcttgtatcatggtcgcgacgattaatttgtgaatttcaataaaaaaagttaattgtgtgatataatcaaggcactgacttcacaaaatgtggatgtcactacctgatcgaacaatgcaaaggggtggtactctatctgttttcgatgatcaattaattcgcagaaacttctttgtcataagaaatgcagttacctttctgacgttagcttacccagctttctgcctttcttaaacaaagagggaatgataaacatgccagtcaattgtactcgttcgtgcacctaaattcattcgtattcagtcctcgttacattacattattttgttaagaaaactattctaaaggaccagcatgctatgaattcttcacgaacttgagtcatgatctgtgtttcgtttctgttgaatccttattacgtactacttgtttggttgattttctctatccaaattcgatatagtctttggcacgactaaatatgatttacttcactggaaacctacctgtcctggtgtgtcaaataatgtatccaaaaagatctatgcgaattgattgctgatggttgtactgaactctgcaatgtgattgccaactatttggactgtggtggtactaaagggttttgttgtgtaccctatgacacaaaaatcctgttcccctgaaacatacaagatattgttttagttattttacaggtctggttcaacggaaacataaatatttaaacaaacatttatcatgcttgctagtaccacaaaaagggcttcctgagcatatatcacgatggtcatttctttttttttcctttatgcagtttataattttggacctagccggttcccagccccaacccctgtcatctccactggcagagctcagccaattgcagtaccggccattcatctggaagagctgaaggaaattacaaaaaacttcagcagtgatgccctcattggcgagggctcgtatgccagagtctattttggtgtgctgaaagatgggacgaaatctgcagtgaagaagcttgactccagcaaacagcctgatcaagaattccttgtgcaggtttcagctgtctcaagattgaagcatgagaatgttgtccaactcgtcggatactgcgccgaagggagcacccgcgtccttgcttatgagtatgcaactaggggatcattgcatgatatcctccatggtaaaaagggtgtcaaaggagcccagccagggccagtcctgtcatggatgcagcgagctaggattgccgtatgtgctgctcggggtctcgagttcctccacgagaaggccgatcctcgagtggtccaccgcgacatcaagtcaagcaacatactgctctttgaccatgatgttgcgaagatcggggacttcgacatctcaaaccaggcccctgacatggctgcgcgcctccactctactcgcgttcttggcacctttggctaccatgcaccagaatatgccatgactggacagcttagcacgaagagtgatgtctacagctttggagttgtgctgctggagcttttaaccggtcgcaagccagttgaccacacactgccccgtggccagcagagccttgtgacatgggctacaccgaggcttagtgaagacaaggtgaggcaatgcgtcgatccaaggctcggagacgaataccctccaaaggctgtagccaagatggctgctgtggccgccctctgcgtgcaatacgagggtgaattccgtcccaacatgagcatcgtcgtcaaggctctgaaccccttgctgcacagccggtctggcaaccgccctactgcctcgtcggcctcccacgctgccgagcgatccggactgtgatttctcatcgctgcgacaactttgggttcacgaaaaaggaccgtcttgtggagcgttggtgttgctgtgtcgtgactgccaaagccttggcgcagagaagagctttgccatgcagctgtgtattgtaaattgttttgtaagcgatgcgcctcctggtttgtgtgccctgtcatcatcctattctattctagaaaatggtgtacgatggatcatggatgataccaactatttggtctcttttggaatgcgaaaatgcagcacttggcttcctatgtgtgtagatcagctttgttgttctattgctacaaaccaggaatactacagtatgaatattacaactactggcagccggcatatgtaacagagaagcatgcacaacagggcaggacaggaaccgctcctggactgttgtcctagtcctaattgtgattgaaccaaaattgaattctatttcgattattagctagctagcgtatctatggttcaaaatgttttctcagacagcagccacgagacgagcgcagcacctcgatctccaactagggaagctgcatatctatggttcaacatcagcttcttcatcggagtcggcggctaggacatcggcagccgtcgtctgctccctgttagcttgttcaccagagtcggcagctgggacatcgacagccatcgtctgctctctgttagcttgttcaccgaaatcggcagctcggatatcttgttcatcggagtaggcagctaggacatcttgttcaccggagtcggcaggtgggacatcgacagtcgtggtctgctccctgttagcttgttcaccggagtcggcagctaggatatcttgttcaccggagtcggcagctgggatatcggcagccgtggtctgctccctgttagcttgttcaccggagacggcagctgggaagcctgggatatcttgttcaccggagtcggcagctgggacatcggcagccgtggtttgctccatgttagcttgttcaccggagtcggcagctgggacatcatgttcaccggagtcgacatctgggacatcggcagccgtggtctgctccctcttagcttgttcaccggaatcgggagctgggacatcttgttcaccagagtcggcagcagggatatc

SEQ ID NO: 34437 - DNA, 2050 bp, Zea Mays
cagtgtcctcccgctgagtcctcacgtgcatgcctacccgactcgccaaatactttccgcaccgtgactcaggtacacccgcacccgcgcgggcccatcttcctccccggacccgctctcaccgcggctataaatggcagccccagcactcccgaggtgccgtgccacacatccgtttgcctcttctccctcttgccggtcccgaataaagagcagcagcgcaagaggtcggtagagcgagaagaaggcaatggcggccgagagcttccttttcacctcggagtccgtgaacgaggggcaccccgacaagctgtgcgaccaggtgtcggacgccgtgcttgacgcatgcctcgcgcaggaccccgacagcaaggtggcctgcgagacctgcaccaagaccaacatggtgatggtgttcggcgagatcacgaccaaggcgaccgtggactacgagaagatcgtgcgcgacacctgccgcgagatcgggttcacctccgacgacgtgggcctcgacgccgaccgctgcaaggtgctggtgaacatcgagcagcagtcccccgacatcgcgcagggcgtgcacgggcacttcacgaagcggcccgaggagatcggcgcgggcgaccagggccacatgttcgggtacgccaccgacgagacccccgagctgatgccgctgagccacgtgctggccaccaagctgggcgcgcgcctcaccgaggtgcgcaagaacggcacctgcgcctggctgaggcccgacggcaagacccaggtgacggtggagtacgtgaacgagggcggcgccatggtgcccgtccgcgtgcacaccgtgctcatctccacccagcacgacgagaccgtcaccaacgacgagatcgccgccgacctcaaggagcacgtcatcaagcccgtgatccctgagaagtacctcgacgagaagaccatcttccacctcaacccgtccgggcgcttcgtcatcggcgggccccacggtgacgccggcctcaccggccgcaagatcatcatcgacacgtacggcggctggggagcccacggcggtggcgccttctccggcaaggaccccaccaaggtggaccgcagcggcgcctacgtggccaggcaggccgccaagagcatcgtggccagcggcctcgcccgccgctgcctcgtgcaggtgtcgtacgccatcggcgtgccggagcccctgtccgtgttcgtcaactcgtacggcaccggcacgatccccgacaaggagatcctcaagatcgtgaaggagaacttcgacttcaggcccgggatgatcagcatcaacctcgacctgaagaagggcggcaacaggttcatcaagaccgccgcctacggccacttcggccgtgacgacgccgacttcacctgggaggtggtgaagcccctcaagttcgacaaggcatcggcttaaggttgggagtgtcactgtggacatgaggactaccttcctctggctctgctgttacctgcaagcattgctgctgctggatgtgtgtgtttgatcagtgactggctgctgctccatagaagatgaacggagagaaggatgatgaagggctttggcaatcgccgctgcaactgcaacccatgccatgccggcttagtgattgggtataatttggcttggcagcagccagcattattatgtgctgatctgttatcttttactagtttggtcgtccgatatctttctttctttttccccccttttcgactctgtactgaaactgctgagagattcgcagtattgttgtatcgtattcatatgctactgttactctggtgcccctctctctctctctgctgagagttttctccgtccacttgtgcttgctctatcggtgacctttgagaaccatgaaaggtgatacgacatgtttcatgtgacctttgagcaagtgtggaaggtacacagttcatactgcaattggcaactgaatggacaggctggatctttgttgctgctggttccgcaactggtcaaacttgaaccagcagcaaaattggccgccgggacttgatgcac

SEQ ID NO: 34438 - DNA, 580 bp, Zea Mays
cgtcttcatcccgcgcgcgtcgcccctttgagcacagtatcccggcggcggaatcttccggaagctgctgcacagctcgccccctgcgccgccgcatgtgtcaggagcaatggaaacagaggaggaggtgaaagatcgggatgtggcaggtggtgagcaagccaggattctgagcgccatggccaccaagatcggcatggccatgcctggtgcaaacagtgacgacagccatggcggcagcggggacgacgctaagtcgagcaatggcgaagcggcccgtggtggcagtaacggtggagagaagcagggggatgaatccaacagtggcgggatacttagcgctgtggcttccaggatcggcgtggccgtgtccggcgccaacggggaccgcagcggcagcgctgaggatggtgccaagacgagcgctggcaacgctggtcacggtagcaagggcgaggagaaggggcgtggtgtgaacggtggtagaatagtcgagcagatcatttccaatctgccctcagatgatcaggcgcctgatgccgatgaagcttccttgctcatcgccattatcgaagattag

SEQ ID NO: 34439 - DNA, 629 bp, Zea Mays
gctggttaatccccaacttgctcgtcagggtggtggtcgcctctcccgaagcgcgaaggtgccatggctccatgtcagctgcccaccttgttgaccccctcagaccggacataggacgcccttctgagggatttgagcgtggctcgctcagccctggagatagctaacactgaggtgtggcatctgcaatcgcgactagcgaccctcaacaatccaagggcaggacctaggcccgaagcgctgggttttcctctgtgtggatcaggctacaagatttgttcatgcgctagggaagaatcagagatcgtgcctccttgacatcctggattgtgttcgcgaggctatggagttcattgttcaacggggcacgtcgacgactcttgctattgcatagttgcactttggtgaccgccttcgtgatgttgtcggtttgcctaccagaacaacattagtagacttaggtctcctaacgagcggctttgatgttgtagggaacactgtgctcggggtggtgtcaatggaggaaataatccatgatcttccatagcctcactccgtggcctgattatttttgcaacgtgtatggtctttgggtcccttagatcctagttggtcttaggatcgcattt

SEQ ID NO: 34440 - DNA, 5157 bp, Zea Mays
caaatggtactgaaactgatccctcaaattttttaatagctcggaaaaagactctttgtttcgttgcagttgcacgggttggcgccggctcctccgatccagtctggccaccgggcaccggcgatgggctgctcgccggaggggggctctgcggcgtgtccggactgcctgagacgccttgtcctacgtgacctcgccggctccggcctctccttcgtctacggcctctccgactcaccgctccccttcgccgcctccgccgtcgttcagattgcatctgatggagacgagggaagtattgggaggcagcatatctccagttttgttttagtgggcttatgtggtggcaaagtgccttttaatagccaacaatgtgacaacagttccttggagaattgcattcataaagatccccaggcagagcaaaccttatacaatggtgataatgaatatactgagcagtcagattcctcatcttgtatagaatgcattgaaggttgcaaaagttcctctggtccttgtaagcaaccattggccataagcacgattaccaaattagctcctgcttgctatcttagcataggccacacttcagaggttagagagcttattacaggttatctgacctcatcaagtgaagagtatgtgattaattcgttaaatctgctatttgaaaacaaaattagtggatctgctggtttagatttcctcagcttcgttggattttcagcatttgatgacttgcattcttctggctgtgtgaggcatcccaacatcttaccagtgttaggtatactagaaacatccgattgttgctacatgttacaaccaaaggccccatacaccttggaaaacattatgcactacagtccagaggcattctgctcagattggcatattagatttcttgtctaccagataatatctgctgtggcataccttcatgatttaggagttcatcatggcaacctaaggccatcaaagatcttgatgtcagattccttatggccttacctgagcataagtgatacctgccctgtaaagcacagttggggtgttgccaatcataaatgttcacctaattcatgttgttttatggaggactgttcctcaaaagccatttatagtggtttcaaactgcaatcgtcgttagattggcattctcactttaagcaatggtggaaaggtgaactgagcaattatgagtaccttcttgtcttaaacaagttagctggtagaagatggggcgatccaggttttcacactgtgatgccttgggtaatagattttacagggatacctgatgaaagttctgataatggttggagggacctgaccaaaagtaaatggcggttggcaaaaggtgatgagcagttggattttacgtattcatcatctgaagttccacatcatgtttctgatgagtgtctctcagagctagctgtctgcagttacaaagcaaggaggttacctaagaccatcttgagatcagctgtgcgttccgtctatgagccgaatgaatacccgtctagtatgcaaaggctttatcaatggactccagatgaatgcattcctgaattttatagtgatcctcagattttcacctctcttcattctgaaatgagtgatttggcattaccttcctgggcaacatctgcagcagatttcatttatcttcacagggatgcattggagagcgaccgagtctcacaacaactgcatcactggattgacataacatttggctataaactttctggagaggcatctgttgaagcaaaaaatgtcatgttgccctctaatgatccatctaggccaaaatcgattggccggcatcagctttttacaaggcctcatcctaagcgccttgttagcacacctcatgcagtctaccacaataatttggactcttgtgctagatgctgtggcaaacgaagcggtgcaacaactgatgcagtgttaaatggctgtggatctccaaatatggtttcagaaattggccgtctggaggaatttgagaaagcaactctgtttgcagagcttgaataccagttgaatccagtctatgattatgctgatggtgatccttcaacttgtttctcttcaaacaaatatcccaagaaacaaaatgcagatcagatattgcagcatgacaatgcattgccagcagcacctaactttgatcttggttcctttctagaatgctttgagtctgatgataattctcatatgggttatcaagaactgctgctctggaataaaaagtctaattcacaaaacgaatgccatgcaaatgatgtattttctattgggtgcattctggcagaaatctatgtgcaaaaaccactttttgacaatgccttgctatctgcatacaaagaaattgggataatgcccggagcacttcaaggcctgccttctcatgtcacacttcttgttgagtcatgcatacagagggaatggaaaaggaggccatcagcaaagcaccttttggagtcatcatactttcctccatcagttcgatctgcatatatgtttcttgctccacttcaagttttgtctacatctagagagcgaatcaagtatgctgctaagcttgcaagtgaaggggcactcaaagctatgggagaatttgctgctgaaatttcacctaacaagatcatcgcctctgctgcatctactgttctgatcgtctcaaggggacttcttggagaaaattttgttgtaaagcaaattcttccgttgcttttgaatgtcatattctcttgtatcgattcgtctaagatgagtaagcccgagccacagcatagttggaattctttcgcgctgattgatagcttatctgccttggaaggtcttgtgttggttcttcctgtcaaaactgttattaaggagcttcttcaggaccaagcctgtctttatgtaaaagttcttatgcagattcctttggatcttcgtgtgattcaagtggctgctacagcactcattgacctttgtcaacgaattggaccagaaaacacttctatatatgttttgccacaactcaaggagctttttgctgaactggccttttctcatgattcatctggtcttaaccatcctataaaaggatttaaaagttctgatgaaaataaaaacaagccaattaaagtggaatccagaattgaccttttgttgctgctatatcctttcttggcatcacttgttgggatagagaagctccgagagtcttgctcaacatggtttcttttggagcaagcacttcaaaggttgtacaattggaagtgggagccttctggtgattgttctaagaatgctgaaaatatgaaaggtcaaaggctccagcctggtaactatatgtcatcagagtttgttccaaccaaactgcttttcaatggggtaggttggtccatgccacaatcagaaaccactaaaaaaaatggtcggaacactgcagcttctaaccttgagaatgagacatctagtgacaatttgtctacttcaagttctggtaatcaaccatggttttggttccccacccctgatagtagttggggtgttccagaatttcttggtcgtggtggtggtttgagggatgaacttccctggaagattaaagcttctatcctttactcagcccgtgctcaccctggtgctctgcgttcattagcagtccatgatgatgagtgcacagtttttactggaggagttggtcctggttttaaaggaagtatccagaggtgggaattgccaaacatgaattgcacatctggttattatgggcatgaagaggttgtcaattccatctgtatcctgtcaattactggcagagtggcttcttgtgatggcactatccatatatggaatgggcagtctggaaagctcattgcagctcatgctgagtcgtctacaacttttccactccaaaccccatctattgagcaggcaaacatgcttaatcaggacgcactctcaggtggaatattgtcaaatgcatttcgtggtagtttgtatacgactatgcattatatggaatctgagggtatacttgttgctggtatgggaaatggttcaatcagatttattgacatatctcaagatcagaagctacatttatggaagagcgatacggctgaaatatctttctcatcacttgtgtcggctatttgctcgtgtggctcaaacaagctcaggaaaggaagcctaatggcttcatcctggatagcagcaggtttaagttctggatattgtcgattgcttgataagcgcagtgggaacatcattgcagtttggcgagcacatgatggacacattacaaagctggcagcaccagatgatcacttaattttgtcgagttcccttgacaagactcttcgagtgtgggacctcagaaggaatctggcaacacagtcaaacattttcagaagtcattcagacggcatttccaacttctctgtgtggggtcaggacgtggtatcaatttcaaggaacaaaattgcactaacttccctgtcgagaccagaaagtgaaattggacatcagcagcttgcacttcagaacttgtattcggctgacagaggggtgaaacataaaaacctatctgtcctttcaactattgctgtgcttcctttgtcaaggttgtttgtggttggaactgaagatggatttctcaaaatgtgccactaggtgcttcttccgctgaactatctcctccccagagcccttcgagtcactggccgacccagaggcaaaggaatcaacagagattattaacatggccaaaactattatagacgaagtcgttacccaactgttgaccgaagctgcagataaagttttgaaagaagaagaatagctattgtaaaaacattgctagaatattaatgtaacatttgctggactatgcttgtaatatttggtgctcatgggttttgaatgtaatatatgaatggttttgtaatttatttctttacgatgtatgaaacttttttgtacataccgtttttgagccttcggcgaaaaaacaccttcccttcttttcatgcttcgtaaagaagcgcttttatgcttcgtaaaaaatcttccaatcgtggcaaaaacattgttgcttcatcaagaatagattttttccatgcttcgtcaagagtagattttttc

SEQ ID NO: 34441 - DNA, 5065 bp, Zea Mays
caaatggtactgaaactgatccctcaaattttttaatagctcggaaaaagactctttgtttcgttgcagttgcacgggttggcgccggctcctccgatccagtctggccaccgggcaccggcgatgggctgctcgccggaggggggctctgcggcgtgtccggactgcctgagacgccttgtcctacgtgacctcgccggctccggcctctccttcgtctacggcctctccgactcaccgctccccttcgccgcctccgccgtcgttcagattgcatctgatggagacgagggaagtattgggaggcagcatatctccagttttgttttagtgggcttatgtggtggcaaagtgccttttaatagccaacaatgtgacaacagttccttggagaattgcattcataaagatccccaggcagagcaaaccttatacaatggtgataatgaatatactgagcagtcagattcctcatcttgtatagaatgcattgaaggttgcaaaagttcctctggtccttgtaagcaaccattggccataagcacgattaccaaattagctcctgcttgctatcttagcataggccacacttcagaggttagagagcttattacaggttatctgacctcatcaagtgaagagtatgtgattaattcgttaaatctgctatttgaaaacaaaattagtggatctgctggtttagatttcctcagcttcgttggattttcagcatttgatgacttgcattcttctggctgtgtgaggcatcccaacatcttaccagtgttaggtatactagaaacatccgattgttgctacatgttacaaccaaaggccccatacaccttggaaaacattatgcactacagtccagaggcattctgctcagattggcatattagatttcttgtctaccagataatatctgctgtggcataccttcatgatttaggagttcatcatggcaacctaaggccatcaaagatcttgatgtcagattccttatggccttacctgagcataagtgatacctgccctgtaaagcacagttggggtgttgccaatcataaatgttcacctaattcatgttgttttatggaggactgttcctcaaaagccatttatagtggtttcaaactgcaatcgtcgttagattggcattctcactttaagcaatggtggaaaggtgaactgagcaattatgagtaccttcttgtcttaaacaagttagctggtagaagatggggcgatccaggttttcacactgtgatgccttgggtaatagattttacagggatacctgatgaaagttctgataatggttggagggacctgaccaaaagtaaatggcggttggcaaaaggtgatgagcagttggattttacgtattcatcatctgaagttccacatcatgtttctgatgagtgtctctcagagctagctgtctgcagttacaaagcaaggaggttacctaagaccatcttgagatcagctgtgcgttccgtctatgagccgaatgaatacccgtctagtatgcaaaggctttatcaatggactccagatgaatgcattcctgaattttatagtgatcctcagattttcacctctcttcattctgaaatgagtgatttggcattaccttcctgggcaacatctgcagcagatttcatttatcttcacagggatgcattggagagcgaccgagtctcacaacaactgcatcactggattgacataacatttggctataaactttctggagaggcatctgttgaagcaaaaaatgtcatgttgccctctaatgatccatctaggccaaaatcgattggccggcatcagctttttacaaggcctcatcctaagcgccttgttagcacacctcatgcagtctaccacaataatttggactcttgtgctagatgctgtggcaaacgaagcggtgcaacaactgatgcagtgttaaatggctgtggatctccaaatatggtttcagaaattggccgtctggaggaatttgagaaagcaactctgtttgcagagcttgaataccagttgaatccagtctatgattatgctgatggtgatccttcaacttgtttctcttcaaacaaatatcccaagaaacaaaatgcagatcagatattgcagcatgacaatgcattgccagcagcacctaactttgatcttggttcctttctagaatgctttgagtctgatgataattctcatatgggttatcaagaactgctgctctggaataaaaagtctaattcacaaaacgaatgccatgcaaatgatgtattttctattgggtgcattctggcagaaatctatgtgcaaaaaccactttttgacaatgccttgctatctgcatacaaagaaattgggataatgcccggagcacttcaaggcctgccttctcatgtcacacttcttgttgagtcatgcatacagagggaatggaaaaggaggccatcagcaaagcaccttttggagtcatcatactttcctccatcagttcgatctgcatatatgtttcttgctccacttcaagttttgtctacatctagagagcgaatcaagtatgctgctaagcttgcaagtgaaggggcactcaaagctatgggagaatttgctgctgaaatgtgtgcaccttattgcctgtctcttctttcatcatctttgtcagatgttgataccgaatcagccttgtctctgcttaaagaatttctagggagtttgactatccaagcaactaaggaccttgttctgcacatcattcagaaaatcttacaggcaccagaatattcacatctgaaggttgccttccttcaagactcttttattcgggatttgtggaagaaattggggaaaaaaacttatattgaaaagatacatcctttggtgatctcaaacttatacagttcacctaacaagatcatcgcctctgctgcatctactgttctgatcgtctcaaggggacttcttggagaaaattttgttgtaaagcaaattcttccgttgcttttgaatgtcatattctcttgtatcgattcgtctaagatgagtaagcccgagccacagcatagttggaattctttcgcgctgattgatagcttatctgccttggaaggtcttgtgttggttcttcctgtcaaaactgttattaaggagcttcttcaggaccaagcctgtctttatgtaaaagttcttatgcagattcctttggatcttcgtgtgattcaagtggctgctacagcactcattgacctttgtcaacgaattggaccagaaaacacttctatatatgttttgccacaactcaaggagctttttgctgaactggccttttctcatgattcatctggtcttaaccatcctataaaaggatttaaaagttctgatgaaaataaaaacaagccaattaaagtggaatccagaattgaccttttgttgctgctatatcctttcttggcatcacttgttgggatagagaagctccgagagtcttgctcaacatggtttcttttggagcaagcacttcaaaggttgtacaattggaagtgggagccttctggtgattgttctaagaatgctgaaaatatgaaaggtcaaaggctccagcctggtaactatatgtcatcagagtttgttccaaccaaactgcttttcaatggggtaggttggtccatgccacaatcagaaaccactaaaaaaaatggtcggaacactgcagcttctaaccttgagaatgagacatctagtgacaatttgtctacttcaagttctggtaatcaaccatggttttggttccccacccctgatagtagttggggtgttccagaatttcttggtcgtggtggtggtttgagggatgaacttccctggaagattaaagcttctatcctttactcagcccgtgctcaccctggtgctctgcgttcattagcagtccatgatgatgagtgcacagtttttactggaggagttggtcctggttttaaaggaagtatccagaggtgggaattgccaaacatgaattgcacatctggttattatgggcatgaagaggttgtcaattccatctgtatcctgtcaattactggcagagtggcttcttgtgatggcactatccatatatggaatgggcagtctggaaagctcattgcagctcatgctgagtcgtctacaacttttccactccaaaccccatctattgagcaggcaaacatgcttaatcaggacgcactctcaggtggaatattgtcaaatgcatttcgtggtagtttgtatacgactatgcattatatggaatctgagggtatacttgttgctggtatgggaaatggttcaatcagatttattgacatatctcaagatcagaagctacatttatggaagagcgatacggctgaaatatctttctcatcacttgtgtcggctatttgctcgtgtggctcaaacaagctcaggaaaggaagcctaatggcttcatcctggatagcagcaggtttaagttctggatattgtcgattgcttgataagcgcagtgggaacatcattgcagtttggcgagcacatgatggacacattacaaagctggcagcaccagatgatcacttaattttgtcgagttcccttgacaagactcttcgagtgtgggacctcagaaggaatctggcaacacagtcaaacattttcagaagtcattcagacggcatttccaacttctctgtgtggggtcaggacgtggtatcaatttcaaggaacaaaattgcactaacttccctgtcgagaccagaaagtgaaattggacatcagcagcttgcacttcagaacttgtattcggctgacagaggggtgaaacataaaaacctatctgtcctttcaactattgctgtgcttcctttgtcaaggttgtttgtggttggaactgaagatggatttctcaaaatgtgccactaggtgcttcttccggtactggtgaccatctctcattgtgaagttttggtggtttgtctccttcgatgtgctgagttgatttttgtgtggagccttgttttgc

SEQ ID NO: 34442 - DNA, 5173 bp, Zea Mays
caaatggtactgaaactgatccctcaaattttttaatagctcggaaaaagactctttgtttcgttgcagttgcacgggttggcgccggctcctccgatccagtctggccaccgggcaccggcgatgggctgctcgccggaggggggctctgcggcgtgtccggactgcctgagacgccttgtcctacgtgacctcgccggctccggcctctccttcgtctacggcctctccgactcaccgctccccttcgccgcctccgccgtcgttcagattgcatctgatggagacgagggaagtattgggaggcagcatatctccagttttgttttagtgggcttatgtggtggcaaagtgccttttaatagccaacaatgtgacaacagttccttggagaattgcattcataaagatccccaggcagagcaaaccttatacaatggtgataatgaatatactgagcagtcagattcctcatcttgtatagaatgcattgaaggttgcaaaagttcctctggtccttgtaagcaaccattggccataagcacgattaccaaattagctcctgcttgctatcttagcataggccacacttcagaggttagagagcttattacaggttatctgacctcatcaagtgaagagtatgtgattaattcgttaaatctgctatttgaaaacaaaattagtggatctgctggtttagatttcctcagcttcgttggattttcagcatttgatgacttgcattcttctggctgtgtgaggcatcccaacatcttaccagtgttaggtatactagaaacatccgattgttgctacatgttacaaccaaaggccccatacaccttggaaaacattatgcactacagtccagaggcattctgctcagattggcatattagatttcttgtctaccagataatatctgctgtggcataccttcatgatttaggagttcatcatggcaacctaaggccatcaaagatcttgatgtcagattccttatggccttacctgagcataagtgatacctgccctgtaaagcacagttggggtgttgccaatcataaatgttcacctaattcatgttgttttatggaggactgttcctcaaaagccatttatagtggtttcaaactgcaatcgtcgttagattggcattctcactttaagcaatggtggaaaggtgaactgagcaattatgagtaccttcttgtcttaaacaagttagctggtagaagatggggcgatccaggttttcacactgtgatgccttgggtaatagattttacagggatacctgatgaaagttctgataatggttggagggacctgaccaaaagtaaatggcggttggcaaaaggtgatgagcagttggattttacgtattcatcatctgaagttccacatcatgtttctgatgagtgtctctcagagctagctgtctgcagttacaaagcaaggaggttacctaagaccatcttgagatcagctgtgcgttccgtctatgagccgaatgaatacccgtctagtatgcaaaggctttatcaatggactccagatgaatgcattcctgaattttatagtgatcctcagattttcacctctcttcattctgaaatgagtgatttggcattaccttcctgggcaacatctgcagcagatttcatttatcttcacagggatgcattggagagcgaccgagtctcacaacaactgcatcactggattgacataacatttggctataaactttctggagaggcatctgttgaagcaaaaaatgtcatgttgccctctaatgatccatctaggccaaaatcgattggccggcatcagctttttacaaggcctcatcctaagcgccttgttagcacacctcatgcagtctaccacaataatttggactcttgtgctagatgctgtggcaaacgaagcggtgcaacaactgatgcagtgttaaatggctgtggatctccaaatatggtttcagaaattggccgtctggaggaatttgagaaagcaactctgtttgcagagcttgaataccagttgaatccagtctatgattatgctgatggtgatccttcaacttgtttctcttcaaacaaatatcccaagaaacaaaatgcagatcagatattgcagcatgacaatgcattgccagcagcacctaactttgatcttggttcctttctagaatgctttgagtctgatgataattctcatatgggttatcaagaactgctgctctggaataaaaagtctaattcacaaaacgaatgccatgcaaatgatgtattttctattgggtgcattctggcagaaatctatgtgcaaaaaccactttttgacaatgccttgctatctgcatacaaagaaattgggataatgcccggagcacttcaaggcctgccttctcatgtcacacttcttgttgagtcatgcatacagagggaatggaaaaggaggccatcagcaaagcaccttttggagtcatcatactttcctccatcagttcgatctgcatatatgtttcttgctccacttcaagttttgtctacatctagagagcgaatcaagtatgctgctaagcttgcaagtgaaggggcactcaaagctatgggagaatttgctgctgaaatgtgtgcaccttattgcctgtctcttctttcatcatctttgtcagatgttgataccgaatcagccttgtctctgcttaaagaatttctagggagtttgactatccaagcaactaaggaccttgttctgcacatcattcagaaaatcttacaggcaccagaatattcacatctgaaggttgccttccttcaagactcttttattcgggatttgtggaagaaattggggaaaaaaacttatattgaaaagatacatcctttggtgatctcaaacttatacagttcacctaacaagatcatcgcctctgctgcatctactgttctgatcgtctcaagtgaggaactaggaataccaattaccattcatcagacgattttaccactaattcactgttttggcaaaggattatgtgctgatggaatcaataccttggttaggattgggggacttcttggagaaaattttgttgtaaagcaaattcttccgttgcttttgaatgtcatattctcttgtatcgattcgtctaagatgagtaagcccgagccacagcatagttggaattctttcgcgctgattgatagcttatctgccttggaaggtcttgtgttggttcttcctgtcaaaactgttattaaggagcttcttcaggaccaagcctgtctttatgtaaaagttcttatgcagattcctttggatcttcgtgtgattcaagtggctgctacagcactcattgacctttgtcaacgaattggaccagaaaacacttctatatatgttttgccacaactcaaggagctttttgctgaactggccttttctcatgattcatctggtcttaaccatcctataaaaggatttaaaagttctgatgaaaataaaaacaagccaattaaagtggaatccagaattgaccttttgttgctgctatatcctttcttggcatcacttgttgggatagagaagctccgagagtcttgctcaacatggtttcttttggagcaagcacttcaaaggttgtacaattggaagtgggagccttctggtgattgttctaagaatgctgaaaatatgaaaggtcaaaggctccagcctggtaactatatgtcatcagagtttgttccaaccaaactgcttttcaatggggtaggttggtccatgccacaatcagaaaccactaaaaaaaatggtcggaacactgcagcttctaaccttgagaatgagacatctagtgacaatttgtctacttcaagttctggtaatcaaccatggttttggttccccacccctgatagtagttggggtgttccagaatttcttggtcgtggtggtggtttgagggatgaacttccctggaagattaaagcttctatcctttactcagcccgtgctcaccctggtgctctgcgttcattagcagtccatgatgatgagtgcacagtttttactggaggagttggtcctggttttaaaggaagtatccagaggtgggaattgccaaacatgaattgcacatctggttattatgggcatgaagaggttgtcaattccatctgtatcctgtcaattactggcagagtggcttcttgtgatggcactatccatatatggaatgggcagtctggaaagctcattgcagctcatgctgagtcgtctacaacttttccactccaaaccccatctattgagcaggcaaacatgcttaatcaggacgcactctcaggtggaatattgtcaaatgcatttcgtggtagtttgtatacgactatgcattatatggaatctgagggtatacttgttgctggtatgggaaatggttcaatcagatttattgacatatctcaagatcagaagctacatttatggaagagcgatacggctgaaatatctttctcatcacttgtgtcggctatttgctcgtgtggctcaaacaagctcaggaaaggaagcctaatggcttcatcctggatagcagcaggtttaagttctggatattgtcgattgcttgataagcgcagtgggaacatcattgcagtttggcgagcacatgatggacacattacaaagctggcagcaccagatgatcacttaattttgtcgagttcccttgacaagactcttcgagtgtgggacctcagaaggaatctggcaacacagtcaaacattttcagaagtcattcagacggcatttccaacttctctgtgtggggtcaggacgtggtatcaatttcaaggaacaaaattgcactaacttccctgtcgagaccagaaagtgaaattggacatcagcagcttgcacttcagaacttgtattcggctgacagaggggtgaaacataaaaacctatctgtcctttcaactattgctgtgcttcctttgtcaaggttgtttgtggttggaactgaagatggatttctcaaaatgtgccactaggtgcttcttccggtactggtgaccatctctcattgtgaagttttggtggtttgtctccttcgatgtgctgagttgatttttgtgtggagccttgttttgc

SEQ ID NO: 34443 - DNA, 5022 bp, Zea Mays
caaatggtactgaaactgatccctcaaattttttaatagctcggaaaaagactctttgtttcgttgcagttgcacgggttggcgccggctcctccgatccagtctggccaccgggcaccggcgatgggctgctcgccggaggggggctctgcggcgtgtccggactgcctgagacgccttgtcctacgtgacctcgccggctccggcctctccttcgtctacggcctctccgactcaccgctccccttcgccgcctccgccgtcgttcagattgcatctgatggagacgagggaagtattgggaggcagcatatctccagttttgttttagtgggcttatgtggtggcaaagtgccttttaatagccaacaatgtgacaacagttccttggagaattgcattcataaagatccccaggcagagcaaaccttatacaatggtgataatgaatatactgagcagtcagattcctcatcttgtatagaatgcattgaaggttgcaaaagttcctctggtccttgtaagcaaccattggccataagcacgattaccaaattagctcctgcttgctatcttagcataggccacacttcagaggttagagagcttattacaggttatctgacctcatcaagtgaagagtatgtgattaattcgttaaatctgctatttgaaaacaaaattagtggatctgctggtttagatttcctcagcttcgttggattttcagcatttgatgacttgcattcttctggctgtgtgaggcatcccaacatcttaccagtgttaggtatactagaaacatccgattgttgctacatgttacaaccaaaggccccatacaccttggaaaacattatgcactacagtccagaggcattctgctcagattggcatattagatttcttgtctaccagataatatctgctgtggcataccttcatgatttaggagttcatcatggcaacctaaggccatcaaagatcttgatgtcagattccttatggccttacctgagcataagtgatacctgccctgtaaagcacagttggggtgttgccaatcataaatgttcacctaattcatgttgttttatggaggactgttcctcaaaagccatttatagtggtttcaaactgcaatcgtcgttagattggcattctcactttaagcaatggtggaaaggtgaactgagcaattatgagtaccttcttgtcttaaacaagttagctggtagaagatggggcgatccaggttttcacactgtgatgccttgggtaatagattttacagggatacctgatgaaagttctgataatggttggagggacctgaccaaaagtaaatggcggttggcaaaaggtgatgagcagttggattttacgtattcatcatctgaagttccacatcatgtttctgatgagtgtctctcagagctagctgtctgcagttacaaagcaaggaggttacctaagaccatcttgagatcagctgtgcgttccgtctatgagccgaatgaatacccgtctagtatgcaaaggctttatcaatggactccagatgaatgcattcctgaattttatagtgatcctcagattttcacctctcttcattctgaaatgagtgatttggcattaccttcctgggcaacatctgcagcagatttcatttatcttcacagggatgcattggagagcgaccgagtctcacaacaactgcatcactggattgacataacatttggctataaactttctggagaggcatctgttgaagcaaaaaatgtcatgttgccctctaatgatccatctaggccaaaatcgattggccggcatcagctttttacaaggcctcatcctaagcgccttgttagcacacctcatgcagtctaccacaataatttggactcttgtgctagatgctgtggcaaacgaagcggtgcaacaactgatgcagtgttaaatggctgtggatctccaaatatggtttcagaaattggccgtctggaggaatttgagaaagcaactctgtttgcagagcttgaataccagttgaatccagtctatgattatgctgatggtgatccttcaacttgtttctcttcaaacaaatatcccaagaaacaaaatgcagatcagatattgcagcatgacaatgcattgccagcagcacctaactttgatcttggttcctttctagaatgctttgagtctgatgataattctcatatgggttatcaagaactgctgctctggaataaaaagtctaattcacaaaacgaatgccatgcaaatgatgtattttctattgggtgcattctggcagaaatctatgtgcaaaaaccactttttgacaatgccttgctatctgcatacaaagaaattgggataatgcccggagcacttcaaggcctgccttctcatgtcacacttcttgttgagtcatgcatacagagggaatggaaaaggaggccatcagcaaagcaccttttggagtcatcatactttcctccatcagttcgatctgcatatatgtttcttgctccacttcaagttttgtctacatctagagagcgaatcaagtatgctgctaagcttgcaagtgaaggggcactcaaagctatgggagaatttgctgctgaaatgcaccagaatattcacatctgaaggttgccttccttcaagactcttttattcgggatttgtggaagaaattggggaaaaaaacttatattgaaaagatacatcctttggtgatctcaaacttatacagttcacctaacaagatcatcgcctctgctgcatctactgttctgatcgtctcaagtgaggaactaggaataccaattaccattcatcagacgattttaccactaattcactgttttggcaaaggattatgtgctgatggaatcaataccttggttaggattgggggacttcttggagaaaattttgttgtaaagcaaattcttccgttgcttttgaatgtcatattctcttgtatcgattcgtctaagatgagtaagcccgagccacagcatagttggaattctttcgcgctgattgatagcttatctgccttggaaggtcttgtgttggttcttcctgtcaaaactgttattaaggagcttcttcaggaccaagcctgtctttatgtaaaagttcttatgcagattcctttggatcttcgtgtgattcaagtggctgctacagcactcattgacctttgtcaacgaattggaccagaaaacacttctatatatgttttgccacaactcaaggagctttttgctgaactggccttttctcatgattcatctggtcttaaccatcctataaaaggatttaaaagttctgatgaaaataaaaacaagccaattaaagtggaatccagaattgaccttttgttgctgctatatcctttcttggcatcacttgttgggatagagaagctccgagagtcttgctcaacatggtttcttttggagcaagcacttcaaaggttgtacaattggaagtgggagccttctggtgattgttctaagaatgctgaaaatatgaaaggtcaaaggctccagcctggtaactatatgtcatcagagtttgttccaaccaaactgcttttcaatggggtaggttggtccatgccacaatcagaaaccactaaaaaaaatggtcggaacactgcagcttctaaccttgagaatgagacatctagtgacaatttgtctacttcaagttctggtaatcaaccatggttttggttccccacccctgatagtagttggggtgttccagaatttcttggtcgtggtggtggtttgagggatgaacttccctggaagattaaagcttctatcctttactcagcccgtgctcaccctggtgctctgcgttcattagcagtccatgatgatgagtgcacagtttttactggaggagttggtcctggttttaaaggaagtatccagaggtgggaattgccaaacatgaattgcacatctggttattatgggcatgaagaggttgtcaattccatctgtatcctgtcaattactggcagagtggcttcttgtgatggcactatccatatatggaatgggcagtctggaaagctcattgcagctcatgctgagtcgtctacaacttttccactccaaaccccatctattgagcaggcaaacatgcttaatcaggacgcactctcaggtggaatattgtcaaatgcatttcgtggtagtttgtatacgactatgcattatatggaatctgagggtatacttgttgctggtatgggaaatggttcaatcagatttattgacatatctcaagatcagaagctacatttatggaagagcgatacggctgaaatatctttctcatcacttgtgtcggctatttgctcgtgtggctcaaacaagctcaggaaaggaagcctaatggcttcatcctggatagcagcaggtttaagttctggatattgtcgattgcttgataagcgcagtgggaacatcattgcagtttggcgagcacatgatggacacattacaaagctggcagcaccagatgatcacttaattttgtcgagttcccttgacaagactcttcgagtgtgggacctcagaaggaatctggcaacacagtcaaacattttcagaagtcattcagacggcatttccaacttctctgtgtggggtcaggacgtggtatcaatttcaaggaacaaaattgcactaacttccctgtcgagaccagaaagtgaaattggacatcagcagcttgcacttcagaacttgtattcggctgacagaggggtgaaacataaaaacctatctgtcctttcaactattgctgtgcttcctttgtcaaggttgtttgtggttggaactgaagatggatttctcaaaatgtgccactaggtgcttcttccggtactggtgaccatctctcattgtgaagttttggtggtttgtctccttcgatgtgctgagttgatttttgtgtggagccttgttttgc

SEQ ID NO: 34444 - DNA, 5772 bp, Zea Mays
caaatggtactgaaactgatccctcaaattttttaatagctcggaaaaagactctttgtttcgttgcagttgcacgggttggcgccggctcctccgatccagtctggccaccgggcaccggcgatgggctgctcgccggaggggggctctgcggcgtgtccggactgcctgagacgccttgtcctacgtgacctcgccggctccggcctctccttcgtctacggcctctccgactcaccgctccccttcgccgcctccgccgtcgttcagattgcatctgatggagacgagggaagtattgggaggcagcatatctccagttttgttttagtgggcttatgtggtggcaaagtgccttttaatagccaacaatggtaactctcttacttgaggattatattatcttcaaaggctccaaaattgatgtgtcaacatgtatggatttctccacattttcgttccatacagtgacaacagttccttggagaattgcattcataaagatccccaggcagagcaaaccttatacaatggtgataatgaatatactgagcagtcagattcctcatcttgtatagaatgcattgaaggttgcaaaagttcctctggtccttgtaagcaaccattggccataagcacgattaccaaattagctcctgcttgctatcttagcataggccacacttcagaggttagagagcttattacaggttatctgacctcatcaagtgaagagtatgtgattaattcgttaaatctgctatttgaaaacaaaattagtggatctgctggtttagatttcctcagcttcgttggattttcagcatttgatgacttgcattcttctggctgtgtgaggcatcccaacatcttaccagtgttaggtatactagaaacatccgattgttgctacatgttacaaccaaaggccccatacaccttggaaaacattatgcactacagtccagaggcattctgctcagattggcatattagatttcttgtctaccagataatatctgctgtggcataccttcatgatttaggagttcatcatggcaacctaaggccatcaaagatcttgatgtcagattccttatggccttacctgagcataagtgatacctgccctgtaaagcacagttggggtgttgccaatcataaatgttcacctaattcatgttgttttatggaggactgttcctcaaaagccatttatagtggtttcaaactgcaatcgtcgttagattggcattctcactttaagcaatggtggaaaggtgaactgagcaattatgagtaccttcttgtcttaaacaagttagctggtagaagatggggcgatccaggttttcacactgtgatgccttgggtaatagattttacagggatacctgatgaaagttctgataatggttggagggacctgaccaaaagtaaatggcggttggcaaaaggtgatgagcagttggattttacgtattcatcatctgaagttccacatcatgtttctgatgagtgtctctcagagctagctgtctgcagttacaaagcaaggaggttacctaagaccatcttgagatcagctgtgcgttccgtctatgagccgaatgaatacccgtctagtatgcaaaggctttatcaatggactccagatgaatgcattcctgaattttatagtgatcctcagattttcacctctcttcattctgaaatgagtgatttggcattaccttcctgggcaacatctgcagcagatttcatttatcttcacagggatgcattggagagcgaccgagtctcacaacaactgcatcactggattgacataacatttggctataaactttctggagaggcatctgttgaagcaaaaaatgtcatgttgccctctaatgatccatctaggccaaaatcgattggccggcatcagctttttacaaggcctcatcctaagcgccttgttagcacacctcatgcagtctaccacaataatttggactcttgtgctagatgctgtggcaaacgaagcggtgcaacaactgatgcagtgttaaatggctgtggatctccaaatatggtttcagaaattggccgtctggaggaatttgagaaagcaactctgtttgcagagcttgaataccagttgaatccagtctatgattatgctgatggtgatccttcaacttgtttctcttcaaacaaatatcccaagaaacaaaatgcagatcagatattgcagcatgacaatgcattgccagcagcacctaactttgatcttggttcctttctagaatgctttgagtctgatgataattctcatatgggttatcaagaactgctgctctggaataaaaagtctaattcacaaaacgaatgccatgcaaatgatgtattttctattgggtgcattctggcagaaatctatgtgcaaaaaccactttttgacaatgccttgctatctgcatacaaagaaattgggataatgcccggagcacttcaaggcctgccttctcatgtcacacttcttgttgagtcatgcatacagagggaatggaaaaggaggccatcagcaaagcaccttttggagtcatcatactttcctccatcagttcgatctgcatatatgtttcttgctccacttcaagttttgtctacatctagagagcgaatcaagtatgctgctaagcttgcaagtgaaggggcactcaaagctatgggagaatttgctgctgaaatgtgtgcaccttattgcctgtctcttctttcatcatctttgtcagatgttgataccgaatcagccttgtctctgcttaaagaatttctagggagtttgactatccaagcaactaaggaccttgttctgcacatcattcagaaaatcttacaggccagcaccagaatattcacatctgaaggttgccttccttcaagactcttttattcgggatttgtggaagaaattggggaaaaaaacttatattgaaaagatacatcctttggtgatctcaaacttatacagttcacctaacaagatcatcgcctctgctgcatctactgttctgatcgtctcaagtgaggaactaggaataccaattaccattcatcagacgattttaccactaattcactgttttggcaaaggattatgtgctgatggaatcaataccttggttaggattgggggacttcttggagaaaattttgttgtaaagcaaattcttccgttgcttttgaatgtcatattctcttgtatcgattcgtctaagatgagtaagcccgagccacagcatagttggaattctttcgcgctgattgatagcttatctgccttggaaggtcttgtgttggttcttcctgtcaaaactgttattaaggagcttcttcaggaccaagcctgtctttatgtaaaagttcttatgcagattcctttggatcttcgtgtgattcaagtggctgctacagcactcattgacctttgtcaacgaattggaccagaaaacacttctatatatgttttgccacaactcaaggagctttttgctgaactggccttttctcatgattcatctggtcttaaccatcctataaaaggatttaaaagttctgatgaaaataaaaacaagccaattaaagtggaatccagaattgaccttttgttgctgctatatcctttcttggcatcacttgttgggatagagaagctccgagagtcttgctcaacatggtttcttttggagcaagcacttcaaaggttgtacaattggaagtgggagccttctggtgattgttctaagaatgctgaaaatatgaaaggtcaaaggctccagcctggtaactatatgtcatcagagtttgttccaaccaaactgcttttcaatggggtaggttggtccatgccacaatcagaaaccactaaaaaaaatggtcggaacactgcagcttctaaccttgagaatgagacatctagtgacaatttgtctacttcaagttctggtaatcaaccatggttttggttccccacccctgatagtagttggggtgttccagaatttcttggtcgtggtggtggtttgagggatgaacttccctggaagattaaagcttctatcctttactcagcccgtgctcaccctggtgctctgcgttcattagcagtccatgatgatgagtgcacagtttttactggaggagttggtcctggttttaaaggaagtatccagaggtgggaattgccaaacatgaattgcacatctggttattatgggcatgaagaggggcctttgactaagacaactttcttcggcgaagagtccactagagagggggcctccgatccagcggaccacaaggggtcagcagaagctgaggccttcgccgctatgccgacggaggatcatcatccggcaaggcgcaacaaagggagcgatgatgcgaagagtctcgggacaaagactacaagtcagccttgctttgacgccacggcatgccactcgcatcacccattcggaatgcctctagaagacgacaacacagacctccaggacagccgagacctcggcatcaacatcgaggagcaactcttactcaaaagccttcgcatgcacaatgccaatctccagaagcaaagagatgctatcgccgccaagcagcagcgtagcgaggccgaagccagagtccgcctcctcatccagcaagaaaaagagcatctcctggccctcgagcaagaaatttcgcaactacaggcacatgaccccactcacccttcacaaggccatgttgtcaattccatctgtatcctgtcaattactggcagagtggcttcttgtgatggcactatccatatatggaatgggcagtctggaaagctcattgcagctcatgctgagtcgtctacaacttttccactccaaaccccatctattgagcaggcaaacatgcttaatcaggacgcactctcaggtggaatattgtcaaatgcatttcgtggtagtttgtatacgactatgcattatatggaatctgagggtatacttgttgctggtatgggaaatggttcaatcagatttattgacatatctcaagatcagaagctacatttatggaagagcgatacggctgaaatatctttctcatcacttgtgtcggctatttgctcgtgtggctcaaacaagctcaggaaaggaagcctaatggcttcatcctggatagcagcaggtttaagttctggatattgtcgattgcttgataagcgcagtgggaacatcattgcagtttggcgagcacatgatggacacattacaaagctggcagcaccagatgatcacttaattttgtcgagttcccttgacaagactcttcgagtgtgggacctcagaaggaatctggcaacacagtcaaacattttcagaagtcattcagacggcatttccaacttctctgtgtggggtcaggacgtggtatcaatttcaaggaacaaaattgcactaacttccctgtcgagaccagaaagtgaaattggacatcagcagcttgcacttcagaacttgtattcggctgacagaggggtgaaacataaaaacctatctgtcctttcaactattgctgtgcttcctttgtcaaggttgtttgtggttggaactgaagatggatttctcaaaatgtgccactaggtgcttcttccggtactggtgaccatctctcattgtgaagttttggtggtttgtctccttcgatgtgctgagttgatttttgtgtggagccttgttttgc

SEQ ID NO: 34445 - DNA, 5135 bp, Zea Mays
caaatggtactgaaactgatccctcaaattttttaatagctcggaaaaagactctttgtttcgttgcagttgcacgggttggcgccggctcctccgatccagtctggccaccgggcaccggcgatgggctgctcgccggaggggggctctgcggcgtgtccggactgcctgagacgccttgtcctacgtgacctcgccggctccggcctctccttcgtctacggcctctccgactcaccgctccccttcgccgcctccgccgtcgttcagattgcatctgatggagacgagggaagtattgggaggcagcatatctccagttttgttttagtgggcttatgtggtggcaaagtgccttttaatagccaacaatgtgacaacagttccttggagaattgcattcataaagatccccaggcagagcaaaccttatacaatggtgataatgaatatactgagcagtcagattcctcatcttgtatagaatgcattgaaggttgcaaaagttcctctggtccttgtaagcaaccattggccataagcacgattaccaaattagctcctgcttgctatcttagcataggccacacttcagaggttagagagcttattacaggttatctgacctcatcaagtgaagagtatgtgattaattcgttaaatctgctatttgaaaacaaaattagtggatctgctggtttagatttcctcagcttcgttggattttcagcatttgatgacttgcattcttctggctgtgtgaggcatcccaacatcttaccagtgttaggtatactagaaacatccgattgttgctacatgttacaaccaaaggccccatacaccttggaaaacattatgcactacagtccagaggcattctgctcagattggcatattagatttcttgtctaccagataatatctgctgtggcataccttcatgatttaggagttcatcatggcaacctaaggccatcaaagatcttgatgtcagattccttatggccttacctgagcataagtgatacctgccctgtaaagcacagttggggtgttgccaatcataaatgttcacctaattcatgttgttttatggaggactgttcctcaaaagccatttatagtggtttcaaactgcaatcgtcgttagattggcattctcactttaagcaatggtggaaaggtgaactgagcaattatgagtaccttcttgtcttaaacaagttagctggtagaagatggggcgatccaggttttcacactgtgatgccttgggtaatagattttacagggatacctgatgaaagttctgataatggttggagggacctgaccaaaagtaaatggcggttggcaaaaggtgatgagcagttggattttacgtattcatcatctgaagttccacatcatgtttctgatgagtgtctctcagagctagctgtctgcagttacaaagcaaggaggttacctaagaccatcttgagatcagctgtgcgttccgtctatgagccgaatgaatacccgtctagtatgcaaaggctttatcaatggactccagatgaatgcattcctgaattttatagtgatcctcagattttcacctctcttcattctgaaatgagtgatttggcattaccttcctgggcaacatctgcagcagatttcatttatcttcacagggatgcattggagagcgaccgagtctcacaacaactgcatcactggattgacataacatttggctataaactttctggagaggcatctgttgaagcaaaaaatgtcatgttgccctctaatgatccatctaggccaaaatcgattggccggcatcagctttttacaaggcctcatcctaagcgccttgttagcacacctcatgcagtctaccacaataatttggactcttgtgctagatgctgtggcaaacgaagcggtgcaacaactgatgcagtgttaaatggctgtggatctccaaatatggtttcagaaattggccgtctggaggaatttgagaaagcaactctgtttgcagagcttgaataccagttgaatccagtctatgattatgctgatggtgatccttcaacttgtttctcttcaaacaaatatcccaagaaacaaaatgcagatcagatattgcagcatgacaatgcattgccagcagcacctaactttgatcttggttcctttctagaatgctttgagtctgatgataattctcatatgggttatcaagaactgctgctctggaataaaaagtctaattcacaaaacgaatgccatgcaaatgatgtattttctattgggtgcattctggcagaaatctatgtgcaaaaaccactttttgacaatgccttgctatctgcatacaaagaaattgggataatgcccggagcacttcaaggcctgccttctcatgtcacacttcttgttgagtcatgcatacagagggaatggaaaaggaggccatcagcaaagcaccttttggagtcatcatactttcctccatcagttcgatctgcatatatgtttcttgctccacttcaagttttgtctacatctagagagcgaatcaagtatgctgctaagcttgcaagtgaaggggcactcaaagctatgggagaatttgctgctgaaatgtgtgcaccttattgcctgtctcttctttcatcatctttgtcagatgttgataccgaatcagccttgtctctgcttaaagaatttctagggagtttgactatccaagcaactaaggaccttgttctgcacatcattcagaaaatcttacaggcaccagaatattcacatctgaaggttgccttccttcaagactcttttattcgggatttgtggaagaaattggggaaaaaaacttatattgaaaagatacatcctttggtgatctcaaacttatacagttcacctaacaagatcatcgcctctgctgcatctactgttctgatcgtctcaagtgaggaactaggaataccaattaccattcatcagacgattttaccactaattcactgttttggcaaaggattatgtgctgatggaatcaataccttggttaggattgggggacttcttggagaaaattttgttgtaaagcaaattcttccgttgcttttgaatgtcatattctcttgtatcgattcgtctaagatgagtaagcccgagccacagcatagttggaattctttcgcgctgattgatagcttatctgccttggaaggtcttgtgttggttcttcctgtcaaaactgttattaaggagcttcttcaggaccaagcctgtctttatgtaaaagttcttatgcagattcctttggatcttcgtgtgattcaagtggctgctacagcactcattgacctttgtcaacgaattggaccagaaaacacttctatatatgttttgccacaactcaaggagctttttgctgaactggccttttctcatgattcatctggtcttaaccatcctataaaaggatttaaaagttctgatgaaaataaaaacaagccaattaaagtggaatccagaattgaccttttgttgctgctatatcctttcttggcatcacttgttgggatagagaagctccgagagtcttgctcaacatggtttcttttggagcaagcacttcaaaggttgtacaattggaagtgggagccttctggtgattgttctaagaatgctgaaaatatgaaaggtcaaaggctccagcctggtaactatatgtcatcagagtttgttccaaccaaactgcttttcaatggggtaggttggtccatgccacaatcagaaaccactaaaaaaaatggtcggaacactgcagcttctaaccttgagaatgagacatctagtgacaatttgtctacttcaagttctggtaatcaaccatggttttggttccccacccctgatagtagttggggtgttccagaatttcttggtcgtggtggtggtttgagggatgaacttccctggaagattaaagcttctatcctttactcagcccgtgctcaccctggtgctctgcgttcattagcagtccatgatgatgagtgcacagtttttactggaggagttggtcctggttttaaaggaagtatccagaggtgggaattgccaaacatgaattgcacatctggttattatgggcatgaagagagtggcttcttgtgatggcactatccatatatggaatgggcagtctggaaagctcattgcagctcatgctgagtcgtctacaacttttccactccaaaccccatctattgagcaggcaaacatgcttaatcaggacgcactctcaggtggaatattgtcaaatgcatttcgtggtagtttgtatacgactatgcattatatggaatctgagggtatacttgttgctggtatgggaaatggttcaatcagatttattgacatatctcaagatcagaagctacatttatggaagagcgatacggctgaaatatctttctcatcacttgtgtcggctatttgctcgtgtggctcaaacaagctcaggaaaggaagcctaatggcttcatcctggatagcagcaggtttaagttctggatattgtcgattgcttgataagcgcagtgggaacatcattgcagtttggcgagcacatgatggacacattacaaagctggcagcaccagatgatcacttaattttgtcgagttcccttgacaagactcttcgagtgtgggacctcagaaggaatctggcaacacagtcaaacattttcagaagtcattcagacggcatttccaacttctctgtgtggggtcaggacgtggtatcaatttcaaggaacaaaattgcactaacttccctgtcgagaccagaaagtgaaattggacatcagcagcttgcacttcagaacttgtattcggctgacagaggggtgaaacataaaaacctatctgtcctttcaactattgctgtgcttcctttgtcaaggttgtttgtggttggaactgaagatggatttctcaaaatgtgccactaggtgcttcttccggtactggtgaccatctctcattgtgaagttttggtggtttgtctccttcgatgtgctgagttgatttttgtgtggagccttgttttgc

SEQ ID NO: 34446 - DNA, 5163 bp, Zea Mays
caaatggtactgaaactgatccctcaaattttttaatagctcggaaaaagactctttgtttcgttgcagttgcacgggttggcgccggctcctccgatccagtctggccaccgggcaccggcgatgggctgctcgccggaggggggctctgcggcgtgtccggactgcctgagacgccttgtcctacgtgacctcgccggctccggcctctccttcgtctacggcctctccgactcaccgctccccttcgccgcctccgccgtcgttcagattgcatctgatggagacgagggaagtattgggaggcagcatatctccagttttgttttagtgggcttatgtggtggcaaagtgccttttaatagccaacaatgtgacaacagttccttggagaattgcattcataaagatccccaggcagagcaaaccttatacaatggtgataatgaatatactgagcagtcagattcctcatcttgtatagaatgcattgaaggttgcaaaagttcctctggtccttgtaagcaaccattggccataagcacgattaccaaattagctcctgcttgctatcttagcataggccacacttcagaggttagagagcttattacaggttatctgacctcatcaagtgaagagtatgtgattaattcgttaaatctgctatttgaaaacaaaattagtggatctgctggtttagatttcctcagcttcgttggattttcagcatttgatgacttgcattcttctggctgtgtgaggcatcccaacatcttaccagtgttaggtatactagaaacatccgattgttgctacatgttacaaccaaaggccccatacaccttggaaaacattatgcactacagtccagaggcattctgctcagattggcatattagatttcttgtctaccagataatatctgctgtggcataccttcatgatttaggagttcatcatggcaacctaaggccatcaaagatcttgatgtcagattccttatggccttacctgagcataagtgatacctgccctgtaaagcacagttggggtgttgccaatcataaatgttcacctaattcatgttgttttatggaggactgttcctcaaaagccatttatagtggtttcaaactgcaatcgtcgttagattggcattctcactttaagcaatggtggaaaggtgaactgagcaattatgagtaccttcttgtcttaaacaagttagctggtagaagatggggcgatccaggttttcacactgtgatgccttgggtaatagattttacagggatacctgatgaaagttctgataatggttggagggacctgaccaaaagtaaatggcggttggcaaaaggtgatgagcagttggattttacgtattcatcatctgaagttccacatcatgtttctgatgagtgtctctcagagctagctgtctgcagttacaaagcaaggaggttacctaagaccatcttgagatcagctgtgcgttccgtctatgagccgaatgaatacccgtctagtatgcaaaggctttatcaatggactccagatgaatgcattcctgaattttatagtgatcctcagattttcacctctcttcattctgaaatgagtgatttggcattaccttcctgggcaacatctgcagcagatttcatttatcttcacagggatgcattggagagcgaccgagtctcacaacaactgcatcactggattgacataacatttggctataaactttctggagaggcatctgttgaagcaaaaaatgtcatgttgccctctaatgatccatctaggccaaaatcgattggccggcatcagctttttacaaggcctcatcctaagcgccttgttagcacacctcatgcagtctaccacaataatttggactcttgtgctagatgctgtggcaaacgaagcggtgcaacaactgatgcagtgttaaatggctgtggatctccaaatatggtttcagaaattggccgtctggaggaatttgagaaagcaactctgtttgcagagcttgaataccagttgaatccagtctatgattatgctgatggtgatccttcaacttgtttctcttcaaacaaatatcccaagaaacaaaatgcagatcagatattgcagcatgacaatgcattgccagcagcacctaactttgatcttggttcctttctagaatgctttgagtctgatgataattctcatatgggttatcaagaactgctgctctggaataaaaagtctaattcacaaaacgaatgccatgcaaatgatgtattttctattgggtgcattctggcagaaatctatgtgcaaaaaccactttttgacaatgccttgctatctgcatacaaagaaattgggataatgcccggagcacttcaaggcctgccttctcatgtcacacttcttgttgagtcatgcatacagagggaatggaaaaggaggccatcagcaaagcaccttttggagtcatcatactttcctccatcagttcgatctgcatatatgtttcttgctccacttcaagttttgtctacatctagagagcgaatcaagtatgctgctaagcttgcaagtgaaggggcactcaaagctatgggagaatttgctgctgaaatgtgtgcaccttattgcctgtctcttctttcatcatctttgtcagatgttgataccgaatcagccttgtctctgcttaaagaatttctagggagtttgactatccaagcaactaaggaccttgttctgcacatcattcagaaaatcttacaggcaccagaatattcacatctgaaggttgccttccttcaagactcttttattcgggatttgtggaagaaattggggaaaaaaacttatattgaaaagatacatcctttggtgatctcaaacttatacagttcacctaacaagatcatcgcctctgctgcatctactgttctgatcgtctcaagtgaggaactaggaataccaattaccattcatcagacgattttaccactaattcactgttttggcaaaggattatgtgctgatggaatcaataccttgggggacttcttggagaaaattttgttgtaaagcaaattcttccgttgcttttgaatgtcatattctcttgtatcgattcgtctaagatgagtaagcccgagccacagcatagttggaattctttcgcgctgattgatagcttatctgccttggaaggtcttgtgttggttcttcctgtcaaaactgttattaaggagcttcttcaggaccaagcctgtctttatgtaaaagttcttatgcagattcctttggatcttcgtgtgattcaagtggctgctacagcactcattgacctttgtcaacgaattggaccagaaaacacttctatatatgttttgccacaactcaaggagctttttgctgaactggccttttctcatgattcatctggtcttaaccatcctataaaaggatttaaaagttctgatgaaaataaaaacaagccaattaaagtggaatccagaattgaccttttgttgctgctatatcctttcttggcatcacttgttgggatagagaagctccgagagtcttgctcaacatggtttcttttggagcaagcacttcaaaggttgtacaattggaagtgggagccttctggtgattgttctaagaatgctgaaaatatgaaaggtcaaaggctccagcctggtaactatatgtcatcagagtttgttccaaccaaactgcttttcaatggggtaggttggtccatgccacaatcagaaaccactaaaaaaaatggtcggaacactgcagcttctaaccttgagaatgagacatctagtgacaatttgtctacttcaagttctggtaatcaaccatggttttggttccccacccctgatagtagttggggtgttccagaatttcttggtcgtggtggtggtttgagggatgaacttccctggaagattaaagcttctatcctttactcagcccgtgctcaccctggtgctctgcgttcattagcagtccatgatgatgagtgcacagtttttactggaggagttggtcctggttttaaaggaagtatccagaggtgggaattgccaaacatgaattgcacatctggttattatgggcatgaagaggttgtcaattccatctgtatcctgtcaattactggcagagtggcttcttgtgatggcactatccatatatggaatgggcagtctggaaagctcattgcagctcatgctgagtcgtctacaacttttccactccaaaccccatctattgagcaggcaaacatgcttaatcaggacgcactctcaggtggaatattgtcaaatgcatttcgtggtagtttgtatacgactatgcattatatggaatctgagggtatacttgttgctggtatgggaaatggttcaatcagatttattgacatatctcaagatcagaagctacatttatggaagagcgatacggctgaaatatctttctcatcacttgtgtcggctatttgctcgtgtggctcaaacaagctcaggaaaggaagcctaatggcttcatcctggatagcagcaggtttaagttctggatattgtcgattgcttgataagcgcagtgggaacatcattgcagtttggcgagcacatgatggacacattacaaagctggcagcaccagatgatcacttaattttgtcgagttcccttgacaagactcttcgagtgtgggacctcagaaggaatctggcaacacagtcaaacattttcagaagtcattcagacggcatttccaacttctctgtgtggggtcaggacgtggtatcaatttcaaggaacaaaattgcactaacttccctgtcgagaccagaaagtgaaattggacatcagcagcttgcacttcagaacttgtattcggctgacagaggggtgaaacataaaaacctatctgtcctttcaactattgctgtgcttcctttgtcaaggttgtttgtggttggaactgaagatggatttctcaaaatgtgccactaggtgcttcttccggtactggtgaccatctctcattgtgaagttttggtggtttgtctccttcgatgtgctgagttgatttttgtgtggagccttgttttgc

SEQ ID NO: 34447 - DNA, 4977 bp, Zea Mays
ctgagctttgtcattgcaggtttgggcatcttattaggaaaaccactgttcattttcttccaaatgtcctccacacgtgattttgcatctacaaggaaaagaagtatttgttaatatactaattaaaggatgtgcatcatgcataactgcataataaggatcaaaaacacgcatgacatgtaacactatgatgtctagaactaaaaatatggtgcatgtgtatcacaagttcatttatttatcacatatgtggatatgccaacttgagcgaacaggtatcctgtacaagctcatgtatgttaatgcagaaataatgtagatttcattttccttccagatgtccctaaaaatgttttcctatataccataattgaaacatcactaggaaaataagatacatactaaacttagagtaaggtggaccaggtttgcccttctggcatggctgagtctggcaaaggcaaagctatggatgctcccctggtctcgctgaaacctgatgaggttaggcctcgccgtcgccatcatcggaagaggtggtacccggctcgacggtcttgcatgcacggctcgattctcatgtgcgtgcatcacagacggcggcaatggatggcctgtacctggcttgtcggccagtttaggcgcgactccagcccgtgcgagcgtccaatccaggcggcggcgatggagggtcaggctcggctacctgtccatgcgtggctcggtccattgctgcaacccaaccaccgggcggcgggtttcctgcctcaactgccggtccaggcatggctgggtctgaggcgtttgacctcttggaggacagcagacagctcacttcggcttcctcgctccatcccctgctcaagaacattgaagggggctccatgcgtgtggcttcccaagatgaggctgcccaacgtgcccccatccccaattggcgctcgctcgggtggttcgaagatggcgtcatgtgtgtgggttcccaagaacagagcgggcgcccccttcgccccattactgaagcgttgagtccccaaatgagtgatatcctggagattcgtctgtcccccaaggttgctgaggtccctatgatggagccttgtgatggggatgaagtggtccagactgctatgtcttatgagtttgggaacgtatcagataggagaattgaggggaaggatcatgtaggctcttttcagctgactttttctcagtcagagatacatggtagcctgatttccccttcagacctaagcttgagggccccttctgaagcattctcacctactgatgacacagctttgcacgtctatactagaagagtttgcaacaacagggagaatgcggatatgcctgcggatactgatgatgatccttcagctatttcacctaccctgataaaacggttcaagaagaataactcagataacagggcagatgaactgaacggccctcgatccccgggtacaactgtgatggtgggtacagatttaaatgatctagtctccagccttcttgtaacacctgatggcctctccttcatgctgcagagtgcccaggcttctgctggtgccccacaccatagtcgtcaccttgcgggggtagggattgaatatgacaaacaagagttatgttcaaggtccacaaaacaagcaatgaaggccctcttgctcatgttgaagcgccggcagctttttttggatgggaagtgccagatgaatttaagttgctgtcaaaaatgttaaatggatccaaagaaaaaattatttggaatgtaaggggtcttaattccgcatcaagacagagttctgttagaacattttttaatcttatggtgagatgcagggaatcaatcaaggaaaatgttggccatactaggagctgattttgatcagttcattgctctaccatctattggagatagtggaggagtactatcttggaaaaggcatgtgaaggtgacatgtttaagtagagtggatgcttatagtgtctctgtacaatttcagaaatctaatggtcagccctggtggttaacttgcgtgtatgggcctcaaagtaatgatgaaaagatatcttttttctacaagagttaaggcaaatcagaagtgcatgtcatgatccatgggttgtggtaggagatgagtggtcatgtggcttcccagttggcacttgcaagagaaatcctacatcaactcgaagttgctcaagatatgtgaatcatgtccccattggaggaatggcttatgaggggtcttaagaagcattcactagcccttgcttccctcaagcgcaccattgcccgaattagatcaagaatcaattggctaaaggatggggatgccaacaccaagctcttccatatgcatgctagatacagaaaaaaggaataatcttattgtcaaacttgtctcgggtagtggcacatacactgatcatgatgaggtcaaagtggtggatgatttttaccataagcttttgggcagcagggtggacagatccataacagttgacctggactacttgggattacccactcatgacttggctgatttggatgcaccaatgtctgaaaaggaggtttttgaaattataaagcagttaccatcagataaggcgccaggaccagatgggtacacagaaaggttttataaagtgtgctggccaatcatcagagaggatttgatggctgtaatttctgcaatttcgagcaggaaatttgggcaatttggtaggctaaatacagcttatgtaactctcatacctaagaaggaaggtgccaaagaggtaaaagattttcgacttataagtttagtgcacagtattgctaaacttgtcaccaaactgatggctaatagattgtcccaaaagttacatgatttagtctccctaaggaagtgcgcttttattaaaggtcgtttcattccggacaacttcatgatggtacaatagactgccagattacttcatcaacaaaaaaaagacgagggcactgctgaagttagacatcaccaaggccttctactccgtctcttggcctttcttgcttgaagtccttcagaaacttggatttgggcagatctggagagatatcttgagctgatggctaacagattgtcccaaaagttacatgatttagtctccctaaggaagtgtgcttttattaaaggtcgtttcattcaggacaacttcatgatggtacaatagactgccagattacttcatcaacaaaaaaagacgagggcactgctgaagttagacatcaccaaggccttctactccgtctcttggcctttcttgcttgaagtccttcagaaacttggatttgggcagatctggagagatatcttgagctgatggctaacagattgtcccaaaagttacatgatttagtctccctaaggaagtgcgcttttattaaaggtcgtttcattcaggacaacttcatgatggtacaatagactgccagattacttcatcaacaaaaaaagacgagggcactgctgaagttagacatcaccaaggccttctactccgtctcttggccttttttgcttgaagtccttcagaaacttggatttgggcagatctggaaagatatcttgagtgggttattggccacctcctctacacaagttctcctgaatggtgttccaggggatattattcaacttaaaagggggctgagacaaggtgatcctctgtcacctaagctttttatattggtaatggatattcttgggtgtattgttgctaagtctagacccctgcagcacaggatatcactatatgctgatgacgtggtactttttctgcaacctagggagagtgaaatccatactatgatcaatattttgaagctatttggagaagcatcaggtctgaaaactaatattcagaagagtagtgtttatcctatatgatgtggtgaggaggaattgataacactacatagacagcttccatgtgagttctcatcctttccctgtaaatatctcggacttcctctgtcattaaaaaaactctccagaacctaggtgcaacccattattgacagagtggctgaccaattatctggctggaaagccgatctaatgtctagggctgggagaagagtacaggtgcagtatgtgatgacagacatgatcatctattttgccatggcagtagaattacccccaggagctctcaaggctattgacaagatcagaaaaggctttctttggcgtggaagcaaagatgcaagaggagggcattgtttagtggcttggggcagagtttgtagacctcttgagcttggcggccttggtatttcaagtctcaaagatttgggatgggctttgagattgagatggctatggctcggtaaaactgaacctgataaaccatggtcctcgctacctatgcaattttcaaaaaagatgatggccttcttctccgctgccatgctcactgagattgggagtggatcttcaaccttattttggcaagatctttggattcatgtaaagaaaattgaagacattgctcctagatcgatggcagctgtaccaaagaagattaagaacagcagatctgtgcatgaggctttaatagatagaaaaaaacttggccggggaggaaaagaccgccctcccggtattatattaagaagagacccaaacacggtcccgaccgagaaaacccccgaaccctggcccccatcactaacgggccgatcaactgcccactctgcaacggcccagccagagggtggcgcgcaggatatcgatctctgagagcgggcgaggcatagcgaggggattttttttaaccaagcccaaaattcgcccccgaggggggtcgaacccaggacctagaggtgctactcggaagccttaaccattacgctagaggccctttcgcgttttaatagatagaaaatggttgacatatattaaaggggccttgactgttggctgatttccttgatctctg

SEQ ID NO: 34448 - DNA, 1750 bp, Zea Mays
ctttccatccccggttggccggttccccacgcccaccttttcttcttcccatctcgtctctctcttcagcgcgcaaggatctcttcgtcggggagagaggaccaaggaagcgcccgcggagagagatggcgctggcgatcctagcgaggcggcgggctgcagcggccgtgttgcggcggccgcagacggcggcgggggcggccgtgtccgcctggagggcgtacgcggcggcgggcgaggagagcgacgtggtggtggtgggcggcgggcccggagggtacgtggcggcgatcaaggccgcgcagctggggctcaagaccacctgcatcgagaagaggggcactctcggcgggacctgcctcaacgtcggatgcatcccatccaaggctcttttgcattcatcacatatgtatcatgaagcaaagagttcttttgcacaccatggagttaagttttcaaatctggaagtggacctcccagccatgatggctcagaaagacaaagctgtggcaggactaacaaagggaattgaagggctctttaaaaagaacaaggaataacaattgatgagaagaaagttgtttcatctactggtgcactgtgcttgtcagagatcccgaaaaaactggtggtaatcggagcaggttatattggccttgagatgggttcagtctggaaccgccttggttcagaggtcactgttgttgaatttgccccggatatagtaccatcaatggatggcgaggtcaggaagcagttccaacgcatgctagaaaaacagaaattcaagttcatgctcaagacaaaggttgttgggtgtgataccagtggagatggcgtaaagctgacactggagcctgcagctggtggtgagcagaccatccttgaagcagatgttgttcttgtctctgctggcagaagcccatttacttctgggattgggcttgaaactcttggtgttgagacagacaaggctggcaggatccttgttgataagcgcttcatgaccaatgtgaagggagtctatgcaatcggggatgccatccctggtcccatgcttgcccataaagctgaagaggatggtgtcgcatgcgtagaattcattgctggaaaagaaggccatgttgactatggcacagttcctggtgtggtctatacacatccagaagttgcatctgttggcaagactgaggagcaggtgaaggctctaggaattgcctataatgtggggaagtttccacttttggctaacagtcgtgcgaaggccattgatgacgctgaaggggtagttaaggtgatcgcagagaaggaaacagataagattctgggcgtgcacattatggcacccaatgctggtgagatcatccacgaagctgtcgtcgccttgcagtatggagcatccagtgaggacgttgctcgaacatgccacgcacaccctaccgtgagtgaagccctcaaggaggcttgcttgcaaaccttcgataaagcaatccacatataatttctcattttttgtgtccaaactccaaagtttgtggtaattttgggtctgttggaaaaaaggcccctgattgtccttttgtttttgtcggcaatactgtgaattgaccctttgagttgtccatcttagcggggttttgtgcttccttggcttggtttatccatccaaataataacctgatactatgttttacattttatgcccatgaaccattgatggatatacatttctaaggttccagtaaaaata

SEQ ID NO: 34449 - DNA, 995 bp, Zea Mays
aacagtctaaaccctaaatcctgtacaccgcttctttttaatcaactgtttaccttgtttaaatggctgtttagtctgaaactctgaataatggctaaacattaggtgcctgactgtttagggtggtaaaatttgattcaacaaaaattgttcctgcaaagtacatcatgaaaacggatgacgatgcttttgttaggatcgatgaagtgatctcgagcctaaagaagagcaattccaatggccttctttatggtctcatttctttccaatcttccccccacagagacaagggtagcaaatggttcatcagtcggaaggaatggcccttcgacatgtacccgccatgggctcatggccctggatacgtaatctcacgtgacatcgctaagtttgtagtccaaggccaccaggaactgactcttcagcttttcaaacttgaagacgtggcaatgggtatttggatccaacagtacaagaacagtgggcagcaagtaaacattgtgactgatgaccggttctacaatgaaggatgcgaagctgactacgtccttgcccactaccagaccccgaggcttatgatgtgtctgtgggagaagctgaagacggaatatcatgctatatgctgtgaatagcatccgaattgcaagtaggaggcgatagaggaatggatagatagaggaatggataggttagccttggttttgaagaagacatttgctccgattttgacgctgtgtggaaaattgttgggactatgcgcaaaaagcctgtaacattgggttctcacttctgttctgtggcctgtgggttcatgttctttgtttttgggtagaaaatgttaatccgtgcaacttgatggatgttgtaaaaagagtgttgtaggacatttgagagagtttatctggcacaacctctcaagttattggatccatatacacctgcactcgtcctatagatctcagacggctgcactaaataacttaacaggatttgtg

SEQ ID NO: 34450 - DNA, 1039 bp, Zea Mays
atgaaatagattggaaatctgtttcttcccttgctgcctcttacatcttaaagtgcacaagaatgagcaagtcaatatggagttatggagagaggctcaattatatggtgatatccaattgatgcccttcgttgactactatactttgatcactttgaagaccatatcaatttgcattttcggaacaaaaattgttcctgcaaagtacatcatgaaaacggatgacgatgcttttgttaggatcgatgaagtgatctcgagcctaaagaagagcaattccaatggccttctttatggtctcatttctttccaatcttccccccacagagacaagggtagcaaatggttcatcagtcggaaggaatggcccttcgacatgtacccgccatgggctcatggccctggatacgtaatctcacgtgacatcgctaagtttgtagtccaaggccaccaggaactgactcttcagcttttcaaacttgaagacgtggcaatgggtatttggatccaacagtacaagaacagtgggcagcaagtaaacattgtgactgatgaccggttctacaatgaaggatgcgaagctgactacgtccttgcccactaccagaccccgaggcttatgatgtgtctgtgggagaagctgaagacggaatatcatgctatatgctgtgaatagcatccgaattgcaagtaggaggcgatagaggaatggatagatagaggaatggataggttagccttggttttgaagaagacatttgctccgattttgacgctgtgtggaaaattgttgggactatgcgcaaaaagcctgtaacattgggttctcacttctgttctgtggcctgtgggttcatgttctttgtttttgggtagaaaatgttaatccgtgcaacttgatggatgttgtaaaaagagtgttgtaggacatttgagagagtttatctggcacaacctctcaagttattggatccatatacacctgcactcgtcctatagatctcagacggctgcactaaataacttaacaggatttgtg

SEQ ID NO: 34451 - DNA, 1551 bp, Zea Mays
cttgaccgacgctcgagaagtcgagatagagacaaccggcacccgccgatcgctcgctggtgggatgaagaaatgctccggcgtgctcttcatcctcacactcgccgtcgtgctcttcctcctctcgccgtcgccctcccccactccaccccccaacaccgcacccaatggcccgatcaccgacctcctccccaccctccccggcctttcggacctctaccctcccgctcccaactccactgcacatctctcctggggcctcctccgcccgctcctctgccgctccgacgcgctcccgggaacctctgcaggcgtcctcgaggcagccgaagcctggcggaatctcaccctggctgtcaccgccgcggcaagcgaggaggaggcgcgtctccaaggactccgctgctcatcgtccgtgggaggggatctacgcacgggacgtgccacactcccctgcgggctctcggagggcgcggcattgacggtggtcgggattctcagggagggggcggccaagttctgggtggaaatgctgggtgcgaacggtgaggttgtgctgcacgtcaatgtgagcctgggagccgcgggggtgttggtggagcagaattcctggacgccagaggaggggtggggggagtgggagcggtgcccgcctgttggtgatgtgggcagcagcaatagcagcttgcagctaagacaaaaattgttcctgcaaagtacatcatgaaaacggatgacgatgcttttgttaggatcgatgaagtgatctcgagcctaaagaagagcaattccaatggccttctttatggtctcatttctttccaatcttccccccacagagacaagggtagcaaatggttcatcagtcggaaggaatggcccttcgacatgtacccgccatgggctcatggccctggatacgtaatctcacgtgacatcgctaagtttgtagtccaaggccaccaggaactgactcttcagcttttcaaacttgaagacgtggcaatgggtatttggatccaacagtacaagaacagtgggcagcaagtaaacattgtgactgatgaccggttctacaatgaaggatgcgaagctgactacgtccttgcccactaccagaccccgaggcttatgatgtgtctgtgggagaagctgaagacggaatatcatgctatatgctgtgaatagcatccgaattgcaagtaggaggcgatagaggaatggatagatagaggaatggataggttagccttggttttgaagaagacatttgctccgattttgacgctgtgtggaaaattgttgggactatgcgcaaaaagcctgtaacattgggttctcacttctgttctgtggcctgtgggttcatgttctttgtttttgggtagaaaatgttaatccgtgcaacttgatggatgttgtaaaaagagtgttgtaggacatttgagagagtttatctggcacaacctctcaagttattggatccatatacacctgcactcgtcctatagatctcagacggctgcactaaataacttaacaggatttgtg

SEQ ID NO: 34452 - DNA, 2215 bp, Zea Mays
cttgaccgacgctcgagaagtcgagatagagacaaccggcacccgccgatcgctcgctggtgggatgaagaaatgctccggcgtgctcttcatcctcacactcgccgtcgtgctcttcctcctctcgccgtcgccctcccccactccaccccccaacaccgcacccaatggcccgatcaccgacctcctccccaccctccccggcctttcggacctctaccctcccgctcccaactccactgcacatctctcctggggcctcctccgcccgctcctctgccgctccgacgcgctcccgggaacctctgcaggcgtcctcgaggcagccgaagcctggcggaatctcaccctggctgtcaccgccgcggcaagcgaggaggaggcgcgtctccaaggactccgctgctcatcgtccgtgggaggggatctacgcacgggacgtgccacactcccctgcgggctctcggagggcgcggcattgacggtggtcgggattctcagggagggggcggccaagttctgggtggaaatgctgggtgcgaacggtgaggttgtgctgcacgtcaatgtgagcctgggagccgcgggggtgttggtggagcagaattcctggacgccagaggaggggtggggggagtgggagcggtgcccgcctgttggtgatgtgggcagcagcaatagcagcttgcagctaagtttgaccagtccagtggacggccttgttcattgcaatgagaaagtgggtgcaaggatcgtccaggagagtaataatactgtggtaaatattactgggaaccaacctgaagattggcagagtcaaacaggacatggtcagttaagtggacgtttctcaattgttgaaggagagccttttacagtaacactgtgggctggtgtagaggggttccatatgacagtaaatgggcggcatgagacatcatttgcctatagagagaggtcagagccatggttggtagcagaagtcatgttttctggtgatttggagctcttgtcattcttggctaatgagttaccagtatcagaagatatagacatggaaaatgttgcagttttgaaggccccacctctgccaaagaagcaaacttttctgctggttggtgttttctctactggaaacaacttcaagcggcggatggctttgaggcgaacatggatgcaatatgaggctgttcgctcaggcgatgtagtagtccgttttttcactggtcttcacaagaatgagcaagtcaatatggagttatggagagaggctcaattatatggtgatatccaattgatgcccttcgttgactactatactttgatcactttgaagaccatatcaatttgcattttcggaacaaaaattgttcctgcaaagtacatcatgaaaacggatgacgatgcttttgttaggatcgatgaagtgatctcgagcctaaagaagagcaattccaatggccttctttatggtctcatttctttccaatcttccccccacagagacaagggtagcaaatggttcatcagtcggaaggaatggcccttcgacatgtacccgccatgggctcatggccctggatacgtaatctcacgtgacatcgctaagtttgtagtccaaggccaccaggaactgactcttcagcttttcaaacttgaagacgtggcaatgggtatttggatccaacagtacaagaacagtgggcagcaagtaaacattgtgactgatgaccggttctacaatgaaggatgcgaagctgactacgtccttgcccactaccagaccccgaggcttatgatgtgtctgtgggagaagctgaagacggaatatcatgctatatgctgtgaatagcatccgaattgcaagtaggaggcgatagaggaatggatagatagaggaatggataggttagccttggttttgaagaagacatttgctccgattttgacgctgtgtggaaaattgttgggactatgcgcaaaaagcctgtaacattgggttctcacttctgttctgtggcctgtgggttcatgttctttgtttttgggtagaaaatgttaatccgtgcaacttgatggatgttgtaaaaagagtgttgtaggacatttgagagagtttatctggcacaacctctcaagttattggatccatatacacctgcactcgtcctatagatctcagacggctgcactaaataacttaacaggatttgtg

SEQ ID NO: 34453 - DNA, 1006 bp, Zea Mays
tgacatttcaaggatggcactgcaacattttagttattgtctgtgcttgcgaatgatgtctacaataatatggcgatcaataatgtgatgatcatgttaggctatctccagcaaatcccctatctcatctcttatttcaaacttctctctgtaaacagtgtcatctacagtttcgagtcccctattttacacactctactggagacagtcttataccttacgtatgcagattatctttgagttggctgtttaacataccacctttgttacaacttacataggatatgtacccgaacataaagttagcacagttatggacaactatggtaaaggcaggccttcagtcatgaaaactaccaggctgctgcttgatgaagatggctggaggggattctatagaggttttggaccgaggtttcttaacatgtctgtctggggcacatcaatgatcgtgacatatgagctcataagtaggtcatttttcagtaaatctattatctatatatttcagtctggaaggtctactaacttttttctttcatattccgaacctgcagaaaggctatccgtgaagtctgaatgacacattttggtggattctcaactaaggtgatttactgttcaaaatcatctatacagatataggcaatcaagtcagtttgcctcgcgaagagtataggcgagtattatgatcgggtgggatgcagaattatggtttagttgcataggataacatgcttctgtatgacacttgcgatgtatatatttttgctaaagagccctcctttcaggatgtttgtagccagcttcttttggatgtaacagatggaggccaagacgcctgttctgtctaatgaggcacattatatgtagctgtactattcgtggtccaacaaaattttggcaaagaactctgcatccttttcgtttgttgttgtgctaaagggctctccggtcgtcgtcgccgtcctgcttacatttttcttaggatctaccgagattgttc

SEQ ID NO: 34454 - DNA, 1656 bp, Zea Mays
atctccgacccggccccactgacgggacccactcctcggtttcactacgaccctcgcccaatccaggccccgcaagtcagtgaggcgaggccggacgaatggcaagttgggcagcgcggtccgaggggcgccgccgacccgaccgtgctggaaacttctaaccaaaacccctaatgtctcgaggtggcgcaccccaacaaactggctccgcctccttcctcctcccctccggcctccgccgctgccttcttttccccgtgcgcatagtcgctcgcagaggcgccgacatcacttcgtccggaccggaaacacgcacgaagtgaggaccagcaccaaacaccgcgccgcttctcctatatttgttcctctcccggagccgcatcgtgtgtaagcgtgtggcggatccatggcagcggcggcggatacctcggaggcgtccgcggcaggaatcgcgctcgcagaggccaatatcaactgggagaggttggacaagacgaggtttcatgtgattggagctatcctgttcacggcccagcaaggtgctctgcacccaacagctgttgtgaagactaggatgcagaggatttggcaccgctgctgttggagctctgcctgggcgagtgctagctctaacatcactggagatctctaaagaaatgacatttaagtattgtgaacattttgatctgtcagaggcgtcacaaattgctatagcaaatggcattgcaggtctaatgtcgagtatctgttcatgctcatactttgtgcctctagatgtgatttgccaaaggctcatggttcaaggattgccagggatggcaacatacaggggcccattcgatgtgataaataaggttgtcagaacagaagggatccgggggctttatcgaggttttggtatcactatgttgactcagtcgccagcttcagccctttggtggagtgcatatggtggtgctcaacatgctatttggagcaggaacaattgctggtgcttgctcgtcgattatcaccactccagtagataccatcaagactcggcttcaggttatggacaactatggtaaaggcaggccttcagtcatgaaaactaccaggctgctgcttgatgaagatggctggaggggattctatagaggttttggaccgaggtttcttaacatgtctgtctggggcacatcaatgatcgtgacatatgagctcataaaaaggctatccgtgaagtctgaatgacacattttggtggattctcaactaaggtgatttactgttcaaaatcatctatacagatataggcaatcaagtcagtttgcctcgcgaagagtataggcgagtattatgatcgggtgggatgcagaattatggtttagttgcataggataacatgcttctgtatgacacttgcgatgtatatatttttgctaaagagccctcctttcaggatgtttgtagccagcttcttttggatgtaacagatggaggccaagacgcctgttctgtctaatgaggcacattatatgtagctgtactattcgtggtccaacaaaattttggcaaagaactctgcatccttttcgtttgttgttgtgctaaagggctctccggtcgtcgtcgccgtcctgcttacatttttcttaggatctaccgagattgttc

SEQ ID NO: 34455 - DNA, 1666 bp, Zea Mays
atctccgacccggccccactgacgggacccactcctcggtttcactacgaccctcgcccaatccaggccccgcaagtcagtgaggcgaggccggacgaatggcaagttgggcagcgcggtccgaggggcgccgccgacccgaccgtgctggaaacttctaaccaaaacccctaatgtctcgaggtggcgcaccccaacaaactggctccgcctccttcctcctcccctccggcctccgccgctgccttcttttccccgtgcgcatagtcgctcgcagaggcgccgacatcacttcgtccggaccggaaacacgcacgaagtgaggaccagcaccaaacaccgcgccgcttctcctatatttgttcctctcccggagccgcatcgtgtgtaagcgtgtggcggatccatggcagcggcggcggatacctcggaggcgtccgcggcaggaatcgcgctcgcagaggccaatatcaactgggagaggttggacaagacgaggtttcatgtgattggagctatcctgttcacggcccagcaaggtgctctgcacccaacagctgttgtgaagactaggatgcaggttgctgaagaggatttggcaccgctgctgttggagctctgcctgggcgagtgctagctctaacatcactggagatctctaaagaaatgacatttaagtattgtgaacattttgatctgtcagaggcgtcacaaattgctatagcaaatggcattgcaggtctaatgtcgagtatctgttcatgctcatactttgtgcctctagatgtgatttgccaaaggctcatggttcaaggattgccagggatggcaacatacaggggcccattcgatgtgataaataaggttgtcagaacagaagggatccgggggctttatcgaggttttggtatcactatgttgactcagtcgccagcttcagccctttggtggagtgcatatggtggtgctcaacatgctatttggagcaggaacaattgctggtgcttgctcgtcgattatcaccactccagtagataccatcaagactcggcttcaggttatggacaactatggtaaaggcaggccttcagtcatgaaaactaccaggctgctgcttgatgaagatggctggaggggattctatagaggttttggaccgaggtttcttaacatgtctgtctggggcacatcaatgatcgtgacatatgagctcataaaaaggctatccgtgaagtctgaatgacacattttggtggattctcaactaaggtgatttactgttcaaaatcatctatacagatataggcaatcaagtcagtttgcctcgcgaagagtataggcgagtattatgatcgggtgggatgcagaattatggtttagttgcataggataacatgcttctgtatgacacttgcgatgtatatatttttgctaaagagccctcctttcaggatgtttgtagccagcttcttttggatgtaacagatggaggccaagacgcctgttctgtctaatgaggcacattatatgtagctgtactattcgtggtccaacaaaattttggcaaagaactctgcatccttttcgtttgttgttgtgctaaagggctctccggtcgtcgtcgccgtcctgcttacatttttcttaggatctaccgagattgttc

SEQ ID NO: 34456 - DNA, 1616 bp, Zea Mays
gtcgccacgactccactccccgttccccgatagcaggaaagcgagaaacagccaccacaaaatctccgacccggccccactgacgggacccactcctcggtttcactacgaccctcgcccaatccaggccccgcaagtcagtgaggcgaggccggacgaatggcaagttgggcagcgcggtccgaggggcgccgccgacccgaccgtgctggaaacttctaaccaaaacccctaatgtctcgaggtggcgcaccccaacaaactggctccgcctccttcctcctcccctccggcctccgccgctgccttcttttccccgtgcgcatagtcgctcgcagaggcgccgacatcacttcgtccggaccggaaacacgcacgaagtgaggaccagcaccaaacaccgcgccgcttctcctatatttgttcctctcccggagccgcatcgtgtgtaagcgtgtggcggatccatggcagcggcggcggatacctcggaggcgtccgcggcaggaatcgcgctcgcagaggccaatatcaactgggagaggttggacaagacgaggtttcatgtgattggagctatcctgttcacggcccagcaaggtgctctgcacccaacagctgttgtgaagactaggatgcaggttgctgaagaggatttggcaccgctgctgttggagctctgcctgggcgagtgctagctctaacatcactggagatctctaaagaaatgacatttaagtattgtgaacattttgatctgtcagaggcgtcacaaattgctatagcaaatggcattgcaggtctaatgtcgagtatctgttcatgctcatactttgtgcctctagatgtgatttgccaaaggctcatggttcaaggattgccagggatggcaacatacaggggcccattcgatgtgataaataaggttgtcagaacagaagggatccgggggctttatcgaggttttggtatcactatgttgactcagtcgccagcttcagccctttggtggagtgcatatggtggtgctcaacatgctatttggaggagtttgggttatggaaatgactcacaaacaaaaccatctcaatcagaacttgttgttgtccaagcaacagcaggaacaattgctggtgcttgctcgtcgattatcaccactccagtagataccatcaagactcggcttcaggttatggacaactatggtaaaggcaggccttcagtcatgaaaactaccaggctgctgcttgatgaagatggctggaggggattctatagaggttttggaccgaggtttcttaacatgtctgtctggggcacatcaatgatcgtgacatatgagctcataaaaaggctatccgtgaagtctgaatgacacattttggtggattctcaactaaggatgtttgtagccagcttcttttggatgtaacagatggaggccaagacgcctgttctgtctaatgaggcacattatatgtagctgtactattcgtggtccaacaaaattttggcaaagaactctgcatccttttcgtttgttgttgtgctaaagggctctccggtcgtcgtcgccgtcctgcttacatttttcttaggatctaccgagattgttc

SEQ ID NO: 34457 - DNA, 2240 bp, Zea Mays
gctttttcccgttctcaatggcaatgtgacagtggatattgtaagaggtgttgtcccttctgttagagcagatatagatggtataattgttggtccaaaaaaatctaaaaaaaagctctacgaagagaaaatatgagaaatgcaagaagaaacattaatgatgcccctgtaaatgcgtacgagcagcaacgaatagcaatcattgcagaaaacaaaaggaagctagcatctcttaatatccctactttgaagaccgcgggtccatccgagaaaagaacaaagaggactcatgacacaagtgttgtagcaactgaaggtcataatttacgtgcaaggccacaaagaaactataatgggaatgaaaatatacagatcgatgaagatcttgtgataaatcaatcagatggagactttctatgtgataatgaagcagattttgaagacattccaaaaaaacgagcagggaaaggaaggggtattactaggctagatgacatattcgcaaggaaatctgacatgcctaaaataaaaataacactaaatgaacatggtcagcctgttggaaaagattgtaggaagttttctagtgccattgggtgtctagtgaggaagaaactatcagttgcatgtgctgattggaggctggttcctgctgaaaagaagtatgaagtttggacaagcattaaggaaatctatgacatcgatgatgctgccttcaattggttccttgctagtgccgggagaaaatggaaggaattcaaggcaaccctaaaggagcaatactttaatgagaaactaacaaatgaggagctgaagacaaaagttggtgacagagttgatgatgatgcttggaattttctcacagaatattggatgtctcctaactttgataacaaacttaaagcaatagttgaagcacgtccagagttgaaggaaagatcaattcaacaaggtgatgcctttgctgccgtttgtggagaaaaggaaccaagaggacgggttcgtgttttgggtctaggtccaactcctcaagaagttggtacccctgggttgaagtgctacacaccaacaagacttcaaatggaagtttttgctcgcaaaaagcttgaaagtgagaaagcagccttagaaaaacgtatagcggatatgcaagaggaaatgatggaacgagaaaagcaaaatgttgaaatgggatcacacaatgattcaaattcaagactccattcgcagagcccaagagaggagcatattcaccaggcgcatgatgctcagttccaagaagatgatgcttctctagataaccattgtgaagaggatgagtacgtgtttctccccaggggtggtaatattcgccctacaagcgtgaccacaactaggccaagaattgtttctgcgactcgcttttcacatgatgcacttgttggggaagatggtgcacaaacatctgtaccacccaatgaatgcaacccgattcaacctaaaagagcaaccacatcagtctggcctagaaatgatgctgccactcgcttttcacatgatgttcgaccaagaaatgatgctgccactcgcttttcacatgatgttcagttggggaagatgtgatactctatgcaatgttgagatctgatcctgtggcaaagggaacaattacttcaactaatccaaacactgtgctaggaggtgaaaatcttggaacacaattttgtgaagtagttgtgaatgttgtgctaaaaagggacgcagatctacctcgcccttatgaccatatggagaccatgggtgatgcttatatgatgcctgttgcatggccatacaagagaatgaaggtcagcaaggcttccaaatcatcccatgttgctactggtaattctgggatatgctaggtagcacatttgatggaccagctgacagcaacttgttcaaacagcaagcatatggtgtaatggagaagggttgtcttcttagtttgcagcttttgggtttcttacattaagactgtagttgtagcttttgggttgcaagcatatggtgtaatggagaatggttatagcttttgggttgttgtgttgacaactgtaatagtactgactgtgtgctgtttggaagcgacaatgcacttttgctgcttgtgcttggtacctttgtttcaaagattgttgaacaatttcttgtgtgtcctgagaaatcaaaatgtttctatgctgatgttgaatcaatgaatgattgtgccaataattgtg

SEQ ID NO: 34458 - DNA, 2315 bp, Zea Mays
cggggagcgcgtcaccgtcgtcgggccgtggacttcgccgtcgtcgaggagcgcgccaccgtcgtcgggccgtggagctcgccgttgtcgaggagtgcgccaccgtcgtcgggccgaagattctgctctgccattgctatagcagtgcacaagttccaggagaaaatatgagaaatgcaagaagaaacattaatgatgcccctgtaaatgcgtacgagcagcaacgaatagcaatcattgcagaaaacaaaaggaagctagcatctcttaatatccctactttgaagaccgcgggtccatccgagaaaagaacaaagaggactcatgacacaagtgttgtagcaactgaaggtcataatttacgtgcaaggccacaaagaaactataatgggaatgaaaatatacagatcgatgaagatcttgtgataaatcaatcagatggagactttctatgtgataatgaagattttgaagacattccaaaaaaacgagcagggaaaggaaggggtattactaggctagatgacatattcgcaaggaaatctgacatgcctaaaataaaaataacactaaatgaacatggtcagcctgttggaaaagattgtaggaagttttctagtgccattgggtgtctagtgaggaagaaactatcagttgcatgtgctgattggaggctggttcctgctgaaaagaagtatgaagtttggacaagcattaaggaaatctatgacatcgatgatgctgccttcaattggttccttgctagtgccgggagaaaatggaaggaattcaaggcaaccctaaaggagcaatactttaatgagaaactaacaaatgaggagctgaagacaaaagttggtgacagagttgatgatgatgcttggaattttctcacagaatattggatgtctcctaactttgataacaaacttaaagcaatagttgaagcacgtccagagttgaaggaaagatcaattcaacaaggtgatgcctttgctgccgtttgtggagaaaaggaaccaagaggacgggttcgtgttttgggtctaggtccaactcctcaagaagttggtacccctgggttgaagtgctacacaccaacaagacttcaaatggaagtttttgctcgcaaaaagcttgaaagtgagaaagcagccttagaaaaacgtatagcggatatgcaagaggaaatgatggaacgagaaaagcaaaatgttgaaatgggatcacacaatgattcaaattcaagactccattcgcagagcccaagagaggagcatattcaccaggcgcatgatgctcagttccaagaagatgatgcttctctagataaccattgtgaagaggatgagtacgtgtttctccccaggggtggtaatattcgccctacaagcgtgaccacaactaggccaagaattgtttctgcgactcgcttttcacatgatgcacttgttggggaagatggtgcacaaacatctgtaccacccaatgaatgcaacccgattcaacctaaaagagcaaccacatcagtctggcctagaaatgatgctgccactcgcttttcacatgatgttcgaccaagaaatgatgctgccactcgcttttcacatgatgttcagctaagaaatgatactgccactcacttttcacatgatgcactagttggggaagatgtgatactctatgcaatgttgagatctgatcctgtggcaaagggaacaattacttcaactaatccaaacactgtgctaggaggtgaaaatcttggaacacaattttgtgaagtagttgtgaatgttgtgctaaaaagggacgcagatctacctcgcccttatgaccatatggagaccatgggtgatgcttatatgatgcctgttgcatggccatacaagagaatgaaggtcagcaaggcttccaaatcatcccatgttgctactggtaattctgggatatgctaggtagcacatttgatggaccagctgacagcaacttgttcaaacagcaagcatatggtgtaatggagaagggttgtcttcttagtttgcagcttttgggtttcttacattaagactgtagttgtagcttttgggttgcaagcatatggtgtaatggagaatggttatagcttttgggttgttgtgttgacaactgtaatagtactgactgtgtgctgtttggaagcgacaatgcacttttgctgcttgtgcttggtacctttgtttcaaagattgttgaacaatttcttgtgtgtcctgagaaatcaaaatgtttctatgctgatgttgaatcaatgaatgattgtgccaataattgtg

SEQ ID NO: 34459 - DNA, 2308 bp, Zea Mays
gtaaaaactgatcaatttgggatcacaaatgtcaatttcaagcatctgttcaataccggtgaaaaaatatcagatgaaccattcattctagcatcacaggcacttcaagtattctatgttcctgatccgattgatactgagtgggctgctgttgttcagtcaaaacctagggacttgtatgatgtggatgatttggagaacgagcacacagataattgtagtggacaagctatgctttttcccgttctcaatggcaatgtgacagtggatattgtaagaggtgttgtcccttctgttagagcagatatagatggtataattgttggtccaaaaaaatctaaaaaaaagctctacgaagagaaaatatgagaaatgcaagaagaaacattaatgatgcccctgtaaatgcgtacgagcagcaacgaatagcaatcattgcagaaaacaaaaggaagctagcatctcttaatatccctactttgaagaccgcgggtccatccgagaaaagaacaaagaggactcatgacacaagtgttgtagcaactgaaggtcataatttacgtgcaaggccacaaagaaactataatgggaatgaaaatatacagatcgatgaagatcttgtgataaatcaatcagatggagactttctatgtgataatgaagattttgaagacattccaaaaaaacgagcagggaaaggaaggggtattactaggctagatgacatattcgcaaggaaatctgacatgcctaaaataaaaataacactaaatgaacatggtcagcctgttggaaaagattgtaggaagttttctagtgccattgggtgtctagtgaggaagaaactatcagttgcatgtgctgattggaggctggttcctgctgaaaagaagtatgaagtttggacaagcattaaggaaatctatgacatcgatgatgctgccttcaattggttccttgctagtgccgggagaaaatggaaggaattcaaggcaaccctaaaggagcaatactttaatgagaaactaacaaatgaggagctgaagacaaaagttggtgacagagttgatgatgatgcttggaattttctcacagaatattggatgtctcctaactttgataacaaacttaaagcaatagttgaagcacgtccagagttgaaggaaagatcaattcaacaaggtgatgcctttgctgccgtttgtggagaaaaggaaccaagaggacgggttcgtgttttgggtctaggtccaactcctcaagaagttggtacccctgggttgaagtgctacacaccaacaagacttcaaatggaagtttttgctcgcaaaaagcttgaaagtgagaaagcagccttagaaaaacgtatagcggatatgcaagaggaaatgatggaacgagaaaagcaaaatgttgaaatgggatcacacaatgattcaaattcaagactccattcgcagagcccaagagaggagcatattcaccaggcgcatgatgctcagttccaagaagatgatgcttctctagataaccattgtgaagaggatgagtacgtgtttctccccaggggtggtaatattcgccctacaagcgtgaccacaactaggccaagaattgtttctgcgactcgcttttcacatgatgcacttgttggggaagatggtgcacaaacatctgtaccacccaatgaatgcaacccgattcaacctaaaagagcaaccacatcagtctggcctagaaatgatgctgccactcgcttttcacatgatgttcgaccaagaaatgatgctgccactcgcttttcacatgatgttcagctaagaaatgatactgccactcacttttcacatgatgcactagttggggaagatgtgatactctatgcaatgttgagatctgatcctgtggcaaagggaacaattacttcaactaatccaaacactgtgctaggaggtgaaaatcttggaacacaattttgtgaagtagttgtgaatgttgtgctaaaaagggacgcagatctacctcgcccttatgaccatatggagaccatgggtgatgcttatatgatgcctgttgcatggccatacaagagaatgaaggtcagcaaggcttccaaatcatcccatgttgctactgagttcatagcaccatcaattgagatgttgtgcatatgcagtgaggaaatagaggttggggaaatgagggaccttgttaggctggggaaagattagttgtttatgctgggtgtggcagccccctttctctttgtataaataattatttgttgtatgtcctgatgggcacttcc

SEQ ID NO: 34460 - DNA, 2083 bp, Zea Mays
cacaaatgggtaaaaactgatcaatttgggatcacaaatgtcaatttcaagcatctgttcaataccggtgaaaaaatatcagatgaaccattcattctagcatcacaggcacttcaagtattctatgttcctgatccgattgatactgagtgggctgctgttgttcagtcaaaacctagggacttgtatgatgtggatgatttggagaacgagcacacagataattgtagtggacaagctatgctttttcccgttctcaatggcaatgtgacagtggatattgtaagaggtgttgtcccttctgttagagcagatatagatggtataattgttggtccaaaaaaatctaaaaaaaagctctacgaagagaaaatatgagaaatgcaagaagaaacattaatgatgcccctgtaaatgcgtacgagcagcaacgaatagcaatcattgcagaaaacaaaaggaagctagcatctcttaatatccctactttgaagaccgcgggtccatccgagaaaagaacaaagaggactcatgacacaagtgttgtagcaactgaaggtcataatttacgtgcaaggccacaaagaaactataatgggaatgaaaatatacagatcgatgaagatcttgtgataaatcaatcagatggagactttctatgtgataatgaagattttgaagacattccaaaaaaacgagcagggaaaggaaggggtattactaggctagatgacatattcgcaaggaaatctgacatgcctaaaataaaaataacactaaatgaacatggtcagcctgttggaaaagattgtaggaagttttctagtgccattgggtgtctagtgaggaagaaactatcagttgcatgtgctgattggaggctggttcctgctgaaaagaagtatgaagtttggacaagcattaaggaaatctatgacatcgatgatgctgccttcaattggttccttgctagtgccgggagaaaatggaaggaattcaaggcaaccctaaaggagcaatactttaatgagaaactaacaaatgaggagctgaagacaaaagttggtgacagagttgatgatgatgcttggaattttctcacagaatattggatgtctcctaactttgataacaaacttaaagcaatagttgaagcacgtccagagttgaaggaaagatcaattcaacaaggtgatgcctttgctgccgtttgtggagaaaaggaaccaagaggacgggttcgtgttttgggtctaggtccaactcctcaagaagttggtacccctgggttgaagtgctacacaccaacaagacttcaaatggaagtttttgctcgcaaaaagcttgaaagtgagaaagcagccttagaaaaacgtatagcggatatgcaagaggaaatgatggaacgagaaaagcaaaatgttgaaatgggatcacacaatgattcaaattcaagactccattcgcagagcccaagagaggagcatattcaccaggcgcatgatgctcagttccaagaagatgatgcttctctagataaccattgtgaagaggatgagtacgtgtttctccccaggggtggtaatattcgccctacaagcgtgaccacaactaggccaagaattgtttctgcgactcgcttttcacatgatgcacttgttggggaagatggtgcacaaacatctgtaccacccaatgaatgcaacccgattcaacctaaaagagcaaccacatcagtctggcctagaaatgatgctgccactcgcttttcacatgatgttcgaccaagaaatgatgctgccactcgcttttcacatgatgttcagctaagaaatgatactgccactcacttttcacatgatgcactaatgaaggtcagcaaggcttccaaatcatcccatgttgctactgagttcatagcaccatcaattgagatgttgtgcatatgcagtgaggaaatagaggttggggaaatgagggaccttgttaggctggggaaagattagttgtttatgctgggtgtggcagccccctttctctttgtataaataattatttgttgtatgtcctgatgggcacttcc

SEQ ID NO: 34461 - DNA, 2589 bp, Zea Mays
aaaaaatattacgcgcaccccgacaccattcctaggacgaggcggtgaagacttgggtgctctgcaagtccacgcccatcctcggctcggcggcgacacgcgcaaatcgagatctagaacataccgatccagccggcgagatggacatcgtggtgggtgcgctgtcgggcatagtggacgcgttgccggggaagctcggcgagctgctggagcaggagtatgcgctgctctccggcgtccgcggggatgtcatcttcctcaaggatgagctatcaagcatgcgcgccgccatccactactgcgagtccctcgaccaccacgactcccagaccactggatggatcagcctcgtccgcgaggtcgcctacgacatcgaggactgggttgacctcttcagcatccgcgtccacggcggtgcccaatccacttccgggtttcgtgcctggcttagccgcagcgtggacaagttaacggcgctccccgctcgccacaccatcgcgagcgagctccagggactcaaggagcgcgttcttgagattagccggcagcggaaccgctacaggctgggccaaatggttggcaccacctcgcaacatccccatgatcccagactttctgcgctcttcgtcgaccccggccgcctcgtcggcttcgatgggaaggtggaggacgtgtccaagactgtcatggacgccggaggtagtaatgggctgagaatcgtctccattgtcgggatggccggctcagggaagacgacgctcgcaaatgctgtgtaccggcgtctccaagcagacaacaccttccagtgctctgctttcgtctccatcggaccgaagccggacatggtgaagacagtcaaggatatgctctcaagactcggcgacggccaccgaggaggcgaggacattagccaactcatcccgagggtcagaggaatactggagaagaaaagacaacagtcttggtagtaggataatcaccacatcaaggaatgatgcgttgcccaccaatcatcattacggttcaagcaaatttgtctacaagatcggcctccttactgacaatgaagccagggagttgtttctgaagaaagctttcagcagccggaatgactgtccacaacatctggtggatgcttttaccaaggttctgagaaggtgtgctggcttgccacttgctgtggttagcgtagctgccaagttagcacacaagcaatcaagagaagaatgggagaagcatggattgaacttgctatacagctcacattcagatgggtcagatgggctgaagcaaatactccatcttagctacagcgatctacagccacaactcaggtcatgtttgctgtacctgagcatatttcctgagaactcagaggttgagacagatcgcctagtgaggcgatggattgccgaaggactcatcgctgcaagcaatgaggatacggcaatcagttccctcaatgagctaattgggagaaacttggtacaaccgttggatctgaaccatgatagtatcccaaggtgttgcagagtccacccagtgatatatgatttcattgtttgcatgtcgatgcaagacaactttgccactgtaacggatgctcaacatgtcccaatcaacaacaaaactgtccgtcggctgtccctgaatttgaagagcaacagcaagcaagatcagcctgcagcacgaaatgagactactgatttgtctcatgctcgctcagtcactgtcttcggtcacgctagtgccacccctcatctgactgatctgaaagtggtgcgtgtgctggatctcgaaggctgcaaaggtcctgtgtgcttggatggcctatgcaagctggtgctgctgaggtacctgagcctcagaggcactgatgtcagtgaactgccagcggcaattggggatctaaggtgcttggagacacttgatgtgaggtcaacgaaggtggaagagcttcctcccagtattgtaaggctgcaaaagctaatgcatttgcttgctgggagtgccaagctgcctgacgggatggataagatgaaagccctgcggtcattgtcatgcgctgctaccacaaagagctctgccaacgtcgtggaagagctcagcaagcaccataacttgagacaactggaactgtattactatgctactgaaacgcctgggaatgagaagcaaatcaagttccccgctgatgggctccagactgtgaaacaactgtgcatccggtgcacatcaccatcggtgacatttgagccccgtgtactgccaaaggtccaagcacttgtcctgagattcgagaaaggccgtgctgatgacacgattggcgtgtctggcttagagcatctgtcgagcctcaagcatttggtacttgagtttgagcagcatgatgcgggtgccatggcgacagttactgcagtgaggatggctgctgaggggctccatctagatcatcaatatataactctaaaggtggatgggaaaaagtactgaggctatcttcagcaaaggcgtgtatataaacgtagaaagcactgttttacaatatatattacacggtttacaaagtagaatatgaaatagtgagtc

SEQ ID NO: 34462 - DNA, 639 bp, Zea Mays
gtttgggagggggcgataaaggcaggaacctccaatccccagcctccatcttctagaagccctcgtctcccttaccgccactcacagccctgtggccgacaccctctcccatggagccatgagcaagatgccgccgttgatttgacctcggcgtgctttctggccaggtcctgcgctctcctttgtctccaccacacagtacctaaggcactggccgctagtccatggccaccaccagtcgcgccactaagacttgtcgccgctcagggaggagaatcagagaaatgagtgggagggtgagagaacgtcgtggccagctccaggctgaatcatcggccttaccccaactgctggccttggagcttcgtcgtattcccctcatggtgctagtggccacctcatgcgaggcgtgaccggggggggcgcgacgaatcgctcgccggtgagaagaccacggagaatccgtacgcgcgctcggaccgtggagactggcaccagaacggcgggaactgctcgccggccgtcaccctccgccgtgaagccaccccgctccgtgggcagactcgccaccgaaccaatccgcgaggatgcgtgtcatctgaaaagcaagttggtacctggaatctcaagtgccaggca

SEQ ID NO: 34463 - DNA, 2449 bp, Zea Mays
cttttgcagagctctttttatggatgaccatctcattcgccatgttgtgaagttcaacttgctgaaaccaataattgatgtctttgttgacaatggggagagatataacatgctacattcaggagtactcgaattgttggaatacatacggaaggaaaatataaaaactctcattatctatgctattgagtctttctgggatgaacttgccatctttgaacactttggaagtattcaggccttcaaactcaagtatcaacagtacctggagagcgctgaaccaaggttgaatgctagtgtgcctgacatgagaaagaaggcagaacaaagaggtcttgagaaggaagaggaagactacttcaatgaggacagtgatgaagaagattcaggctccggccggcgggctaaacatgcacagaaccaaaataacaagcctaagtccaaggtccccaatggaagtgaagctgatgacactgatggcgcctctaggcctaaatctgctggacttgtggactatgacgatgatgacgatgaggacttcaatccaccaccaaaggagccttctaggcctgcagaggatgatgtgcccttaaacatatccccgttgaagcggaagccagtgaatgcagtggatgggaaacattcagacggagagggtcgcaggaggcaaaaaatagaaactagaattagttgtgctaaaattgctgctgttactagtacagctattaagcacacagatctacaaaacaagtatgcttcccacttgcttacgtcagccacaccaagtactgaagccaatggtatttttagtgaacatggtactaactatgaggagcaacaacatcctatggagaacacagaaacttcacgacaaactggtggtgattgtataaaagatgtgggcagtatgtctcccgagaaggccgtaaatactaccaatacaagcgattcggagccttattcagtaagatgactactacacagctggttggtccatgtacccatcctgtgctgtggtcaacaggaaggaatcagaatgtgtttggctccaagcgctgaatgcatcgatatcatgctggaaacatgattggaggtgacatagattgcagctacctttacatctcaagtaaaattccagttacccctttttgcgcctgtaaagttaattttccgcaaggacagatctgacaaacatgataataggaatgactgtagattcgaacattggatgggccttgctcctgctgctgcgctcgctattgtatcggtttatgagccaacgtagtagtgaatatgtgccttcaactttatttttctccacaattattgatactgttgtaaaacaagtaggaaggcatagtttatgttgaatagcgtttttgcaagactttgtgctaactcacctatatgattgtaatttgttggttaatagttttggtcggacatgttacgttggataattaatctggtcttgtgatagaataatttatgcagaattttttctttgttaagccaaatatgttgtgcacatttgacacaaactactacggtagaatttcagaagtgaataatgttcgatgtattgagatctgggttatggagtttatgttgaatagcgtttttgcaagactttgtgctaactcacctatatgattgtaatttgttggttcatagttttggtcggacatgttaccttggataattaatctagtcttgtgatagaataatttatggataattttttctttgttaagccaaatatgttgtgcacatttgacacaaactactaaggtagaatttcagaagtgaataatgttcgatgtattgagatctgggttatggatgacaggtgtacttgcgagaattgcaatggtatcctactgctccagaacaggtaaacatggtcactccatccgcaaagaagaatcatgtgttcaaccagtgtcaattcaacagaataaagaagaatcatgtgttcaaccagtgtcaattcaacagaataatctgttcagcagtttgctttatccgtgctcattgtactacgaacctccgccgtctacttgaatatcaagcctccacgggcagcaaagaatggcgcaaattattgagactcgacagcaatgagcttgatcagtatgttcagggacggtccggaggtgtccttgagggggtcgccgatgacggcagctttctgagcgtgcgacccaaccgaggctatatctaacaaactgcactatgtaaacagtctacattgtaaaataatattttacacggttatatacactctatttaagcatgatcttagtgtggttgtttaaacatggtcttagtgtggttggatgcaccacttgcccttgttaacaaggcccgtgttaacaaggtgaaaaaaaataacttcagatgtatgtcttgaaatagtgccaaaccacatacattaacaaagggtgtg

SEQ ID NO: 34464 - DNA, 2064 bp, Zea Mays
attgctgttttttttgtaacttacgtggtggtagattatgagagacgtagttattgagattttctacgaaagacatcttgactatttggttgatgtaatagcatcctcttgtcccccgaggagcttgtctcgatcatcatctaactcggtacatgttggtggaaatgctgaaggacactgtatcaagcctgagattttgttaaatgtttgtgaactgctgtgcttttgtgttgttcatcatccctacagaattaagtgtaattttcttatgaacaatgctatcgagaaaatccttacattgactcaacgaagggagaagtttttggttgtagcagctgttagatttatgcgtactattatatccagaaatgatgaccatctcattcgccatgttgtgaagttcaacttgctgaaaccaataattgatgtctttgttgacaatggggagagatataacatgctacattcaggagtactcgaattgttggaatacatacggaaggaaaatataaaaactctcattatctatgctattgagtctttctgggatgaacttgccatctttgaacactttggaagtattcaggccttcaaactcaatacctggagagcgctgaaccaaggttgaatgctagtgtgcctgacatgagaaagaaggcagaacaaagaggtcttgagaaggaagaggaagactacttcaatgaggacagtgatgaagaagattcaggctccggccggcgggctaaacatgcacagaaccaaaataacaagcctaagtccaaggtccccaatggaagtgaagctgatgacactgatggcgcctctaggcctaaatctgctggacttgtggactatgacgatgatgacgatgaggacttcaatccaccaccaaaggagccttctaggcctgcagaggatgatgtgcccttaaacatatccccgttgaagcggaagccagtgaatgcagtggatgggaaacattcagacggagagggtcgcaggaggcaaaaaatagaaactagaattagttgtgctaaaattgctgctgttactagtacagctattaagcacacagatctacaaaacaagtatgcttcccacttgcttacgtcagccacaccaagtactgaagccaatggtatttttagtgaacatggtactaactatgaggagcaacaacatcctatggagaacacagaaacttcacgacaaactggtggtgattgtataaaagatgtgggcagtatgtctcccgagaaggccgtaaatactaccaatacaagcgattcggagccttattcagtaagatgactactacacagctggttggtccatgtacccatcctgtgctgtggtcaacaggaaggaatcagaatgtgtttggctccaagcgctgaatgcatcgatatcatgctggaaacatgattggaggtgacatagattgcagctacctttacatctcaagtgtacttgcgagaattgcaatggtatcctactgctccagaacaggtaaacatggtcactccatccgcaaagaagaatcatgtgttcaaccagtgtcaattcaacagaataaagaagaatcatgtgttcaaccagtgtcaattcaacagaataatctgttcagcagtttgctttatccgtgctcattgtactacgaacctccgccgtctacttgaatatcaagcctccacgggcagcaaagaatggcgcaaattattgagactcgacagcaatgagcttgatcagtatgttcagggacggtccggaggtgtccttgagggggtcgccgatgacggcagctttctgagcgtgcgacccaaccgaggctatatctaacaaactgcactatgtaaacagtctacattgtaaaataatattttacacggttatatacactctatttaagcatgatcttagtgtggttgtttaaacatggtcttagtgtggttggatgcaccacttgcccttgttaacaaggcccgtgttaacaaggtgaaaaaaaataacttcagatgtatgtcttgaaatagtgccaaaccacatacattaacaaagggtgtg

SEQ ID NO: 34465 - DNA, 2302 bp, Zea Mays
gacttcagattgctgaggatcttgttatagggatctttcaggtgaaggagtttttgaaataatttctgatgtgttgcagagtcaagatagaaaaatcatttcagctgggacagatatccttatactttttcttaatcaggaccctaacctattgaggtcatatattgtccaacaagaaggaaattctcttctaggacttctggttaaaggcatggtaactgacttcagtgaggaaatgcactgccagtttctagaaattctacgcatattgatggattcttttactacgtctggagcacatagagacgtagttattgagattttctacgaaagacatcttgactatttggttgatgtaatagcatcctcttgtcccccgaggagcttgtctcgatcatcatctaactcggtacatgttggtggaaatgctgaaggacactgtatcaagcctgagattttgttaaatgtttgtgaactgctgtgcttttgtgttgttcatcatccctacagaattaagtgtaattttcttatgaacaatgctatcgagaaaatccttacattgactcaacgaagggagaagtttttggttgtagcagctgttagatttatgcgtactattatatccagaaatgatgaccatctcattcgccatgttgtgaagttcaacttgctgaaaccaataattgatgtctttgttgacaatggggagagatataacatgctacattcaggagtactcgaattgttggaatacatacggaaggaaaatataaaaactctcattatctatgctattgagtctttctgggatgaacttgccatctttgaacactttggaagtattcaggccttcaaactcaagtatcaacagtacctggagagcgctgaaccaaggttgaatgctagtgtgcctgacatgagaaagaaggcagaacaaagaggtcttgagaaggaagaggaagactacttcaatgaggacagtgatgaagaagattcaggctccggccggcgggctaaacatgcacagaaccaaaataacaagcctaagtccaaggtccccaatggaagtgaagctgatgacactgatggcgcctctaggcctaaatctgctggacttgtggactatgacgatgatgacgatgaggacttcaatccaccaccaaaggagccttctaggcctgcagaggatgatgtgcccttaaacatatccccgttgaagcggaagccagtgaatgcagtggatgggaaacattcagacggagagggtcgcaggaggcaaaaaatagaaactagaattagttgtgctaaaattgctgctgttactagtacagctattaagcacacagatctacaaaacaagtatgcttcccacttgcttacgtcagccacaccaagtactgaagccaatggtatttttagtgaacatggtactaactatgaggagcaacaacatcctatggagaacacagaaacttcacgacaaactggtggtgattgtataaaagatgtgggcagtatgtctcccgagaaggccgtaaatactaccaatacaagcgattcggagccttattcagtaagatgactactacacagctggttggtccatgtacccatcctgtgctgtggtcaacaggaaggaatcagaatgtgtttggctccaagcgctgaatgcatcgatatcatgctggaaacatgattggaggtgtacttgcgagaattgcaatggtatcctactgctccagaacaggtaaacatggtcactccatccgcaaagaagaatcatgtgttcaaccagtgtcaattcaacagaataaagaagaatcatgtgttcaaccagtgtcaattcaacagaataatctgttcagcagtttgctttatccgtgctcattgtactacgaacctccgccgtctacttgaatatcaagcctccacgggcagcaaagaatggcgcaaattattgagactcgacagcaatgagcttgatcagtatgttcagggacggtccggaggtgtccttgagggggtcgccgatgacggcagctttctgagcgtgcgacccaaccgaggctatatctaacaaactgcactatgtaaacagtctacattgtaaaataatattttacacggttatatacactctatttaagcatgatcttagtgtggttgtttaaacatggtcttagtgtggttggatgcaccacttgcccttgttaacaaggcccgtgttaacaaggtgaaaaaaaataacttcagatgtatgtcttgaaatagtgccaaaccacatacattaacaaagggtgtg

SEQ ID NO: 34466 - DNA, 2386 bp, Zea Mays
ctttgttcttgttctgttcttgcatgaattttgcacacttagtaagagtctaccacttgttcagcaactgcgactgtttcgggatctttcaggtgaaggagtttttgaaataatttctgatgtgttgcagagtcaagatagaaaaatcatttcagctgggacagatatccttatactttttcttaatcaggaccctaacctattgaggtcatatattgtccaacaagaaggaaattctcttctaggacttctggttaaaggcatggtaactgacttcagtgaggaaatgcactgccagtttctagaaattctacgcatattgatggattcttttactacgtctggagcacatagagacgtagttattgagattttctacgaaagacatcttgactatttggttgatgtaatagcatcctcttgtcccccgaggagcttgtctcgatcatcatctaactcggtacatgttggtggaaatgctgaaggacactgtatcaagcctgagattttgttaaatgtttgtgaactgctgtgcttttgtgttgttcatcatccctacagaattaagtgtaattttcttatgaacaatgctatcgagaaaatccttacattgactcaacgaagggagaagtttttggttgtagcagctgttagatttatgcgtactattatatccagaaatgatgaccatctcattcgccatgttgtgaagttcaacttgctgaaaccaataattgatgtctttgttgacaatggggagagatataacatgctacattcaggagtactcgaattgttggaatacatacggaaggaaaatataaaaactctcattatctatgctattgagtctttctgggatgaacttgccatctttgaacactttggaagtattcaggccttcaaactcaagtatcaacagtacctggagagcgctgaaccaaggttgaatgctagtgtgcctgacatgagaaagaaggcagaacaaagaggtcttgagaaggaagaggaagactacttcaatgaggacagtgatgaagaagattcaggctccggccggcgggctaaacatgcacagaaccaaaataacaagcctaagtccaaggtccccaatggaagtgaagctgatgacactgatggcgcctctaggcctaaatctgctggacttgtggactatgacgatgatgacgatgaggacttcaatccaccaccaaaggagccttctaggcctgcagaggatgatgtgcccttaaacatatccccgttgaagcggaagccagtgaatgcagtggatgggaaacattcagacggagagggtcgcaggaggcaaaaaatagaaactagaattagttgtgctaaaattgctgctgttactagtacagctattaagcacacagatctacaaaacaagtatgcttcccacttgcttacgtcagccacaccaagtactgaagccaatggtatttttagtgaacatggtactaactatgaggagcaacaacatcctatggagaacacagaaacttcacgacaaactggtggtgattgtataaaagatgtgggcagtatgtctcccgagaaggccgtaaatactaccaatacaagcgattcggagccttattcagtaagatgactactacacagctggttggtccatgtacccatcctgtgctgtggtcaacaggaaggaatcagaatgtgtttggctccaagcgctgaatgcatcgatatcatgctggaaacatgattggaggtgacatagattgcagctacctttacatctcaagtgtacttgcgagaattgcaatggtatcctactgctccagaacaggtaaacatggtcactccatccgcaaagaagaatcatgtgttcaaccagtgtcaattcaacagaataaagaagaatcatgtgttcaaccagtgtcaattcaacagaataatctgttcagcagtttgctttatccgtgctcattgtactacgaacctccgccgtctacttgaatatcaagcctccacgggcagcaaagaatggcgcaaattattgagactcgacagcaatgagcttgatcagtatgttcagggacggtccggaggtgtccttgagggggtcgccgatgacggcagctttctgagcgtgcgacccaaccgaggctatatctaacaaactgcactatgtaaacagtctacattgtaaaataatattttacacggttatatacactctatttaagcatgatcttagtgtggttgtttaaacatggtcttagtgtggttggatgcaccacttgcccttgttaacaaggcccgtgttaacaaggtgaaaaaaaataacttcagatgtatgtcttgaaatagtgccaaaccacatacattaacaaagggtgtg

SEQ ID NO: 34467 - DNA, 4288 bp, Zea Mays
atggcagaggagaggtgggccttggttggaggacaaggccttgatggggagaagcagacagaggcaggagaaaaaatgagtgcagggtggaaaaaggcgcgtgtcaaagtataccgtttggctgatggtgggaagtgggacgatcaaggaacaggttatgtttctattgattacattgagggttcaaaagaactaggtttgactgttttagatgaagatgacaatgatacactacttatgcacaacatcacatctgacgatatttacagaaaacaagaagaaacaatcatttcatggagagatcgtgaagcagcaacagacttagcgttaagctttcaggaagctgctggatgctcctacatatgggaacacatatgcgatattcagagaaaccttcagttcagtaaccttggtgctctggaagttggtcctcgtcaatcatcagaatctctagaagcctctagaataatgcattctaatgatgattcattccgctctgccaacggcggcgaattcagggagcttcctcctgttgagttgtctaatcttccttttattttgaagactgtattggaggctggcattacagatcagatgcacgtggcagagttgataacacaagataatgactttttcccaaagatagtggacattttcagaatgtgcgaggatttagagaacatagatgatcttcacatgattttcaaattggtcaagggaataatattgttgaacagtccatcgatctttgacaagattttctctgatgagtttattcttgacataataggtgcccttgaatatgatccagaggttccaagagtgcaaaatcaccgtgcttttctgaaagatcatgtagttttcaaagaggccatacgtattgaaaatgtttctgttgtttcaaagattcatcaaacatacagaatcggctatcttaaggatgttatactaccacgaatactggatgatgccactctagcaagtctgaacacaatgatacactcaaataatgcttcggttatttccctgctaaaggatgacacactctttattagacgactatttgccaggatgaggtcatcagatatttcaatggaatcaaaacgagaattggttctgttcttgcatgaattttgcacacttagtaagagtctaccacttgttcagcaactgcgactgtttcgggatctttcaggtgaaggagtttttgaaataatttctgatgtgttgcagagtcaagatagaaaaatcatttcagctgggacagatatccttatactttttcttaatcaggaccctaacctattgaggtcatatattgtccaacaagaaggaaattctcttctaggacttctggttaaaggcatggtaactgacttcagtgaggaaatgcactgccagtttctagaaattctacgcatattgatggattcttttactacgtctggagcacatagagacgtagttattgagattttctacgaaagacatcttgactatttggttgatgtaatagcatcctcttgtcccccgaggagcttgtctcgatcatcatctaactcggtacatgttggtggaaatgctgaaggacactgtatcaagcctgagattttgttaaatgtttgtgaactgctgtgcttttgtgttgttcatcatccctacagaattaagtactgctctgtacaaacttccattataccatgatcttctatgatctttatatgcatgttcctaaatgtttcttaatcttgtataggtgtaattttcttatgaacaatgctatcgagaaaatccttacattgactcaacgaagggagaagtttttggttgtagcagctgttagatttatgcgtactattatatccagaaatgatgaccatctcattcgccatgttgtgaagttcaacttgctgaaaccaataattgatgtctttgttgacaatggggagagatataacatgctacattcaggagtactcgaattgttggaatacatacggaaggaaaatataaaaactctcattatctatgctattgagtctttctgggatgaacttgccatctttgaacactttggaagtattcaggccttcaaactcaatacctggagagcgctgaaccaaggttgaatgctagtgtgcctgacatgagaaagaaggcagaacaaagaggtcttgagaaggaagaggaagactacttcaatgaggacagtgatgaagaagattcaggctccggccggcgggctaaacatgcacagaaccaaaataacaagcctaagtccaaggtccccaatggaagtgaagctgatgacactgatggcgcctctaggcctaaatctgctggacttgtggactatgacgatgatgacgatgaggacttcaatccaccaccaaaggagccttctaggcctgcagaggatgatgtgcccttaaacatatccccgttgaagcggaagccagtgaatgcagtggatgggaaacattcagacggagagggtcgcaggaggcaaaaaatagaaactagaattagttgtgctaaaattgctgctgttactagtacagctattaagcacacagatctacaaaacaagtatgcttcccacttgcttacgtcagccacaccaagtactgaagccaatggtatttttagtgaacatggtactaactatgaggagcaacaacatcctatggagaacacagaaacttcacgacaaactggtggtgattgtataaaagatgtgggcagtatgtctcccgagaaggccgtaaatactaccaatacaagcgattcggagccttattcagtaagatgactactacacagctggttggtccatgtacccatcctgtgctgtggtcaacaggaaggaatcagaatgtgtttggctccaagcgctgaatgcatcgatatcatgctggaaacatgattggaggtgacatagattgcagctacctttacatctcaagtaaaattccagttacccctttttgcgcctgtaaagttaattttccgcaaggacagatctgacaaacatgataataggaatgactgtagattcgaacattggatgggccttgctcctgctgctgcgctcgctattgtatcggtttatgagccaacgtagtagtgaatatgtgccttcaactttatttttctccacaattattgatactgttgtaaaacaagtaggaaggcatagtttatgttgaatagcgtttttgcaagactttgtgctaactcacctatatgattgtaatttgttggttaatagttttggtcggacatgttacgttggataattaatctggtcttgtgatagaataatttatgcagaattttttctttgttaagccaaatatgttgtgcacatttgacacaaactactacggtagaatttcagaagtgaataatgttcgatgtattgagatctgggttatggagtttatgttgaatagcgtttttgcaagactttgtgctaactcacctatatgattgtaatttgttggttcatagttttggtcggacatgttaccttggataattaatctagtcttgtgatagaataatttatggataattttttctttgttaagccaaatatgttgtgcacatttgacacaaactactaaggtagaatttcagaagtgaataatgttcgatgtattgagatctgggttatggatgacaggtgtacttgcgagaattgcaatggtatcctactgctccagaacaggtaaacatggtcactccatccgcaaagaagaatcatgtgttcaaccagtgtcaattcaacagaataaagaagaatcatgtgttcaaccagtgtcaattcaacagaataatctgttcagcagtttgctttatccgtgctcattgtactacgaacctccgccgtctacttgaatatcaagcctccacgggcagcaaagaatggcgcaaattattgagactcgacagcaatgagcttgatcagtatgttcagggacggtccggaggtgtccttgagggggtcgccgatgacggcagctttctgagcgtgcgacccaaccgaggctatatctaacaaactgcactatgtaaacagtctacattgtaaaataatattttacacggttatatacactctatttaagcatgatcttagtgtggttgtttaaacatggtcttagtgtggttggatgcaccacttgcccttgttaacaaggcccgtgttaacaaggtgaaaaaaaataacttcagatgtatgtcttgaaatagtgccaaaccacatacattaacaaagggtgtg

SEQ ID NO: 34468 - DNA, 3636 bp, Zea Mays
atggcagaggagaggtgggccttggttggaggacaaggccttgatggggagaagcagacagaggcaggagaaaaaatgagtgcagggtggaaaaaggcgcgtgtcaaagtataccgtttggctgatggtgggaagtgggacgatcaaggaacaggttatgtttctattgattacattgagggttcaaaagaactaggtttgactgttttagatgaagatgacaatgatacactacttatgcacaacatcacatctgacgatatttacagaaaacaagaagaaacaatcatttcatggagagatcgtgaagcagcaacagacttagcgttaagctttcaggaagctgctggatgctcctacatatgggaacacatatgcgatattcagagaaaccttcagttcagtaaccttggtgctctggaagttggtcctcgtcaatcatcagaatctctagaagcctctagaataatgcattctaatgatgattcattccgctctgccaacggcggcgaattcagggagcttcctcctgttgagttgtctaatcttccttttattttgaagactgtattggaggctggcattacagatcagatgcacgtggcagagttgataacacaagataatgactttttcccaaagatagtggacattttcagaatgtgcgaggatttagagaacatagatgatcttcacatgattttcaaattggtcaagggaataatattgttgaacagtccatcgatctttgacaagattttctctgatgagtttattcttgacataataggtgcccttgaatatgatccagaggttccaagagtgcaaaatcaccgtgcttttctgaaagatcatgtagttttcaaagaggccatacgtattgaaaatgtttctgttgtttcaaagattcatcaaacatacagaatcggctatcttaaggatgttatactaccacgaatactggatgatgccactctagcaagtctgaacacaatgatacactcaaataatgcttcggttatttccctgctaaaggatgacacactctttattagacgactatttgccaggatgaggtcatcagatatttcaatggaatcaaaacgagaattggttctgttcttgcatgaattttgcacacttagtaagagtctaccacttgttcagcaactgcgactgtttcggctatctgtactacaaaaacaaaaagaaatatgaccatataataccggtgtgcctgagcttggtgttatcattgttttctctgcctggcagccctgtgctttgtctcgctatcatttgacttcagattgctgaggatcttgttatagggatctttcaggtgaaggagtttttgaaataatttctgatgtgttgcagagtcaagatagaaaaatcatttcagctgggacagatatccttatactttttcttaatcaggaccctaacctattgaggtcatatattgtccaacaagaaggaaattctcttctaggacttctggttaaaggcatggtaactgacttcagtgaggaaatgcactgccagtttctagaaattctacgcatattgatggattcttttactacgtctggagcacatagagacgtagttattgagattttctacgaaagacatcttgactatttggttgatgtaatagcatcctcttgtcccccgaggagcttgtctcgatcatcatctaactcggtacatgttggtggaaatgctgaaggacactgtatcaagcctgagattttgttaaatgtttgtgaactgctgtgcttttgtgttgttcatcatccctacagaattaagtgtaattttcttatgaacaatgctatcgagaaaatccttacattgactcaacgaagggagaagtttttggttgtagcagctgttagatttatgcgtactattatatccagaaatgatgaccatctcattcgccatgttgtgaagttcaacttgctgaaaccaataattgatgtctttgttgacaatggggagagatataacatgctacattcaggagtactcgaattgttggaatacatacggaaggaaaatataaaaactctcattatctatgctattgagtctttctgggatgaacttgccatctttgaacactttggaagtattcaggccttcaaactcaagtatcaacagtacctggagagcgctgaaccaaggttgaatgctagtgtgcctgacatgagaaagaaggcagaacaaagaggtcttgagaaggaagaggaagactacttcaatgaggacagtgatgaagaagattcaggctccggccggcgggctaaacatgcacagaaccaaaataacaagcctaagtccaaggtccccaatggaagtgaagctgatgacactgatggcgcctctaggcctaaatctgctggacttgtggactatgacgatgatgacgatgaggacttcaatccaccaccaaaggagccttctaggcctgcagaggatgatgtgcccttaaacatatccccgttgaagcggaagccagtgaatgcagtggatgggaaacattcagacggagagggtcgcaggaggcaaaaaatagaaactagaattagttgtgctaaaattgctgctgttactagtacagctattaagcacacagatctacaaaacaagtatgcttcccacttgcttacgtcagccacaccaagtactgaagccaatggtatttttagtgaacatggtactaactatgaggagcaacaacatcctatggagaacacagaaacttcacgacaaactggtggtgattgtataaaagatgtgggcagtatgtctcccgagaaggccgtaaatactaccaatacaagcgattcggagccttattcagtaagatgactactacacagctggttggtccatgtacccatcctgtgctgtggtcaacaggaaggaatcagaatgtgtttggctccaagcgctgaatgcatcgatatcatgctggaaacatgattggaggtgacatagattgcagctacctttacatctcaagtgtacttgcgagaattgcaatggtatcctactgctccagaacaggtaaacatggtcactccatccgcaaagaagaatcatgtgttcaaccagtgtcaattcaacagaataaagaagaatcatgtgttcaaccagtgtcaattcaacagaataatctgttcagcagtttgctttatccgtgctcattgtactacgaacctccgccgtctacttgaatatcaagcctccacgggcagcaaagaatggcgcaaattattgagactcgacagcaatgagcttgatcagtatgttcagggacggtccggaggtgtccttgagggggtcgccgatgacggcagctttctgagcgtgcgacccaaccgaggctatatctaacaaactgcactatgtaaacagtctacattgtaaaataatattttacacggttatatacactctatttaagcatgatcttagtgtggttgtttaaacatggtcttagtgtggttggatgcaccacttgcccttgttaacaaggcccgtgttaacaaggtgaaaaaaaataacttcagatgtatgtcttgaaatagtgccaaaccacatacattaacaaagggtgtg

SEQ ID NO: 34469 - DNA, 3471 bp, Zea Mays
atggcagaggagaggtgggccttggttggaggacaaggccttgatggggagaagcagacagaggcaggagaaaaaatgagtgcagggtggaaaaaggcgcgtgtcaaagtataccgtttggctgatggtgggaagtgggacgatcaaggaacaggttatgtttctattgattacattgagggttcaaaagaactaggtttgactgttttagatgaagatgacaatgatacactacttatgcacaacatcacatctgacgatatttacagaaaacaagaagaaacaatcatttcatggagagatcgtgaagcagcaacagacttagcgttaagctttcaggaagctgctggatgctcctacatatggtgatggatgcaagagctatggtgcagttaccaagtttttgttcaattactcccttttgatttatttttgtgttctttgttggtgctgtgcagggaacacatatgcgatattcagagaaaccttcagttcagtaaccttggtgatgattcattccgctctgccaacggcggcgaattcagggagcttcctcctgttgagttgtctaatcttccttttattttgaagactgtattggaggctggcattacagatcagatgcacgtggcagagttgataacacaagataatgactttttcccaaagatagtggacattttcagaatgtgcgaggatttagagaacatagatgatcttcacatgattttcaaattggtcaagggaataatattgttgaacagtccatcgatctttgacaagattttctctgatgagtttattcttgacataataggtgcccttgaatatgatccagaggttccaagagtgcaaaatcaccgtgcttttctgaaagatcatgtagttttcaaagaggccatacgtattgaaaatgtttctgttgtttcaaagattcatcaaacatacagaatcggctatcttaaggatgttatactaccacgaatactggatgatgccactctagcaagtctgaacacaatgatacactcaaataatgcttcggttatttccctgctaaaggatgacacactctttattagacgactatttgccaggatgaggtcatcagatatttcaatggaatcaaaacgagaattggttctgttcttgcatgaattttgcacacttagtaagagtctaccacttgttcagcaactgcgactgtttcgggatctttcaggtgaaggagtttttgaaataatttctgatgtgttgcagagtcaagatagaaaaatcatttcagctgggacagatatccttatactttttcttaatcaggaccctaacctattgaggtcatatattgtccaacaagaaggaaattctcttctaggacttctggttaaaggcatggtaactgacttcagtgaggaaatgcactgccagtttctagaaattctacgcatattgatggattcttttactacgtctggagcacatagagacgtagttattgagattttctacgaaagacatcttgactatttggttgatgtaatagcatcctcttgtcccccgaggagcttgtctcgatcatcatctaactcggtacatgttggtggaaatgctgaaggacactgtatcaagcctgagattttgttaaatgtttgtgaactgctgtgcttttgtgttgttcatcatccctacagaattaagtgtaattttcttatgaacaatgctatcgagaaaatccttacattgactcaacgaagggagaagtttttggttgtagcagctgttagatttatgcgtactattatatccagaaatgatgaccatctcattcgccatgttgtgaagttcaacttgctgaaaccaataattgatgtctttgttgacaatggggagagatataacatgctacattcaggagtactcgaattgttggaatacatacggaaggaaaatataaaaactctcattatctatgctattgagtctttctgggatgaacttgccatctttgaacactttggaagtattcaggccttcaaactcaagtatcaacagtacctggagagcgctgaaccaaggttgaatgctagtgtgcctgacatgagaaagaaggcagaacaaagaggtcttgagaaggaagaggaagactacttcaatgaggacagtgatgaagaagattcaggctccggccggcgggctaaacatgcacagaaccaaaataacaagcctaagtccaaggtccccaatggaagtgaagctgatgacactgatggcgcctctaggcctaaatctgctggacttgtggactatgacgatgatgacgatgaggacttcaatccaccaccaaaggagccttctaggcctgcagaggatgatgtgcccttaaacatatccccgttgaagcggaagccagtgaatgcagtggatgggaaacattcagacggagagggtcgcaggaggcaaaaaatagaaactagaattagttgtgctaaaattgctgctgttactagtacagctattaagcacacagatctacaaaacaagtatgcttcccacttgcttacgtcagccacaccaagtactgaagccaatggtatttttagtgaacatggtactaactatgaggagcaacaacatcctatggagaacacagaaacttcacgacaaactggtggtgattgtataaaagatgtgggcagtatgtctcccgagaaggccgtaaatactaccaatacaagcgattcggagccttattcagtaagatgactactacacagctggttggtccatgtacccatcctgtgctgtggtcaacaggaaggaatcagaatgtgtttggctccaagcgctgaatgcatcgatatcatgctggaaacatgattggaggtgacatagattgcagctacctttacatctcaagtaaacatggtcactccatccgcaaagaagaatcatgtgttcaaccagtgtcaattcaacagaataaagaagaatcatgtgttcaaccagtgtcaattcaacagaataatctgttcagcagtttgctttatccgtgctcattgtactacgaacctccgccgtctacttgaatatcaagcctccacgggcagcaaagaatggcgcaaattattgagactcgacagcaatgagcttgatcagtatgttcagggacggtccggaggtgtccttgagggggtcgccgatgacggcagctttctgagcgtgcgacccaaccgaggctatatctaacaaactgcactatgtaaacagtctacattgtaaaataatattttacacggttatatacactctatttaagcatgatcttagtgtggttgtttaaacatggtcttagtgtggttggatgcaccacttgcccttgttaacaaggcccgtgttaacaaggtgaaaaaaaataacttcagatgtatgtcttgaaatagtgccaaaccacatacattaacaaagggtgtg

SEQ ID NO: 34470 - DNA, 3423 bp, Zea Mays
atggcagaggagaggtgggccttggttggaggacaaggccttgatggggagaagcagacagaggcaggagaaaaaatgagtgcagggtggaaaaaggcgcgtgtcaaagtataccgtttggctgatggtgggaagtgggacgatcaaggaacaggttatgtttctattgattacattgagggttcaaaagaactaggtttgactgttttagatgaagatgacaatgatacactacttatgcacaacatcacatctgacgatatttacagaaaacaagaagaaacaatcatttcatggagagatcgtgaagcagcaacagacttagcgttaagctttcaggaagctgctggatgctcctacatatgggaacacatatgcgatattcagagaaaccttcagttcagtaaccttggtgatgattcattccgctctgccaacggcggcgaattcagggagcttcctcctgttgagttgtctaatcttccttttattttgaagactgtattggaggctggcattacagatcagatgcacgtggcagagttgataacacaagataatgactttttcccaaagatagtggacattttcagaatgtgcgaggatttagagaacatagatgatcttcacatgattttcaaattggtcaagggaataatattgttgaacagtccatcgatctttgacaagattttctctgatgagtttattcttgacataataggtgcccttgaatatgatccagaggttccaagagtgcaaaatcaccgtgcttttctgaaagatcatgtagttttcaaagaggccatacgtattgaaaatgtttctgttgtttcaaagattcatcaaacatacagaatcggctatcttaaggatgttatactaccacgaatactggatgatgccactctagcaagtctgaacacaatgatacactcaaataatgcttcggttatttccctgctaaaggatgacacactctttattagacgactatttgccaggatgaggtcatcagatatttcaatggaatcaaaacgagaattggttctgttcttgcatgaattttgcacacttagtaagagtctaccacttgttcagcaactgcgactgtttcgggatctttcaggtgaaggagtttttgaaataatttctgatgtgttgcagagtcaagatagaaaaatcatttcagctgggacagatatccttatactttttcttaatcaggaccctaacctattgaggtcatatattgtccaacaagaaggaaattctcttctaggacttctggttaaaggcatggtaactgacttcagtgaggaaatgcactgccagtttctagaaattctacgcatattgatggattcttttactacgtctggagcacatagagacgtagttattgagattttctacgaaagacatcttgactatttggttgatgtaatagcatcctcttgtcccccgaggagcttgtctcgatcatcatctaactcggtacatgttggtggaaatgctgaaggacactgtatcaagcctgagattttgttaaatgtttgtgaactgctgtgcttttgtgttgttcatcatccctacagaattaagtgtaattttcttatgaacaatgctatcgagaaaatccttacattgactcaacgaagggagaagtttttggttgtagcagctgttagatttatgcgtactattatatccagaaatgatgaccatctcattcgccatgttgtgaagttcaacttgctgaaaccaataattgatgtctttgttgacaatggggagagatataacatgctacattcaggagtactcgaattgttggaatacatacggaaggaaaatataaaaactctcattatctatgctattgagtctttctgggatgaacttgccatctttgaacactttggaagtattcaggccttcaaactcaagtatcaacagtacctggagagcgctgaaccaaggttgaatgctagtgtgcctgacatgagaaagaaggcagaacaaagaggtcttgagaaggaagaggaagactacttcaatgaggacagtgatgaagaagattcaggctccggccggcgggctaaacatgcacagaaccaaaataacaagcctaagtccaaggtccccaatggaagtgaagctgatgacactgatggcgcctctaggcctaaatctgctggacttgtggactatgacgatgatgacgatgaggacttcaatccaccaccaaaggagccttctaggcctgcagaggatgatgtgcccttaaacatatccccgttgaagcggaagccagtgaatgcagtggatgggaaacattcagacggagagggtcgcaggaggcaaaaaatagaaactagaattagttgtgctaaaattgctgctgttactagtacagctattaagcacacagatctacaaaacaagtatgcttcccacttgcttacgtcagccacaccaagtactgaagccaatggtatttttagtgaacatggtactaactatgaggagcaacaacatcctatggagaacacagaaacttcacgacaaactggtggtgattgtataaaagatgtgggcagtatgtctcccgagaaggccgtaaatactaccaatacaagcgattcggagccttattcagtaagatgactactacacagctggttggtccatgtacccatcctgtgctgtggtcaacaggaaggaatcagaatgtgtttggctccaagcgctgaatgcatcgatatcatgctggaaacatgattggaggtgacatagattgcagctacctttacatctcaagtgtacttgcgagaattgcaatggtatcctactgctccagaacaggtaaacatggtcactccatccgcaaagaagaatcatgtgttcaaccagtgtcaattcaacagaataaagaagaatcatgtgttcaaccagtgtcaattcaacagaataatctgttcagcagtttgctttatccgtgctcattgtactacgaacctccgccgtctacttgaatatcaagcctccacgggcagcaaagaatggcgcaaattattgagactcgacagcaatgagcttgatcagtatgttcagggacggtccggaggtgtccttgagggggtcgccgatgacggcagctttctgagcgtgcgacccaaccgaggctatatctaacaaactgcactatgtaaacagtctacattgtaaaataatattttacacggttatatacactctatttaagcatgatcttagtgtggttgtttaaacatggtcttagtgtggttggatgcaccacttgcccttgttaacaaggcccgtgttaacaaggtgaaaaaaaataacttcagatgtatgtcttgaaatagtgccaaaccacatacattaacaaagggtgtg

SEQ ID NO: 34471 - DNA, 3189 bp, Zea Mays
atggcagaggagaggtgggccttggttggaggacaaggccttgatggggagaagcagacagaggcaggagaaaaaatgagtgcagggtggaaaaaggcgcgtgtcaaagtataccgtttggctgatggtgggaagtgggacgatcaaggaacaggttatgtttctattgattacattgagggttcaaaagaactaggtttgactgttttagatgaagatgacaatgatacactacttatgcacaacatcacatctgacgatatttacagaaaacaagaagaaacaatcatttcatggagagatcgtgaagcagcaacagacttagcgttaagctttcaggaagctgctggatgctcctacatatgggaacacatatgcgatattcagagaaaccttcagttcagtaaccttggtgctctggaagttggtcctcgtcaatcatcagaatctctagaagcctctagaataatgcattctaatgatgattcattccgctctgccaacggcggcgaattcagggagcttcctcctgttgagttgtctaatcttccttttattttgaagactgtattggaggctggcattacagatcagatgcacgtggcagagttgataacacaagataatgactttttcccaaagatagtggacattttcagaatgtgcgaggatttagagaacatagatgatcttcacatgattttcaaattggtcaagggaataatattgttgaacagtccatcgatctttgacaagattttctctgatgagtttattcttgacataataggtgcccttgaatatgatccagaggttccaagagtgcaaaatcaccgtgcttttctgaaagatcatgtagttttcaaagaggccatacgtattgaaaatgtttctgttgtttcaaagattcatcaaacatacagaatcggctatcttaaggatgttatactaccacgaatactggatgatgccactctagcaagtctgaacacaatgatacactcaaataatgcttcggttatttccctgctaaaggatgacacactctttattagacgactatttgccaggatgaggtcatcagatatttcaatggaatcaaaacgagaattggttctgttcttgcatgaattttgcacacttagtaagagtctaccacttgttcagcaactgcgactgtttcgggatctttcaggtgaaggagtttttgaaataatttctgatgtgttgcagagtcaagatagaaaaatcatttcagctgggacagatatccttatactttttcttaatcaggaccctaacctattgaggtcatatattgtccaacaagaaggaaattctcttctaggacttctggttaaaggcatggtaactgacttcagtgaggaaatgcactgccagtttctagaaattctacgcatattgatggattcttttactacgtctggagcacatagagacgtagttattgagattttctacgaaagacatcttgactatttggttgatgtaatagcatcctcttgtcccccgaggagcttgtctcgatcatcatctaactcggatgaccatctcattcgccatgttgtgaagttcaacttgctgaaaccaataattgatgtctttgttgacaatggggagagatataacatgctacattcaggagtactcgaattgttggaatacatacggaaggaaaatataaaaactctcattatctatgctattgagtctttctgggatgaacttgccatctttgaacactttggaagtattcaggccttcaaactcaagtatcaacagtacctggagagcgctgaaccaaggttgaatgctagtgtgcctgacatgagaaagaaggcagaacaaagaggtcttgagaaggaagaggaagactacttcaatgaggacagtgatgaagaagattcaggctccggccggcgggctaaacatgcacagaaccaaaataacaagcctaagtccaaggtccccaatggaagtgaagctgatgacactgatggcgcctctaggcctaaatctgctggacttgtggactatgacgatgatgacgatgaggacttcaatccaccaccaaaggagccttctaggcctgcagaggatgatgtgcccttaaacatatccccgttgaagcggaagccagtgaatgcagtggatgggaaacattcagacggagagggtcgcaggaggcaaaaaatagaaactagaattagttgtgctaaaattgctgctgttactagtacagctattaagcacacagatctacaaaacaagtatgcttcccacttgcttacgtcagccacaccaagtactgaagccaatggtatttttagtgaacatggtactaactatgaggagcaacaacatcctatggagaacacagaaacttcacgacaaactggtggtgattgtataaaagatgtgggcagtatgtctcccgagaaggccgtaaatactaccaatacaagcgattcggagccttattcagtaagatgactactacacagctggttggtccatgtacccatcctgtgctgtggtcaacaggaaggaatcagaatgtgtttggctccaagcgctgaatgcatcgatatcatgctggaaacatgattggaggtaaacatggtcactccatccgcaaagaagaatcatgtgttcaaccagtgtcaattcaacagaataaagaagaatcatgtgttcaaccagtgtcaattcaacagaataatctgttcagcagtttgctttatccgtgctcattgtactacgaacctccgccgtctacttgaatatcaagcctccacgggcagcaaagaatggcgcaaattattgagactcgacagcaatgagcttgatcagtatgttcagggacggtccggaggtgtccttgagggggtcgccgatgacggcagctttctgagcgtgcgacccaaccgaggctatatctaacaaactgcactatgtaaacagtctacattgtaaaataatattttacacggttatatacactctatttaagcatgatcttagtgtggttgtttaaacatggtcttagtgtggttggatgcaccacttgcccttgttaacaaggcccgtgttaacaaggtgaaaaaaaataacttcagatgtatgtcttgaaatagtgccaaaccacatacattaacaaagggtgtg

SEQ ID NO: 34472 - DNA, 4146 bp, Zea Mays
atggcagaggagaggtgggccttggttggaggacaaggccttgatggggagaagcagacagaggcaggagaaaaaatgagtgcagggtggaaaaaggcgcgtgtcaaagtataccgtttggctgatggtgggaagtgggacgatcaaggaacaggttatgtttctattgattacattgagggttcaaaagaactaggtttgactgttttagatgaagatgacaatgatacactacttatgcacaacatcacatctgacgatatttacagaaaacaagaagaaacaatcatttcatggagagatcgtgaagcagcaacagacttagcgttaagctttcaggaagctgctggatgctcctacatatgggaacacatatgcgatattcagagaaaccttcagttcagtaaccttggtgatgattcattccgctctgccaacggcggcgaattcagggagcttcctcctgttgagttgtctaatcttccttttattttgaagactgtattggaggctggcattacagatcagatgcacgtggcagagttgataacacaagataatgactttttcccaaagatagtggacattttcagaatgtgcgaggatttagagaacatagatgatcttcacatgattttcaaattggtcaagggaataatattgttgaacagtccatcgatctttgacaagattttctctgatgagtttattcttgacataataggtgcccttgaatatgatccagaggttccaagagtgcaaaatcaccgtgcttttctgaaagatcatgtagttttcaaagaggccatacgtattgaaaatgtttctgttgtttcaaagattcatcaaacatacagaatcggctatcttaaggatgttatactaccacgaatactggatgatgccactctagcaagtctgaacacaatgatacactcaaataatgcttcggttatttccctgctaaaggatgacacactctttattagacgactatttgccaggatgaggtcatcagatatttcaatggaatcaaaacgagaattggttctgttcttgcatgaattttgcacacttagtaagagtctaccacttgttcagcaactgcgactgtttcgggatctttcaggtgaaggagtttttgaaataatttctgatgtgttgcagagtcaagatagaaaaatcatttcagctgggacagatatccttatactttttcttaatcaggaccctaacctattgaggtcatatattgtccaacaagaaggaaattctcttctaggacttctggttaaaggcatggtaactgacttcagtgaggaaatgcactgccagtttctagaaattctacgcatattgatggattcttttactacgtctggagcacatagagacgtagttattgagattttctacgaaagacatcttgactatttggttgatgtaatagcatcctcttgtcccccgaggagcttgtctcgatcatcatctaactcggtacatgttggtggaaatgctgaaggacactgtatcaagcctgagattttgttaaatgtttgtgaactgctgtgcttttgtgttgttcatcatccctacagaattaagtgtaattttcttatgaacaatgctatcgagaaaatccttacattgactcaacgaagggagaagtttttggttgtagcagctgttagatttatgcgtactattatatccagaaatgatgaccatctcattcgccatgttgtgaagttcaacttgctgaaaccaataattgatgtctttgttgacaatggggagagatataacatgctacattcaggagtactcgaattgttggaatacatacggaaggaaaatataaaaactctcattatctatgctattgagtctttctgggatgaacttgccatctttgaacactttggaagtattcaggccttcaaactcaagtatcaacagtacctggagagcgctgaaccaaggttgaatgctagtgtgcctgacatgagaaagaaggcagaacaaagaggtcttgagaaggaagaggaagactacttcaatgaggacagtgatgaagaagattcaggctccggccggcgggctaaacatgcacagaaccaaaataacaagcctaagtccaaggtccccaatggaagtgaagctgatgacactgatggcgcctctaggcctaaatctgctggacttgtggactatgacgatgatgacgatgaggacttcaatccaccaccaaaggagccttctaggcctgcagaggatgatgtgcccttaaacatatccccgttgaagcggaagccagtgaatgcagtggatgggaaacattcagacggagagggtcgcaggaggcaaaaaatagaaactagaattagttgtgctaaaattgctgctgttactagtacagctattaagcacacagatctacaaaacaagtatgcttcccacttgcttacgtcagccacaccaagtactgaagccaatggtatttttagtgaacatggtactaactatgaggagcaacaacatcctatggagaacacagaaacttcacgacaaactggtggtgattgtataaaagatgtgggcagtatgtctcccgagaaggccgtaaatactaccaatacaagcgattcggagccttattcagtaagatgactactacacagctggttggtccatgtacccatcctgtgctgtggtcaacaggaaggaatcagaatgtgtttggctccaagcgctgaatgcatcgatatcatgctggaaacatgattggaggtgacatagattgcagctacctttacatctcaagtaaaattccagttacccctttttgcgcctgtaaagttaattttccgcaaggacagatctgacaaacatgataataggaatgactgtagattcgaacattggatgggccttgctcctgctgctgcgctcgctattgtatcggtttatgagccaacgtagtagtgaatatgtgccttcaactttatttttctccacaattattgatactgttgtaaaacaagtaggaaggcatagtttatgttgaatagcgtttttgcaagactttgtgctaactcacctatatgattgtaatttgttggttaatagttttggtcggacatgttacgttggataattaatctggtcttgtgatagaataatttatgcagaattttttctttgttaagccaaatatgttgtgcacatttgacacaaactactacggtagaatttcagaagtgaataatgttcgatgtattgagatctgggttatggagtttatgttgaatagcgtttttgcaagactttgtgctaactcacctatatgattgtaatttgttggttcatagttttggtcggacatgttaccttggataattaatctagtcttgtgatagaataatttatggataattttttctttgttaagccaaatatgttgtgcacatttgacacaaactactaaggtagaatttcagaagtgaataatgttcgatgtattgagatctgggttatggatgacaggtgtacttgcgagaattgcaatggtatcctactgctccagaacaggtaaacatggtcactccatccgcaaagaagaatcatgtgttcaaccagtgtcaattcaacagaataaagaagaatcatgtgttcaaccagtgtcaattcaacagaataatctgttcagcagtttgctttatccgtgctcattgtactacgaacctccgccgtctacttgaatatcaagcctccacgggcagcaaagaatggcgcaaattattgagactcgacagcaatgagcttgatcagtatgttcagggacggtccggaggtgtccttgagggggtcgccgatgacggcagctttctgagcgtgcgacccaaccgaggctatatctaacaaactgcactatgtaaacagtctacattgtaaaataatattttacacggttatatacactctatttaagcatgatcttagtgtggttgtttaaacatggtcttagtgtggttggatgcaccacttgcccttgttaacaaggcccgtgttaacaaggtgaaaaaaaataacttcagatgtatgtcttgaaatagtgccaaaccacatacattaacaaagggtgtg

SEQ ID NO: 34473 - DNA, 4359 bp, Zea Mays
atggcagaggagaggtgggccttggttggaggacaaggccttgatggggagaagcagacagaggcaggagaaaaaatgagtgcagggtggaaaaaggcgcgtgtcaaagtataccgtttggctgatggtgggaagtgggacgatcaaggaacaggttatgtttctattgattacattgagggttcaaaagaactaggtttgactgttttagatgaagatgacaatgatacactacttatgcacaacatcacatctgacgatatttacagaaaacaagaagaaacaatcatttcatggagagatcgtgaagcagcaacagacttagcgttaagctttcaggaagctgctggatgctcctacatatgggaacacatatgcgatattcagagaaaccttcagttcagtaaccttggtgctctggaagttggtcctcgtcaatcatcagaatctctagaagcctctagaataatgcattctaatgatgattcattccgctctgccaacggcggcgaattcagggagcttcctcctgttgagttgtctaatcttccttttattttgaagactgtattggaggctggcattacagatcagatgcacgtggcagagttgataacacaagataatgactttttcccaaagatagtggacattttcagaatgtgcgaggatttagagaacatagatgatcttcacatgattttcaaattggtcaagggaataatattgttgaacagtccatcgatctttgacaagattttctctgatgagtttattcttgacataataggtgcccttgaatatgatccagaggttccaagagtgcaaaatcaccgtgcttttctgaaagatcatgtagttttcaaagaggccatacgtattgaaaatgtttctgttgtttcaaagattcatcaaacatacagaatcggctatcttaaggatgttatactaccacgaatactggatgatgccactctagcaagtctgaacacaatgatacactcaaataatgcttcggttatttccctgctaaaggatgacacactctttattagacgactatttgccaggatgaggtcatcagatatttcaatggaatcaaaacgagaattggttctgttcttgcatgaattttgcacacttagtaagagtctaccacttgttcagcaactgcgactgtttcggctatctgtactacaaaaacaaaaagaaatatgaccatataataccggtgtgcctgagcttggtgttatcattgttttctctgcctggcagccctgtgctttgtctcgctatcatttgacttcagattgctgaggatcttgttatagggatctttcaggtgaaggagtttttgaaataatttctgatgtgttgcagagtcaagatagaaaaatcatttcagctgggacagatatccttatactttttcttaatcaggaccctaacctattgaggtcatatattgtccaacaagaaggaaattctcttctaggacttctggttaaaggcatggtaactgacttcagtgaggaaatgcactgccagtttctagaaattctacgcatattgatggattcttttactacgtctggagcacatagagacgtagttattgagattttctacgaaagacatcttgactatttggttgatgtaatagcatcctcttgtcccccgaggagcttgtctcgatcatcatctaactcggtacatgttggtggaaatgctgaaggacactgtatcaagcctgagattttgttaaatgtttgtgaactgctgtgcttttgtgttgttcatcatccctacagaattaagtgtaattttcttatgaacaatgctatcgagaaaatccttacattgactcaacgaagggagaagtttttggttgtagcagctgttagatttatgcgtactattatatccagaaatgatgaccatctcattcgccatgttgtgaagttcaacttgctgaaaccaataattgatgtctttgttgacaatggggagagatataacatgctacattcaggagtactcgaattgttggaatacatacggaaggaaaatataaaaactctcattatctatgctattgagtctttctgggatgaacttgccatctttgaacactttggaagtattcaggccttcaaactcaagtatcaacagtacctggagagcgctgaaccaaggttgaatgctagtgtgcctgacatgagaaagaaggcagaacaaagaggtcttgagaaggaagaggaagactacttcaatgaggacagtgatgaagaagattcaggctccggccggcgggctaaacatgcacagaaccaaaataacaagcctaagtccaaggtccccaatggaagtgaagctgatgacactgatggcgcctctaggcctaaatctgctggacttgtggactatgacgatgatgacgatgaggacttcaatccaccaccaaaggagccttctaggcctgcagaggatgatgtgcccttaaacatatccccgttgaagcggaagccagtgaatgcagtggatgggaaacattcagacggagagggtcgcaggaggcaaaaaatagaaactagaattagttgtgctaaaattgctgctgttactagtacagctattaagcacacagatctacaaaacaagtatgcttcccacttgcttacgtcagccacaccaagtactgaagccaatggtatttttagtgaacatggtactaactatgaggagcaacaacatcctatggagaacacagaaacttcacgacaaactggtggtgattgtataaaagatgtgggcagtatgtctcccgagaaggccgtaaatactaccaatacaagcgattcggagccttattcagtaagatgactactacacagctggttggtccatgtacccatcctgtgctgtggtcaacaggaaggaatcagaatgtgtttggctccaagcgctgaatgcatcgatatcatgctggaaacatgattggaggtgacatagattgcagctacctttacatctcaagtaaaattccagttacccctttttgcgcctgtaaagttaattttccgcaaggacagatctgacaaacatgataataggaatgactgtagattcgaacattggatgggccttgctcctgctgctgcgctcgctattgtatcggtttatgagccaacgtagtagtgaatatgtgccttcaactttatttttctccacaattattgatactgttgtaaaacaagtaggaaggcatagtttatgttgaatagcgtttttgcaagactttgtgctaactcacctatatgattgtaatttgttggttaatagttttggtcggacatgttacgttggataattaatctggtcttgtgatagaataatttatgcagaattttttctttgttaagccaaatatgttgtgcacatttgacacaaactactacggtagaatttcagaagtgaataatgttcgatgtattgagatctgggttatggagtttatgttgaatagcgtttttgcaagactttgtgctaactcacctatatgattgtaatttgttggttcatagttttggtcggacatgttaccttggataattaatctagtcttgtgatagaataatttatggataattttttctttgttaagccaaatatgttgtgcacatttgacacaaactactaaggtagaatttcagaagtgaataatgttcgatgtattgagatctgggttatggatgacaggtgtacttgcgagaattgcaatggtatcctactgctccagaacaggtaaacatggtcactccatccgcaaagaagaatcatgtgttcaaccagtgtcaattcaacagaataaagaagaatcatgtgttcaaccagtgtcaattcaacagaataatctgttcagcagtttgctttatccgtgctcattgtactacgaacctccgccgtctacttgaatatcaagcctccacgggcagcaaagaatggcgcaaattattgagactcgacagcaatgagcttgatcagtatgttcagggacggtccggaggtgtccttgagggggtcgccgatgacggcagctttctgagcgtgcgacccaaccgaggctatatctaacaaactgcactatgtaaacagtctacattgtaaaataatattttacacggttatatacactctatttaagcatgatcttagtgtggttgtttaaacatggtcttagtgtggttggatgcaccacttgcccttgttaacaaggcccgtgttaacaaggtgaaaaaaaataacttcagatgtatgtcttgaaatagtgccaaaccacatacattaacaaagggtgtg

SEQ ID NO: 34474 - DNA, 3446 bp, Zea Mays
caatggcagaggagaggtgggccttggttggaggacaaggccttgatggggagaagcagacagaggcaggagaaaaaatgagtgcagggtggaaaaaggcgcgtgtcaaagtataccgtttggctgatggtgggaagtgggacgatcaaggaacaggttatgtttctattgattacattgagggttcaaaagaactaggtttgactgttttagatgaagatgacaatgatacactacttatgcacaacatcacatctgacgatatttacagaaaacaagaagaaacaatcatttcatggagagatcgtgaagcagcaacagacttagcgttaagctttcaggaagctgctggatgctcctacatatgggaacacatatgcgatattcagagaaaccttcagttcagtaaccttggtgctctggaagttggtcctcgtcaatcatcagaatctctagaagcctctagaataatgcattctaatgatgattcattccgctctgccaacggcggcgaattcagggagcttcctcctgttgagttgtctaatcttccttttattttgaagactgtattggaggctggcattacagatcagatgcacgtggcagagttgataacacaagataatgactttttcccaaagatagtggacattttcagaatgtgcgaggatttagagaacatagatgatcttcacatgattttcaaattggtcaagggaataatattgttgaacagtccatcgatctttgacaagattttctctgatgagtttattcttgacataataggtgcccttgaatatgatccagaggttccaagagtgcaaaatcaccgtgcttttctgaaagatcatgtagttttcaaagaggccatacgtattgaaaatgtttctgttgtttcaaagattcatcaaacatacagaatcggctatcttaaggatgttatactaccacgaatactggatgatgccactctagcaagtctgaacacaatgatacactcaaataatgcttcggttatttccctgctaaaggatgacacactctttattagacgactatttgccaggatgaggtcatcagatatttcaatggaatcaaaacgagaattggttctgttcttgcatgaattttgcacacttagtaagagtctaccacttgttcagcaactgcgactgtttcgggatctttcaggtgaaggagtttttgaaataatttctgatgtgttgcagagtcaagatagaaaaatcatttcagctgggacagatatccttatactttttcttaatcaggaccctaacctattgaggtcatatattgtccaacaagaaggaaattctcttctaggacttctggttaaaggcatggtaactgacttcagtgaggaaatgcactgccagtttctagaaattctacgcatattgatggattcttttactacgtctggagcacatagagacgtagttattgagattttctacgaaagacatcttgactatttggttgatgtaatagcatcctcttgtcccccgaggagcttgtctcgatcatcatctaactcggtacatgttggtggaaatgctgaaggacactgtatcaagcctgagattttgttaaatgtttgtgaactgctgtgcttttgtgttgttcatcatccctacagaattaagtgtaattttcttatgaacaatgctatcgagaaaatccttacattgactcaacgaagggagaagtttttggttgtagcagctgttagatttatgcgtactattatatccagaaatgatgaccatctcattcgccatgttgtgaagttcaacttgctgaaaccaataattgatgtctttgttgacaatggggagagatataacatgctacattcaggagtactcgaattgttggaatacatacggaaggaaaatataaaaactctcattatctatgctattgagtctttctgggatgaacttgccatctttgaacactttggaagtattcaggccttcaaactcaagtatcaacagtacctggagagcgctgaaccaaggttgaatgctagtgtgcctgacatgagaaagaaggcagaacaaagaggtcttgagaaggaagaggaagactacttcaatgaggacagtgatgaagaagattcaggctccggccggcgggctaaacatgcacagaaccaaaataacaagcctaagtccaaggtccccaatggaagtgaagctgatgacactgatggcgcctctaggcctaaatctgctggacttgtggactatgacgatgatgacgatgaggacttcaatccaccaccaaaggagccttctaggcctgcagaggatgatgtgcccttaaacatatccccgttgaagcggaagccagtgaatgcagtggatgggaaacattcagacggagagggtcgcaggaggcaaaaaatagaaactagaattagttgtgctaaaattgctgctgttactagtacagctattaagcacacagatctacaaaacaagtatgcttcccacttgcttacgtcagccacaccaagtactgaagccaatggtatttttagtgaacatggtactaactatgaggagcaacaacatcctatggagaacacagaaacttcacgacaaactggtggtgattgtataaaagatgtgggcagtatgtctcccgagaaggccgtaaatactaccaatacaagcgattcggagccttattcagtaagatgactactacacagctggttggtccatgtacccatcctgtgctgtggtcaacaggaaggaatcagaatgtgtttggctccaagcgctgaatgcatcgatatcatgctggaaacatgattggaggtgacatagattgcagctacctttacatctcaagtaaacatggtcactccatccgcaaagaagaatcatgtgttcaaccagtgtcaattcaacagaataaagaagaatcatgtgttcaaccagtgtcaattcaacagaataatctgttcagcagtttgctttatccgtgctcattgtactacgaacctccgccgtctacttgaatatcaagcctccacgggcagcaaagaatggcgcaaattattgagactcgacagcaatgagcttgatcagtatgttcagggacggtccggaggtgtccttgagggggtcgccgatgacggcagctttctgagcgtgcgacccaaccgaggctatatctaacaaactgcactatgtaaacagtctacattgtaaaataatattttacacggttatatacactctatttaagcatgatcttagtgtggttgtttaaacatggtcttagtgtggttggatgcaccacttgcccttgttaacaaggcccgtgttaacaaggtgaaaaaaaataacttcagatgtatgtcttgaaatagtgccaaaccacatacattaacaaagggtgtg

SEQ ID NO: 34475 - DNA, 3458 bp, Zea Mays
caatggcagaggagaggtgggccttggttggaggacaaggccttgatggggagaagcagacagaggcaggagaaaaaatgagtgcagggtggaaaaaggcgcgtgtcaaagtataccgtttggctgatggtgggaagtgggacgatcaaggaacaggttatgtttctattgattacattgagggttcaaaagaactaggtttgactgttttagatgaagatgacaatgatacactacttatgcacaacatcacatctgacgatatttacagaaaacaagaagaaacaatcatttcatggagagatcgtgaagcagcaacagacttagcgttaagctttcaggaagctgctggatgctcctacatatgggaacacatatgcgatattcagagaaaccttcagttcagtaaccttggtgctctggaagttggtcctcgtcaatcatcagaatctctagaagcctctagaataatgcattctaatgatgattcattccgctctgccaacggcggcgaattcagggagcttcctcctgttgagttgtctaatcttccttttattttgaagactgtattggaggctggcattacagatcagatgcacgtggcagagttgataacacaagataatgactttttcccaaagatagtggacattttcagaatgtgcgaggatttagagaacatagatgatcttcacatgattttcaaattggtcaagggaataatattgttgaacagtccatcgatctttgacaagattttctctgatgagtttattcttgacataataggtgcccttgaatatgatccagaggttccaagagtgcaaaatcaccgtgcttttctgaaagatcatgtagttttcaaagaggccatacgtattgaaaatgtttctgttgtttcaaagattcatcaaacatacagaatcggctatcttaaggatgttatactaccacgaatactggatgatgccactctagcaagtctgaacacaatgatacactcaaataatgcttcggttatttccctgctaaaggatgacacactctttattagacgactatttgccaggatgaggtcatcagatatttcaatggaatcaaaacgagaattggttctgttcttgcatgaattttgcacacttagtaagagtctaccacttgttcagcaactgcgactgtttcgggatctttcaggtgaaggagtttttgaaataatttctgatgtgttgcagagtcaagatagaaaaatcatttcagctgggacagatatccttatactttttcttaatcaggaccctaacctattgaggtcatatattgtccaacaagaaggaaattctcttctaggacttctggttaaaggcatggtaactgacttcagtgaggaaatgcactgccagtttctagaaattctacgcatattgatggattcttttactacgtctggagcacatagagacgtagttattgagattttctacgaaagacatcttgactatttggttgatgtaatagcatcctcttgtcccccgaggagcttgtctcgatcatcatctaactcggtacatgttggtggaaatgctgaaggacactgtatcaagcctgagattttgttaaatgtttgtgaactgctgtgcttttgtgttgttcatcatccctacagaattaagtgtaattttcttatgaacaatgctatcgagaaaatccttacattgactcaacgaagggagaagtttttggttgtagcagctgttagatttatgcgtactattatatccagaaatgatgaccatctcattcgccatgttgtgaagttcaacttgctgaaaccaataattgatgtctttgttgacaatggggagagatataacatgctacattcaggagtactcgaattgttggaatacatacggaaggaaaatataaaaactctcattatctatgctattgagtctttctgggatgaacttgccatctttgaacactttggaagtattcaggccttcaaactcaagtatcaacagtacctggagagcgctgaaccaaggttgaatgctagtgtgcctgacatgagaaagaaggcagaacaaagaggtcttgagaaggaagaggaagactacttcaatgaggacagtgatgaagaagattcaggctccggccggcgggctaaacatgcacagaaccaaaataacaagcctaagtccaaggtccccaatggaagtgaagctgatgacactgatggcgcctctaggcctaaatctgctggacttgtggactatgacgatgatgacgatgaggacttcaatccaccaccaaaggagccttctaggcctgcagaggatgatgtgcccttaaacatatccccgttgaagcggaagccagtgaatgcagtggatgggaaacattcagacggagagggtcgcaggaggcaaaaaatagaaactagaattagttgtgctaaaattgctgctgttactagtacagctattaagcacacagatctacaaaacaagtatgcttcccacttgcttacgtcagccacaccaagtactgaagccaatggtatttttagtgaacatggtactaactatgaggagcaacaacatcctatggagaacacagaaacttcacgacaaactggtggtgattgtataaaagatgtgggcagtatgtctcccgagaaggccgtaaatactaccaatacaagcgattcggagccttattcagtaagatgactactacacagctggttggtccatgtacccatcctgtgctgtggtcaacaggaaggaatcagaatgtgtttggctccaagcgctgaatgcatcgatatcatgctggaaacatgattggaggtgtacttgcgagaattgcaatggtatcctactgctccagaacaggtaaacatggtcactccatccgcaaagaagaatcatgtgttcaaccagtgtcaattcaacagaataaagaagaatcatgtgttcaaccagtgtcaattcaacagaataatctgttcagcagtttgctttatccgtgctcattgtactacgaacctccgccgtctacttgaatatcaagcctccacgggcagcaaagaatggcgcaaattattgagactcgacagcaatgagcttgatcagtatgttcagggacggtccggaggtgtccttgagggggtcgccgatgacggcagctttctgagcgtgcgacccaaccgaggctatatctaacaaactgcactatgtaaacagtctacattgtaaaataatattttacacggttatatacactctatttaagcatgatcttagtgtggttgtttaaacatggtcttagtgtggttggatgcaccacttgcccttgttaacaaggcccgtgttaacaaggtgaaaaaaaataacttcagatgtatgtcttgaaatagtgccaaaccacatacattaacaaagggtgtg

SEQ ID NO: 34476 - DNA, 3491 bp, Zea Mays
caatggcagaggagaggtgggccttggttggaggacaaggccttgatggggagaagcagacagaggcaggagaaaaaatgagtgcagggtggaaaaaggcgcgtgtcaaagtataccgtttggctgatggtgggaagtgggacgatcaaggaacaggttatgtttctattgattacattgagggttcaaaagaactaggtttgactgttttagatgaagatgacaatgatacactacttatgcacaacatcacatctgacgatatttacagaaaacaagaagaaacaatcatttcatggagagatcgtgaagcagcaacagacttagcgttaagctttcaggaagctgctggatgctcctacatatgggaacacatatgcgatattcagagaaaccttcagttcagtaaccttggtgctctggaagttggtcctcgtcaatcatcagaatctctagaagcctctagaataatgcattctaatgatgattcattccgctctgccaacggcggcgaattcagggagcttcctcctgttgagttgtctaatcttccttttattttgaagactgtattggaggctggcattacagatcagatgcacgtggcagagttgataacacaagataatgactttttcccaaagatagtggacattttcagaatgtgcgaggatttagagaacatagatgatcttcacatgattttcaaattggtcaagggaataatattgttgaacagtccatcgatctttgacaagattttctctgatgagtttattcttgacataataggtgcccttgaatatgatccagaggttccaagagtgcaaaatcaccgtgcttttctgaaagatcatgtagttttcaaagaggccatacgtattgaaaatgtttctgttgtttcaaagattcatcaaacatacagaatcggctatcttaaggatgttatactaccacgaatactggatgatgccactctagcaagtctgaacacaatgatacactcaaataatgcttcggttatttccctgctaaaggatgacacactctttattagacgactatttgccaggatgaggtcatcagatatttcaatggaatcaaaacgagaattggttctgttcttgcatgaattttgcacacttagtaagagtctaccacttgttcagcaactgcgactgtttcgggatctttcaggtgaaggagtttttgaaataatttctgatgtgttgcagagtcaagatagaaaaatcatttcagctgggacagatatccttatactttttcttaatcaggaccctaacctattgaggtcatatattgtccaacaagaaggaaattctcttctaggacttctggttaaaggcatggtaactgacttcagtgaggaaatgcactgccagtttctagaaattctacgcatattgatggattcttttactacgtctggagcacatagagacgtagttattgagattttctacgaaagacatcttgactatttggttgatgtaatagcatcctcttgtcccccgaggagcttgtctcgatcatcatctaactcggtacatgttggtggaaatgctgaaggacactgtatcaagcctgagattttgttaaatgtttgtgaactgctgtgcttttgtgttgttcatcatccctacagaattaagtgtaattttcttatgaacaatgctatcgagaaaatccttacattgactcaacgaagggagaagtttttggttgtagcagctgttagatttatgcgtactattatatccagaaatgatgaccatctcattcgccatgttgtgaagttcaacttgctgaaaccaataattgatgtctttgttgacaatggggagagatataacatgctacattcaggagtactcgaattgttggaatacatacggaaggaaaatataaaaactctcattatctatgctattgagtctttctgggatgaacttgccatctttgaacactttggaagtattcaggccttcaaactcaagtatcaacagtacctggagagcgctgaaccaaggttgaatgctagtgtgcctgacatgagaaagaaggcagaacaaagaggtcttgagaaggaagaggaagactacttcaatgaggacagtgatgaagaagattcaggctccggccggcgggctaaacatgcacagaaccaaaataacaagcctaagtccaaggtccccaatggaagtgaagctgatgacactgatggcgcctctaggcctaaatctgctggacttgtggactatgacgatgatgacgatgaggacttcaatccaccaccaaaggagccttctaggcctgcagaggatgatgtgcccttaaacatatccccgttgaagcggaagccagtgaatgcagtggatgggaaacattcagacggagagggtcgcaggaggcaaaaaatagaaactagaattagttgtgctaaaattgctgctgttactagtacagctattaagcacacagatctacaaaacaagtatgcttcccacttgcttacgtcagccacaccaagtactgaagccaatggtatttttagtgaacatggtactaactatgaggagcaacaacatcctatggagaacacagaaacttcacgacaaactggtggtgattgtataaaagatgtgggcagtatgtctcccgagaaggccgtaaatactaccaatacaagcgattcggagccttattcagtaagatgactactacacagctggttggtccatgtacccatcctgtgctgtggtcaacaggaaggaatcagaatgtgtttggctccaagcgctgaatgcatcgatatcatgctggaaacatgattggaggtgacatagattgcagctacctttacatctcaagtgtacttgcgagaattgcaatggtatcctactgctccagaacaggtaaacatggtcactccatccgcaaagaagaatcatgtgttcaaccagtgtcaattcaacagaataaagaagaatcatgtgttcaaccagtgtcaattcaacagaataatctgttcagcagtttgctttatccgtgctcattgtactacgaacctccgccgtctacttgaatatcaagcctccacgggcagcaaagaatggcgcaaattattgagactcgacagcaatgagcttgatcagtatgttcagggacggtccggaggtgtccttgagggggtcgccgatgacggcagctttctgagcgtgcgacccaaccgaggctatatctaacaaactgcactatgtaaacagtctacattgtaaaataatattttacacggttatatacactctatttaagcatgatcttagtgtggttgtttaaacatggtcttagtgtggttggatgcaccacttgcccttgttaacaaggcccgtgttaacaaggtgaaaaaaaataacttcagatgtatgtcttgaaatagtgccaaaccacatacattaacaaagggtgtg

SEQ ID NO: 34477 - DNA, 4310 bp, Zea Mays
gccgcccgcaccctcgaccagctgaagaatcgcccggtggttgaagaggctcgcgcctcgccctacaaggctccaagggaagaggggatagacagcggcggaccgcggcgtgcggctgatggccgagcaggaggggagggacgcggaagcggggggcgatgccgcggccgcagcggtggcgtcgcacaccagcagcatgcagcgtgtcaaagtataccgtttggctgatggtgggaagtgggacgatcaaggaacaggttatgtttctattgattacattgagggttcaaaagaactaggtttgactgttttagatgaagatgacaatgatacactacttatgcacaacatcacatctgacgatatttacagaaaacaagaagaaacaatcatttcatggagagatcgtgaagcagcaacagacttagcgttaagctttcaggaagctgctggatgctcctacatatgggaacacatatgcgatattcagagaaaccttcagttcagtaaccttggtgctctggaagttggtcctcgtcaatcatcagaatctctagaagcctctagaataatgcattctaatgatgattcattccgctctgccaacggcggcgaattcagggagcttcctcctgttgagttgtctaatcttccttttattttgaagactgtattggaggctggcattacagatcagatgcacgtggcagagttgataacacaagataatgactttttcccaaagatagtggacattttcagaatgtgcgaggatttagagaacatagatgatcttcacatgattttcaaattggtcaagggaataatattgttgaacagtccatcgatctttgacaagattttctctgatgagtttattcttgacataataggtgcccttgaatatgatccagaggttccaagagtgcaaaatcaccgtgcttttctgaaagatcatgtagttttcaaagaggccatacgtattgaaaatgtttctgttgtttcaaagattcatcaaacatacagaatcggctatcttaaggatgttatactaccacgaatactggatgatgccactctagcaagtctgaacacaatgatacactcaaataatgcttcggttatttccctgctaaaggatgacacactctttattagacgactatttgccaggatgaggtcatcagatatttcaatggaatcaaaacgagaattggttctgttcttgcatgaattttgcacacttagtaagagtctaccacttgttcagcaactgcgactgtttcgggatctttcaggtgaaggagtttttgaaataatttctgatgtgttgcagagtcaagatagaaaaatcatttcagctggatatccttatactttttcttaatcaggaccctaacctattgaggtcatatattgtccaacaagaaggaaattctcttctaggacttctggttaaaggcatggtaactgacttcagtgaggaaatgcactgccagtttctagaaattctacgcatattgatggattcttttactacgtctggagcacatagagacgtagttattgagattttctacgaaagacatcttgactatttggttgatgtaatagcatcctcttgtcccccgaggagcttgtctcgatcatcatctaactcggtacatgttggtggaaatgctgaaggacactgtatcaagcctgagattttgttaaatgtttgtgaactgctgtgcttttgtgttgttcatcatccctacagaattaagtgtaattttcttatgaacaatgctatcgagaaaatccttacattgactcaacgaagggagaagtttttggttgtagcagctgttagatttatgcgtactattatatccagaaatgatgaccatctcattcgccatgttgtgaagttcaacttgctgaaaccaataattgatgtctttgttgacaatggggagagatataacatgctacattcaggagtactcgaattgttggaatacatacggaaggaaaatataaaaactctcattatctatgctattgagtctttctgggatgaacttgccatctttgaacactttggaagtattcaggccttcaaactcaagtatcaacagtacctggagagcgctgaaccaaggttgaatgctagtgtgcctgacatgagaaagaaggcagaacaaagaggtcttgagaaggaagaggaagactacttcaatgaggacagtgatgaagaagattcaggctccggccggcgggctaaacatgcacagaaccaaaataacaagcctaagtccaaggtccccaatggaagtgaagctgatgacactgatggcgcctctaggcctaaatctgctggacttgtggactatgacgatgatgacgatgaggacttcaatccaccaccaaaggagccttctaggcctgcagaggatgatgtgcccttaaacatatccccgttgaagcggaagccagtgaatgcagtggatgggaaacattcagacggagagggtcgcaggaggcaaaaaatagaaactagaattagttgtgctaaaattgctgctgttactagtacagctattaagcacacagatctacaaaacaagtatgcttcccacttgcttacgtcagccacaccaagtactgaagccaatggtatttttagtgaacatggtactaactatgaggagcaacaacatcctatggagaacacagaaacttcacgacaaactggtggtgattgtataaaagatgtgggcagtatgtctcccgagaaggccgtaaatactaccaatacaagcgattcggagccttattcagtaagatgactactacacagctggttggtccatgtacccatcctgtgctgtggtcaacaggaaggaatcagaatgtgtttggctccaagcgctgaatgcatcgatatcatgctggaaacatgattggaggtgacatagattgcagctacctttacatctcaagtaaaattccagttacccctttttgcgcctgtaaagttaattttccgcaaggacagatctgacaaacatgataataggaatgactgtagattcgaacattggatgggccttgctcctgctgctgcgctcgctattgtatcggtttatgagccaacgtagtagtgaatatgtgccttcaactttatttttctccacaattattgatactgttgtaaaacaagtaggaaggcatagtttatgttgaatagcgtttttgcaagactttgtgctaactcacctatatgattgtaatttgttggttaatagttttggtcggacatgttacgttggataattaatctggtcttgtgatagaataatttatgcagaattttttctttgttaagccaaatatgttgtgcacatttgacacaaactactacggtagaatttcagaagtgaataatgttcgatgtattgagatctgggttatggagtttatgttgaatagcgtttttgcaagactttgtgctaactcacctatatgattgtaatttgttggttcatagttttggtcggacatgttaccttggataattaatctagtcttgtgatagaataatttatggataattttttctttgttaagccaaatatgttgtgcacatttgacacaaactactaaggtagaatttcagaagtgaataatgttcgatgtattgagatctgggttatggatgacaggtgtacttgcgagaattgcaatggtatcctactgctccagaacaggtaaacatggtcactccatccgcaaagaagaatcatgtgttcaaccagtgtcaattcaacagaataaagaagaatcatgtgttcaaccagtgtcaattcaacagaataatctgttcagcagtttgctttatccgtgctcattgtactacgaacctccgccgtctacttgaatatcaagcctccacgggcagcaaagaatggcgcaaattattgagactcgacagcaatgagcttgatcagtatgttcagggacggtccggaggtgtccttgagggggtcgccgatgacggcagctttctgagcgtgcgacccaaccgaggctatatctaacaaactgcactatgtaaacagtctacattgtaaaataatattttacacggttatatacactctatttaagcatgatcttagtgtggttgtttaaacatggtcttagtgtggttggatgcaccacttgcccttgttaacaaggcccgtgttaacaaggtgaaaaaaaataacttcagatgtatgtcttgaaatagtgccaaaccacatacattaacaaagggtgtg

SEQ ID NO: 34478 - DNA, 4433 bp, Zea Mays
ggtaattaaacataacgaacacgcgcacaaaaaatattgacaaaaaccggaggggtaaaaggggaaaggccacggccgcctggaggagcgagagggcggaagaggggaagcggcagccgcaggcccgcagctcgtcgatggtggttagggtttcgccgcccgcaccctcgaccagctgaagaatcgcccggtggttgaagaggctcgcgcctcgccctacaaggctccaagggaagaggggatagacagcggcggaccgcggcgtgcggctgatggccgagcaggaggggagggacgcggaagcggggggcgatgccgcggccgcagcggtggcgtcgcacaccagcagcatgcagcgtgtcaaagtataccgtttggctgatggtgggaagtgggacgatcaaggaacaggttatgtttctattgattacattgagggttcaaaagaactaggtttgactgttttagatgaagatgacaatgatacactacttatgcacaacatcacatctgacgatatttacagaaaacaagaagaaacaatcatttcatggagagatcgtgaagcagcaacagacttagcgttaagctttcaggaagctgctggatgctcctacatatgggaacacatatgcgatattcagagaaaccttcagttcagtaaccttggtgctctggaagttggtcctcgtcaatcatcagaatctctagaagcctctagaataatgcattctaatgatgattcattccgctctgccaacggcggcgaattcagggagcttcctcctgttgagttgtctaatcttccttttattttgaagactgtattggaggctggcattacagatcagatgcacgtggcagagttgataacacaagataatgactttttcccaaagatagtggacattttcagaatgtgcgaggatttagagaacatagatgatcttcacatgattttcaaattggtcaagggaataatattgttgaacagtccatcgatctttgacaagattttctctgatgagtttattcttgacataataggtgcccttgaatatgatccagaggttccaagagtgcaaaatcaccgtgcttttctgaaagatcatgtagttttcaaagagattcatcaaacatacagaatcggctatcttaaggatgttatactaccacgaatactggatgatgccactctagcaagtctgaacacaatgatacactcaaataatgcttcggttatttccctgctaaaggatgacacactctttattagacgactatttgccaggatgaggtcatcagatatttcaatggaatcaaaacgagaattggttctgttcttgcatgaattttgcacacttagtaagagtctaccacttgttcagcaactgcgactgtttcgggatctttcaggtgaaggagtttttgaaataatttctgatgtgttgcagagtcaagatagaaaaatcatttcagctgggacagatatccttatactttttcttaatcaggaccctaacctattgaggtcatatattgtccaacaagaaggaaattctcttctaggacttctggttaaaggcatggtaactgacttcagtgaggaaatgcactgccagtttctagaaattctacgcatattgatggattcttttactacgtctggagcacatagagacgtagttattgagattttctacgaaagacatcttgactatttggttgatgtaatagcatcctcttgtcccccgaggagcttgtctcgatcatcatctaactcggtacatgttggtggaaatgctgaaggacactgtatcaagcctgagattttgttaaatgtttgtgaactgctgtgcttttgtgttgttcatcatccctacagaattaagtgtaattttcttatgaacaatgctatcgagaaaatccttacattgactcaacgaagggagaagtttttggttgtagcagctgttagatttatgcgtactattatatccagaaatgatgaccatctcattcgccatgttgtgaagttcaacttgctgaaaccaataattgatgtctttgttgacaatggggagagatataacatgctacattcaggagtactcgaattgttggaatacatacggaaggaaaatataaaaactctcattatctatgctattgagtctttctgggatgaacttgccatctttgaacactttggaagtattcaggccttcaaactcaagtatcaacagtacctggagagcgctgaaccaaggttgaatgctagtgtgcctgacatgagaaagaaggcagaacaaagaggtcttgagaaggaagaggaagactacttcaatgaggacagtgatgaagaagattcaggctccggccggcgggctaaacatgcacagaaccaaaataacaagcctaagtccaaggtccccaatggaagtgaagctgatgacactgatggcgcctctaggcctaaatctgctggacttgtggactatgacgatgatgacgatgaggacttcaatccaccaccaaaggagccttctaggcctgcagaggatgatgtgcccttaaacatatccccgttgaagcggaagccagtgaatgcagtggatgggaaacattcagacggagagggtcgcaggaggcaaaaaatagaaactagaattagttgtgctaaaattgctgctgttactagtacagctattaagcacacagatctacaaaacaagtatgcttcccacttgcttacgtcagccacaccaagtactgaagccaatggtatttttagtgaacatggtactaactatgaggagcaacaacatcctatggagaacacagaaacttcacgacaaactggtggtgattgtataaaagatgtgggcagtatgtctcccgagaaggccgtaaatactaccaatacaagcgattcggagccttattcagtaagatgactactacacagctggttggtccatgtacccatcctgtgctgtggtcaacaggaaggaatcagaatgtgtttggctccaagcgctgaatgcatcgatatcatgctggaaacatgattggaggtgacatagattgcagctacctttacatctcaagtaaaattccagttacccctttttgcgcctgtaaagttaattttccgcaaggacagatctgacaaacatgataataggaatgactgtagattcgaacattggatgggccttgctcctgctgctgcgctcgctattgtatcggtttatgagccaacgtagtagtgaatatgtgccttcaactttatttttctccacaattattgatactgttgtaaaacaagtaggaaggcatagtttatgttgaatagcgtttttgcaagactttgtgctaactcacctatatgattgtaatttgttggttaatagttttggtcggacatgttacgttggataattaatctggtcttgtgatagaataatttatgcagaattttttctttgttaagccaaatatgttgtgcacatttgacacaaactactacggtagaatttcagaagtgaataatgttcgatgtattgagatctgggttatggagtttatgttgaatagcgtttttgcaagactttgtgctaactcacctatatgattgtaatttgttggttcatagttttggtcggacatgttaccttggataattaatctagtcttgtgatagaataatttatggataattttttctttgttaagccaaatatgttgtgcacatttgacacaaactactaaggtagaatttcagaagtgaataatgttcgatgtattgagatctgggttatggatgacaggtgtacttgcgagaattgcaatggtatcctactgctccagaacaggtaaacatggtcactccatccgcaaagaagaatcatgtgttcaaccagtgtcaattcaacagaataaagaagaatcatgtgttcaaccagtgtcaattcaacagaataatctgttcagcagtttgctttatccgtgctcattgtactacgaacctccgccgtctacttgaatatcaagcctccacgggcagcaaagaatggcgcaaattattgagactcgacagcaatgagcttgatcagtatgttcagggacggtccggaggtgtccttgagggggtcgccgatgacggcagctttctgagcgtgcgacccaaccgaggctatatctaacaaactgcactatgtaaacagtctacattgtaaaataatattttacacggttatatacactctatttaagcatgatcttagtgtggttgtttaaacatggtcttagtgtggttggatgcaccacttgcccttgttaacaaggcccgtgttaacaaggtgaaaaaaaataacttcagatgtatgtcttgaaatagtgccaaaccacatacattaacaaagggtgtg

SEQ ID NO: 34479 - DNA, 4591 bp, Zea Mays
ggtaattaaacataacgaacacgcgcacaaaaaatattgacaaaaaccggaggggtaaaaggggaaaggccacggccgcctggaggagcgagagggcggaagaggggaagcggcagccgcaggcccgcagctcgtcgatggtggttagggtttcgccgcccgcaccctcgaccagctgaagaatcgcccggtggttgaagaggctcgcgcctcgccctacaaggctccaagggaagaggggatagacagcggcggaccgcggcgtgcggctgatggccgagcaggaggggagggacgcggaagcggggggcgatgccgcggccgcagcggtggcgtcgcacaccagcagcatgcagcgtgtcaaagtataccgtttggctgatggtgggaagtgggacgatcaaggaacaggttatgtttctattgattacattgagggttcaaaagaactaggtttgactgttttagatgaagatgacaatgatacactacttatgcacaacatcacatctgacgatatttacagaaaacaagaagaaacaatcatttcatggagagatcgtgaagcagcaacagacttagcgttaagctttcaggaagctgctggatgctcctacatatgggaacacatatgcgatattcagagaaaccttcagttcagtaaccttggtgctctggaagttggtcctcgtcaatcatcagaatctctagaagcctctagaataatgcattctaatgatgattcattccgctctgccaacggcggcgaattcagggagcttcctcctgttgagttgtctaatcttccttttattttgaagactgtattggaggctggcattacagatcagatgcacgtggcagagttgataacacaagatgaaaatgcctcttgatattgtggcatccatactttctctgttgaaaagtcattattgatgggctagacacatcatatactgcattattggccaagacactcacagtttgattgttcttttagaatgactttttcccaaagatagtggacattttcagaatgtgcgaggatttagagaacatagatgatcttcacatgattttcaaattggtcaagggaataatattgttgaacagtccatcgatctttgacaagattttctctgatgagtttattcttgacataataggtgcccttgaatatgatccagaggttccaagagtgcaaaatcaccgtgcttttctgaaagatcatgtagttttcaaagaggccatacgtattgaaaatgtttctgttgtttcaaagattcatcaaacatacagaatcggctatcttaaggatgttatactaccacgaatactggatgatgccactctagcaagtctgaacacaatgatacactcaaataatgcttcggttatttccctgctaaaggatgacacactctttattagacgactatttgccaggatgaggtcatcagatatttcaatggaatcaaaacgagaattggttctgttcttgcatgaattttgcacacttagtaagagtctaccacttgttcagcaactgcgactgtttcgggatctttcaggtgaaggagtttttgaaataatttctgatgtgttgcagagtcaagatagaaaaatcatttcagctgggacagatatccttatactttttcttaatcaggaccctaacctattgaggtcatatattgtccaacaagaaggaaattctcttctaggacttctggttaaaggcatggtaactgacttcagtgaggaaatgcactgccagtttctagaaattctacgcatattgatggattcttttactacgtctggagcacatagagacgtagttattgagattttctacgaaagacatcttgactatttggttgatgtaatagcatcctcttgtcccccgaggagcttgtctcgatcatcatctaactcggtacatgttggtggaaatgctgaaggacactgtatcaagcctgagattttgttaaatgtttgtgaactgctgtgcttttgtgttgttcatcatccctacagaattaagtgtaattttcttatgaacaatgctatcgagaaaatccttacattgactcaacgaagggagaagtttttggttgtagcagctgttagatttatgcgtactattatatccagaaatgatgaccatctcattcgccatgttgtgaagttcaacttgctgaaaccaataattgatgtctttgttgacaatggggagagatataacatgctacattcaggagtactcgaattgttggaatacatacggaaggaaaatataaaaactctcattatctatgctattgagtctttctgggatgaacttgccatctttgaacactttggaagtattcaggccttcaaactcaagtatcaacagtacctggagagcgctgaaccaaggttgaatgctagtgtgcctgacatgagaaagaaggcagaacaaagaggtcttgagaaggaagaggaagactacttcaatgaggacagtgatgaagaagattcaggctccggccggcgggctaaacatgcacagaaccaaaataacaagcctaagtccaaggtccccaatggaagtgaagctgatgacactgatggcgcctctaggcctaaatctgctggacttgtggactatgacgatgatgacgatgaggacttcaatccaccaccaaaggagccttctaggcctgcagaggatgatgtgcccttaaacatatccccgttgaagcggaagccagtgaatgcagtggatgggaaacattcagacggagagggtcgcaggaggcaaaaaatagaaactagaattagttgtgctaaaattgctgctgttactagtacagctattaagcacacagatctacaaaacaagtatgcttcccacttgcttacgtcagccacaccaagtactgaagccaatggtatttttagtgaacatggtactaactatgaggagcaacaacatcctatggagaacacagaaacttcacgacaaactggtggtgattgtataaaagatgtgggcagtatgtctcccgagaaggccgtaaatactaccaatacaagcgattcggagccttattcagtaagatgactactacacagctggttggtccatgtacccatcctgtgctgtggtcaacaggaaggaatcagaatgtgtttggctccaagcgctgaatgcatcgatatcatgctggaaacatgattggaggtgacatagattgcagctacctttacatctcaagtaaaattccagttacccctttttgcgcctgtaaagttaattttccgcaaggacagatctgacaaacatgataataggaatgactgtagattcgaacattggatgggccttgctcctgctgctgcgctcgctattgtatcggtttatgagccaacgtagtagtgaatatgtgccttcaactttatttttctccacaattattgatactgttgtaaaacaagtaggaaggcatagtttatgttgaatagcgtttttgcaagactttgtgctaactcacctatatgattgtaatttgttggttaatagttttggtcggacatgttacgttggataattaatctggtcttgtgatagaataatttatgcagaattttttctttgttaagccaaatatgttgtgcacatttgacacaaactactacggtagaatttcagaagtgaataatgttcgatgtattgagatctgggttatggagtttatgttgaatagcgtttttgcaagactttgtgctaactcacctatatgattgtaatttgttggttcatagttttggtcggacatgttaccttggataattaatctagtcttgtgatagaataatttatggataattttttctttgttaagccaaatatgttgtgcacatttgacacaaactactaaggtagaatttcagaagtgaataatgttcgatgtattgagatctgggttatggatgacaggtgtacttgcgagaattgcaatggtatcctactgctccagaacaggtaaacatggtcactccatccgcaaagaagaatcatgtgttcaaccagtgtcaattcaacagaataaagaagaatcatgtgttcaaccagtgtcaattcaacagaataatctgttcagcagtttgctttatccgtgctcattgtactacgaacctccgccgtctacttgaatatcaagcctccacgggcagcaaagaatggcgcaaattattgagactcgacagcaatgagcttgatcagtatgttcagggacggtccggaggtgtccttgagggggtcgccgatgacggcagctttctgagcgtgcgacccaaccgaggctatatctaacaaactgcactatgtaaacagtctacattgtaaaataatattttacacggttatatacactctatttaagcatgatcttagtgtggttgtttaaacatggtcttagtgtggttggatgcaccacttgcccttgttaacaaggcccgtgttaacaaggtgaaaaaaaataacttcagatgtatgtcttgaaatagtgccaaaccacatacattaacaaagggtgtg

SEQ ID NO: 34480 - DNA, 4392 bp, Zea Mays
ggtaattaaacataacgaacacgcgcacaaaaaatattgacaaaaaccggaggggtaaaaggggaaaggccacggccgcctggaggagcgagagggcggaagaggggaagcggcagccgcaggcccgcagctcgtcgatggtggttagggtttcgccgcccgcaccctcgaccagctgaagaatcgcccggtggttgaagaggctcgcgcctcgccctacaaggctccaagggaagaggggatagacagcggcggaccgcggcgtgcggctgatggccgagcaggaggggagggacgcggaagcggggggcgatgccgcggccgcagcggtggcgtcgcacaccagcagcatgcagcgtgtcaaagtataccgtttggctgatggtgggaagtgggacgatcaaggaacaggttatgtttctattgattacattgagggttcaaaagaactaggtttgactgttttagatgaagatgacaatgatacactacttatgcacaacatcacatctgacgatatttacagaaaacaagaagaaacaatcatttcatggagagatcgtgaagcagcaacagacttagcgttaagctttcaggaagctgctggatgctcctacatatgggaacacatatgcgatattcagagaaaccttcagttcagtaaccttggtgctctggaagttggtcctcgtcaatcatcagaatctctagaagcctctagaataatgcattctaatgatgattcattccgctctgccaacggcggcgaattcagggagcttcctcctgttgagttgtctaatcttccttttattttgaagactgtattggaggctggcattacagatcagatgcacgtggcagagttgataacacaagataatgactttttcccaaagatagtggacattttcagaatgtgcgaggatttagagaacatagatgatcttcacatgattttcaaattggtcaagggaataatattgttgaacagtccatcgatctttgacaagattttctctgatgagtttattcttgacataataggtgcccttgaatatgatccagaggttccaagagtgcaaaatcaccgtgcttttctgaaagatcatgtagttttcaaagaggccatacgtattgaaaatgtttctgttgtttcaaagattcatcaaacatacagaatcggctatcttaaggatgttatactaccacgaatactggatgatgccactctagcaagtctgaacacaatgatacactcaaataatgcttcggttatttccctgctaaaggatgacacactctttattagacgactatttgccaggatgaggtcatcagatatttcaatggaatcaaaacgagaattggttctgttcttgcatgaattttgcacacttagtaagagtctaccacttgttcagcaactgcgactgtttcgggatctttcaggtgaaggagtttttgaaataatttctgatgtgttgcagagtcaagatagaaaaatcatttcagctgggacagatatccttatactttttcttaatcaggaccctaacctattgaggtcatatattgtccaacaagaaggaaattctcttctaggacttctggttaaaggcatggtaactgacttcagtgaggaaatgcactgccagtttctagaaattctacgcatattgatggattcttttactacgtctggagcacatagagacgtagttattgagattttctacgaaagacatcttgactatttggttgatgtaatagcatcctcttgtcccccgaggagcttgtctcgatcatcatctaactcggtacatgttggtggaaatgctgaaggacactgtatcaagcctgagattttgttaaatgtttgtgaactgctgtgcttttgtgttgttcatcatccctacagaattaagtgtaattttcttatgaacaatgctatcgagaaaatccttacattgactcaacgaagggagaagtttttggttgtagcagctgttagatttatgcgtactattatatccagaaatgatgaccatctcattcgccatgttgtgaagttcaacttgctgaaaccaataattgatgtctttgttgacaatggggagagatataacatgctacattcaggagtactcgaattgttggaatacatacggaaggaaaatataaaaactctcattatctatgctattgagtctttctgggatgaacttgccatctttgaacactttggaagtattcaggccttcaaactcaagtatcaacagtacctggagagcgctgaaccaaggttgaatgctagtgtgcctgacatgagaaagaaggcagaacaaagaggtcttgagaaggaagaggaagactacttcaatgaggacagtgatgaagaagattcaggctccggccggcgggctaaacatgcacagaaccaaaataacaagcctaagtccaaggtccccaatggaagtgaagctgatgacactgatggcgcctctaggcctaaatctgctggacttgtggactatgacgatgatgacgatgaggacttcaatccaccaccaaaggagccttctaggcctgcagaggatgatgtgcccttaaacatatccccgttgaagcggaagccagtgaatgcagtggatgggaaacattcagacggagagggtcgcaggaggcaaaaaatagaaactagaattagttgtgctaaaattgctgctgttactagtacagctattaagcacacagatctacaaaacaagtatgcttcccacttgcttacgtcagccacaccaagtactgaagccaatggtatttttagtgaacatggtactaactatgaggagcaacaacatcctatggagaacacagaaacttcacgacaaactggtggtgattgtataaaagatgtgggcagtatgtctcccgagaaggccgtaaatactaccaatacaagcgattcggagccttattcagtaagatgactactacacagctggttggtccatgtacccatcctgtgctgtggtcaacaggaaggaatcagaatgtgtttggctccaagcgctgaatgcatcgatatcatgctggaaacatgattggaggtgacatagattgcagctacctttacatctcaagaatgactgtagattcgaacattggatgggccttgctcctgctgctgcgctcgctattgtatcggtttatgagccaacgtagtagtgaatatgtgccttcaactttatttttctccacaattattgatactgttgtaaaacaagtaggaaggcatagtttatgttgaatagcgtttttgcaagactttgtgctaactcacctatatgattgtaatttgttggttaatagttttggtcggacatgttacgttggataattaatctggtcttgtgatagaataatttatgcagaattttttctttgttaagccaaatatgttgtgcacatttgacacaaactactacggtagaatttcagaagtgaataatgttcgatgtattgagatctgggttatggagtttatgttgaatagcgtttttgcaagactttgtgctaactcacctatatgattgtaatttgttggttcatagttttggtcggacatgttaccttggataattaatctagtcttgtgatagaataatttatggataattttttctttgttaagccaaatatgttgtgcacatttgacacaaactactaaggtagaatttcagaagtgaataatgttcgatgtattgagatctgggttatggatgacaggtgtacttgcgagaattgcaatggtatcctactgctccagaacaggtaaacatggtcactccatccgcaaagaagaatcatgtgttcaaccagtgtcaattcaacagaataaagaagaatcatgtgttcaaccagtgtcaattcaacagaataatctgttcagcagtttgctttatccgtgctcattgtactacgaacctccgccgtctacttgaatatcaagcctccacgggcagcaaagaatggcgcaaattattgagactcgacagcaatgagcttgatcagtatgttcagggacggtccggaggtgtccttgagggggtcgccgatgacggcagctttctgagcgtgcgacccaaccgaggctatatctaacaaactgcactatgtaaacagtctacattgtaaaataatattttacacggttatatacactctatttaagcatgatcttagtgtggttgtttaaacatggtcttagtgtggttggatgcaccacttgcccttgttaacaaggcccgtgttaacaaggtgaaaaaaaataacttcagatgtatgtcttgaaatagtgccaaaccacatacattaacaaagggtgtg

SEQ ID NO: 34481 - DNA, 4456 bp, Zea Mays
ggtaattaaacataacgaacacgcgcacaaaaaatattgacaaaaaccggaggggtaaaaggggaaaggccacggccgcctggaggagcgagagggcggaagaggggaagcggcagccgcaggcccgcagctcgtcgatggtggttagggtttcgccgcccgcaccctcgaccagctgaagaatcgcccggtggttgaagaggctcgcgcctcgccctacaaggctccaagggaagaggggatagacagcggcggaccgcggcgtgcggctgatggccgagcaggaggggagggacgcggaagcggggggcgatgccgcggccgcagcggtggcgtcgcacaccagcagcatgcagcgtgtcaaagtataccgtttggctgatggtgggaagtgggacgatcaaggaacaggttatgtttctattgattacattgagggttcaaaagaactaggtttgactgttttagatgaagatgacaatgatacactacttatgcacaacatcacatctgacgatatttacagaaaacaagaagaaacaatcatttcatggagagatcgtgaagcagcaacagacttagcgttaagctttcaggaagctgctggatgctcctacatatgggaacacatatgcgatattcagagaaaccttcagttcagtaaccttggtgctctggaagttggtcctcgtcaatcatcagaatctctagaagcctctagaataatgcattctaatgatgattcattccgctctgccaacggcggcgaattcagggagcttcctcctgttgagttgtctaatcttccttttattttgaagactgtattggaggctggcattacagatcagatgcacgtggcagagttgataacacaagataatgactttttcccaaagatagtggacattttcagaatgtgcgaggatttagagaacatagatgatcttcacatgattttcaaattggtcaagggaataatattgttgaacagtccatcgatctttgacaagattttctctgatgagtttattcttgacataataggtgcccttgaatatgatccagaggttccaagagtgcaaaatcaccgtgcttttctgaaagatcatgtagttttcaaagaggccatacgtattgaaaatgtttctgttgtttcaaagattcatcaaacatacagaatcggctatcttaaggatgttatactaccacgaatactggatgatgccactctagcaagtctgaacacaatgatacactcaaataatgcttcggttatttccctgctaaaggatgacacactctttattagacgactatttgccaggatgaggtcatcagatatttcaatggaatcaaaacgagaattggttctgttcttgcatgaattttgcacacttagtaagagtctaccacttgttcagcaactgcgactgtttcgggatctttcaggtgaaggagtttttgaaataatttctgatgtgttgcagagtcaagatagaaaaatcatttcagctggatatccttatactttttcttaatcaggaccctaacctattgaggtcatatattgtccaacaagaaggaaattctcttctaggacttctggttaaaggcatggtaactgacttcagtgaggaaatgcactgccagtttctagaaattctacgcatattgatggattcttttactacgtctggagcacatagagacgtagttattgagattttctacgaaagacatcttgactatttggttgatgtaatagcatcctcttgtcccccgaggagcttgtctcgatcatcatctaactcggtacatgttggtggaaatgctgaaggacactgtatcaagcctgagattttgttaaatgtttgtgaactgctgtgcttttgtgttgttcatcatccctacagaattaagtgtaattttcttatgaacaatgctatcgagaaaatccttacattgactcaacgaagggagaagtttttggttgtagcagctgttagatttatgcgtactattatatccagaaatgatgaccatctcattcgccatgttgtgaagttcaacttgctgaaaccaataattgatgtctttgttgacaatggggagagatataacatgctacattcaggagtactcgaattgttggaatacatacggaaggaaaatataaaaactctcattatctatgctattgagtctttctgggatgaacttgccatctttgaacactttggaagtattcaggccttcaaactcaagtatcaacagtacctggagagcgctgaaccaaggttgaatgctagtgtgcctgacatgagaaagaaggcagaacaaagaggtcttgagaaggaagaggaagactacttcaatgaggacagaagattcaggctccggccggcgggctaaacatgcacagaaccaaaataacaagcctaagtccaaggtccccaatggaagtgaagctgatgacactgatggcgcctctaggcctaaatctgctggacttgtggactatgacgatgatgacgatgaggacttcaatccaccaccaaaggagccttctaggcctgcagaggatgatgtgcccttaaacatatccccgttgaagcggaagccagtgaatgcagtggatgggaaacattcagacggagagggtcgcaggaggcaaaaaatagaaactagaattagttgtgctaaaattgctgctgttactagtacagctattaagcacacagatctacaaaacaagtatgcttcccacttgcttacgtcagccacaccaagtactgaagccaatggtatttttagtgaacatggtactaactatgaggagcaacaacatcctatggagaacacagaaacttcacgacaaactggtggtgattgtataaaagatgtgggcagtatgtctcccgagaaggccgtaaatactaccaatacaagcgattcggagccttattcagtaagatgactactacacagctggttggtccatgtacccatcctgtgctgtggtcaacaggaaggaatcagaatgtgtttggctccaagcgctgaatgcatcgatatcatgctggaaacatgattggaggtgacatagattgcagctacctttacatctcaagtaaaattccagttacccctttttgcgcctgtaaagttaattttccgcaaggacagatctgacaaacatgataataggaatgactgtagattcgaacattggatgggccttgctcctgctgctgcgctcgctattgtatcggtttatgagccaacgtagtagtgaatatgtgccttcaactttatttttctccacaattattgatactgttgtaaaacaagtaggaaggcatagtttatgttgaatagcgtttttgcaagactttgtgctaactcacctatatgattgtaatttgttggttaatagttttggtcggacatgttacgttggataattaatctggtcttgtgatagaataatttatgcagaattttttctttgttaagccaaatatgttgtgcacatttgacacaaactactacggtagaatttcagaagtgaataatgttcgatgtattgagatctgggttatggagtttatgttgaatagcgtttttgcaagactttgtgctaactcacctatatgattgtaatttgttggttcatagttttggtcggacatgttaccttggataattaatctagtcttgtgatagaataatttatggataattttttctttgttaagccaaatatgttgtgcacatttgacacaaactactaaggtagaatttcagaagtgaataatgttcgatgtattgagatctgggttatggatgacaggtgtacttgcgagaattgcaatggtatcctactgctccagaacaggtaaacatggtcactccatccgcaaagaagaatcatgtgttcaaccagtgtcaattcaacagaataaagaagaatcatgtgttcaaccagtgtcaattcaacagaataatctgttcagcagtttgctttatccgtgctcattgtactacgaacctccgccgtctacttgaatatcaagcctccacgggcagcaaagaatggcgcaaattattgagactcgacagcaatgagcttgatcagtatgttcagggacggtccggaggtgtccttgagggggtcgccgatgacggcagctttctgagcgtgcgacccaaccgaggctatatctaacaaactgcactatgtaaacagtctacattgtaaaataatattttacacggttatatacactctatttaagcatgatcttagtgtggttgtttaaacatggtcttagtgtggttggatgcaccacttgcccttgttaacaaggcccgtgttaacaaggtgaaaaaaaataacttcagatgtatgtcttgaaatagtgccaaaccacatacattaacaaagggtgtg

SEQ ID NO: 34482 - DNA, 3734 bp, Zea Mays
ggtaattaaacataacgaacacgcgcacaaaaaatattgacaaaaaccggaggggtaaaaggggaaaggccacggccgcctggaggagcgagagggcggaagaggggaagcggcagccgcaggcccgcagctcgtcgatggtggttagggtttcgccgcccgcaccctcgaccagctgaagaatcgcccggtggttgaagaggctcgcgcctcgccctacaaggctccaagggaagaggggatagacagcggcggaccgcggcgtgcggctgatggccgagcaggaggggagggacgcggaagcggggggcgatgccgcggccgcagcggtggcgtcgcacaccagcagcatgcagcgtgtcaaagtataccgtttggctgatggtgggaagtgggacgatcaaggaacaggttatgtttctattgattacattgagggttcaaaagaactaggtttgactgttttagatgaagatgacaatgatacactacttatgcacaacatcacatctgacgatatttacagaaaacaagaagaaacaatcatttcatggagagatcgtgaagcagcaacagacttagcgttaagctttcaggaagctgctggatgctcctacatatgggaacacatatgcgatattcagagaaaccttcagttcagtaaccttggtgctctggaagttggtcctcgtcaatcatcagaatctctagaagcctctagaataatgcattctaatgatgattcattccgctctgccaacggcggcgaattcagggagcttcctcctgttgagttgtctaatcttccttttattttgaagactgtattggaggctggcattacagatcagatgcacgtggcagagttgataacacaagataatgactttttcccaaagatagtggacattttcagaatgtgcgaggatttagagaacatagatgatcttcacatgattttcaaattggtcaagggaataatattgttgaacagtccatcgatctttgacaagattttctctgatgagtttattcttgacataatagatgatccagaggttccaagagtgcaaaatcaccgtgcttttctgaaagatcatgtagttttcaaagaggccatacgtattgaaaatgtttctgttgtttcaaagattcatcaaacatacagaatcggctatcttaaggatgttatactaccacgaatactggatgatgccactctagcaagtctgaacacaatgatacactcaaataatgcttcggttatttccctgctaaaggatgacacactctttattagacgactatttgccaggatgaggtcatcagatatttcaatggaatcaaaacgagaattggttctgttcttgcatgaattttgcacacttagtaagagtctaccacttgttcagcaactgcgactgtttcgggatctttcaggtgaaggagtttttgaaataatttctgatgtgttgcagagtcaagatagaaaaatcatttcagctgggacagatatccttatactttttcttaatcaggaccctaacctattgaggtcatatattgtccaacaagaaggaaattctcttctaggacttctggttaaaggcatggtaactgacttcagtgaggaaatgcactgccagtttctagaaattctacgcatattgatggattcttttactacgtctggagcacatagagacgtagttattgagattttctacgaaagacatcttgactatttggttgatgtaatagcatcctcttgtcccccgaggagcttgtctcgatcatcatctaactcggtacatgttggtggaaatgctgaaggacactgtatcaagcctgagattttgttaaatgtttgtgaactgctgtgcttttgtgttgttcatcatccctacagaattaagtgtaattttcttatgaacaatgctatcgagaaaatccttacattgactcaacgaagggagaagtttttggttgtagcagctgttagatttatgcgtactattatatccagaaatgatgaccatctcattcgccatgttgtgaagttcaacttgctgaaaccaataattgatgtctttgttgacaatggggagagatataacatgctacattcaggagtactcgaattgttggaatacatacggaaggaaaatataaaaactctcattatctatgctattgagtctttctgggatgaacttgccatctttgaacactttggaagtattcaggccttcaaactcaagtatcaacagtacctggagagcgctgaaccaaggttgaatgctagtgtgcctgacatgagaaagaaggcagaacaaagaggtcttgagaaggaagaggaagactacttcaatgaggacagtgatgaagaagattcaggctccggccggcgggctaaacatgcacagaaccaaaataacaagcctaagtccaaggtccccaatggaagtgaagctgatgacactgatggcgcctctaggcctaaatctgctggacttgtggactatgacgatgatgacgatgaggacttcaatccaccaccaaaggagccttctaggcctgcagaggatgatgtgcccttaaacatatccccgttgaagcggaagccagtgaatgcagtggatgggaaacattcagacggagagggtcgcaggaggcaaaaaatagaaactagaattagttgtgctaaaattgctgctgttactagtacagctattaagcacacagatctacaaaacaagtatgcttcccacttgcttacgtcagccacaccaagtactgaagccaatggtatttttagtgaacatggtactaactatgaggagcaacaacatcctatggagaacacagaaacttcacgacaaactggtggtgattgtataaaagatgtgggcagtatgtctcccgagaaggccgtaaatactaccaatacaagcgattcggagccttattcagtaagatgactactacacagctggttggtccatgtacccatcctgtgctgtggtcaacaggaaggaatcagaatgtgtttggctccaagcgctgaatgcatcgatatcatgctggaaacatgattggaggtgacatagattgcagctacctttacatctcaagtgtacttgcgagaattgcaatggtatcctactgctccagaacaggtaaacatggtcactccatccgcaaagaagaatcatgtgttcaaccagtgtcaattcaacagaataaagaagaatcatgtgttcaaccagtgtcaattcaacagaataatctgttcagcagtttgctttatccgtgctcattgtactacgaacctccgccgtctacttgaatatcaagcctccacgggcagcaaagaatggcgcaaattattgagactcgacagcaatgagcttgatcagtatgttcagggacggtccggaggtgtccttgagggggtcgccgatgacggcagctttctgagcgtgcgacccaaccgaggctatatctaacaaactgcactatgtaaacagtctacattgtaaaataatattttacacggttatatacactctatttaagcatgatcttagtgtggttgtttaaacatggtcttagtgtggttggatgcaccacttgcccttgttaacaaggcccgtgttaacaaggtgaaaaaaaataacttcagatgtatgtcttgaaatagtgccaaaccacatacattaacaaagggtgtg

SEQ ID NO: 34483 - DNA, 4270 bp, Zea Mays
cacgcctccacggccaccactccaacagcgtgtcaaagtataccgtttggctgatggtgggaagtgggacgatcaaggaacaggttatgtttctattgattacattgagggttcaaaagaactaggtttgactgttttagatgaagatgacaatgatacactacttatgcacaacatcacatctgacgatatttacagaaaacaagaagaaacaatcatttcatggagagatcgtgaagcagcaacagacttagcgttaagctttcaggaagctgctggatgctcctacatatgggaacacatatgcgatattcagagaaaccttcagttcagtaaccttggtgatgattcattccgctctgccaacggcggcgaattcagggagcttcctcctgttgagttgtctaatcttccttttattttgaagactgtattggaggctggcattacagatcagatgcacgtggcagagttgataacacaagataatgactttttcccaaagatagtggacattttcagaatgtgcgaggatttagagaacatagatgatcttcacatgattttcaaattggtcaagggaataatattgttgaacagtccatcgatctttgacaagattttctctgatgagtttattcttgacataataggtgcccttgaatatgatccagaggttccaagagtgcaaaatcaccgtgcttttctgaaagatcatgtagttttcaaagaggccatacgtattgaaaatgtttctgttgtttcaaagattcatcaaacatacagaatcggctatcttaaggatgttatactaccacgaatactggatgatgccactctagcaagtctgaacacaatgatacactcaaataatgcttcggttatttccctgctaaaggatgacacactctttattagacgactatttgccaggatgaggtcatcagatatttcaatggaatcaaaacgagaattggttctgttcttgcatgaattttgcacacttagtaagagtctaccacttgttcagcaactgcgactgtttcgggatctttcaggtgaaggagtttttgaaataatttctgatgtgttgcagagtcaagatagaaaaatcatttcagctgggacagatatccttatactttttcttaatcaggaccctaacctattgaggtcatatattgtccaacaagaaggaaattctcttctaggacttctggcaaccacatgaagaacttgcacttgccagataccaaaacttttccaaattcaatcccaaggtctgaaaagggcagcctcaacaaacaacctcccatatgctgattttgctgagtattttccatttgtaaagaaacaccatgtgtgagaatcttcaaccttgggctgcagttccacctctgagaggtctccaatagttaaaggcatggtaactgacttcagtgaggaaatgcactgccagtttctagaaattctacgcatattgatggattcttttactacgtctggagcacatagagacgtagttattgagattttctacgaaagacatcttgactatttggttgatgtaatagcatcctcttgtcccccgaggagcttgtctcgatcatcatctaactcggtacatgttggtggaaatgctgaaggacactgtatcaagcctgagattttgttaaatgtttgtgaactgctgtgcttttgtgttgttcatcatccctacagaattaagtgtaattttcttatgaacaatgctatcgagaaaatccttacattgactcaacgaagggagaagtttttggttgtagcagctgttagatttatgcgtactattatatccagaaatgatgaccatctcattcgccatgttgtgaagttcaacttgctgaaaccaataattgatgtctttgttgacaatggggagagatataacatgctacattcaggagtactcgaattgttggaatacatacggaaggaaaatataaaaactctcattatctatgctattgagtctttctgggatgaacttgccatctttgaacactttggaagtattcaggccttcaaactcaagtatcaacagtacctggagagcgctgaaccaaggttgaatgctagtgtgcctgacatgagaaagaaggcagaacaaagaggtcttgagaaggaagaggaagactacttcaatgaggacagtgatgaagaagattcaggctccggccggcgggctaaacatgcacagaaccaaaataacaagcctaagtccaaggtccccaatggaagtgaagctgatgacactgatggcgcctctaggcctaaatctgctggacttgtggactatgacgatgatgacgatgaggacttcaatccaccaccaaaggagccttctaggcctgcagaggatgatgtgcccttaaacatatccccgttgaagcggaagccagtgaatgcagtggatgggaaacattcagacggagagggtcgcaggaggcaaaaaatagaaactagaattagttgtgctaaaattgctgctgttactagtacagctattaagcacacagatctacaaaacaagtatgcttcccacttgcttacgtcagccacaccaagtactgaagccaatggtatttttagtgaacatggtactaactatgaggagcaacaacatcctatggagaacacagaaacttcacgacaaactggtggtgattgtataaaagatgtgggcagtatgtctcccgagaaggccgtaaatactaccaatacaagcgattcggagccttattcagtaagatgactactacacagctggttggtccatgtacccatcctgtgctgtggtcaacaggaaggaatcagaatgtgtttggctccaagcgctgaatgcatcgatatcatgctggaaacatgattggaggtgacatagattgcagctacctttacatctcaagtaaaattccagttacccctttttgcgcctgtaaagttaattttccgcaaggacagatctgacaaacatgataataggaatgactgtagattcgaacattggatgggccttgctcctgctgctgcgctcgctattgtatcggtttatgagccaacgtagtagtgaatatgtgccttcaactttatttttctccacaattattgatactgttgtaaaacaagtaggaaggcatagtttatgttgaatagcgtttttgcaagactttgtgctaactcacctatatgattgtaatttgttggttaatagttttggtcggacatgttacgttggataattaatctggtcttgtgatagaataatttatgcagaattttttctttgttaagccaaatatgttgtgcacatttgacacaaactactacggtagaatttcagaagtgaataatgttcgatgtattgagatctgggttatggagtttatgttgaatagcgtttttgcaagactttgtgctaactcacctatatgattgtaatttgttggttcatagttttggtcggacatgttaccttggataattaatctagtcttgtgatagaataatttatggataattttttctttgttaagccaaatatgttgtgcacatttgacacaaactactaaggtagaatttcagaagtgaataatgttcgatgtattgagatctgggttatggatgacaggtgtacttgcgagaattgcaatggtatcctactgctccagaacaggtaaacatggtcactccatccgcaaagaagaatcatgtgttcaaccagtgtcaattcaacagaataaagaagaatcatgtgttcaaccagtgtcaattcaacagaataatctgttcagcagtttgctttatccgtgctcattgtactacgaacctccgccgtctacttgaatatcaagcctccacgggcagcaaagaatggcgcaaattattgagactcgacagcaatgagcttgatcagtatgttcagggacggtccggaggtgtccttgagggggtcgccgatgacggcagctttctgagcgtgcgacccaaccgaggctatatctaacaaactgcactatgtaaacagtctacattgtaaaataatattttacacggttatatacactctatttaagcatgatcttagtgtggttgtttaaacatggtcttagtgtggttggatgcaccacttgcccttgttaacaaggcccgtgttaacaaggtgaaaaaaaataacttcagatgtatgtcttgaaatagtgccaaaccacatacattaacaaagggtgtg

SEQ ID NO: 34484 - DNA, 3486 bp, Zea Mays
cacgcctccacggccaccactccaacagcgtgtcaaagtataccgtttggctgatggtgggaagtgggacgatcaaggaacaggttatgtttctattgattacattgagggttcaaaagaactaggtttgactgttttagatgaagatgacaatgatacactacttatgcacaacatcacatctgacgatatttacagaaaacaagaagaaacaatcatttcatggagagatcgtgaagcagcaacagacttagcgttaagctttcaggaagctgctggatgctcctacatatgggaacacatatgcgatattcagagaaaccttcagttcagtaaccttggtgatgattcattccgctctgccaacggcggcgaattcagggagcttcctcctgttgagttgtctaatcttccttttattttgaagactgtattggaggctggcattacagatcagatgcacgtggcagagttgataacacaagataatgactttttcccaaagatagtggacattttcagaatgtgcgaggatttagagaacatagatgatcttcacatgattttcaaattggtcaagggaataatattgttgaacagtccatcgatctttgacaagattttctctgatgagtttattcttgacataataggtgcccttgaatatgatccagaggttccaagagtgcaaaatcaccgtgcttttctgaaagatcatgtagttttcaaagaggccatacgtattgaaaatgtttctgttgtttcaaagattcatcaaacatacagaatcggctatcttaaggatgttatactaccacgaatactggatgatgccactctagcaagtctgaacacaatgatacactcaaataatgcttcggttatttccctgctaaaggatgacacactctttattagacgactatttgccaggatgaggtcatcagatatttcaatggaatcaaaacgagaattggttctgttcttgcatgaattttgcacacttagtaagagtctaccacttgttcagcaactgcgactgtttcgggatctttcaggtgaaggagtttttgaaataatttctgatgtgttgcagagtcaagatagaaaaatcatttcagctgggacagatatccttatactttttcttaatcaggaccctaacctattgaggtcatatattgtccaacaagaaggaaattctcttctaggacttctggcaaccacatgaagaacttgcacttgccagataccaaaacttttccaaattcaatcccaaggtctgaaaagggcagcctcaacaaacaacctcccatatgctgattttgctgagtattttccatttgtaaagaaacaccatgtgtgagaatcttcaaccttgggctgcagttccacctctgagaggtctccaatagttaaaggcatggtaactgacttcagtgaggaaatgcactgccagtttctagaaattctacgcatattgatggattcttttactacgtctggagcacatcatcctcttgtcccccgaggagcttgtctcgatcatcatctaactcggtacatgttggtggaaatgctgaaggacactgtatcaagcctgagattttgttaaatgtttgtgaactgctgtgcttttgtgttgttcatcatccctacagaattaagtgtaattttcttatgaacaatgctatcgagaaaatccttacattgactcaacgaagggagaagtttttggttgtagcagctgttagatttatgcgtactattatatccagaaatgatgaccatctcattcgccatgttgtgaagttcaacttgctgaaaccaataattgatgtctttgttgacaatggggagagatataacatgctacattcaggagtactcgaattgttggaatacatacggaaggaaaatataaaaactctcattatctatgctattgagtctttctgggatgaacttgccatctttgaacactttggaagtattcaggccttcaaactcaagtatcaacagtacctggagagcgctgaaccaaggttgaatgctagtgtgcctgacatgagaaagaaggcagaacaaagaggtcttgagaaggaagaggaagactacttcaatgaggacagtgatgaagaagattcaggctccggccggcgggctaaacatgcacagaaccaaaataacaagcctaagtccaaggtccccaatggaagtgaagctgatgacactgatggcgcctctaggcctaaatctgctggacttgtggactatgacgatgatgacgatgaggacttcaatccaccaccaaaggagccttctaggcctgcagaggatgatgtgcccttaaacatatccccgttgaagcggaagccagtgaatgcagtggatgggaaacattcagacggagagggtcgcaggaggcaaaaaatagaaactagaattagttgtgctaaaattgctgctgttactagtacagctattaagcacacagatctacaaaacaagtatgcttcccacttgcttacgtcagccacaccaagtactgaagccaatggtatttttagtgaacatggtactaactatgaggagcaacaacatcctatggagaacacagaaacttcacgacaaactggtggtgattgtataaaagatgtgggcagtatgtctcccgagaaggccgtaaatactaccaatacaagcgattcggagccttattcagtaagatgactactacacagctggttggtccatgtacccatcctgtgctgtggtcaacaggaaggaatcagaatgtgtttggctccaagcgctgaatgcatcgatatcatgctggaaacatgattggaggtgacatagattgcagctacctttacatctcaagtgtacttgcgagaattgcaatggtatcctactgctccagaacaggtaaacatggtcactccatccgcaaagaagaatcatgtgttcaaccagtgtcaattcaacagaataaagaagaatcatgtgttcaaccagtgtcaattcaacagaataatctgttcagcagtttgctttatccgtgctcattgtactacgaacctccgccgtctacttgaatatcaagcctccacgggcagcaaagaatggcgcaaattattgagactcgacagcaatgagcttgatcagtatgttcagggacggtccggaggtgtccttgagggggtcgccgatgacggcagctttctgagcgtgcgacccaaccgaggctatatctaacaaactgcactatgtaaacagtctacattgtaaaataatattttacacggttatatacactctatttaagcatgatcttagtgtggttgtttaaacatggtcttagtgtggttggatgcaccacttgcccttgttaacaaggcccgtgttaacaaggtgaaaaaaaataacttcagatgtatgtcttgaaatagtgccaaaccacatacattaacaaagggtgtg

SEQ ID NO: 34485 - DNA, 1469 bp, Zea Mays
atggcagaggagaggtgggccttggttggaggacaaggccttgatggggagaagcagacagaggcaggagaaaaaatgagtgcagggtggaaaaaggcgcgtgtcaaagtataccgtttggctgatggtgggaagtgggacgatcaaggaacaggttatgtttctattgattacattgagggttcaaaagaactaggtttgactgttttagatgaagatgacaatgatacactacttatgcacaacatcacatctgacgatatttacagaaaacaagaagaaacaatcatttcatggagagatcgtgaagcagcaacagacttagcgttaagctttcaggaagctgctggatgctcctacatatggtgatggatgcaagagctatggtgcagttaccaagtttttgttcaattactcccttttgatttatttttgtgttctttgttggtgctgtgcagggaacacatatgcgatattcagagaaaccttcagttcagtaaccttggtgctctggaagttggtcctcgtcaatcatcagaatctctagaagcctctagaataatgcattctaatgatgattcattccgctctgccaacggcggcgaattcagggagcttcctcctgttgagttgtctaatcttccttttattttgaagactgtattggaggctggcattacagatcagatgcacgtggcagagttgataacacaagataatgactttttcccaaagatagtggacattttcagaatgtgcgaggatttagagaacatagatgatcttcacatgattttcaaattggtcaagggaataatattgttgaacagtccatcgatctttgacaagattttctctgatgagtttattcttgacataataggtgcccttgaatatgatccagaggttccaagagtgcaaaatcaccgtgcttttctgaaagatcatgtagttttcaaagaggccatacgtattgaaaatgtttctgttgtttcaaagattcatcaaacatacagaatcggctatcttaaggatgttatactaccacgaatactggatgatgccactctagcaagtctgaacacaatgatacactcaaataatgcttcggttatttccctgctaaaggatgacacactctttattagacgactatttgccaggatgaggtcatcagatatttcaatggaatcaaaacgagaattggttctgttcttgcatgaattttgcacacttagtaagagtctaccacttgttcagcaactgcgactgtttcgggatctttcaggtgaaggagtttttgaaataatttctgatgtgttgcagagtcaagatagaaaaatcatttcagctgggacagatatccttatactttttcttaatcaggaccctaacctattgaggtcatatattgtccaacaagaaggaaattctcttctaggacttctggcaaccacatgaagaacttg

SEQ ID NO: 34486 - DNA, 384 bp, Zea Mays
atgtcggcagcacgacgacgtttgaggagggagcgaggagaccgacgacgtctaaggaggagattgtgtttggggctcctcgcgacggcccaggcactgcgacaatgtttgaggagtagacaagaaggcgctccactcggatctgctggagaccacgtcgacgccgtcagcatgatatcttctgaggatgggtggaggggaaggggatggtgctcatctaggcgtctggacacatcgttggtggggggtggagccttggagctccatcgcgcaacaaagagggcgctagcggtcgaagcccggaggggtctggaagcatcgcgtagcgaagatgttaggataggaacgctttcacgggtgggggacgcggctggaagccgttga

SEQ ID NO: 34487 - DNA, 967 bp, Zea Mays
cttctaaatcaccagtccatcttcgatttgctgagtcacccaattatttcttatataaatacgccaggtcaccacagcatcccttgtgtcaacctgctacatcatcgttgcatctagcatatcaatctaattatgtcaacactgatgattgtttcagtttggtactccagtgtatatttagtggagtgccactcagcctaacttaggtcagtacaattacactgtccattggaagttgatgtcctgtttagagtttttgggtgaagcttgcgtctttcagatagagcaaaagacaacaattcagattacagtttggatgctctgttttgcgagtgacgttatacactacgattaaaacacttgttcattacgtagctttctttgtggcgtttggatgaaccctctgtgttcatttcaatgtggctttccttagattcactgtgtttgcttttactttgttacaaacagttgtggtttgttgctttcaatttatattagggcacatgttcaaccttgctgagttgatagtaagcagttgaaatatgcttggcacctcctgcattatatgctcttttgatctgagatagctcttgtacttggttgcacattagatcattcagtttgttcatatgaggttcatgcttcaaagcaactttattatcattcttattggattaaccaatagtattctgcgggctgacgaagagcttctttctgattttgggattgatgttaaagatgaatgcaccaaatttggtctcgtagataatgtcaaggtacacctaaccccacatatatgttttttgttcctttttatattttgcaaattttgtgtaagctttaaattaatcaatgataggttgtcatatttattttttcaccaaattaatgaatgagatgaccaatattaatcaatgacaggttgtacccctctgattatcttgtactagtaaatgatgtgcgccct

SEQ ID NO: 34488 - DNA, 410 bp, Zea Mays
ctgctgtttgtttttttttaaataacaatgtagtagaaagtgcctttttgacctttaactttagaaaatcataactaaatgaccatcccttagatttctgtgatttttagcacagaagcctattattgctattagatgccagcaaaaataacatttaggacagaacccaccactaattaggaggtgtagtataaagtgaccccttttacaccactcttgttatttttgtccaaagcatagcctctatattttaagcctcaaattcttaaagcaggctagaatagcaaatggcaactcactgtaatttttacaaaaaattttggaaattattaaaccactgtcatagttcaaacctacactagaaaccataagtagagaataaagaaaggggaaaatgaataataggaaat

SEQ ID NO: 34489 - DNA, 1417 bp, Zea Mays
ctctttctttgattcagcaaatcgctccttatcatatgcatctaccaggtatactacagcatcaacctgttgcaatatgaaaaagaaaaatcaggcagacatgaaaagctgcatctgatggaatagaagcagaggcataagaaaaattattagcttatagcgagctgcaaaagaaagatagaacacaggaaccgaacaaataactatctgcattctgcaactaatcattgcttcaaaaaatttggtacaaggaataaggatagcacagtgtgcaaagactataggaaataacggaaacatcagcatgtaaaatgaaatatcacctaacaaaatacatatttagaccaatgttaaaaataaatcatgcaaacaaactttgggtgcctcttgatggtgaaatgagtcaatgaaaggatgaatacaccatgcattacaaagtagatataagataataaaagatgcagtaatgttacaaggtagagcaagatgacacaaagaataccagcgcaaagtaaaggcatatgctaatgcattgcaatacgacatgtaacacattagtcaatacaaaatggctaaaagtctgaagtgcacattaaaagctttggctacacaaaaggaataatttatggagtggccaatgacttgtgctagaaatagtgtgaagatgacgaatgcaactttcacgttgttaattgaaaaaatgttatcagttgaaaattgccgaagttacagtaacaaaaagtgacagaaagtagtatgtctaaagaacacatgccataaatgtcaatataaatatgtatgcaaccagaaaaatgtattgacagagatacagtatgtatacaattgtggattgtgaatcaaaatgcaacgagtacatgaagcaactgatgcagttgcctcccaaagtcacatacatttcaaagagccttaggactgacaacgaaagaaacatacaacaacatgcacctttaggacctgggaatttctgtgtgtacatgttattgattctaaacctacatcacaaacttgtcaattttttatactcaatttcacgacgtctctacagagtagtaaagaagccgaactgatggctgatgcatgtaaaccgcttccatacagaagctacttatcaatttatcaaagtagcaaaatcagaattctaagacgagattggattacgccaaaaggaaaagaacgacctcctatgtaagtaacctaggacggatcaaaattcaaaacacacacgttgttttgaatcaagggcacaacatagcgcgcaaggcgtagatctgaccacacggcgcgtattaaaagaacggatatggagctcgacctttgcgtagtaatccttccacacgcggcgcgcgatctggtggccgccgaggtcgaaggccttgaacttgatcttgccgatgct

SEQ ID NO: 34490 - DNA, 1637 bp, Zea Mays
gtgccttccactaggtgctgcgctcgtcctatctcggctcccagcgcttgaccgctcgtcgtgtccttgctaaagcaccggccggtcgtctctagggcccccgccctcctgcttcattgcgtcgagccaccatcctggcgtgaatgcgtgatccactgcgcccagccactctccatcgctaaccctggccgcagctcatcctggtcaggcgtctctctgttcccgcctggtccttgtgctcgtggtcgacctgcaccgtcacccagttcaccggtgtcatcggcgcacgcctccctcaccaacgatagccacttcgccgtgtcttctccaaccttcacctgttccagcagctagacgtcgcactgttcctcctccttgtcgcggtttcccctagcatgttcggactcgtccgggtgctgaccccctccccgcggcgctcgggacttcgtcggcgctgtctggctatgctcgtcgcgctgcacgtcttcatgttcctctgcgtcaatctcgcttcgccgaagcaatagcaacactagcgtcgtctcccagcatgggttcgtgaatttcctcgtcgaaccggcatcgtgtcgtcatccgagctctctgaagaagtggacatcgaagaaaaatttgctccgatatctgaatacccagtggtggagtttcatctaactgtttaccagagtagaagggttttgggatcttctcctgcaataaggagaagttttattcccttatcctttgggtagttacttcatgtggaggacttgaagcttagaatgtttttatatatctcttatggaaaggcttcacccttcccattattgtagttaagttatgcacttcgagtactatcaggacttgtaataaatacatctctttctaccatgtaaaacttgagttctggaatgtaaagtgtactttgtaaaagtcttccgctctatctccaatatgtgtgtatcaaatgtgattactgtaatatacctgttatatgggagatccttgggatgatgagttccagttggcgaactcgatagccttgttaagttactcggtacacgtgcacaaccatctgaggtcattaaggcaagaattggtgcatgtgggcctgataacttgggagggctgtcacattagagatcggatcatgcactcacgatgttgggggccttctccttccaaaggtcctcaaaaacataattaaccatttatcttcagcataagctattacaggaagcttcgtcatcaggatataagcctcttccttatgacgaagacacacaagatgaagacagatccaaagaacgccgaagctatcaccaaatggaagagcttcggctcacaacgaagcagaggaataatgatgatgatcgaagggggaaaaatactacttagtcctttataacttgtattacgatggtgtgtaaacattgaggacataaatgtatttttgctcgggctacgtcccgtgcctataaatagatgaacagtaacatcgtacggttcacgctagattgtattcactctctcgcatcctcaccttcgagcaggtcgaaggtatcaatgtaatattaacattgttggtattcatatatgatttatgggatgcaagaataaatgaactattaagatataat

SEQ ID NO: 34491 - DNA, 2666 bp, Zea Mays
gtgccttccactaggtgctgcgctcgtcctatctcggctcccagcgcttgaccgctcgtcgtgtccttgctaaagcaccggccggtcgtctctagggcccccgccctcctgcttcattgcgtcgagccaccatcctggcgtgaatgcgtgatccactgcgcccagccactctccatcgctaaccctggccgcagctcatcctggtcaggcgtctctctgttcccgcctggtccttgtgctcgtggtcgacctgcaccgtcacccagttcaccggtgtcatcggcgcacgcctccctcaccaacgatagccacttcgccgtgtcttctccaaccttcacctgttccagcagctagacgtcgcactgttcctcctccttgtcgcggtttcccctagcatgttcggactcgtccgggtgctgaccccctccccgcggcgctcgggacttcgtcggcgctgtctggctatgctcgtcgcgctgcacgtcttcatgttcctctgcgtcaatctcgcttcgccgaagcaatagcaacactagcgtcgtctcccagcatgggttcgtgaatttcctcgtcgaaccggcatcgtgtcgtcatccgagctctctgaagaagtggacatcgaagaaaaatttgctccgatatctgaatacccagtggtggagtttcatctaactgtttaccagagtagaagggttttgggatcttctcctgcaataaggcaagtcccggtgcatttaccacttcccttgtgtttacaaaattttatcacttatatgttgcatcagatgataggaattgattgattaaacacttgttgcattaccatccttgaaagattggttaccataccttgtcacctgttttataaaagctagagatgcttagtcatgctgatagactaagaaaaaaatgtttttttatctatgactcatgttttttcaaaaaaaagggtttgggataatgaaggcatcaagacgttgataaattcgttatccaggcatggcccctctgccaggcgccaaaattttgaaatagtttaaaatgggaccagacgctgagcaagaaaagtcgctcgtctgtgtcgattaaggaccgtaccgattgttggcctgctgatctaggaccttttatctggccacatacctcattatgggtaagcctgaacccggctattccatacgtgaaaagacaatcgcgcactgggaatggagagatggcgagagtggcatgtatcctcctgacaaaggaccgcctaaaaggggtggtgtgctctcgggtggcgcagacctgttcatgtgatggaggatctgtgggaatggtagacatgtgcaaaagagttaagggaagcatatgtcgtgtggttggagatcccaagctaggtattaatcgattcggatcgccgaacttttcggatatgaagactagatcttcgaccggcagcgtagttaacaagtataacaatgttttgattaaaagcaagctagtgtaggtcaagtgaatgatctagattaggcaaatgctagatttaggctagaagattcaggtaataacctaacttgtgaagtaaaacttggcttaaggatccattattagtaagcctgcttttctgcaaaaaggagtccttgataattgatgagattttccttgagtcccaaatccagcatacccttgagagtcttttctttagtcgggtaagtcttgctgagtaattgcgtacttagggttttattccttgttgtttttgtaggagaagttttattcccttatcctttgggtagttacttcatgtggaggacttgaagcttagaatgtttttatatatctcttatggaaaggcttcacccttcccattattgtagttaagttatgcacttcgagtactatcaggacttgtaataaatacatctctttctaccatgtaaaacttgagttctggaatgtaaagtgtactttgtaaaagtcttccgctctatctccaatatgtgtgtatcaaatgtgattactgtaatatacctgttatatgggagatccttgggatgatgagttccagttggcgaactcgatagccttgttaagttactcggtacacgtgcacaaccatctgaggtcattaaggcaagaattggtgcatgtgggcctgataacttgggagggctgtcacattagagatcggatcatgcactcacgatgttgggggccttctccttccaaaggtcctcaaaaacataattaaccatttatcttcagcataagctattacaggaagcttcgtcatcaggatataagcctcttccttatgacgaagacacacaagatgaagacagatccaaagaacgccgaagctatcaccaaatggaagagcttcggctcacaacgaagcagaggaataatgatgatgatcgaagggggaaaaatactacttagtcctttataacttgtattacgatggtgtgtaaacattgaggacataaatgtatttttgctcgggctacgtcccgtgcctataaatagatgaacagtaacatcgtacggttcacgctagattgtattcactctctcgcatcctcaccttcgagcaggtcgaaggtatcaatgtaatattaacattgttggtattcatatatgatttatgggatgcaagaataaatgaactattaagatataat

SEQ ID NO: 34492 - DNA, 1767 bp, Zea Mays
attagtttcagcatttcggcctttctgcgaaccctgctctatctcgagcttatcttacagccaactgcattcaattacatccctctctttacatttgcaaaaggaaagatgactccacggcgtcttcctcgtttcatttgttttttgagtggaacctcgtttcatttgttttcacgctagctcacgtgttccatcgccctagctcgcttgctgtttcttgctgagattgcagttttgggtttgttaattttgaatactttcctcatatccccgttcttcaatccttggtccatcgcgtcagtactcagtagacaccagacaccatttcttggcgagccgtagttgatgtcatctgtcttccatggttcagcctcccggaagaaggtccctacctgactggagatccggcctgccagaggatctcctcgagtccatcgggaagcgtctcgcgtcaggccacgacgcggcggccttccgatccgcttgctccccatggcgcgccgccgtcccgttcgcgatcttcgggccgctcctgctactcccgttcgacgccgactcggaccgcgttggcttctattgcgtctcggagaaaaaggtcttctccaagacgctgcccgacgtgcgcggcaaggtcccgtgcggctcgtcgtgtgggtggctggcgctcatggacgaggctgcggccgtcacgctgctgaatccattcgctggtgctggtgccggtgccggcgcgggtgcccgccgcattgagctcccgccagcaggtgaacatgtcgcggcggcgtcctcatcggaacccgtgtataaggtccacggccggtgggtcctccgttccaccgacgactacggaggagacatagatgcaggcagagtcatcaagctacaagacatgagggacgtgtttttccgtgagatcgtgctctccgcgccgcctgacgccggcagcgagtgcgtggccatggccatgctcgggtgctccacggaggtcgcgttctgccgggttggagtcgacaacgcatggacgctgctcgacaccaaactggacttctccgtggcctccatcgtccactgccaagacaagttcttggctatcgactacactggagagatctccgtcttcagcagcaacgccggcgcatggacgctgttgccatcgctgtcgccacctgcggggctctgtcaccggagctacctggagtcaaacggcgagctgcacattgtgggtgccatggtgagcacgtcccacgagacgcagacgttcacttacagcagcgcgatctacgcttgcaacctccacgaccgtacgccggagtggtccagggtgaaggacatcggtgatcagacactgttcgtgtctaagcatttcaacggaagcttcagcggaacaagtgtatcggagtacaaggagaacacaatctacttctctgaacccttgtatggggatccgtacgacatggtgcatcgtttggagatcgttgatgttgttaccggcagatctgaagtgaagcctgtgcacgagaagatgcagggttccgagattctaggttggattcgacccaatctgtggaagggaggtgggtattcagagcacaaggaaaaatcgcagatagaaggaacttctaatgtgacaggctcgccaaaacatgagatgtagaaatcaagtctgttgttgttcagtccaagaatacttgagatatatattgttatccctgcctagctatcaacaatcaccgatcttagatgtgtgacactcgttggagaagagag

SEQ ID NO: 34493 - DNA, 1892 bp, Zea Mays
gtactcagtagacaccagacaccatttcttggcgagccgtagttgatgtcatctgtcttccatggttcagcctcccggaagaaggtccctacctgactggagatccggcctgccagaggatctcctcgagtccatcgggaagcgtctcgcgtcaggccacgacgcggcggccttccgatccgcttgctccccatggcgcgccgccgtcccgttcgcgatcttcgggccgctcctgctactcccgttcgacgccgactcggaccgcgttggcttctattgcgtctcggagaaaaaggtcttctccaagacgctgcccgacgtgcgcggcaaggtcccgtgcggctcgtcgtgtgggtggctggcgctcatggacgaggctgcggccgtcacgctgctgaatccattcgctggtgctggtgccggtgccggcgcgggtgcccgccgcattgagctcccgccagcaggtgaacatgtcgcggcggcgtcctcatcggaacccgtgtataaggtccacggccggtgggtcctccgttccaccgacgactacggaggagacatagatgcaggcagagtcatcaagctacaagacatgagggacgtgtttttccgtgagatcgtgctctccgcgccgcctgacgccggcagcgagtgcgtggccatggccatgctcgggtgctccacggaggtcgcgttctgccgggttggagtcgacaacgcatggacgctgctcgacaccaaactggacttctccgtggcctccatcgtccactgccaagacaagttcttggctatcgactacactggagagatctccgtcttcagcagcaacgccggcgcatggacgctgttgccatcgctgtcgccacctgcggggctctgtcaccggagctacctggagtcaaacggcgagctgcacattgtgggtgccatggtgagcacgtcccacgagacgcagacgttcacttacagcagcgcgatctacgcttgcaacctccacgaccgtacgccggagtggtccagggtgaaggacatcggtgatcagacactgttcgtgtctaagcatttcaacggaagcttcagcggaacaagtgtatcggagtacaaggagaacacaatctacttctctgaacccttgtatggggatccgtacgacatggtgcatcgtttggagatcgttgatgttgttaccggcagatctgaagtgaagcctgtgcacgagaagatgcagggttccgagattctaggttggattcgacccaatctgtggaagggagagggcaattcaggtattcatggcaatttcttaatgggataaagtcatagatgtaatgtcggccatggtatctttctccaatacctaccatgccatgtggatacccaaatctatattgggccctagcccaggtgggtattcagagcacaaggaaaaatcgcagatagaaggaacttctaatgtgacaggctcgccaaaacatgagatgtagaaatcaagtctgttgttgttcagtccaagaatacttgagatatatattgttatccctgcctagctatcaacaatcaccgatcttagatgtgagtgttcacatatcttttgtttcatggtgtgataaattctaggtttacttatgtcggagagtagatcttcggccgggtggcgaagtgcacccgccctaagtcctgagatgaggaagggtgtaggcatttcgcttgattgttggagagaaggggaagtacacaagaacacacaagggtttagagtggttcgggccgtcggagcgtaataccctactccactgtgagatgtattgcttgagagcttgtatgagccagcgagtcttagattgcgtgtgtgtgtaacgtcgcatgcctccccttttatagctgaagggggg

SEQ ID NO: 34494 - DNA, 2062 bp, Zea Mays
attagtttcagcatttcggcctttctgcgaaccctgctctatctcgagcttatcttacagccaactgcattcaattacatccctctctttacatttgcaaaaggaaagatgactccacggcgtcttcctcgtttcatttgttttttgagtggaacctcgtttcatttgttttcacgctagctcacgtgttccatcgccctagctcgcttgctgtttcttgctgagattgcagttttgggtttgttaattttgaatactttcctcatatccccgttcttcaatccttggtccatcgcgtcagtactcagtagacaccagacaccatttcttggcgagccgtagttgatgtcatctgtcttccatggttcagcctcccggaagaaggtccctacctgactggagatccggcctgccagaggatctcctcgagtccatcgggaagcgtctcgcgtcaggccacgacgcggcggccttccgatccgcttgctccccatggcgcgccgccgtcccgttcgcgatcttcgggccgctcctgctactcccgttcgacgccgactcggaccgcgttggcttctattgcgtctcggagaaaaaggtcttctccaagacgctgcccgacgtgcgcggcaaggtcccgtgcggctcgtcgtgtgggtggctggcgctcatggacgaggctgcggccgtcacgctgctgaatccattcgctggtgctggtgccggtgccggcgcgggtgcccgccgcattgagctcccgccagcaggtgaacatgtcgcggcggcgtcctcatcggaacccgtgtataaggtccacggccggtgggtcctccgttccaccgacgactacggaggagacatagatgcaggcagagtcatcaagctacaagacatgagggacgtgtttttccgtgagatcgtgctctccgcgccgcctgacgccggcagcgagtgcgtggccatggccatgctcgggtgctccacggaggtcgcgttctgccgggttggagtcgacaacgcatggacgctgctcgacaccaaactggacttctccgtggcctccatcgtccactgccaagacaagttcttggctatcgactacactggagagatctccgtcttcagcagcaacgccggcgcatggacgctgttgccatcgctgtcgccacctgcggggctctgtcaccggagctacctggagtcaaacggcgagctgcacattgtgggtgccatggtgagcacgtcccacgagacgcagacgttcacttacagcagcgcgatctacgcttgcaacctccacgaccgtacgccggagtggtccagggtgaaggacatcggtgatcagacactgttcgtgtctaagcatttcaacggaagcttcagcggaacaagtgtatcggagtacaaggagaacacaatctacttctctgaacccttgtatggggatccgtacgacatggtgcatcgtttggagatcgttgatgttgttaccggcagatctgaagtgaagcctgtgcacgagaagatgcagggttccgagattctaggttggattcgacccaatctgtggaagggaggtgggtattcagagcacaaggaaaaatcgcagatagaaggaacttctaatgtgacaggctcgccaaaacatgagatgtagaaatcaagtctgttgttgttcagtccaagaatacttgagatatatattgttatccctgcctagctatcaacaatcaccgatcttagatgtgagtgttcacatatcttttgtttcatggtgtgataaattctaggtttacttatgtcggagagtagatcttcggccgggtggcgaagtgcacccgccctaagtcctgagatgaggaagggtgtaggcatttcgcttgattgttggagagaaggggaagtacacaagaacacacaagggtttagagtggttcgggccgtcggagcgtaataccctactccactgtgagatgtattgcttgagagcttgtatgagccagcgagtcttagattgcgtgtgtgtgtaacgtcgcatgcctccccttttatagctgaagggggg

SEQ ID NO: 34495 - DNA, 1581 bp, Zea Mays
tcaattacatccctctctttacatttgcaaaaggaaagatgactccacggcgtcttcctcgtttcatttgttttttgagtggaacctcgtttcatttgttttcacgctagctcacgtgttccatcgccctagctcgcttgctgtttcttgctgagattgcagttttgggtttgttaattttgaatactttcctcatatccccgttcttcaatccttggtccatcgcgtcagtactcagtagacaccagacaccatttcttggcgagccgtagttgatgtcatctgtcttccatggttcagcctcccggaagaaggtccctacctgactggagatccggcctgccagaggatctcctcgagtccatcgggaagcgtctcgcgtcaggccacgacgcggcggccttccgatccgcttgctccccatggcgcgccgccgtcccgttcgcgatcttcgggccgctcctgctactcccgttcgacgccgactcggaccgcgttggcttctattgcgtctcggagaaaaaggtcttctccaagacgctgcccgacgtgcgcggcaaggtcccgtgcggctcgtcgtgtgggtggctggcgctcatggacgaggctgcggccgtcacgctgctgaatccattcgctggtgctggtgccggtgccggcgcgggtgcccgccgcattgagctcccgccagcaggtgaacatgtcgcggcggcgtcctcatcggaacccgtgtataaggtccacggccggtgggtcctccgttccaccgacgactacggaggagacatagatgcaggcagagtcatcaagctacaagacatgagggacgtgtttttccgtgagatcgtgctctccgcgccgcctgacgccggcagcgagtgcgtggccatggccatgctcgggtgctccacggaggtcgcgttctgccgggttggagtcgacaacgcatggacgctgctcgacaccaaactggacttctccgtggcctccatcgtccactgccaagacaagttcttggctatcgactacactggagagatctccgtcttcagcagcaacgccggcgcatggacgctgttgccatcgctgtcgccacctgcggggctctgtcaccggagctacctggagtcaaacggcgagctgcacattgtgggtgccatggtgagcacgtcccacgagacgcagacgttcacttacagcagcgcgatctacgcttgcaacctccacgaccgtacgccggagtggtccagggtgaaggacatcggtgatcagacactgttcgtgtctaagcatttcaacggaagcttcagcggaacaagtgtatcggagtacaaggagaacacaatctacttctctgaacccttgtatggggatccgtacgacatggtgcatcgtttggagatcgttgatgttgttaccggcagatctgaagtgaagcctgtgcacgagaagatgcagggttccgagattctaggttggattcgacccaatctgtggaagggagatcaagaccaagtttgtatatgggaaacattaaaattgtgggggtgatccaagcataaattgcagtcatatagttag

SEQ ID NO: 34496 - DNA, 1803 bp, Zea Mays
aaaaaaatggatgctttcatggggtcagtgctgggtgccctcctggccgtgctcgcctccacgctgctgatcggagcgctgttctttctggtgtggaagccctacgtcgtcacccggtggtttcggggccagggcatcgggggcccaagctacaggttcctcgtcggctccctgccggagatcaagcggatgaaagccgccggcagcaagatcacactcgacgtcggctcccatgacttcgtccccatcgtgcagccgcagtaccgtagatgggtatccgattacgggaagacatttctgtactggttcggcgcggtgccgaccatctgcgtcgccgaggtgggcctggtgaagcaggtgctcgcggagaggacaggcctgttccccaaggactacatgaacgacagcatggaggtactccttggcaagggtctcgttctcgccaacggcgaagactggaaacgccaccgcgaggtggtgcacccggccttcaagcccgacaagctcaagacgatgtcggtggtcatggccgacctggtgcagcggatgatgcagcaatggcgatctcagatacagcgggccagcaaccatgaggctgaaattgaactcagcagcgagttctcggagctgacttcagatgtcatcgcgcacacggccttcggtaccagctacaaggagggtaaggaggtgttcgtcgcgcagaaggagctccaagaactcacattctcgacatggcttgatatccctgctcctgcttgtctaagccgacgagttgaagagctggacaagaaggtgaggagcatgctcatggcgataatcgaagggcgccttgccgcgaggggcaccagtggatacggcaacgatctgctcggcctgatgctccaagcgcgcgctctggagcaagaagggcaccagatgctcaccacggaggagatcgtggacgagtgcaagaccttcatcttcgctgggcaggacaccacctcgcacctcctcacctggaccatgttcctgcttagcaggtactctgagtggcaacacaggctgagggaggaggtgctgagagagtgtggcgatgcagtgccaaatccggacacagtcaccaagctcaaactggttaacatggttcttctcgagtcattgaggctctacagccccgtggtgttcataagaagggccgtaggctcagacatcctgctccgcagcacgagggtgcccaagggaacaatgctgtcgataccaattgcattgctgcacagggacaaggatgtctggggccaagatgctgacgagttcaaccctgacaggttcgagcatggcgtgtccaatgccgctgccaaacaccccaatgccctgctgtccttctcccaggggcctagggcttgcatcggccagaacttcgcgatgcttgaggcccgtatcgggatcgccatgatccttcagaggttctcgtttgagctctcgccaaactatgtccatgcacccaaggaagcggtcacccttatgcccaggttcgggcttcccatcatcctgaggaaccttcacgattgagatgtgctaccataaatatatatacgcactgccacttccttttgcccgaggtttgtcacactaaacaaacacttgtgggtatttggtatgtcattatgtgatgctgttgtatttttttactttatttacggtttgctttagtttcttacgcagaatgtaatgaataaaaacttgtcagggagattacctgcaataattatagttgtgttcctacactatagcagcatcgtacaaagaagacatactgaatgatcg

SEQ ID NO: 34497 - DNA, 2789 bp, Zea Mays
ggcgactttgcggcgcgcaggcgccgtaggcgggcggcgggagcgcgcggcgtttttttagcggaagcgcgcaggatttttagcaggagcgcgtgccgggccgacctgctcccgcgtgggaaaatccatgcgctgctcccgctcggcctccctcctccacacgcgaacttggcctccggctactcccccgccggctgctccccttcctgctcccccgccgaaatgatagcctgcggtgtacaagtgaaaggattaaggatgtcatcagaaactgcagctgcaccttctgaaactgaagcagctagagcgaatctcctaaaaagaaattcagatgatgttggatgggaatatggtgttctggttgatgctaacaacaaagacaaggtgaagtgtaagttctgtgacaaggagatgaggggagggatttataggttgaaggagcatcttgcccatgttggaaagaatgtgaagaaatgcacgtctgcaacaccgcaagctctagaggctaaagagaagtgcaagaaagcaatagaggctgcaaaaaaggaagagggaggagaagactgttcggttggagaggagttagaagaagtcacttgtgttggaagctcacaacctcacaaattagggccaattgacaaatggacacgtgctattgatcctactaaggctgattctttcaaacaacagcagctgaacaaggaactgtggaaagaaagagagcatgaggtgtacaagtttattgcaagatgggcctataatcgtggaatacctttcaatgcatgtgacaatgatgagttcaagcaaatgtgtgaagcaattggacaatttggaccaggacttacacctccaactcaagatgcctttcgaggtagtttgctggaagaagaatatgaaagaaccaagtgtttgctgcaggaacgtgaagccgagaagatgaaaaatgggtgctctattatgaccgatgcttggtcagataggaagaggagaagcataatgaatatatgcactaattgtgctgatggaacctccttcattagctcaaaagagatgtcagatgtgtcacacacaagtgaagtcatttttgaattagtggacaaagcaattgaagacattggtgaagaaaatgtggtgcaagtagtcactgacaatgcctctaacaacatgggagcaaagaagctattgcttgtgaaaagaccacaaatattttggacctcttgtgcagctcacacaatcaacttgatgctccaaggaattggcaacttgcctcggttcaggaaagtgattgaccaaacaaagtcatttaccatatttgtgtatgaccacacaagaacattggagtgcttgagatacttcacagaggggaaagagctagtgaggccaggagtgactaggtttgcttcatactttctcactttgaacagcatgcaagagaagaaggaccaattaaggaagatggtggttcatagcaggtgggactcattaaaggatgtgaaatcaaagaaaggaaaaaaggccacagctactatattgagtccagccttttggaaggatgtgaagctaatgttggctgtttttgagccattggtcaaagtcctccgtttggttgatggggatgtgaagccatccatgggtttcttttatggagagctactaaaggcaaagagagagctttttttgctgaatccacactatagttatgctaacccatcaatctttgatgagcccaaaatgaatgaagccttcatatcttgtgttgagcaattttattatcatgatgaggaccaacaagaacaggctgccaactttgaattgaaaaaaattcagaatagagaaggaccatttagcaagaagcttgcaagaacttttcaaaactatgattacaatccagcatcatggtggcggttatatggaactgaaacaccagctttacagaagatggctacaaggatattatctttgacatcaagctcttctggttgtgaaagaaattggagtgggtttgaagggatacacactaagaagagaaataggctgactacaacccgcctcaacaagttggtctatattcagttcaataacaggctgatgaataagagagaaaagatcaagtcaaagaaaatcactgatgttctcttgtctagtgatacaactgaagctcaaggttttctccaagagggtggagatgattgtgcacaagttgtctttagagatggggaggaagatgagatggaaggtacagggataccttggtctgttattggagagacagtgggagcagaagaacaacttgagcctcgtagaagtgcaagagtgagagagctctatgaaggagaagagtttgagtctgaagaagaagagtatgaagatgaagatttgtgctacagtgaagatgaaatatgatctggaccatcttcatctagtagtgaagccttttgtgatgccctggtcttatgaactacagctatgtcactttgtgtctgtgtgtcttcttttgtgtgagacctgaactaagaactatgtgcttgtgctgtcctttatttataaattgtgttctgcacttgtattactgtcctatctacttgtgttgtaattaccagctgctgcctgctgatatggtgtgctcaactgctcatgaatgggaggctgctgaaatcatccagataagtcacaatttagtgttttctatttttttgatgaacagctagctgtctattgactaatttactaactactagctgtcaaaatgtgttacagccttgcaggagctaggaacatgcaagagtaag

SEQ ID NO: 34498 - DNA, 1345 bp, Zea Mays
atgtgtggggaagtgagatcaacaggacctcttgttatggagcctaccacaactcacatagcagatacatcaaggtctacaggtaggacggaaacagagaagaagacgatcaatggagtgattaggttggcactaatcatccacccctatcagaagatcacacaatcccgagataggccccctccttccctatctcagactggtgtgagaaacatgtacgatttggactggaatcgttggatggtgactgtgcaaggggtagaggaaatttcgctggatagatcctcaaaaggcatgcttgtctcaagagtggcagctctccgtgatggtactgtcgacctgttgcgtaaggaattcaaaaactggaagaccttgggcgcacaggttagatttggtggaatgtggttcggatcgatcgtccttagctagctgtctctgattagaacgcactgctaagagcacactaatttgacttggtctctggtgtcttcatttcatcgtactgttttatactagactgaatttcaattcaacattcactacaaaagatgagtagaccgtcgtgcatcctgcttttagccaaacaaaatcgcatccatacttacaccaagttgttgagactaacagatatcgttcctattggctattgattagaacgtgttcataaaaaggagcagatggtaagcacatacgagaggggtcgtatacatccctactaagcgggcaggattgcgattgacagcacataaatttcagtaatataagaaggttataagtagatgatgacatatatatatcctatcctacatagcacagacagaaacaactagtatttgcaggactatcggagtcgcgtgtgtatgtagataggttgatcaaggtcagcagccaatccagccaccaggaatccccaatctactggtgccttatccggacgaacagtatatggagcctcgaaaacaagaggagggagggcgatcatgagcttaccctgggcccggtggggccgctgcgccacatgggcgtggtggtggcgcggcattcgacgcagctcctggcgcctttctccggcaccacgatcccgtcgatctgcagcgacgggtcgcagaagcaaaggagagaggtcgatcagtccgagatcacagagcttggcggcaaagcagagagaacggggacgagagccggatgtaccttactgcgatcggcggagcccatcggcgtcggcgccagcgccggcggcaacagacggcagccccgatccgtggccgggttggcgataggattgcttggagaattctggtttttctctgccggcgtgcgtggtctggtctgttctcttagatag

SEQ ID NO: 34499 - DNA, 1748 bp, Zea Mays
tatttagatatgatgaacctattcatgatgtgcatgatatttggagtagaattaaaaataaatttgatgagtccaaacatgtagtcatatgatgtttctacttcctttagtccttgtgaaactaaccctttaaaggaagaagaagaaaatgaacgttggagagcaaacgatgaatccacccctccaaaaggtctgtcttcccatttcgattcccacatatgttgtgtggctaatgaaaatgatagcggaagcacaaatgaggatgaggaggacgaaagaagttttatgcaactctacgctcacctaagcctagagaataaggcggtcatgctcaaacttctaaaaagggtgagatagcaaagtgaagctcttcacaagctagaagatgtcctcatcacaaaagtcaaaagcttggaagagttcactaaagaacatggggagttaaatgctctcatgttgatttggtccaaaggagctcaaggaagaaaatgagaggctaaggatgagcttgacacaactaaaaaggaagtcattgctcaaccttctcaagataatcgtgatgacatggtgaagaatcttgagacgggaacaaccgtagcatgcacaaaatccattgaagaaaatgtcaaggacttgaggaatgtcaagaggaaggaacaaaagaagaaaaccaatacctctaccaaaagcctcaaccatgcctccatacaaggtaacatccaaggtaatgatcaagccacacttcacactaagaaaaataagaagtgtagtgaatgctttgaagaggggcacttgattaggtcatgcccctatattaaagaaaatagctcggttattaacaaggatgataaaaaaatagatgctctaagaagggacatacggtcaagtcatgtccctatgtaaaacaaaatggcatagttttacaaaagaaaatatttactaaccatgtagcaagcaagaggcaaggaaagaagaaatcttcaaaacgtgaagatcgcctttgctacatatgccgaaggatgggacatctatgcaaggattatcccattggtaactgttgggagccttcctcttccgaaggtcctcaaaaaacacgactaaccatttgtttctagcataatgttgattattacaggagcttcgtcacaaacaaagatacatgatgggagtcttctccatcgaaggtcttcaaaacaaagacataacccaaaaatgacaacaatgaacgccaaagctatagccgaagagtaatagctacgacttgaagtaatgtcgaagatcaagcatgttgctgagccaaagaggaaaagactagctagtctctaatgatttatgttacacttatgaacaaatgttaaggtcataaatgtatttttacccgggttgcgttcggtgcctatatatagatgaacagtaccaccatactattcacgctggattgtaatcgctcttgttggggcgaaggcgaagacgccacccttcgctcgatgccttcgccaacctcgctgcaccaacggaggcaagacgactggcagatttacccttcgtcccacgcgtcgccgaacgaagacctgcgacgaggtcgtcgcatcctgcggcctcgtccaacatggaggcccacgtgtgatccggcccattgtaacaggccctgcgtggccgctgtgcattacgggcctaatttgtaaaggtctccctgtaattacagtctgtaaccctgctttatgggaatattccggggataacctagg

SEQ ID NO: 34500 - DNA, 3657 bp, Zea Mays
cgtcgaccaccgtatgctgaagcggcgaagctgcttacaagtttctgcaaggctatagtttaaacagccaacattcgagcagaagagacgcagctccattccaggccccgcagcttctccgttctctgtctgcgtgtggtcgtcagttgcggaggtaccacgacctcgccaagttaagctttgatggctgccagagatcccatggatgcatggatgaaccgttaccgtgctttcgcggaaggagtggtggtgatggtctgcccggtgcttcttgcgatagcgctgaagaaggttgacctgaagagcgaagagcatggtggtgccgtcccgaccaccatgctcgtggtagcagcggttactctagtcgccggttccccacacgctgctaccatgttgctggcacccttatccagcacatgtttagtggcacttgcctgttggatcgtacatctcatcctagacagctgggcgttccctgcggtcggcgccctcgtcggactctgctccgcgattcgtaccgtcatgcacttcacaacccgtgcgggacaaggagatgctgaaatggagtactgcgatagactggagagctcgcttgatttcttggttggtataactgcgcttctgtttctgggactggaaggcctcgctctggagggtcagattaacagctccagcggtcgtcttaccacgccgatcggcacaagcttcgttgtctgtgtttttgctgcgagcttaatgctcgtggagacgatgcctccacgcagactcgtgaggtatctgacagagaccattgatatcctcacgggttttgccgtctccctggctatgttcttcatcatgtatccactcatgggactacgagcattgcttctgctagcagctccgttcctgatcctcatggcgtatgtcttctacgtcgctatcggcaaggatgatggcaacaacaaccaccaggttgctagcgcgaacggcgatgaagaatcgtcaggtgttagcagcagccgcaggagtggtgcggcggcggacggtgataataaaccagcgtcgcttgaactgacaaaagtaacattcgcagggttcctggcggtgtcgataccaagcatcagcaaaggttcagtcaccatttattccgaatgtttcttgcaccttgcagcagcagctgttgtctcaggcctcgtgtggaggctcctaacgcattacaaaaagtcacagaccaccgtcgcaactgttgcagatattgcttccttctgcacccatctctgtgttgcagttgcggtaattccgtttacgataatggccgggaatgcactctcatgattttgtagtactagtctgtcgagtcctgctctcattttgactaataaacattttttatgttaagatgaatgtgttttcttctccttgtcattttctattacaatagggcataatatgtgctcgctctgtagttcctttccaactatgaaaagctatttgtcagtaacatttctctccttgataccaagagctctcccctttcatgccaccaacattttattttaacttctaaattttaatcttgttgattgttatcgatttttcatcctctggttaagctcaaactcttgctctagttatatctttgattaactctatagatttttttatctgcaggttaagttgaatctttttgtttaattacagcttttattagctctcgttttgtccttttaaatatagtttagggttgtagactgcgcttttatgtactaagatggtataaacagccattttaagactacaccacattgcttaagataagcagtagagcttaaagtaagatctaggagaaggtagcagcgttaaactgaagaggataacaatatataatctttataataattctttactctaaagttatttaaaaggccattaagatattgcttcatgtggtttgcactaacctctgcagcttctcaaaagttaaggaattactaccacgtgaaatgctatggtttttataaatcctttgactagactttattttaataaaacacaaaaatatggttgtcctattgttcaaaaatcaatgacaagtcaggaactcaagttctgaaattgccaagtgcggaccatccggccccttctggcggatcgtccgcgacaccgctatgacttcgaccaggaactataaatcgtggatagttcggctataaaccgcggaccgtccagctatacagtgcggacctttcggctataattcatggatcgtccgcacgtgaagatctagtttagctcgaagttgacaagtcgagcaaaaggaattttagagatggcgcggaccgtccgggaccaagggcagaccgtccgcgtattgtcaccagggaaagactgtcgttatctagccgttggcttgtaaggcgtatccgttgaagttgtcacaaccgaccgttggaaggtcgcggaccgcacttgccgcagcccgtccgccagtgcagtttctggcagatgcgccacaacggctatatgggtggttgagggctataaaagccaccccaaccagcccattcacaaacattcaatgatctaccccatacacaagagttggctattcactcctatctactagagcaacacttctatacacatcaaagcgtcacaagtgccataaaagagagatgaagcaagatagggctactcgtgtgtgtttagcgatagtgcctcatgagaatcattgagagaaagtgtgtgctagctcttgtgatcaatttaagcgtggagttttgactcccattcattgtaaagctagcaagagcccttatatttgtggttggcctcgcggaaactttggtctttttttgataaagaagaaggaacactcgccggtcctggtgaccattggagagaggaaaaggggttgaaaaagacccgtccttagtggactcctaaatggggattagggtcttggtgaactgaacctcggtaaaacaaataatccgtgtcacttgtgtttattgtttgtgatttgtttgtcttctccctctttaagttctcttgcactattctttgttgatattactttgtgttgcttcaagttaaattctcatatatagaagcaacccattgcaagaaagaacttgtattatttatcttcttatctaagcccttttgctttattctccatagatattttagttgtgttgctttgtgttaatgccgcattctttgaaagcaatactttttgcaagcaaaggacttagttttatactccgataattgttcatcttgttttaaccactaatcgagggatcaagggtcgtgttaaagctataaattttaggtttcgcctattcaccccctaggcgactttcaattggtatcagaggtaggcactttatattaagtctaacaactcgaagtgatggctcggagaaaatcccaaaagaacaagaagacaccaccgaaggagaacaatgaggtaactcttgagatattactttctgattgttctaattatgcttcatggtctactagagtgataaatgcttttagaaccatagacccacaattagaaaaaaattagacaagggtattataccttctagttatgataagaaaatgcttctgaggaagatcgaagatgtttacgcttaaattatcttgcttatgacatcttag

SEQ ID NO: 34501 - DNA, 1896 bp, Zea Mays
ccccaatagccaacaagaggagaggatccaaacacgcagctctagtgagctccgtcccacacacagactccggctccctgtggcccgcggcgtgagcgtgtcgtgtcccgcagggccacctttgctctctaaccccttccaccacacgcgaccgccgtccccgcgcgagttgccgaacccacgtctcccctcgccccgcgccgaccctaccaaccctcgggcccgcccatggagatctccgcctccgctgcgccggccgcctcctccccgcccgccaggccgctggtcctgcgcccgttcgcctcgtcatcgccccacccggctacgtcctcctcgaccaccatccgccgccgcccatcctcatcggccactgccacggtccgccgccgcgcgcgcacccgcccccgtacagggcggtccaagccccccgccgactcgggcgactacttctccggcaacgacggccccggtctcggtggttccggcggcggtgacggaggaggacggtggagctggaacagcgggttcggctctggatcagacggccccgacgactgggagcccgatgtgccggcgccccggaggtcagcggcggatgcggcgctcggggtcgtctacgagctcatgtgcctcatcgcgctctccaactgcacccagttcgccgtccgcaggctcgcgggcctcctctccgcccgcgtcgccgcattgcgattcgtccccaccgtctgctgatcatccgtgggggtttgttttacttcctcttcctcctgcccgtctacctgaaatcgcttctgtacatatatcagcctgcaactgcggttttaggggattggggccttgggggaatcaggacctctgcctgttgttcctcggtgcgtgcctcaagcattataccgttgaacagtagcaaaattcgtcgaatccaattggagaaacacaaaaataagatcaacttgtttatcctttgttgttgtactcaagattgattgatgcctattgtgttaggatgcatcattatctgttccatgtgtatataaatgtgctgttattaagtttcttggtacttcatggaatgtcaagggcagtgcgtttggggaattctcatagatccggttagttgaatggaagctcaattaactagctatatggctatattaactttgcactccttatttcaatgatttctttttgaataattggatctatatcattaaaagattgcaactttagatatataccattggctccacatatcattgacttatgttgacttatgtggaccccacatgtaagtgagatagcaatggtatatatctaaagttgtaatcttttaatggtatagatctaaatttccctctttttttctataatcagctatttctttgcaattgttactcatgtggatgtgatatgctatatgcttaataatactccgcagagcaatgacttgcaccgaatgtaggatgatattactaggttgcaatggcggtatagtgcaatgactgggtggacaaatctacttttgccggagccaaattgtagtaatctgcggtttttagaaaggggtaggaataaacagggccttcttttgactattgttgaatgacctaatgtttttagtgctttctacattcatgtatcaattattactattcaacatgcttaggtctagttcgatctgaggaagagaggaaaaagcagagctgttttccaacgattttttattatcttgataacattttttatgtagttttggagtgattttcctgagagcaaaatgaaacaagagggtagcctttgttggttatttttagtctagctttttctcactcgcatgcttttaaatttttatatttttaatctggagtttgtgtaaaaacgtgtatttatactatt

SEQ ID NO: 34502 - DNA, 2540 bp, Zea Mays
acaactcggcaactacggagctgcctccatctcatttgcttaccatccctaccgcctggctcagatctcgatgcggcgcaagcttcccggcgacgcgccgctgtcggcggcggggcctggtcatgcgttgtccgcatccgcgccgtccgaggtggacctcgctcagctctccgccgccatcgcggccggggaggaccttggccccttcgtgcgccgggccttcgcgtgcggccgccccgagccgctgctcgcctcgctccgcggcgcggcgcgggaccgcgaggcggagatcgaggagctctgccgcgcacacttccacgattttatccgcgccgtcgacgacctccggtccctccttgccgacgccgacgcgctcaagggctccctctcggcgtcccactccgcgcttctctcctcggcggccccgttgctcgcctcgcttgaatccttcctcgccgcgcgctcgctcgcggggaatctctcctccgcgctagcctcctcccgacgctgcgtacggctgctcgcgctcgcggcgcgggcgaacgcgcacttacaggccggcaatcatgggctctacctcgccctgcgcgccgtcgacgccatcgaccgtgatctcgcctcgggacccgagcctctgccgctacccacgctccgccgcatgctgctcagcgtcgtccctgcggtgcgtgcgcatgccgagcgcgagatctcccgggagttctcagactggatggttagcattcgcgctgcttcgaggcacctcggccaggtggccatcagccggtcggctgccgcgaggcagcgccaggaggagctccgctccaagcaccgcccgctggaggagtgcatcaccttggatgacgatggtgttggtgacctcgacgattttgcggcagccgcggcaacagctgaagcagcagatggtgccgctgcagcctcttttgaccttacgccgctctatcgagcgatgcatatacaccagacgctggcgctaggtgagcggttcaagaagtactacctggaaaacaggaagctgcagctgacatcggactttgatgtcattgcggcgacgccattcctcgagtcccaccaggtgtttttctcgcagattgctgggttctttattgttgaagaccgggtgtttagaacagggggtgggctcacatctcggccagatgtagatgcactttgggatgccgctgtggggaagatggtctctgtcatggaagataacttctccaggatgcagacagcaaaccacttgcttctcatcactgattatgctgctttgctttctgccacaatgcggcggtatggttatccagtagggatgctactcgatgtgctggctaagcacagggacaagtaccatgatttgctgcttgcagattgccgtaggcaggtggctgaggcactgacagcagataagtttgatcagatgctcatgagaaaggagtatgagtactcaatgaatgtccttgcatttggaattcagagctcagacattaccccagctttcccatatgttgcaccgttttcatgcaccgtcccagacatttgccgtattgttcgttcgttcattgaagattctgtgagcttcatggcacatgggggaggtggggatacctatgcagcagtgaagaagtaccttggtcggatcctatctgaggtggtggatgcttcgattaaaaaacttttggattcaggcagtggtctaagtgtgtcccaggcaatgcaggttgctgctaacatgtctgtgatggagcgggcatgcgagttctttacacgccatgctgcacaactgtgtggtgtgccgctgcgtgctgtggagcgtggtcggcgggacttcccacttcgcaggtcacgtgatgctgcggaggcgctcctgctgcggcttctgcgtgccaaggttgatgagtttatgagacaatctgatggtatcaactggatggctgatgactctcctcctggcggcaatgagtatgcgaatgaggtcatcatctaccttgagacgctcacatcaacggcacagcagatccttccccttcctgtgctacaccgtgtacttgtggcagtgcttgcccacatctctgaaaggatcatcgagctcttcttgaacgattcagtaaagcggttcaatgccaatgcggtcactggtatagatactgatctcaaaatgtttgagacgtttgcagagggcatgtctagcctgtttgtggactcaggtcaagaatctgcaaaaaatgaaatgaaggctgcactagtggaagcaaggcagctagtgaatcttcttatgagcaatagtccagagaatttcctaaatccagtgatccgtgagaagagctataacaagctagattatagaaaggttgcaatcatctcagagaagtttagagatacctcagagagttatttctcaacatttgggacaaggggtgccaggcagaacccaaagaagaaatctctggataccctgatcaagaggctcagagaagccagttagatatcctcccagctaagacactctcgtggtagaaaat

SEQ ID NO: 34503 - DNA, 3060 bp, Zea Mays
cttctccgttcgtttccctccaaacactcaccgacaagcaggtcccacttccggccacccaacccaccttctccgaccgccccctccgctgtccgctcctgttccgtcgtttcgtcgactaacctccaaagttttttcctctccacaactcggcaactacggagctgcctccatctcatttgcttaccatccctaccgcctggctcagatctcgatgcggcgcaagcttcccggcgacgcgccgctgtcggcggcggggcctggtcatgcgttgtccgcatccgcgccgtccgaggtggacctcgctcagctctccgccgccatcgcggccggggaggaccttggccccttcgtgcgccgggccttcgcgtgcggccgccccgagccgctgctcgcctcgctccgcggcgcggcgcgggaccgcgaggcggagatcgaggagctctgccgcgcacacttccacgattttatccgcgccgtcgacgacctccggtccctccttgccgacgccgacgcgctcaagggctccctctcggcgtcccactccgcgcttctctcctcggcggccccgttgctcgcctcgcttgaatccttcctcgccgcgcgctcgctcgcggggaatctctcctccgcgctagcctcctcccgacgctgcgtacggctgctcgcgctcgcggcgcgggcgaacgcgcacttacaggccggcaatcatgggctctacctcgccctgcgcgccgtcgacgccatcgaccgtgatctcgcctcgggacccgagcctctgccgctacccacgctccgccgcatgctgctcagcgtcgtccctgcggtgcgtgcgcatgccgagcgcgagatctcccgggagttctcagactggatggttagcattcgcgctgcttcgaggcacctcggccaggtggccatcagccggtcggctgccgcgaggcagcgccaggaggagctccgctccaagcaccgcccgctggaggagtgcatcaccttggatgacgatggtgttggtgacctcgacgattttgcggcagccgcggcaacagctgaagcagcagatggtgccgctgcagcctcttttgaccttacgccgctctatcgagcgatgcatatacaccagacgctggcgctagattgctgggttctttattgttgaagaccgggtgtttagaacagggggtgggctcacatctcggccagatgtagatgcactttgggatgccgctgtggggaagatggtctctgtcatggaagataacttctccaggatgcagacagcaaaccacttgcttctcatcactgattatgctgctttgctttctgccacaatgcggcggtatggttatccagtagggatgctactcgatgtgctggctaagcacagggacaagtaccatgatttgctgcttgcagattgccgtaggcaggtggctgaggcactgacagcagataagtttgatcagatgctcatgagaaaggagtatgagtactcaatgaatgtccttgcatttggaattcagagctcagacattaccccagctttcccatatgttgcaccgttttcatgcaccgtcccagacatttgccgtattgttcgttcgttcattgaagattctgtgagcttcatggcacatgggggaggtggggatacctatgcagcagtgaagaagtaccttggtcggatcctatctgaggtggtggatgcttcgattaaaaaacttttggattcaggcagtggtctaagtgtgtcccaggcaatgcaggttgctgctaacatgtctgtgatggagcgggcatgcgagttctttacacgccatgctgcacaactgtgtggtgtgccgctgcgtgctgtggagcgtggtcggcgggacttcccacttcgcaggtcacgtgatgctgcggaggcgctcctgctgcggcttctgcgtgccaaggttgatgagtttatgagacaatctgatggtatcaactggatggctgatgactctcctcctggcggcaatgagtatgcgaatgaggtcatcatctaccttgagacgctcacatcaacggcacagcagatccttccccttcctgtgctacaccgtgtacttgtggcagtgcttgcccacatctctgaaaggatcatcgagctcttcttgaacgattcagtaaagcggttcaatgccaatgcggtcactggtatagatactgatctcaaaatgtttgagacgtttgcagagggcatgtctagcctgtttgtggactcaggtcaagaatctgcaaaaaatgaaatgaaggctgcactagtggaagcaaggcagctagtgaatcttcttatgagcaatagtccagagaatttcctaaatccagtgatccgtgagaagagctataacaagctagattatagaaaggttgcaatcatctcagagaagtttagagatacctcagagagttatttctcaacatttgggacaaggggtgccaggcagaacccaaagaagaaatctctggataccctgatcaagaggctcagagaagccagttagatatcctcccagctgttgaccggtaaattactggattgtgggaaccataaagatgacaatgtcttttcaaccctttagctcactgttggctatcttttacaatttctgaaagataattgaacatgttagaatgtattgtgtgagttcttgttagggttatgtatagaccccttttgtattgggccttggcccacctaactctattattaatttatcaccaaccctagttagtgttagggtttcagtttttccaacatgatatccagctaggttttctttctcctcttctcccccaccagtcgctagccctccaccctttcctcccttgccctcatcgctaggccccatcccttcttcaccatcacgctgccaggcccttcccatggttggcgacccctagatctgagccatcggacatctcgtgggttgtcggcgcgcccaacgagcttgcacccctcccttcaagcttcgacgccatcgacctttcctctgccgcggcgatgactgctcagctccaacccagaac

SEQ ID NO: 34504 - DNA, 3063 bp, Zea Mays
gcacagcacacaaaccccgcgtaggggtagagatcacctcacccctcccgactccggcgcatccattcggtcgctgccggatgcgtgcttgacccggccatggatgactctgtccctttcaatgacctcggtccctccaagcccccgtcggcctctttctacgacgatatgttcgagtcctacttcaatcgcgcggccgaggcccccgagcccgcgcctaaggcttcttcctcgccgtcgacgccgccgcccgtgttcgacaagccagtcttcgacgacgatccttacacggccgatccattcgacgcgatccccttgtttggaggcggtggtggaggggaagaggaagacttgcacggtggcgtccggagtgcggcaaagccggagaggacggagttggaggtggtgggttttgatgaagatttgttccctgggttggctgggagcaccaattttcccatggagaagccggccagggaggtggagcgggaccgtcaaccagtggggttcgacgacgagttgatccctggattcgatggaagcatgaagccagcgccgcaaatggagcctgagacagtggcgtttgatgatgatgtgatccctgactgcagtggaggcacgagctatccctcttcggcaagggaggaacctataacgagacaagaaagtgaatcaatttcctctagcaaaattagcatgagcatgccagaagatcctttcgttactttaggtggtacacacaaatcgggatattcatctttagggttgttttcaaatcttctgaataacattggcatgcctagaaaggaagcggacacaacgcctgataataccagtgggatatttcagggttctgatatctttactgagtttccaaaagccatgccacccttttcgtttacatctgaaaaccagagtgatagaactgaaaggagatatactgaaaacataatcagcacgagtcactccgatcggctgcctcaggagaagacagtccaacaagcatcaacagaagcacctgccaatacattgactgagatgaacttccctgaagcatctgttgtccatgaagtacctgttaccactagttttcagacattgaacccatttgttgaggaagacgatttgttagaggtgaatcaatcttcacaaacgactaatgatgtgtggctaactgttttagatattgctttagtgacactacctacaagtgcgccacctccttcaaggcctccacctccacttgctgctaagaaaccacctactgaatctgtaactagtgaagcatatgcccatcattgtaatcaacgctaccatcactccatatgttcttcaaacacctctaaaacatcccaaattgatgaattggaagattttttcttgacaaagcctgcaaattctgccattggtcatccacaagttctaaagcatgaaggaaatgggcattatccatctgcagctactgcaagtttcatggactggactgagatgggacactgtaaaagggggaaccaaggggcatttgattctatgttcactagcagtcaatatcgacagccagaaatagatgagaaagcagaggtatgtgctcatgaaacagaaagtacagatgaagaaaagagattagagaatgaacaaatacaaagagaacataaagaagagcaaataagagcagaaagggagatggaagaagagcttgagagggaaagagaaaatgtgagacaaagggaacaagaggagcagaggaggcgtgaaaaagaaagagtggccaggcaggctgtagataaggctatacgggaggcacgcgaaagatcagctgctgaagcacgcatgcaagctgagaaggaggctcgtcaaagagcagagcgagctgcagtatggaaagcagcaacagaagctcgtgagagagctgcagtggaggcaaaggaaagagctgcgaaggctgctgcagaagctaaggaaagagaagcagcagaggctagagaaagggctgcaacagaatcaagggaaagggatgccaaagttgccgcagatgcaagggaaagagctgctagggctgctgctgaagctagggaaaaggaaacagcagaatttcaggagaaagctactgcagaagctcgggcaaaggctgagcgagctgctgttgagaaagctgcagcagaagcacggtggagggctgaaagagcagctttcgagagggttgctactgaagttaagcaaagggcttttaatgatgctagagaaagggctgccgctgcagctgcagctgaagcactggcaagagaaaatcagcaaaggagagcaacaacagaacctgaccttgagtcattctttggcatgccttctcgatcaagtagtctaccgagatcatacaacaacacaacaacgaatcctttcgatgttcaacctggcaatgctggttctggtggtgtaaggaggacaccttctggttcaggttttccctttactcagccttcatcaagcaatcttatggatggcctatcttctatatttggagcacctttaccatctgctgtatttcaagaagtggatggagagagtgaagagagaaggaaggcaagattggaacgacaccaaagaacaatggagcgtgcggcaaaagctcttgctgagaagaatgagcgtgacttgcaagctcagcaggagcaagaagagcgacatagaattggtgaatcacttgattttgagataaagaggtgggctgctggcaaagaaggcaacctacgggccttgctaacaacgttgcaatatattctttggcctgaatgtggctggcgacctgtatcattgactgatctgattacagcagcatctgtcaagaaagaatacaggaaagcaacattgtgtatccatcctgataaggtgcagcagaagggtgcaaatcttcaacagaaatacattgcagaaaaggtatttgaccttctgaaggaagcctggaaaaaattcaactcagaagaactcttctaacaacttgtttaggaaaatgttgatcgcaaaacaagtattgggaaggacagaggatcatcaaggacttgaaacatg

SEQ ID NO: 34505 - DNA, 3057 bp, Zea Mays
aattcacaggctgcacagcacacaaaccccgcgtaggggtagagatcacctcacccctcccgactccggcgcatccattcggtcgctgccggatgcgtgcttgacccggccatggatgactctgtccctttcaatgacctcggtccctccaagcccccgtcggcctctttctacgacgatatgttcgagtcctacttcaatcgcgcggccgaggcccccgagcccgcgcctaaggcttcttcctcgccgtcgacgccgccgcccgtgttcgacaagccagtcttcgacgacgatccttacacggccgatccattcgacgcgatccccttgtttggaggcggtggtggaggggaagaggaagacttgcacggtggcgtccggagtgcggcaaagccggagaggacggagttggaggtggtgggttttgatgaagatttgttccctgggttggctgggagcaccaattttcccatggagaagccggccagggaggtggagcgggaccgtcaaccagtggggttcgacgacgagttgatccctggattcgatggaagcatgaagccagcgccgcaaatggagcctgagacagtggcgtttgatgatgatgtgatccctgactgcagtggaggcacgagctatccctcttcggcaagggaggaacctataacgagacaagaaagtgaatcaatttcctctagcaaaattagcatgagcatgccagaagatcctttcgttactttaggtggtacacacaaatcgggatattcatctttagggttgttttcaaatcttctgaataacattggcatgcctagaaaggaagcggacacaacgcctgataataccagtgggatatttcagggttctgatatctttactgagtttccaaaagccatgccacccttttcgtttacatctgaaaaccagagtgatagaactgaaaggagatatactgaaaacataatcagcacgagtcactccgatcggctgcctcaggagaagacagtccaacaagcatcaacagaagcacctgccaatacattgactgagatgaacttccctgaagcatctgttgtccatgaagtacctgttaccactagttttcagacattgaacccatttgttgaggaagacgatttgttagaggtgaatcaatcttcacaaacgactaatgatgtgtggctaactgttttagatattgctttagtgacactacctacaagtgcgccacctccttcaaggcctccacctccacttgctgctaagaaaccacctactgaatctgtaactagtgaagcatatgcccatcattgtaatcaacgctaccatcactccatatgttcttcaaacacctctaaaacatcccaaattgatgaattggaagattttttcttgacaaagcctgcaaattctgccattggtcatccacaagttctaaagcatgaaggaaatgggcattatccatctgcagctactgcaagtttcatggactggactgagatgggacactgtaaaagggggaaccaaggggcatttgattctatgttcactagcagtcaatatcgacagccagaaatagatgagaaagcagaggtatgtgctcatgaaacagaaagtacagatgaagaaaagagattagagaatgaacaaatacaaagagaacataaagaagagcaaataagagcagaaagggagatggaagaagagcttgagagggaaagagaaaatgtgagacaaagggaacaagaggagcagaggaggcgtgaaaaagaaagagtggccaggcaggctgtagataaggctatacgggaggcacgcgaaagatcagctgctgaagcacgcatgcaagctgagaaggaggctcgtcaaagagcagagcgagctgcagtatggaaagcagcaacagaagctcgtgagagagctgcagtggaggcaaaggaaagagctgcgaaggctgctgcagaagctaaggaaagagaagcagcagaggctagagaaagggctgcaacagaatcaagggaaagggatgccaaagttgccgcagatgcaagggaaagagctgctagggctgctgctgaagctagggaaaaggaaacagcagaatttcaggagaaagctactgcagaagctcgggcaaaggctgagcgagctgctgttgagaaagctgcagcagaagcacggtggagggctgaaagagcagctttcgagagggttgctactgaagttaagcaaagggcttttaatgatgctagagaaagggctgccgctgcagctgcagctgaagcactggcaagagaaaatcagcaaaggagagcaacaacagaacctgaccttgagtcattctttggcatgccttctcgatcaagtagtctaccgagatcatacaacaacacaacaacgaatcctttcgatgttcaacctggcaatgctggttctggtggtgtaaggaggacaccttctggttcaggttttccctttactcagccttcatcaagcaatcttatggatggcctatcttctatatttggagcacctttaccatctgctgtatttcaagaagtggatggagagagtgaagagagaaggaaggcaagattggaacgacaccaaagaacaatggagcgtgcggcaaaagctcttgctgagaagaatgagcgtgacttgcaagctcagcaggagcaagaagagcgacatagaattggtgaatcacttgattttgagataaagaggtgggctgctggcaaagaaggcaacctacgggccttgctaacaacgttgcaatatattctttggcctgaatgtggctggcgacctgtatcattgactgatctgattacagcagcatctgtcaagaaagaatacaggaaagcaacattgtgtatccatcctgataaggtgcagcagaagggtgcaaatcttcaacagaaatacattgcagaaaaggaagcctggaaaaaattcaactcagaagaactcttctaacaacttgtttaggaaaatgttgatcgcaaaacaagtattgggaaggacagaggatcatcaaggacttgaaacatg

SEQ ID NO: 34506 - DNA, 3621 bp, Zea Mays
aattcacaggctgcacagcacacaaaccccgcgtaggggtagagatcacctcacccctcccgactccggcgcatccattcggtcgctgccggatgcgtgcttgacccggccatggatgactctgtccctttcaatgacctcggtccctccaagcccccgtcggcctctttctacgacgatatgttcgagtcctacttcaatcgcgcggccgaggcccccgagcccgcgcctaaggcttcttcctcgccgtcgacgccgccgcccgtgttcgacaagccagtcttcgacgacgatccttacacggccgatccattcgacgcgatccccttgtttggaggcggtggtggaggggaagaggaagacttgcacggtggcgtccggagtgcggcaaagccggagaggacggagttggaggtggtgggttttgatgaagatttgttccctgggttggctgggagcaccaattttcccatggagaagccggccagggaggtggagcgggaccgtcaaccagtggggttcgacgacgagttgatccctggattcgatggaagcatgaagccagcgccgcaaatggagcctgagacagtggcgtttgatgatgatgtgatccctgactgcagtggaggcacgagctatccctcttcggcaagggaggaacctataacgagacaagaaagtgaatcaatttcctctagcaaaattagcatgagcatgccagaagatcctttcgttactttaggtggtacacacaaatcgggatattcatctttagggttgttttcaaatcttctgaataacattggcatgcctagaaaggaagcggacacaacgcctgataataccagtgggatatttcagggttctgatatctttactgagtttccaaaagccatgccacccttttcgtttacatctgaaaaccagagtgatagaactgaaaggagatatactgaaaacataatcagcacgagtcactccgatcggctgcctcaggagaagacagtccaacaagcatcaacagaagcacctgccaatacattgactgagatgaacttccctgaagcatctgttgtccatgaagtacctgttaccactagttttcagacattgaacccatttgttgaggaagacgatttgttagaggtgaatcaatcttcacaaacgactaatgatgtgtggctaactgttttagatattgctttagtgacactacctacaagtgcgccacctccttcaaggcctccacctccacttgctgctaagaaaccacctactgaatctgtaactagtgaagcatatgcccatcattgtaatcaacgctaccatcactccatatgttcttcaaacacctctaaaacatcccaaattgatgaattggaagattttttcttgacaaagcctgcaaattctgccattggtcatccacaagttctaaagcatgaaggaaatgggcattatccatctgcagctactgcaagtttcatggactggactgagatgggacactgtaaaagggggaaccaaggggcatttgattctatgttcactagcagtcaatatcgacagccagaaatagatgagaaagcagaggtatgtgctcatgaaacagaaagtacagatgaagaaaagagattagagaatgaacaaatacaaagagaacataaagaagagcaaataagagcagaaagggagatggaagaagagcttgagagggaaagagaaaatgtgagacaaagggaacaagaggagcagaggaggcgtgaaaaagaaagagtggccaggcaggctgtagataaggctatacgggaggcacgcgaaagatcagctgctgaagcacgcatgcaagctgagaaggaggctcgtcaaagagcagagcgagctgcagtatggaaagcagcaacagaagctcgtgagagagctgcagtggaggcaaaggaaagagctgcgaaggctgctgcagaagctaaggaaagagaagcagcagaggctagagaaagggctgcaacagaatcaagggaaagggatgccaaagttgccgcagatgcaagggaaagagctgctagggctgctgctgaagctagggaaaaggaaacagcagaatttcaggagaaagctactgcagaagctcgggcaaaggctgagcgagctgctgttgagaaagctgcagcagaagcacggtggagggctgaaagagcagctttcgagagggttgctactgaagttaagcaaagggcttttaatgatgctagagaaagggctgccgctgcagctgcagctgaagcactggcaagagaaaatcagcaaaggagagcaacaacagaacctgaccttgagtcattctttggcatgccttctcgatcaagtagtctaccgagatcatacaacaacacaacaacgaatcctttcgatgttcaacctggcaatgctggttctggtggtgtaaggaggacaccttctggttcaggttttccctttactcagccttcatcaagcaatcttatggatggcctatcttctatatttggagcacctttaccatctgctgtatttcaagaagtggatggagagagtgaagagagaaggaaggcaagattggaacgacaccaaagaacaatggagcgtgcggcaaaagctcttgctgagaagaatgagcgtgacttgcaagctcagcaggagcaagaagagcgacatagaattggtgaatcacttgattttgagataaagaggtgggctgctggcaaagaaggcaacctacgggccttgctaacaacgttgcaatatattctttggcctgaatgtggctggcgacctgtatcattgactgatctgattacagcagcatctgtcaagaaagaatacaggaaagcaacattgtgtatccatcctgataaggtgcagcagaagggtgcaaatcttcaacagaaatacattgcagaaaaggaagcctggaaaaaattcaactcagaagaactcttctaacaacttgtttaggaaaatgttgatcgcaaaacaagtattgggaaggacagggacatactggtccctgtagtaatgaagaaagggagagtagcaggggccctgtttgggtatgtagaagcaggcaccagctcgaggggcgattccggttagctcaaggccagatatgcaggctagtcgctcgtccaatctggagaagcagccgccagctcaaggacgtttcttgctagctctaggctagggaaaatttaactatttgatgataactctctaaaagaactatttgatgataactctctaaaagatacttttataatgtccataacagttaccattattttttgaaacattctacatttttgtcattttacctacatggctggccacgcatgcccactatgtgtccttgccagcgtggaatgctttggaaaatgtcccttttgccctccatctctcagccattgagccgatagcctcgccagcgacgtcgggtagctagctacccacaaggcctagctcgtcgggattctccaccagtggcgtcgttggcgtcattcgccccaccacgagcacgttgaccttagataacatgttgatggtctcaaacacctccttggtgtacccttgccgctcctcgaagtg

SEQ ID NO: 34507 - DNA, 3458 bp, Zea Mays
cttcccttgaagccgtcatcacaattcacaggctgcacagcacacaaaccccgcgtaggggtagagatcacctcacccctcccgactccggcgcatccattcggtcgctgccggatgcgtgcttgacccggccatggatgactctgtccctttcaatgacctcggtccctccaagcccccgtcggcctctttctacgacgatatgttcgagtcctacttcaatcgcgcggccgaggcccccgagcccgcgcctaaggcttcttcctcgccgtcgacgccgccgcccgtgttcgacaagccagtcttcgacgacgatccttacacggccgatccattcgacgcgatccccttgtttggaggcggtggtggaggggaagaggaagacttgcacggtggcgtccggagtgcggcaaagccggagaggacggagttggaggtggtgggttttgatgaagatttgttccctgggttggctgggagcaccaattttcccatggagaagccggccagggaggtggagcgggaccgtcaaccagtggggttcgacgacgagttgatccctggattcgatggaagcatgaagccagcgccgcaaatggagcctgagacagtggcgtttgatgatgatgtgatccctgactgcagtggaggcacgagctatccctcttcggcaagggttctgatatctttactgagtttccaaaagccatgccacccttttcgtttacatctgaaaaccagagtgatagaactgaaaggagatatactgaaaacataatcagcacgagtcactccgatcggctgcctcaggagaagacagtccaacaagcatcaacagaagcacctgccaatacattgactgagatgaacttccctgaagcatctgttgtccatgaagtacctgttaccactagttttcagacattgaacccatttgttgaggaagacgatttgttagaggtgaatcaatcttcacaaacgactaatgatgtgtggctaactgttttagatattgctttagtgacactacctacaagtgcgccacctccttcaaggcctccacctccacttgctgctaagaaaccacctactgaatctgtaactagtgaagcatatgcccatcattgtaatcaacgctaccatcactccatatgttcttcaaacacctctaaaacatcccaaattgatgaattggaagattttttcttgacaaagcctgcaaattctgccattggtcatccacaagttctaaagcatgaaggaaatgggcattatccatctgcagctactgcaagtttcatggactggactgagatgggacactgtaaaagggggaaccaaggggcatttgattctatgttcactagcagtcaatatcgacagccagaaatagatgagaaagcagaggtatgtgctcatgaaacagaaagtacagatgaagaaaagagattagagaatgaacaaatacaaagagaacataaagaagagcaaataagagcagaaagggagatggaagaagagcttgagagggaaagagaaaatgtgagacaaagggaacaagaggagcagaggaggcgtgaaaaagaaagagtggccaggcaggctgtagataaggctatacgggaggcacgcgaaagatcagctgctgaagcacgcatgcaagctgagaaggaggctcgtcaaagagcagagcgagctgcagtatggaaagcagcaacagaagctcgtgagagagctgcagtggaggcaaaggaaagagctgcgaaggctgctgcagaagctaaggaaagagaagcagcagaggctagagaaagggctgcaacagaatcaagggaaagggatgccaaagttgccgcagatgcaagggaaagagctgctagggctgctgctgaagctagggaaaaggaaacagcagaatttcaggagaaagctactgcagaagctcgggcaaaggctgagcgagctgctgttgagaaagctgcagcagaagcacggtggagggctgaaagagcagctttcgagagggttgctactgaagttaagcaaagggcttttaatgatgctagagaaagggctgccgctgcagctgcagctgaagcactggcaagagaaaatcagcaaaggagagcaacaacagaacctgaccttgagtcattctttggcatgccttctcgatcaagtagtctaccgagatcatacaacaacacaacaacgaatcctttcgatgttcaacctggcaatgctggttctggtggtgtaaggaggacaccttctggttcaggttttccctttactcagccttcatcaagcaatcttatggatggcctatcttctatatttggagcacctttaccatctgctgtatttcaagaagtggatggagagagtgaagagagaaggaaggcaagattggaacgacaccaaagaacaatggagcgtgcggcaaaagctcttgctgagaagaatgagcgtgacttgcaagctcagcaggagcaagaagagcgacatagaattggtgaatcacttgattttgagataaagaggtgggctgctggcaaagaaggcaacctacgggccttgctaacaacgttgcaatatattctttggcctgaatgtggctggcgacctgtatcattgactgatctgattacagcagcatctgtcaagaaagaatacaggaaagcaacattgtgtatccatcctgataaggtgcagcagaagggtgcaaatcttcaacagaaatacattgcagaaaaggtatttgaccttctgaaggaagcctggaaaaaattcaactcagaagaactcttctaacaacttgtttaggaaaatgttgatcgcaaaacaagtattgggaaggacagggacatactggtccctgtagtaatgaagaaagggagagtagcaggggccctgtttggtaagggtatgtagaagcaggcaccagctcgaggggcgattccggttagctcaaggccagatatgcaggctagtcgctcgtccaatctggagaagcagccgccagctcaaggacgtttcttgctagctctaggctagggaaaatttaactatttgatgataactctctaaaagaactatttgatgataactctctaaaagatacttttataatgtccataacagttaccattattttttgaaacattctacatttttgtcattttacctacatggctggccacgcatgcccactatgtgtccttgccagcgtggaatgctttggaaaatgtcccttttgccctccatctctcagccattgagccgatagcctcgccagcgacgtcgggtagctagctacccacaaggcctagctcgtcgggattctccaccagtggcgtcgttggcgtcattcgccccaccacgagcacgttgaccttagataacatgttgatggtctcaaacacctccttggtgtacccttgccgctcctcgaagtg

SEQ ID NO: 34508 - DNA, 3648 bp, Zea Mays
cttcccttgaagccgtcatcacaattcacaggctgcacagcacacaaaccccgcgtaggggtagagatcacctcacccctcccgactccggcgcatccattcggtcgctgccggatgcgtgcttgacccggccatggatgactctgtccctttcaatgacctcggtccctccaagcccccgtcggcctctttctacgacgatatgttcgagtcctacttcaatcgcgcggccgaggcccccgagcccgcgcctaaggcttcttcctcgccgtcgacgccgccgcccgtgttcgacaagccagtcttcgacgacgatccttacacggccgatccattcgacgcgatccccttgtttggaggcggtggtggaggggaagaggaagacttgcacggtggcgtccggagtgcggcaaagccggagaggacggagttggaggtggtgggttttgatgaagatttgttccctgggttggctgggagcaccaattttcccatggagaagccggccagggaggtggagcgggaccgtcaaccagtggggttcgacgacgagttgatccctggattcgatggaagcatgaagccagcgccgcaaatggagcctgagacagtggcgtttgatgatgatgtgatccctgactgcagtggaggcacgagctatccctcttcggcaagggaggaacctataacgagacaagaaagtgaatcaatttcctctagcaaaattagcatgagcatgccagaagatcctttcgttactttaggtggtacacacaaatcgggatattcatctttagggttgttttcaaatcttctgaataacattggcatgcctagaaaggaagcggacacaacgcctgataataccagtgggatatttcagggttctgatatctttactgagtttccaaaagccatgccacccttttcgtttacatctgaaaaccagagtgatagaactgaaaggagatatactgaaaacataatcagcacgagtcactccgatcggctgcctcaggagaagacagtccaacaagcatcaacagaagcacctgccaatacattgactgagatgaacttccctgaagcatctgttgtccatgaagtacctgttaccactagttttcagacattgaacccatttgttgaggaagacgatttgttagaggtgaatcaatcttcacaaacgactaatgatgtgtggctaactgttttagatattgctttagtgacactacctacaagtgcgccacctccttcaaggcctccacctccacttgctgctaagaaaccacctactgaatctgtaactagtgaagcatatgcccatcattgtaatcaacgctaccatcactccatatgttcttcaaacacctctaaaacatcccaaattgatgaattggaagattttttcttgacaaagcctgcaaattctgccattggtcatccacaagttctaaagcatgaaggaaatgggcattatccatctgcagctactgcaagtttcatggactggactgagatgggacactgtaaaagggggaaccaaggggcatttgattctatgttcactagcagtcaatatcgacagccagaaatagatgagaaagcagaggtatgtgctcatgaaacagaaagtacagatgaagaaaagagattagagaatgaacaaatacaaagagaacataaagaagagcaaataagagcagaaagggagatggaagaagagcttgagagggaaagagaaaatgtgagacaaagggaacaagaggagcagaggaggcgtgaaaaagaaagagtggccaggcaggctgtagataaggctatacgggaggcacgcgaaagatcagctgctgaagcacgcatgcaagctgagaaggaggctcgtcaaagagcagagcgagctgcagtatggaaagcagcaacagaagctcgtgagagagctgcagtggaggcaaaggaaagagctgcgaaggctgctgcagaagctaaggaaagagaagcagcagaggctagagaaagggctgcaacagaatcaagggaaagggatgccaaagttgccgcagatgcaagggaaagagctgctagggctgctgctgaagctagggaaaaggaaacagcagaatttcaggagaaagctactgcagaagctcgggcaaaggctgagcgagctgctgttgagaaagctgcagcagaagcacggtggagggctgaaagagcagctttcgagagggttgctactgaagttaagcaaagggcttttaatgatgctagagaaagggctgccgctgcagctgcagctgaagcactggcaagagaaaatcagcaaaggagagcaacaacagaacctgaccttgagtcattctttggcatgccttctcgatcaagtagtctaccgagatcatacaacaacacaacaacgaatcctttcgatgttcaacctggcaatgctggttctggtggtgtaaggaggacaccttctggttcaggttttccctttactcagccttcatcaagcaatcttatggatggcctatcttctatatttggagcacctttaccatctgctgtatttcaagaagtggatggagagagtgaagagagaaggaaggcaagattggaacgacaccaaagaacaatggagcgtgcggcaaaagctcttgctgagaagaatgagcgtgacttgcaagctcagcaggagcaagaagagcgacatagaattggtgaatcacttgattttgagataaagaggtgggctgctggcaaagaaggcaacctacgggccttgctaacaacgttgcaatatattctttggcctgaatgtggctggcgacctgtatcattgactgatctgattacagcagcatctgtcaagaaagaatacaggaaagcaacattgtgtatccatcctgataaggtgcagcagaagggtgcaaatcttcaacagaaatacattgcagaaaaggaagcctggaaaaaattcaactcagaagaactcttctaacaacttgtttaggaaaatgttgatcgcaaaacaagtattgggaaggacagggacatactggtccctgtagtaatgaagaaagggagagtagcaggggccctgtttggtaagggtatgtagaagcaggcaccagctcgaggggcgattccggttagctcaaggccagatatgcaggctagtcgctcgtccaatctggagaagcagccgccagctcaaggacgtttcttgctagctctaggctagggaaaatttaactatttgatgataactctctaaaagaactatttgatgataactctctaaaagatacttttataatgtccataacagttaccattattttttgaaacattctacatttttgtcattttacctacatggctggccacgcatgcccactatgtgtccttgccagcgtggaatgctttggaaaatgtcccttttgccctccatctctcagccattgagccgatagcctcgccagcgacgtcgggtagctagctacccacaaggcctagctcgtcgggattctccaccagtggcgtcgttggcgtcattcgccccaccacgagcacgttgaccttagataacatgttgatggtctcaaacacctccttggtgtacccttgccgctcctcgaagtg

SEQ ID NO: 34509 - DNA, 4073 bp, Zea Mays
aaagttttaaaacgtaccactcgatctaagattggtgccgcctccacccgggttccgagtctagtggactggtcgtacgccgtgccttcgtcgtcggaagaatcaatgtcgacgtagtcatccgctatccactgctggcgccaagatctataacgcctacccccgtcacgtgggcgccacgacacccccaccaccacgtcggagacctaggcggcaatagtattgacgccgatctgtgttggctcggcgttaataatattgacgtctatgtaaggtccaatttttgaaataaaacttaaaaagacatatttgtaagaaaaaaccgaaaaaaccaaaaaaaagctaaattgcaaaaaaaaactgatcaccccgccggctcgccccaacaggccaagtgcacacgacttcttcccttgaagccgtcatcacaattcacaggctgcacagcacacaaaccccgcgtaggggtagagatcacctcacccctcccgactccggcgcatccattcggtcgctgccggatgcgtgcttgacccggccatggatgactctgtccctttcaatgacctcggtccctccaagcccccgtcggcctctttctacgacgatatgttcgagtcctacttcaatcgcgcggccgaggcccccgagcccgcgcctaaggcttcttcctcgccgtcgacgccgccgcccgtgttcgacaagccagtcttcgacgacgatccttacacggccgatccattcgacgcgatccccttgtttggaggcggtggtggaggggaagaggaagacttgcacggtggcgtccggagtgcggcaaagccggagaggacggagttggaggtggtgggttttgatgaagatttgttccctgggttggctgggagcaccaattttcccatggagaagccggccagggaggtggagcgggaccgtcaaccagtggggttcgacgacgagttgatccctggattcgatggaagcatgaagccagcgccgcaaatggagcctgagacagtggcgtttgatgatgatgtgatccctgactgcagtggaggcacgagctatccctcttcggcaagggaggaacctataacgagacaagaaagtgaatcaatttcctctagcaaaattagcatgagcatgccagaagatcctttcgttactttaggtggtacacacaaatcgggatattcatctttagggttgttttcaaatcttctgaataacattggcatgcctagaaaggaagcggacacaacgcctgataataccagtgggatatttcagggttctgatatctttactgagtttccaaaagccatgccacccttttcgtttacatctgaaaaccagagtgatagaactgaaaggagatatactgaaaacataatcagcacgagtcactccgatcggctgcctcaggagaagacagtccaacaagcatcaacagaagcacctgccaatacattgactgagatgaacttccctgaagcatctgttgtccatgaagtacctgttaccactagttttcagacattgaacccatttgttgaggaagacgatttgttagaggtgaatcaatcttcacaaacgactaatgatgtgtggctaactgttttagatattgctttagtgacactacctacaagtgcgccacctccttcaaggcctccacctccacttgctgctaagaaaccacctactgaatctgtaactagtgaagcatatgcccatcattgtaatcaacgctaccatcactccatatgttcttcaaacacctctaaaacatcccaaattgatgaattggaagattttttcttgacaaagcctgcaaattctgccattggtcatccacaagttctaaagcatgaaggaaatgggcattatccatctgcagctactgcaagtttcatggactggactgagatgggacactgtaaaagggggaaccaaggggcatttgattctatgttcactagcagtcaatatcgacagccagaaatagatgagaaagcagaggtatgtgctcatgaaacagaaagtacagatgaagaaaagagattagagaatgaacaaatacaaagagaacataaagaagagcaaataagagcagaaagggagatggaagaagagcttgagagggaaagagaaaatgtgagacaaagggaacaagaggagcagaggaggcgtgaaaaagaaagagtggccaggcaggctgtagataaggctatacgggaggcacgcgaaagatcagctgctgaagcacgcatgcaagctgagaaggaggctcgtcaaagagcagagcgagctgcagtatggaaagcagcaacagaagctcgtgagagagctgcagtggaggcaaaggaaagagctgcgaaggctgctgcagaagctaaggaaagagaagcagcagaggctagagaaagggctgcaacagaatcaagggaaagggatgccaaagttgccgcagatgcaagggaaagagctgctagggctgctgctgaagctagggaaaaggaaacagcagaatttcaggagaaagctactgcagaagctcgggcaaaggctgagcgagctgctgttgagaaagctgcagcagaagcacggtggagggctgaaagagcagctttcgagagggttgctactgaagttaagcaaagggcttttaatgatgctagagaaagggctgccgctgcagctgcagctgaagcactggcaagagaaaatcagcaaaggagagcaacaacagaacctgaccttgagtcattctttggcatgccttctcgatcaagtagtctaccgagatcatacaacaacacaacaacgaatcctttcgatgttcaacctggcaatgctggttctggtggtgtaaggaggacaccttctggttcaggttttccctttactcagccttcatcaagcaatcttatggatggcctatcttctatatttggagcacctttaccatctgctgtatttcaagaagtggatggagagagtgaagagagaaggaaggcaagattggaacgacaccaaagaacaatggagcgtgcggcaaaagctcttgctgagaagaatgagcgtgacttgcaagctcagcaggagcaagaagagcgacatagaattggtgaatcacttgattttgagataaagaggtgggctgctggcaaagaaggcaacctacgggccttgctaacaacgttgcaatatattctttggcctgaatgtggctggcgacctgtatcattgactgatctgattacagcagcatctgtcaagaaagaatacaggaaagcaacattgtgtatccatcctgataaggtgcagcagaagggtgcaaatcttcaacagaaatacattgcagaaaaggtatttgaccttctgaaggaagcctggaaaaaattcaactcagaagaactcttctaacaacttgtttaggaaaatgttgatcgcaaaacaagtattgggaaggacagggacatactggtccctgtagtaatgaagaaagggagagtagcaggggccctgtttggtaagggtatgtagaagcaggcaccagctcgaggggcgattccggttagctcaaggccagatatgcaggctagtcgctcgtccaatctggagaagcagccgccagctcaaggacgtttcttgctagctctaggctagggaaaatttaactatttgatgataactctctaaaagaactatttgatgataactctctaaaagatacttttataatgtccataacagttaccattattttttgaaacattctacatttttgtcattttacctacatggctggccacgcatgcccactatgtgtccttgccagcgtggaatgctttggaaaatgtcccttttgccctccatctctcagccattgagccgatagcctcgccagcgacgtcgggtagctagctacccacaaggcctagctcgtcgggattctccaccagtggcgtcgttggcgtcattcgccccaccacgagcacgttgaccttagataacatgttgatggtctcaaacacctccttggtgtacccttgccgctcctcgaagtg

SEQ ID NO: 34510 - DNA, 4068 bp, Zea Mays
aaagttttaaaacgtaccactcgatctaagattggtgccgcctccacccgggttccgagtctagtggactggtcgtacgccgtgccttcgtcgtcggaagaatcaatgtcgacgtagtcatccgctatccactgctggcgccaagatctataacgcctacccccgtcacgtgggcgccacgacacccccaccaccacgtcggagacctaggcggcaatagtattgacgccgatctgtgttggctcggcgttaataatattgacgtctatgtaaggtccaatttttgaaataaaacttaaaaagacatatttgtaagaaaaaaccgaaaaaaccaaaaaaaagctaaattgcaaaaaaaaactgatcaccccgccggctcgccccaacaggccaagtgcacacgacttcttcccttgaagccgtcatcacaattcacaggctgcacagcacacaaaccccgcgtaggggtagagatcacctcacccctcccgactccggcgcatccattcggtcgctgccggatgcgtgcttgacccggccatggatgactctgtccctttcaatgacctcggtccctccaagcccccgtcggcctctttctacgacgatatgttcgagtcctacttcaatcgcgcggccgaggcccccgagcccgcgcctaaggcttcttcctcgccgtcgacgccgccgcccgtgttcgacaagccagtcttcgacgacgatccttacacggccgatccattcgacgcgatccccttgtttggaggcggtggtggaggggaagaggaagacttgcacggtggcgtccggagtgcggcaaagccggagaggacggagttggaggtggtgggttttgatgaagatttgttccctgggttggctgggagcaccaattttcccatggagaagccggccagggaggtggagcgggaccgtcaaccagtggggttcgacgacgagttgatccctggattcgatggaagcatgaagccagcgccgcaaatggagcctgagacagtggcgtttgatgatgatgtgatccctgactgcagtggaggcacgagctatccctcttcggcaagggaggaacctataacgagacaagaaagtgaatcaatttcctctagcaaaattagcatgagcatgccagaagatcctttcgttactttaggtggtacacacaaatcgggatattcatctttagggttgttttcaaatcttctgaataacattggcatgcctagaaaggaagcggacacaacgcctgataataccagtgggatatttcagggttctgatatctttactgagtttccaaaagccatgccacccttttcgtttacatctgaaaaccagagtgatagaactgaaaggagatatactgaaaacataatcagcacgagtcactccgatcggctgcctcaggagaagacagtccaacaagcatcaacagaagcacctgccaatacattgactgagatgaacttccctgaagcatctgttgtccatgaagtacctgttaccactagttttcagacattgaacccatttgttgaggaagacgatttgttagaggtgaatcaatcttcacaaacgactaatgatgtgtggctaactgttttagatattgctttagtgacactacctacaagtgcgccacctccttcaaggcctccacctccacttgctgctaagaaaccacctactgaatctgtaactagtgaagcatatgcccatcattgtaatcaacgctaccatcactccatatgttcttcaaacacctctaaaacatcccaaattgatgaattggaagattttttcttgacaaagcctgcaaattctgccattggtcatccacaagttctaaagcatgaaggaaatgggcattatccatctgcagctactgcaagtttcatggactggactgagatgggacactgtaaaagggggaaccaaggggcatttgattctatgttcactagcagtcaatatcgacagccagaaatagatgagaaagcagaggtatgtgctcatgaaacagaaagtacagatgaagaaaagagattagagaatgaacaaatacaaagagaacataaagaagagcaaataagagcagaaagggagatggaagaagagcttgagagggaaagagaaaatgtgagacaaagggaacaagaggagcagaggaggcgtgaaaaagaaagagtggccaggcaggctgtagataaggctatacgggaggcacgcgaaagatcagctgctgaagcacgcatgcaagctgagaaggaggctcgtcaaagagcagagcgagctgcagtatggaaagcagcaacagaagctcgtgagagagctgcagtggaggcaaaggaaagagctgcgaaggctgctgcagaagctaaggaaagagaagcagcagaggctagagaaagggctgcaacagaatcaagggaaagggatgccaaagttgccgcagatgcaagggaaagagctgctagggctgctgctgaagctagggaaaaggaaacagcagaatttcaggagaaagctactgcagaagctcgggcaaaggctgagcgagctgctgttgagaaagctgcagcagaagcacggtggagggctgaaagagcagctttcgagagggttgctactgaagttaagcaaagggcttttaatgatgctagagaaagggctgccgctgcagctgcagctgaagcactggcaagagaaaatcagcaaaggagagcaacaacagaacctgaccttgagtcattctttggcatgccttctcgatcaagtagtctaccgagatcatacaacaacacaacaacgaatcctttcgatgttcaacctggcaatgctggttctggtggtgtaaggaggacaccttctggttcaggttttccctttactcagccttcatcaagcaatcttatggatggcctatcttctatatttggagcacctttaccatctgctgtatttcaagaagtggatggagagagtgaagagagaaggaaggcaagattggaacgacaccaaagaacaatggagcgtgcggcaaaagctcttgctgagaagaatgagcgtgacttgcaagctcagcaggagcaagaagagcgacatagaattggtgaatcacttgattttgagataaagaggtgggctgctggcaaagaaggcaacctacgggccttgctaacaacgttgcaatatattctttggcctgaatgtggctggcgacctgtatcattgactgatctgattacagcagcatctgtcaagaaagaatacaggaaagcaacattgtgtatccatcctgataaggtgcagcagaagggtgcaaatcttcaacagaaatacattgcagaaaaggtatttgaccttctgaaggaagcctggaaaaaattcaactcagaagaactcttctaacaacttgtttaggaaaatgttgatcgcaaaacaagtattgggaaggacagggacatactggtccctgtagtaatgaagaaagggagagtagcaggggccctgtttgggtatgtagaagcaggcaccagctcgaggggcgattccggttagctcaaggccagatatgcaggctagtcgctcgtccaatctggagaagcagccgccagctcaaggacgtttcttgctagctctaggctagggaaaatttaactatttgatgataactctctaaaagaactatttgatgataactctctaaaagatacttttataatgtccataacagttaccattattttttgaaacattctacatttttgtcattttacctacatggctggccacgcatgcccactatgtgtccttgccagcgtggaatgctttggaaaatgtcccttttgccctccatctctcagccattgagccgatagcctcgccagcgacgtcgggtagctagctacccacaaggcctagctcgtcgggattctccaccagtggcgtcgttggcgtcattcgccccaccacgagcacgttgaccttagataacatgttgatggtctcaaacacctccttggtgtacccttgccgctcctcgaagtg

SEQ ID NO: 34511 - DNA, 2815 bp, Zea Mays
gcacagcacacaaaccccgcgtaggggtagagatcacctcacccctcccgactccggcgcatccattcggtcgctgccggatgcgtgcttgacccggccatggatgactctgtccctttcaatgacctcggtccctccaagcccccgtcggcctctttctacgacgatatgttcgagtcctacttcaatcgcgcggccgaggcccccgagcccgcgcctaaggcttcttcctcgccgtcgacgccgccgcccgtgttcgacaagccagtcttcgacgacgatccttacacggccgatccattcgacgcgatccccttgtttggaggcggtggtggaggggaagaggaagacttgcacggtggcgtccggagtgcggcaaagccggagaggacggagttggaggtggtgggttttgatgaagatttgttccctgggttggctgggagcaccaattttcccatggagaagccggccagggaggtggagcgggaccgtcaaccagtggggttcgacgacgagttgatccctggattcgatggaagcatgaagccagcgccgcaaatggagcctgagacagtggcgtttgatgatgatgtgatccctgactgcagtggaggcacgagctatccctcttcggcaagttgtgactgaaatatatacagggaggaacctataacgagacaagaaagtgaatcaatttcctctagcaaaattagcatgagcatgccagaagatcctttcgttactttaggtggtacacacaaatcgggatattcatctttagggttgttttcaaatcttctgaataacattggcatgcctagaaaggaagcggacacaacgcctgataataccagtgggatatttcagggttctgatatctttactgagtttccaaaagccatgccacccttttcgtttacatctgaaaaccagagtgatagaactgaaaggagatatactgaaaacataatcagcacgagtcactccgatcggctgcctcaggagaagacagtccaacaagcatcaacagaagcacctgccaatacattgactgagatgaacttccctgaagcatctgttgtccatgaagtacctgttaccactagttttcagacattgaacccatttgttgaggaagacgatttgttagaggtgaatcaatcttcacaaacgactaatgatgtgtggctaactgttttagatattgctttagtgacactacctacaagtgcgccacctccttcaaggcctccacctccacttgctgctaagaaaccacctactgaatctgtaactagtgaagcatatgcccatcattgtaatcaacgctaccatcactccatatgttcttcaaacacctctaaaacatcccaaattgatgaattggaagattttttcttgacaaagcctgcaaattctgccattggtcatccacaagttctaaagcatgaaggaaatgggcattatccatctgcagctactgcaagtttcatggactggactgagatgggacactgtaaaagggggaaccaaggggcatttgattctatgttcactagcagtcaatatcgacagccagaaatagatgagaaagcagaggtatgtgctcatgaaacagaaagtacagatgaagaaaagagattagagaatgaacaaatacaaagagaacataaagaagagcaaataagagcagaaagggagatggaagaagagcttgagagggaaagagaaaatgtgagacaaagggaacaagaggagcagaggaggcgtgaaaaagaaagagtggccaggcaggctgtagataaggctatacgggaggcacgcgaaagatcagctgctgaagcacgcatgcaagctgagaaggaggctcgtcaaagagcagagcgagctgcagtatggaaagcagcaacagaagctcgtgagagagctgcagtggaggcaaaggaaagagctgcgaaggctgctgcagaagctaaggaaagagaagcagcagaggctagagaaagggctgcaacagaatcaagggaaagggatgccaaagttgccgcagatgcaagggaaagagctgctagggctgctgctgaagctagggaaaaggaaacagcagaatttcaggagaaagctactgcagaagctcgggcaaaggctgagcgagctgctgttgagaaagctgcagcagaagcacggtggagggctgaaagagcagctttcgagagggttgctactgaagttaagcaaagggcttttaatgatgctagagaaagggctgccgctgcagctgcagctgaagcactggcaagagaaaatcagcaaaggagagcaacaacagaacctgaccttgagtcattctttggcatgccttctcgatcaagtagtctaccgagatcatacaacaacacaacaacgaatcctttcgatgttcaacctggcaatgctggttctggtggtgtaaggaggacaccttctggttcaggttttccctttactcagccttcatcaagcaatcttatggatggcctatcttctatatttggagcacctttaccatctgctgtatttcaagaagtggatggagagagtgaagagagaaggaaggcaagattggaacgacaccaaagaacaatggagcgtgcggcaaaagctcttgctgagaagaatgagcgtgacttgcaagctcagcaggagcaagaagagcgacatagaattggtgaatcacttgattttgagataaagaggtgggctgctggcaaagaaggcaacctacgggccttgctaacaacgttgcaatatatttccaacaattgcgagtttg

SEQ ID NO: 34512 - DNA, 2883 bp, Zea Mays
cacaaaccccgcgtaggggtagagatcacctcacccctcccgactccggcgcatccattcggtcgctgccggatgcgtgcttgacccggccatggatgactctgtccctttcaatgacctcggtccctccaagcccccgtcggcctctttctacgacgatatgttcgagtcctacttcaatcgcgcggccgaggcccccgagcccgcgcctaaggcttcttcctcgccgtcgacgccgccgcccgtgttcgacaagccagtcttcgacgacgatccttacacggccgatccattcgacgcgatccccttgtttggaggcggtggtggaggggaagaggaagacttgcacggtggcgtccggagtgcggcaaagccggagaggacggagttggaggtggtgggttttgatgaagatttgttccctgggttggctgggagcaccaattttcccatggagaagccggccagggaggtggagcgggaccgtcaaccagtggggttcgacgacgagttgatccctggattcgatggaagcatgaagccagcgccgcaaatggagcctgagacagtggcgtttgatgatgatgtgatccctgactgcagtggaggcacgagctatccctcttcggcaagggaggaacctataacgagacaagaaagtgaatcaatttcctctagcaaaattagcatgagcatgccagaagatcctttcgttactttaggtggtacacacaaatcgggatattcatctttagggttgttttcaaatcttctgaataacattggcatgcctagaaaggaagcggacacaacgcctgataataccagtgggatatttcagggttctgatatctttactgagtttccaaaagccatgccacccttttcgtttacatctgaaaaccagagtgatagaactgaaaggagatatactgaaaacataatcagcacgagtcactccgatcggctgcctcaggagaagacagtccaacaagcatcaacagaagcacctgccaatacattgactgagatgaacttccctgaagcatctgttgtccatgaagtacctgttaccactagttttcagacattgaacccatttgttgaggaagacgatttgttagaggtgaatcaatcttcacaaacgactaatgatgtgtggctaactgttttagatattgctttagtgacactacctacaagtgcgccacctccttcaaggcctccacctccacttgctgctaagaaaccacctactgaatctgtaactagtgaagcatatgcccatcattgtaatcaacgctaccatcactccatatgttcttcaaacacctctaaaacatcccaaattgatgaattggaagattttttcttgacaaagcctgcaaattctgccattggtcatccacaagttctaaagcatgaaggaaatgggcattatccatctgcagctactgcaagtttcatggactggactgagatgggacactgtaaaagggggaaccaaggggcatttgattctatgttcactagcagtcaatatcgacagccagaaatagatgagaaagcagaggtatgtgctcatgaaacagaaagtacagatgaagaaaagagattagagaatgaacaaatacaaagagaacataaagaagagcaaataagagcagaaagggagatggaagaagagcttgagagggaaagagaaaatgtgagacaaagggaacaagaggagcagaggaggcgtgaaaaagaaagagtggccaggcaggctgtagataaggctatacgggaggcacgcgaaagatcagctgctgaagcacgcatgcaagctgagaaggaggctcgtcaaagagcagagcgagctgcagtatggaaagcagcaacagaagctcgtgagagagctgcagtggaggcaaaggaaagagctgcgaaggctgctgcagaagctaaggaaagagaagcagcagaggctagagaaagggctgcaacagaatcaagggaaagggatgccaaagttgccgcagatgcaagggaaagagctgctagggctgctgctgaagctagggaaaaggaaacagcagaatttcaggagaaagctactgcagaagctcgggcaaaggctgagcgagctgctgttgagaaagctgcagcagaagcacggtggagggctgaaagagcagctttcgagagggttgctactgaagttaagcaaagggcttttaatgatgctagagaaagggctgccgctgcagctgcagctgaagcactggcaagagaaaatcagcaaaggagagcaacaacagaacctgaccttgagtcattctttggcatgccttctcgatcaagtagtctaccgagatcatacaacaacacaacaacgaatcctttcgatgttcaacctggcaatgctggttctggtggtgtaaggaggacaccttctggttcaggttttccctttactcagccttcatcaagcaatcttatggatggcctatcttctatatttggagcacctttaccatctgctgtatttcaagaagtggatggagagagtgaagagagaaggaaggcaagattggaacgacaccaaagaacaatggagcgtgcggcaaaagctcttgctgagaagaatgagcgtgacttgcaagctcagcaggagcaagaagagcgacatagaattggtgaatcacttgattttgagataaagaggtgggctgctggcaaagaaggcaacctacgggccttgctaacaacgttgcaatattcgctgcatgcttgatgggatcttacctaacttgaatggggtgctagtgctcattatggagaaatgcaccttttagtgtttggctgggtttcatggagtttctcatctgcttacctttg

SEQ ID NO: 34513 - DNA, 2363 bp, Zea Mays
ctctcctccttcctcgaaaggccgccaactgcgcaactggccctcgctagctgtagctggggcgctctctaccgccgctagggtttccaccgccgccgtcgatgggcgccctcaccgacagccggaagcgtctctcggcggaccactgcctctcggccgaccaccgcctcccctacccctccttgtccccgccgtcccttatccctcccttcaagcgggccaagctctccccaattcctgaacacgatccctccacctccgatttcccgcctatccgtccctctccccaaatcatccactccgctgcggcggcatccacctcctccacgccgggcccatccccctcttctatcaccgcttccaccccgcttccgcacaggcgccgactcccaccgccgccattccagcgctcgatccacggcccccagcggatcctccgcgtcttccagcttggaggggccgcacgggcctacgccaccggccactcatggttctccccgcaatcacccccgcctcgtcctctcggactccagcagtacgttgagctcgtcaacagcgtcacccacccttcgccgcccactcccgccgccattaccaatgctacgaggcaggcggaggtggcgcccttcgaggtggtcgccatcgaggaggatgaggacgagaggaagcagcagaacgaggaggaggtgatggggagcgtggtagtgagaagggtgccaccatacaaggagctgtacgaggcgtcgcgacagaagcgggatgctaagctcaagacgctcgagtttgaggtgcggctcactgagcagggccgtcttagccttgagcggcttgccgaggccctcccgcgaattacgccaaagaaggaggaggtgcctgaaccttttgttcctcttactgatgaggatgaagaaatggttcgtcaggctcttcatggcaagaacagacatgagaggttagcagtacatgaaccttcaaatattgtgataacgagggagatcatgcagtgcttgaataaccaggagtggctaaatgatgaggttcttaaaatgtcatttcttcaacacctttttctacaagaagctgatttccagtgggtatgattataaagctgttagaagatggacaacaaaaaggaagttagggtacagtctaattgattgtgacaagatatttgttcccatacacaaggaagtccattggtgtttagcagtcatcaacatcagggacaaaaagtttcagtatctagactcacttggtggcatggacatgaaggtcttgaatgtcttggccaagtatattgtggatgaggtcaaagacaaaagtggccaacagatggatgtgctctcatggaagcaggaaggtgtcaaaaaccttcctttgcaggagaatggatgggactgcggcatgtttatgctcaaatacattgacttctacagcagagatatggacctcattttcggacagaagcaaatgcattacttccgcaggaggacagcgaaggaaatactgagtttgagagctgaataaaccttggaggacatcataagtcattttggctatgttcagaattgttggaatatgtacttaacaaatgggtgcagcggcttaaaggtatagcactgagtgcaaggaatttggaagttctccagttgcacaacggcaccaagcgatggccaagcaaccggttggaattttgcatgagcacagtggtgcctttaagttttgccagtgagcatttgcaggtcataaatgggtggaatgaggcttctcctggcattagattgcaatgagattcctcagagacagctggattatggatgacttagaaactatatatagcagtgatcttgagcttcctgtgaggtgtgagctgaccaagtgagcaatcaccggtttaggctgtatgcccagcttcggtgcagagttttgtataatgttcaaatcccttttgttctttatgtttgtatttattttttaaatagtgctaattcccttagccgattatgagtgtatctggaatggctgatccgttacctgtagttttaggtcttctttggcatggctctatctccttgcacagttaaccgaggagcatgttgggcagagcatttgcacccccaattctggcacaaggtgtaagcataataacaaatgaatatcatacagcacgagcacaataagcagaagaccaaatatactaaataaaaaataccttgtttgtttgtcattatctgttgtatcagcatcacgctcacttccagcaagatcagtagatgacattttctctacaagctttgtattctttgcttcaataccatctcggtctttctgtctccgggtttcagaaaattgttttttgtcag

SEQ ID NO: 34514 - DNA, 2320 bp, Zea Mays
ctctcctccttcctcgaaaggccgccaactgcgcaactggccctcgctagctgtagctggggcgctctctaccgccgctagggtttccaccgccgccgtcgatgggcgccctcaccgacagccggaagcgtctctcggcggaccactgcctctcggccgaccaccgcctcccctacccctccttgtccccgccgtcccttatccctcccttcaagcgggccaagctctccccaattcctgaacacgatccctccacctccgatttcccgcctatccgtccctctccccaaatcatccactccgctgcggcggcatccacctcctccacgccgggcccatccccctcttctatcaccgcttccaccccgcttccgcacaggcgccgactcccaccgccgccattccagcgctcgatccacggcccccagcggatcctccgcgtcttccagcttggaggggccgcacgggcctacgccaccggccactcatggttctccccgcaatcacccccgcctcgtcctctcggactccagcagtacgttgagctcgtcaacagcgtcacccacccttcgccgcccactcccgccgccattaccaatgctacgaggcaggcggaggtggcgcccttcgaggtggtcgccatcgaggaggatgaggacgagaggaagcagcagaacgaggaggaggtgatggggagcgtggtagtgagaagggtgccaccatacaaggagctgtacgaggcgtcgcgacagaagcgggatgctaagctcaagacgctcgagtttgaggtgcggctcactgagcagggccgtcttagccttgagcggcttgccgaggccctcccgcgaattacgccaaagaaggaggaggtgcctgaaccttttgttcctcttactgatgaggatgaagaaatggttcgtcaggctcttcatggcaagaacagacatgagaggttagcagtacatgaaccttcaaatattgtgataacgagggagatcatgcagtgcttgaataaccaggagtggctaaatgatgagctgatttccagtgggtatgattataaagctgttagaagatggacaacaaaaaggaagttagggtacagtctaattgattgtgacaagatatttgttcccatacacaaggaagtccattggtgtttagcagtcatcaacatcagggacaaaaagtttcagtatctagactcacttggtggcatggacatgaaggtcttgaatgtcttggccaagtatattgtggatgaggtcaaagacaaaagtggccaacagatggatgtgctctcatggaagcaggaaggtgtcaaaaaccttcctttgcaggagaatggatgggactgcggcatgtttatgctcaaatacattgacttctacagcagagatatggacctcattttcggacagaagcaaatgcattacttccgcaggaggacagcgaaggaaatactgagtttgagagctgaataaaccttggaggacatcataagtcattttggctatgttcagaattgttggaatatgtacttaacaaatgggtgcagcggcttaaaggtatagcactgagtgcaaggaatttggaagttctccagttgcacaacggcaccaagcgatggccaagcaaccggttggaattttgcatgagcacagtggtgcctttaagttttgccagtgagcatttgcaggtcataaatgggtggaatgaggcttctcctggcattagattgcaatgagattcctcagagacagctggattatggatgacttagaaactatatatagcagtgatcttgagcttcctgtgaggtgtgagctgaccaagtgagcaatcaccggtttaggctgtatgcccagcttcggtgcagagttttgtataatgttcaaatcccttttgttctttatgtttgtatttattttttaaatagtgctaattcccttagccgattatgagtgtatctggaatggctgatccgttacctgtagttttaggtcttctttggcatggctctatctccttgcacagttaaccgaggagcatgttgggcagagcatttgcacccccaattctggcacaaggtgtaagcataataacaaatgaatatcatacagcacgagcacaataagcagaagaccaaatatactaaataaaaaataccttgtttgtttgtcattatctgttgtatcagcatcacgctcacttccagcaagatcagtagatgacattttctctacaagctttgtattctttgcttcaataccatctcggtctttctgtctccgggtttcagaaaattgttttttgtcag

SEQ ID NO: 34515 - DNA, 2398 bp, Zea Mays
ctctcctccttcctcgaaaggccgccaactgcgcaactggccctcgctagctgtagctggggcgctctctaccgccgctagggtttccaccgccgccgtcgatgggcgccctcaccgacagccggaagcgtctctcggcggaccactgcctctcggccgaccaccgcctcccctacccctccttgtccccgccgtcccttatccctcccttcaagcgggccaagctctccccaattcctgaacacgatccctccacctccgatttcccgcctatccgtccctctccccaaatcatccactccgctgcggcggcatccacctcctccacgccgggcccatccccctcttctatcaccgcttccaccccgcttccgcacaggcgccgactcccaccgccgccattccagcgctcgatccacggcccccagcggatcctccgcgtcttccagcttggaggggccgcacgggcctacgccaccggccactcatggttctccccgcaatcacccccgcctcgtcctctcggactccagcagtacgttgagctcgtcaacagcgtcacccacccttcgccgcccactcccgccgccattaccaatgctacgaggcaggcggaggtggcgcccttcgaggtggtcgccatcgaggaggatgaggacgagaggaagcagcagaacgaggaggaggtgatggggagcgtggtagtgagaagggtgccaccatacaaggagctgtacgaggcgtcgcgacagaagcgggatgctaagctcaagacgctcgagtttgaggtgcggctcactgagcagggccgtcttagccttgagcggcttgccgaggccctcccgcgaattacgccaaagaaggaggaggtgcctgaaccttttgttcctcttactgatgaggatgaagaaatggttcgtcaggctcttcatggcaagaacagacatgagaggttagcagtacatgaaccttcaaatattgtgataacgagggagatcatgcagtgcttgaataaccaggagtggctaaatgatgaggctatcaatttgtatcttgatcttcttaaagaaagggaactaagagaaccttgcaggttcttaaaatgtcatttcttcaacacctttttctacaagaagctgatttccagtgggtatgattataaagctgttagaagatggacaacaaaaaggaagttagggtacagtctaattgattgtgacaaggaagtccattggtgtttagcagtcatcaacatcagggacaaaaagtttcagtatctagactcacttggtggcatggacatgaaggtcttgaatgtcttggccaagtatattgtggatgaggtcaaagacaaaagtggccaacagatggatgtgctctcatggaagcaggaaggtgtcaaaaaccttcctttgcaggagaatggatgggactgcggcatgtttatgctcaaatacattgacttctacagcagagatatggacctcattttcggacagaagcaaatgcattacttccgcaggaggacagcgaaggaaatactgagtttgagagctgaataaaccttggaggacatcataagtcattttggctatgttcagaattgttggaatatgtacttaacaaatgggtgcagcggcttaaaggtatagcactgagtgcaaggaatttggaagttctccagttgcacaacggcaccaagcgatggccaagcaaccggttggaattttgcatgagcacagtggtgcctttaagttttgccagtgagcatttgcaggtcataaatgggtggaatgaggcttctcctggcattagattgcaatgagattcctcagagacagctggattatggatgacttagaaactatatatagcagtgatcttgagcttcctgtgaggtgtgagctgaccaagtgagcaatcaccggtttaggctgtatgcccagcttcggtgcagagttttgtataatgttcaaatcccttttgttctttatgtttgtatttattttttaaatagtgctaattcccttagccgattatgagtgtatctggaatggctgatccgttacctgtagttttaggtcttctttggcatggctctatctccttgcacagttaaccgaggagcatgttgggcagagcatttgcacccccaattctggcacaaggtgtaagcataataacaaatgaatatcatacagcacgagcacaataagcagaagaccaaatatactaaataaaaaataccttgtttgtttgtcattatctgttgtatcagcatcacgctcacttccagcaagatcagtagatgacattttctctacaagctttgtattctttgcttcaataccatctcggtctttctgtctccgggtttcagaaaattgttttttgtcag

SEQ ID NO: 34516 - DNA, 1245 bp, Zea Mays
caaagagtcatcatcttctctatcctacatcaacaagtgtctcatcaaaaacccttgaacttgtgttttcaaatgtatggggtactgctttgaagtatgtaggtcgaaaaaagtatcatgtcagttttattgacgatttcagcaagttcacctcgttgaatttcagaacatggttgagcaccactttaacacgaagatcattgctatccaaactaattggggggatgaatatcagcgtccgaactcgcttagtgtcttgtcctcatgctcaccacaaagtggtcctgttgaaagaaagagtcgccacataatagaggtatgttccagaaataattgaaggggacatggattctataagacctgaagtaaaactgttctactctagtcagggatccaaaatttctgataagtcacataaccaggagacaacagatctacacaaatgtatttctcgaatccatcattgtacgcctgatgatgaaaaaccaaatctctgtgtacttgttactggagcactaggtggaaggtttgatcacgaggcggcaaatatcaatgttctgtatctgttttcggacatgaggattgtcctcctatcagacgattgcttgatccgacttcttccaagaacacatcgccatgagctttatattgagtcgtctgttgaaggaccccattgtgggcttttccctgttggagcaccatcaacaagcacaacaactactggcctgaaatggaatctaagtgaatcaaagatgagatttgggagcatgataagcacatccaacattgtgcagtcggagaaagtaactgtagaatctgatgcagatctcttgtggacaatttctctgcgaaatctgacataagcagttcctagtttgttatcttttttcttctctttcctgtcaagtggcaaccaagctcttgtacagccacttttgtgtttatgagttgtgtgtctggtaaataaataccatctgatgacaaatcgatgaggtctcatcattagacaggatgtctaccacgatcttgaactgctgatgaattatgtgaataacacgagcaggcatgatggttgtatcctctctagttgtataactgtattgttgtacttgcaacggggtttcttgtataaaattgttctcaacagttcacactgtatggttggattttgtaatgagtctggcaattgggtacagtgatatatgctaatccatctgttctaatgtaagacattttagattttct

SEQ ID NO: 34517 - DNA, 1582 bp, Zea Mays
gtggtcccgtttgacggcgctcgtgagaacagtccatgtccgtcgcagcacatcgagcggctacaaccaacttcagaattctgaaagggacacaccgtcataccgacagcgaagacctttgccgtttttattcttcctccgtctctgcctgtacagcggcggcttggccacctctgagcctcaagccctcaacctccctcttcggcgcgtaacgtcagtcctcaggtgagatctgcttgcgcctcagtgtttcctgcgccgtttgcggtagcctgtgatgtcgcacgtattggcagcataaagtgttagatttgtccttgattgaggtaccccttcaaaggtcaagatgttgtggcgcgcagtacgcagtatggatgtaataatgcattcttcgagtttccttcttccgaaactgtatcaacctgtcaacaaaccagtcaagaactatgctttagttgttctaaaccagcatcttccacgattcatgcctcgactctgggatcatgaacagcaaacttgaggatctgcgctgatggaggagctaatcatatttttgatgagatgtatcagataaccaatgatgaagacaaaaaaagcaccagaaataagtatgttccagaaataattgaaggggacatggattctataagacctgaagtaaaactgttctactctagtcaggttcttttatttgcgctttggtttctacattgtttacccagtcagggatccaaaatttctgataagtcacataaccaggagacaacagatctacacaaatgtatttctcgaatccatcattgtacgcctgatgatgaaaaaccaaatctctgtgtacttgttactggagcactaggtggaaggtttgatcacgaggcggcaaatatcaatgttctgtatctgttttcggacatgaggattgtcctcctatcagacgattgcttgatccgacttcttccaagaacacatcgccatgagctttatattgagtcgtctgttgaaggaccccattgtgggcttttccctgttggagcaccatcaacaagcacaacaactactggcctgaaatggaatctaagtgaatcaaagatgagatttgggagcatgataagcacatccaacattgtgcagtcggagaaagtaactgtagaatctgatgcagatctcttgtggacaatttctctgcgaaatctgacataagcagttcctagtttgttatcttttttcttctctttcctgtcaagtggcaaccaagctcttgtacagccacttttgtgtttatgagttgtgtgtctggtaaataaataccatctgatgacaaatcgatgaggtctcatcattagacaggatgtctaccacgatcttgaactgctgatgaattatgtgaataacacgagcaggcatgatggttgtatcctctctagttgtataactgtattgttgtacttgcaacggggtttcttgtataaaattgttctcaacagttcacactgtatggttggattttgtaatgagtctggcaattgggtacagtgatatatgctaatccatctgttctaatgtaagacattttagattttct

SEQ ID NO: 34518 - DNA, 1476 bp, Zea Mays
gtggtcccgtttgacggcgctcgtgagaacagtccatgtccgtcgcagcacatcgagcggctacaaccaacttcagaattctgaaagggacacaccgtcataccgacagcgaagacctttgccgtttttattcttcctccgtctctgcctgtacagcggcggcttggccacctctgagcctcaagccctcaacctccctcttcggcgcgtaacgtcagtcctcaggtattggcagcataaagtgttagatttgtccttgattgaggtaccccttcaaaggtcaagatgttgtggcgcgcagtacgcagtatggatgtaataatgcattcttcgagtttccttcttccgaaactgtatcaacctgtcaacaaaccagtcaagaactatgctttagttgttctaaaccagcatcttccacgattcatgcctcgactctgggatcatgaacagcaaacttgaggatctgcgctgatggaggagctaatcatatttttgatgagatgtatcagataaccaatgatgaagacaaaaaaagcaccagaaataagtatgttccagaaataattgaaggggacatggattctataagacctgaagtaaaactgttctactctagtcagggatccaaaatttctgataagtcacataaccaggagacaacagatctacacaaatgtatttctcgaatccatcattgtacgcctgatgatgaaaaaccaaatctctgtgtacttgttactggagcactaggtggaaggtttgatcacgaggcggcaaatatcaatgttctgtatctgttttcggacatgaggattgtcctcctatcagacgattgcttgatccgacttcttccaagaacacatcgccatgagctttatattgagtcgtctgttgaaggaccccattgtgggcttttccctgttggagcaccatcaacaagcacaacaactactggcctgaaatggaatctaagtgaatcaaagatgagatttgggagcatgataagcacatccaacattgtgcagtcggagaaagtaactgtagaatctgatgcagatctcttgtggacaatttctctgcgaaatctgacataagcagttcctagtttgttatcttttttcttctctttcctgtcaagtggcaaccaagctcttgtacagccacttttgtgtttatgagttgtgtgtctggtaaataaataccatctgatgacaaatcgatgaggtctcatcattagacaggatgtctaccacgatcttgaactgctgatgaattatgtgaataacacgagcaggcatgatggttgtatcctctctagttgtataactgtattgttgtacttgcaacggggtttcttgtataaaattgttctcaacagttcacactgtatggttggattttgtaatgagtctggcaattgggtacagtgatatatgctaatccatctgttctaatgtaagacattttagattttct

SEQ ID NO: 34519 - DNA, 460 bp, Zea Mays
cctatgtcctcgctactcgctgcacagcctcgtcttgcgctcgcctactctccaagcagcagcagtagcagcgctcctcacgctcgacctcggcaaggacgagcagccccatccacgacaccaaaattctttgccccttgtcgtcgtcgcgcttcgtccgttgtttctcgacagaaagccaaaccgacatgcatgcatgcacaactccactcgggtttcggccaggttgttcgctttagaaaaattgtgattttgttttatttacggttcagccgatggcgtgaatatgtgcatgaaagtataattgtatgaatggacgcgtgtagagaataaaatgaagtagaaaagaactcgaatgtttttatattttgataggaaaaatatgcgatgagttgtttgatgcgaagactaagttacaaaatgcggattatgttttgtgaaatgcatcgatatgtgttta

SEQ ID NO: 34520 - DNA, 2167 bp, Zea Mays
gctaaactagggctactcctaattcctaatgctaaggtgaaggatgctcttgaacaatttgagaatgcattagagctgaatccaacatctattgaggcccaggcagcgctatataacaaggcatgctgccatgcgtatagagaagaaagcaaaaaggctgcagaatgtttaagggaagctttgagagactacaatctcaaatttggtaccatacttaatgatccagacttggcgccattcagagcatcaccagaattcaaggaacttcaagaagaggctttgcgtggtggagaagatattggttctggtttccgaagagacctgaaactcattagtgaagtacaagcaccattccgtggtgttcgaagattcttctatgtagctttgacagcagcagctggaatttcaacattctttaccattccccgacttgtactagcagttcgagggggtgatggcgcccctgatcttctggaaactgctggaaatgctgccatcaatattggaggtattgttgttctggtagctttgtatttctgggaaaacaagaaagaagagaagcagatcacacaaatttctcgtaatgaaaccctttcaagattacctgtgcgcctgtcaaccaatcgcattattgaacttgttcaactccgggacatcactaggcctgttcaaaagcatctgttactcgggcattgcaaagagctgagaggtatcggactgaactgctcaaacgaggcgttcttctaattcctgtgatctttggtgcttctcagaaagaccaaaccaaaccaaggggttttggtgcaagaagagctgctgcatcagttccttctgttgggggtgactttgaaaagcgtactgaatctattgcagcaaaatcacggttgaagactgaggttcggtttaaggctgatattgtttccccagaacaatgggaaaggtgcatttcctttgatgtatatgcattttgtcctatactctatatctaacttcaataagtagcaagactgtttttcacaagtacatatttttttctaacatagcacaataagtcaataacataattaaggtacatagattgtgtagcagcacagaagggaaattattagaaagatatataaacttacaatccaccctaaagtaaaggattatgatcttcccctctatagcacacaccatacttgaaacttgaaagccatattgctcactcaggtaaagaagtagggttttttttggggccaatgcagcattataatggaaatgttatctgtaaaaccacagaatattgaaaagatacagtgtcctttgattcttctcctcccataggccataggtatgattgcagaaaaaacatatccatatgtttaggttctgatatggcatctatcccttttactgcatccacatattgataggacctgaggtatgaaataatctgtctcaagtctaaatttcaagatatctttacttgttttgctcccatttctagtctgtgcctttacattacttctcttttctaaggaccgctacagaaatactacaagtgcagtcagtcctgttccttttctgttattattagcatggttctacatgcttgaatgtggtaatttactatcctgggttttgatatctacctgttctcattatggttcagttggatacgagaccagcaagtgtctgaaggtgtcactcctggtgaggatgtctacataatccttcgtctcgatggacgtgtcagaagatctggaataggcatgccaaactggaatgacatattacaggaactgccacgacttgaagatctgatgagcaaacttgaacggtgaaaaaggtgtgggagcagctaaagttttaccattactctttttcccccattccattcgccttgcccttatctgctgaaacttgaagctggaccatcgtagttcttgtataatatagtgaaattctgctattttgtttatagcttgccgaagtttttctgtcatttggtaaccgcgatatagagggttgttcttttaaagggctagtttgggaacgccgtttttctaagatattcagattttcccaaagaaaaatgaactaatttttctttgaaaaatgaaaatcctttgaaaaaatggagttcacaaactagccctagccctaaatagattgatgaaataag

SEQ ID NO: 34521 - DNA, 2590 bp, Zea Mays
gctaaactagggctactcctaattcctaatgctaaggtaaaaatgataagtagaattgattggatcgattgtgggggttcaatcggccgtacctcttcatctatataagggggaggtcttgacccgttacaagtcagttcccaagctaatcctatgaagatcgctaacaaatcccacaagaaacggggaaccgtaactgattctgcgcacgcgcggaccgtccgcgccgccactgcgcggacagtccgcaagccaatttcggtgctcaacagatatgtattggcagattatgacagtctccaacttgaaaacaattggcagtgaaggatgctcttgaacaatttgagaatgcattagagctgaatccaacatctattgaggcccaggcagcgctatataacaaggcatgctgccatgcgtatagagaagaaagcaaaaaggctgcagaatgtttaagggaagctttgagagactacaatctcaaatttggtaccatacttaatgatccagacttggcgccattcagagcatcaccagaattcaaggaacttcaagaagaggctttgcgtggtggagaagatattggttctggtttccgaagagacctgaaactcattagtgaagtacaagcaccattccgtggtgttcgaagattcttctatgtagctttgacagcagcagctggaatttcaacattctttaccattccccgacttgtactagcagttcgagggggtgatggcgcccctgatcttctggaaactgctggaaatgctgccatcaatattggagtatgccgcaggtattgttgttctggtagctttgtatttctgggaaaacaagaaagaagagaagcagatcacacaaatttctcgtaatgaaaccctttcaagattacctgtgcgcctgtcaaccaatcgcattattgaacttgttcaactccgggacatcactaggcctgttagtataactttctctatctttaatgtccactgtatgtttgctgaaattaattgtttttctcatttatttctgaaacctttattcagccacttgtcatttgaggtgtattttaggtgatattggcaggttcaaaagcatctgttactcgggcattgcaaagagctgagaggtatcggactgaactgctcaaacgaggcgttcttctaattcctgtgatctttggtgcttctcagaaagaccaaaccaaaccaaggggttttggtgcaagaagagctgctgcatcagttccttctgttgggggtgactttgaaaagcgtactgaatctattgcagcaaaatcacggttgaagactgaggttcggtttaaggctgatattgtttccccagaacaatgggaaaggtgcatttcctttgatgtatatgcattttgtcctatactctatatctaacttcaataagtagcaagactgtttttcacaagtacatatttttttctaacatagcacaataagtcaataacataattaaggtacatagattgtgtagcagcacagaagggaaattattagaaagatatataaacttacaatccaccctaaagtaaaggattatgatcttcccctctatagcacacaccatacttgaaacttgaaagccatattgctcactcaggtaaagaagtagggttttttttggggccaatgcagcattataatggaaatgttatctgtaaaaccacagaatattgaaaagatacagtgtcctttgattcttctcctcccataggccataggtatgattgcagaaaaaacatatccatatgtttaggttctgatatggcatctatcccttttactgcatccacatattgataggacctgaggtatgaaataatctgtctcaagtctaaatttcaagatatctttacttgttttgctcccatttctagtctgtgcctttacattacttctcttttctaaggaccgctacagaaatactacaagtgcagtcagtcctgttccttttctgttattattagcatggttctacatgcttgaatgtggtaatttactatcctgggttttgatatctacctgttctcattatggttcagttggatacgagaccagcaagtgtctgaaggtgtcactcctggtgaggatgtctacataatccttcgtctcgatggacgtgtcagaagatctggaataggcatgccaaactggaatgacatattacaggaactgccacgacttgaagatctgatgagcaaacttgaacggtgaaaaaggtgtgggagcagctaaagttttaccattactctttttcccccattccattcgccttgcccttatctgctgaaacttgaagctggaccatcgtagttcttgtataatatagtgaaattctgctattttgtttatagcttgccgaagtttttctgtcatttggtaaccgcgatatagagggttgttcttttaaagggctagtttgggaacgccgtttttctaagatattcagattttcccaaagaaaaatgaactaatttttctttgaaaaatgaaaatcctttgaaaaaatggagttcacaaactagccctagccctaaatagattgatgaaataag

SEQ ID NO: 34522 - DNA, 1699 bp, Zea Mays
gctaaactagggctactcctaattcctaatgctaaggtgaaggatgctcttgaacaatttgagaatgcattagagctgaatccaacatctattgaggcccaggcagcgctatataacaaggcatgctgccatgcgtatagaaagcaaaaaggctgcagaatgtttaagggaagctttgagagactacaatctcaaatttggtaccatacttaatgatccagacttggcgccattcagagcatcaccagaattcaaggaacttcaagaagaggctttgcgtggtggagaagatattggttctggtttccgaagagacctgaaactcattagtgaagtacaagcaccattccgtggtgttcgaagattcttctatgtagctttgacagcagcagctggaatttcaacattctttaccattccccgacttgtactagcagttcgagggggtgatggcgcccctgatcttctggaaactgctggaaatgctgccatcaatattggaggtattgttgttctggtagctttgtatttctgggaaaacaagaaagaagagaagcagatcacacaaatttctcgtaatgaaaccctttcaagattacctgtgcgcctgtcaaccaatcgcattattgaacttgttcaactccgggacatcactaggcctgttagtataactttctctatctttaatgtccactgtatgtttgctgaaattaattgtttttctcatttatttctgaaacctttattcagccacttgtcatttgaggtgtattttaggtgatattggcaggttcaaaagcatctgttactcgggcattgcaaagagctgagaggtatcggactgaactgctcaaacgaggcgttcttctaattcctgtgatctttggtgcttctcagaaagaccaaaccaaaccaaggggttttggtgcaagaagagctgctgcatcagttccttctgttggggttagaccaaccttacatattggctaaataccaaaaacctcacctgcctcttagtttgtgtgttttgcaccaaaaacttggtccctttctttgataatttaatgcaatgttgattttgacagggtgactttgaaaagcgtactgaatctattgcagcaaaatcacggttgaagactgaggttcggtttaaggctgatattgtttccccagaacaatgggaaagttggatacgagaccagcaagtgtctgaaggtgtcactcctggtgaggatgtctacataatccttcgtctcgatggacgtgtcagaagatctggaataggcatgccaaactggaatgacatattacaggaactgccacgacttgaagatctgatgagcaaacttgaacggtgaaaaaggtgtgggagcagctaaagttttaccattactctttttcccccattccattcgccttgcccttatctgctgaaacttgaagctggaccatcgtagttcttgtataatatagtgaaattctgctattttgtttatagcttgccgaagtttttctgtcatttggtaaccgcgatatagagggttgttcttttaaagggctagtttgggaacgccgtttttctaagatattcagattttcccaaagaaaaatgaactaatttttctttgaaaaatgaaaatcctttgaaaaaatggagttcacaaactagccctagccctaaatagattgatgaaataag

SEQ ID NO: 34523 - DNA, 1709 bp, Zea Mays
gctaaactagggctactcctaattcctaatgctaaggtgaaggatgctcttgaacaatttgagaatgcattagagctgaatccaacatctattgaggcccaggcagcgctatataacaaggcatgctgccatgcgtatagaaagcaaaaaggctgcagaatgtttaagggaagctttgagagactacaatctcaaatttggtaccatacttaatgatccagacttggcgccattcagagcatcaccagaattcaaggaacttcaagaagaggctttgcgtggtggagaagatattggttctggtttccgaagagacctgaaactcattagtgaagtacaagcaccattccgtggtgttcgaagattcttctatgtagctttgacagcagcagctggaatttcaacattctttaccattccccgacttgtactagcagttcgagggggtgatggcgcccctgatcttctggaaactgctggaaatgctgccatcaatattggagtatgccgcaggtattgttgttctggtagctttgtatttctgggaaaacaagaaagaagagaagcagatcacacaaatttctcgtaatgaaaccctttcaagattacctgtgcgcctgtcaaccaatcgcattattgaacttgttcaactccgggacatcactaggcctgttagtataactttctctatctttaatgtccactgtatgtttgctgaaattaattgtttttctcatttatttctgaaacctttattcagccacttgtcatttgaggtgtattttaggtgatattggcaggttcaaaagcatctgttactcgggcattgcaaagagctgagaggtatcggactgaactgctcaaacgaggcgttcttctaattcctgtgatctttggtgcttctcagaaagaccaaaccaaaccaaggggttttggtgcaagaagagctgctgcatcagttccttctgttggggttagaccaaccttacatattggctaaataccaaaaacctcacctgcctcttagtttgtgtgttttgcaccaaaaacttggtccctttctttgataatttaatgcaatgttgattttgacagggtgactttgaaaagcgtactgaatctattgcagcaaaatcacggttgaagactgaggttcggtttaaggctgatattgtttccccagaacaatgggaaagttggatacgagaccagcaagtgtctgaaggtgtcactcctggtgaggatgtctacataatccttcgtctcgatggacgtgtcagaagatctggaataggcatgccaaactggaatgacatattacaggaactgccacgacttgaagatctgatgagcaaacttgaacggtgaaaaaggtgtgggagcagctaaagttttaccattactctttttcccccattccattcgccttgcccttatctgctgaaacttgaagctggaccatcgtagttcttgtataatatagtgaaattctgctattttgtttatagcttgccgaagtttttctgtcatttggtaaccgcgatatagagggttgttcttttaaagggctagtttgggaacgccgtttttctaagatattcagattttcccaaagaaaaatgaactaatttttctttgaaaaatgaaaatcctttgaaaaaatggagttcacaaactagccctagccctaaatagattgatgaaataag

SEQ ID NO: 34524 - DNA, 2413 bp, Zea Mays
gctaaactagggctactcctaattcctaatgctaaggtgaaggatgctcttgaacaatttgagaatgcattagagctgaatccaacatctattgaggcccaggcagcgctatataacaaggcatgctgccatgcgtatagaaagcaaaaaggctgcagaatgtttaagggaagctttgagagactacaatctcaaatttggtaccatacttaatgatccagacttggcgccattcagagcatcaccagaattcaaggaacttcaagaagaggctttgcgtggtggagaagatattggttctggtttccgaagagacctgaaactcattagtgaagtacaagcaccattccgtggtgttcgaagattcttctatgtagctttgacagcagcagctggaatttcaacattctttaccattccccgacttgtactagcagttcgagggggtgatggcgcccctgatcttctggaaactgctggaaatgctgccatcaatattggaggtattgttgttctggtagctttgtatttctgggaaaacaagaaagaagagaagcagatcacacaaatttctcgtaatgaaaccctttcaagattacctgtgcgcctgtcaaccaatcgcattattgaacttgttcaactccgggacatcactaggcctgttagtataactttctctatctttaatgtccactgtatgtttgctgaaattaattgtttttctcatttatttctgaaacctttattcagccacttgtcatttgaggtgtattttaggtgatattggcaggttcaaaagcatctgttactcgggcattgcaaagagctgagaggtatcggactgaactgctcaaacgaggcgttcttctaattcctgtgatctttggtgcttctcagaaagaccaaaccaaaccaaggggttttggtgcaagaagagctgctgcatcagttccttctgttggggttagaccaaccttacatattggctaaataccaaaaacctcacctgcctcttagtttgtgtgttttgcaccaaaaacttggtccctttctttgataatttaatgcaatgttgattttgacagggtgactttgaaaagcgtactgaatctattgcagcaaaatcacggttgaagactgaggttcggtttaaggctgatattgtttccccagaacaatgggaaaggtgcatttcctttgatgtatatgcattttgtcctatactctatatctaacttcaataagtagcaagactgtttttcacaagtacatatttttttctaacatagcacaataagtcaataacataattaaggtacatagattgtgtagcagcacagaagggaaattattagaaagatatataaacttacaatccaccctaaagtaaaggattatgatcttcccctctatagcacacaccatacttgaaacttgaaagccatattgctcactcaggtaaagaagtagggttttttttggggccaatgcagcattataatggaaatgttatctgtaaaaccacagaatattgaaaagatacagtgtcctttgattcttctcctcccataggccataggtatgattgcagaaaaaacatatccatatgtttaggttctgatatggcatctatcccttttactgcatccacatattgataggacctgaggtatgaaataatctgtctcaagtctaaatttcaagatatctttacttgttttgctcccatttctagtctgtgcctttacattacttctcttttctaaggaccgctacagaaatactacaagtgcagtcagtcctgttccttttctgttattattagcatggttctacatgcttgaatgtggtaatttactatcctgggttttgatatctacctgttctcattatggttcagttggatacgagaccagcaagtgtctgaaggtgtcactcctggtgaggatgtctacataatccttcgtctcgatggacgtgtcagaagatctggaataggcatgccaaactggaatgacatattacaggaactgccacgacttgaagatctgatgagcaaacttgaacggtgaaaaaggtgtgggagcagctaaagttttaccattactctttttcccccattccattcgccttgcccttatctgctgaaacttgaagctggaccatcgtagttcttgtataatatagtgaaattctgctattttgtttatagcttgccgaagtttttctgtcatttggtaaccgcgatatagagggttgttcttttaaagggctagtttgggaacgccgtttttctaagatattcagattttcccaaagaaaaatgaactaatttttctttgaaaaatgaaaatcctttgaaaaaatggagttcacaaactagccctagccctaaatagattgatgaaataag

SEQ ID NO: 34525 - DNA, 1745 bp, Zea Mays
gctaaactagggctactcctaattcctaatgctaaggtgaaggatgctcttgaacaatttgagaatgcattagagctgaatccaacatctattgaggcccaggcagcgctatataacaaggcatgctgccatgcgtatagagaagaaagcaaaaaggctgcagaatgtttaagggaagctttgagagactacaatctcaaatttggtaccatacttaatgatccagacttggcgccattcagagcatcaccagaattcaaggaacttcaagaagaggctttgcgtggtggagaagatattggttctggtttccgaagagacctgaaactcattagtgaagtacaagcaccattccgtggtgttcgaagattcttctatgtagctttgacagcagcagctggaatttcaacattctttaccattccccgacttgtactagcagttcgagggggtgatggcgcccctgatcttctggaaactgctggaaatgctgccatcaatattggagtatgccgcaggtattgttgttctggtagctttgtatttctgggaaaacaagaaagaagagaagcagatcacacaaatttctcgtaatgaaaccctttcaagattacctgtgcgcctgtcaaccaatcgcattattgaacttgttcaactccgggacatcactaggcctgttagtataactttctctatctttaatgtccactgtatgtttgctgaaattaattgtttttctcatttatttctgaaacctttattcagccacttgtcatttgaggtgtattttaggtgatattggcaggttcaaaagcatctgttactcgggcattgcaaagagctgagaggtatcggactgaactgctcaaacgaggcgttcttctaattcctgtgatctttggtgcttctcagaaagaccaaaccaaaccaaggggttttggtgcaagaagagctgctgcatcagttccttctgttggggttagaccaaccttacatattggctaaataccaaaaacctcacctgcctcttagtttgtgtgttttgcaccaaaaacttggtccctttctttgataatttaatgcaatgttgattttgacagggtgactttgaaaagcgtactgaatctattgcagcaaaatcacggttgaagactgaggttcggtttaaggctgatattgtttccccagaacaatgggaaagttggatacgagaccagcaagtgtctgaaggtgtcactcctggtgaggatgtctacataatccttcgtctcgatggacgtgtcagaagatctggaatagtaattattctctgctctcagtttcactctgggcatgccaaactggaatgacatattacaggaactgccacgacttgaagatctgatgagcaaacttgaacggtgaaaaaggtgtgggagcagctaaagttttaccattactctttttcccccattccattcgccttgcccttatctgctgaaacttgaagctggaccatcgtagttcttgtataatatagtgaaattctgctattttgtttatagcttgccgaagtttttctgtcatttggtaaccgcgatatagagggttgttcttttaaagggctagtttgggaacgccgtttttctaagatattcagattttcccaaagaaaaatgaactaatttttctttgaaaaatgaaaatcctttgaaaaaatggagttcacaaactagccctagccctaaatagattgatgaaataag

SEQ ID NO: 34526 - DNA, 1578 bp, Zea Mays
ctcctctcgggaaggaccctgtcggggaggagagatcttagggtgtgccttggagtcggcaggccacccaagacgtctctaatcgacgtagagccgacgagaggtgaagattcgagttagagaaggctaaactagggctactcctaattcctaatgctaaggtgaaggatgctcttgaacaatttgagaatgcattagagctgaatccaacatctattgaggcccaggcagcgctatataacaaggcatgctgccatgcgtatagagaagaaagcaaaaaggctgcagaatgtttaagggaagctttgagagactacaatctcaaatttggtaccatacttaatgatccagacttggcgccattcagagcatcaccagaattcaaggaacttcaagaagaggctttgcgtggtggagaagatattggttctggtttccgaagagacctgaaactcattagtgaagtacaagcaccattccgtggtgttcgaagattcttctatgtagctttgacagcagcagctggaatttcaacattctttaccattccccgacttgtactagcagttcgagggggtgatggcgcccctgatcttctggaaactgctggaaatgctgccatcaatattggaggtattgttgttctggtagctttgtatttctgggaaaacaagaaagaagagaagcagatcacacaaatttctcgtaatgaaaccctttcaagattacctgtgcgcctgtcaaccaatcgcattattgaacttgttcaactccgggacatcactaggcctgttcaaaagcatctgttactcgggcattgcaaagagctgagaggtatcggactgaactgctcaaacgaggcgttcttctaattcctgtgatctttggtgcttctcagaaagaccaaaccaaaccaaggggttttggtgcaagaagagctgctgcatcagttccttctgttgggggtgactttgaaaagcgtactgaatctattgcagcaaaatcacggttgaagactgaggttcggtttaaggctgatattgtttccccagaacaatgggaaagttggatacgagaccagcaagtgtctgaaggtgtcactcctggtgaggatgtctacataatccttcgtctcgatggacgtgtcagaagatctggaataggcatgccaaactggaatgacatattacaggaactgccacgacttgaagatctgatgagcaaacttgaacggtgaaaaaggtgtgggagcagctaaagttttaccattactctttttcccccattccattcgccttgcccttatctgctgaaacttgaagctggaccatcgtagttcttgtataatatagtgaaattctgctattttgtttatagcttgccgaagtttttctgtcatttggtaaccgcgatatagagggttgttcttttaaagggctagtttgggaacgccgtttttctaagatattcagattttcccaaagaaaaatgaactaatttttctttgaaaaatgaaaatcctttgaaaaaatggagttcacaaactagccctagccctaaatagattgatgaaataag

SEQ ID NO: 34527 - DNA, 2695 bp, Zea Mays
agacggtccgtgaaacagtgccagacggtctacgacctgagcataagagcggctccttctctgggtacatccggacggtccgtgcctatggctcggacaatccacgatggcgcagagggtcgttttcttcgcagcagacctagatttctcctctcgggaaggaccctgtcggggaggagagatcttagggtgtgccttggagtcggcaggccacccaagacgtctctaatcgacgtagagccgacgagaggtgaagattcgagttagagaaggctaaactagggctactcctaattcctaatgctaaggtgaaggatgctcttgaacaatttgagaatgcattagagctgaatccaacatctattgaggcccaggcagcgctatataacaaggcatgctgccatgcgtatagaaagcaaaaaggctgcagaatgtttaagggaagctttgagagactacaatctcaaatttggtaccatacttaatgatccagacttggcgccattcagagcatcaccagaattcaaggaacttcaagaagaggctttgcgtggtggagaagatattggttctggtttccgaagagacctgaaactcattagtgaagtacaagcaccattccgtggtgttcgaagattcttctatgtagctttgacagcagcagctggaatttcaacattctttaccattccccgacttgtactagcagttcgagggggtgatggcgcccctgatcttctggaaactgctggaaatgctgccatcaatattggagtatgccgcaggtattgttgttctggtagctttgtatttctgggaaaacaagaaagaagagaagcagatcacacaaatttctcgtaatgaaaccctttcaagattacctgtgcgcctgtcaaccaatcgcattattgaacttgttcaactccgggacatcactaggcctgttagtataactttctctatctttaatgtccactgtatgtttgctgaaattaattgtttttctcatttatttctgaaacctttattcagccacttgtcatttgaggtgtattttaggtgatattggcaggttcaaaagcatctgttactcgggcattgcaaagagctgagaggtatcggactgaactgctcaaacgaggcgttcttctaattcctgtgatctttggtgcttctcagaaagaccaaaccaaaccaaggggttttggtgcaagaagagctgctgcatcagttccttctgttggggttagaccaaccttacatattggctaaataccaaaaacctcacctgcctcttagtttgtgtgttttgcaccaaaaacttggtccctttctttgataatttaatgcaatgttgattttgacagggtgactttgaaaagcgtactgaatctattgcagcaaaatcacggttgaagactgaggttcggtttaaggctgatattgtttccccagaacaatgggaaaggtgcatttcctttgatgtatatgcattttgtcctatactctatatctaacttcaataagtagcaagactgtttttcacaagtacatatttttttctaacatagcacaataagtcaataacataattaaggtacatagattgtgtagcagcacagaagggaaattattagaaagatatataaacttacaatccaccctaaagtaaaggattatgatcttcccctctatagcacacaccatacttgaaacttgaaagccatattgctcactcaggtaaagaagtagggttttttttggggccaatgcagcattataatggaaatgttatctgtaaaaccacagaatattgaaaagatacagtgtcctttgattcttctcctcccataggccataggtatgattgcagaaaaaacatatccatatgtttaggttctgatatggcatctatcccttttactgcatccacatattgataggacctgaggtatgaaataatctgtctcaagtctaaatttcaagatatctttacttgttttgctcccatttctagtctgtgcctttacattacttctcttttctaaggaccgctacagaaatactacaagtgcagtcagtcctgttccttttctgttattattagcatggttctacatgcttgaatgtggtaatttactatcctgggttttgatatctacctgttctcattatggttcagttggatacgagaccagcaagtgtctgaaggtgtcactcctggtgaggatgtctacataatccttcgtctcgatggacgtgtcagaagatctggaataggcatgccaaactggaatgacatattacaggaactgccacgacttgaagatctgatgagcaaacttgaacggtgaaaaaggtgtgggagcagctaaagttttaccattactctttttcccccattccattcgccttgcccttatctgctgaaacttgaagctggaccatcgtagttcttgtataatatagtgaaattctgctattttgtttatagcttgccgaagtttttctgtcatttggtaaccgcgatatagagggttgttcttttaaagggctagtttgggaacgccgtttttctaagatattcagattttcccaaagaaaaatgaactaatttttctttgaaaaatgaaaatcctttgaaaaaatggagttcacaaactagccctagccctaaatagattgatgaaataag

SEQ ID NO: 34528 - DNA, 2452 bp, Zea Mays
agacggtccgtgaaacagtgccagacggtctacgacctgagcataagagcggctccttctctgggtacatccggacggtccgtgcctatggctcggacaatccacgatggcgcagagggtcgttttcttcgcagcagacctagatttctcctctcgggaaggaccctgtcggggaggagagatcttagggtgtgccttggagtcggcaggccacccaagacgtctctaatcgacgtagagccgacgagaggtgaagattcgagttagagaaggctaaactagggctactcctaattcctaatgctaaggtgaaggatgctcttgaacaatttgagaatgcattagagctgaatccaacatctattgaggcccaggcagcgctatataacaaggcatgctgccatgcgtatagagaagaaagcaaaaaggctgcagaatgtttaagggaagctttgagagactacaatctcaaatttggtaccatacttaatgatccagacttggcgccattcagagcatcaccagaattcaaggaacttcaagaagaggctttgcgtggtggagaagatattggttctggtttccgaagagacctgaaactcattagtgaagtacaagcaccattccgtggtgttcgaagattcttctatgtagctttgacagcagcagctggaatttcaacattctttaccattccccgacttgtactagcagttcgagggggtgatggcgcccctgatcttctggaaactgctggaaatgctgccatcaatattggaggtattgttgttctggtagctttgtatttctgggaaaacaagaaagaagagaagcagatcacacaaatttctcgtaatgaaaccctttcaagattacctgtgcgcctgtcaaccaatcgcattattgaacttgttcaactccgggacatcactaggcctgtgatattggcaggttcaaaagcatctgttactcgggcattgcaaagagctgagaggtatcggactgaactgctcaaacgaggcgttcttctaattcctgtgatctttggtgcttctcagaaagaccaaaccaaaccaaggggttttggtgcaagaagagctgctgcatcagttccttctgttgggggtgactttgaaaagcgtactgaatctattgcagcaaaatcacggttgaagactgaggttcggtttaaggctgatattgtttccccagaacaatgggaaaggtgcatttcctttgatgtatatgcattttgtcctatactctatatctaacttcaataagtagcaagactgtttttcacaagtacatatttttttctaacatagcacaataagtcaataacataattaaggtacatagattgtgtagcagcacagaagggaaattattagaaagatatataaacttacaatccaccctaaagtaaaggattatgatcttcccctctatagcacacaccatacttgaaacttgaaagccatattgctcactcaggtaaagaagtagggttttttttggggccaatgcagcattataatggaaatgttatctgtaaaaccacagaatattgaaaagatacagtgtcctttgattcttctcctcccataggccataggtatgattgcagaaaaaacatatccatatgtttaggttctgatatggcatctatcccttttactgcatccacatattgataggacctgaggtatgaaataatctgtctcaagtctaaatttcaagatatctttacttgttttgctcccatttctagtctgtgcctttacattacttctcttttctaaggaccgctacagaaatactacaagtgcagtcagtcctgttccttttctgttattattagcatggttctacatgcttgaatgtggtaatttactatcctgggttttgatatctacctgttctcattatggttcagttggatacgagaccagcaagtgtctgaaggtgtcactcctggtgaggatgtctacataatccttcgtctcgatggacgtgtcagaagatctggaataggcatgccaaactggaatgacatattacaggaactgccacgacttgaagatctgatgagcaaacttgaacggtgaaaaaggtgtgggagcagctaaagttttaccattactctttttcccccattccattcgccttgcccttatctgctgaaacttgaagctggaccatcgtagttcttgtataatatagtgaaattctgctattttgtttatagcttgccgaagtttttctgtcatttggtaaccgcgatatagagggttgttcttttaaagggctagtttgggaacgccgtttttctaagatattcagattttcccaaagaaaaatgaactaatttttctttgaaaaatgaaaatcctttgaaaaaatggagttcacaaactagccctagccctaaatagattgatgaaataag

SEQ ID NO: 34529 - DNA, 2515 bp, Zea Mays
cttaggatattgttgggagatgaatcacctagcggtgctgtctgcggaggcgtagacggtccgtgaaacagtgccagacggtctacgacctgagcataagagcggctccttctctgggtacatccggacggtccgtgcctatggctcggacaatccacgatggcgcagagggtcgttttcttcgcagcagacctagatttctcctctcgggaaggaccctgtcggggaggagagatcttagggtgtgccttggagtcggcaggccacccaagacgtctctaatcgacgtagagccgacgagaggtgaagattcgagttagagaaggctaaactagggctactcctaattcctaatgctaaggtgaaggatgctcttgaacaatttgagaatgcattagagctgaatccaacatctattgaggcccaggcagcgctatataacaaggcatgctgccatgcgtatagagaagaaagcaaaaaggctgcagaatgtttaagggaagctttgagagactacaatctcaaatttggtaccatacttaatgatccagacttggcgccattcagagcatcaccagaattcaaggaacttcaagaagaggctttgcgtggtggagaagatattggttctggtttccgaagagacctgaaactcattagtgaagtacaagcaccattccgtggtgttcgaagattcttctatgtagctttgacagcagcagctggaatttcaacattctttaccattccccgacttgtactagcagttcgagggggtgatggcgcccctgatcttctggaaactgctggaaatgctgccatcaatattggagtatgccgcaggtattgttgttctggtagctttgtatttctgggaaaacaagaaagaagagaagcagatcacacaaatttctcgtaatgaaaccctttcaagattacctgtgcgcctgtcaaccaatcgcattattgaacttgttcaactccgggacatcactaggcctgtgatattggcaggttcaaaagcatctgttactcgggcattgcaaagagctgagaggtatcggactgaactgctcaaacgaggcgttcttctaattcctgtgatctttggtgcttctcagaaagaccaaaccaaaccaaggggttttggtgcaagaagagctgctgcatcagttccttctgttgggggtgactttgaaaagcgtactgaatctattgcagcaaaatcacggttgaagactgaggttcggtttaaggctgatattgtttccccagaacaatgggaaaggtgcatttcctttgatgtatatgcattttgtcctatactctatatctaacttcaataagtagcaagactgtttttcacaagtacatatttttttctaacatagcacaataagtcaataacataattaaggtacatagattgtgtagcagcacagaagggaaattattagaaagatatataaacttacaatccaccctaaagtaaaggattatgatcttcccctctatagcacacaccatacttgaaacttgaaagccatattgctcactcaggtaaagaagtagggttttttttggggccaatgcagcattataatggaaatgttatctgtaaaaccacagaatattgaaaagatacagtgtcctttgattcttctcctcccataggccataggtatgattgcagaaaaaacatatccatatgtttaggttctgatatggcatctatcccttttactgcatccacatattgataggacctgaggtatgaaataatctgtctcaagtctaaatttcaagatatctttacttgttttgctcccatttctagtctgtgcctttacattacttctcttttctaaggaccgctacagaaatactacaagtgcagtcagtcctgttccttttctgttattattagcatggttctacatgcttgaatgtggtaatttactatcctgggttttgatatctacctgttctcattatggttcagttggatacgagaccagcaagtgtctgaaggtgtcactcctggtgaggatgtctacataatccttcgtctcgatggacgtgtcagaagatctggaataggcatgccaaactggaatgacatattacaggaactgccacgacttgaagatctgatgagcaaacttgaacggtgaaaaaggtgtgggagcagctaaagttttaccattactctttttcccccattccattcgccttgcccttatctgctgaaacttgaagctggaccatcgtagttcttgtataatatagtgaaattctgctattttgtttatagcttgccgaagtttttctgtcatttggtaaccgcgatatagagggttgttcttttaaagggctagtttgggaacgccgtttttctaagatattcagattttcccaaagaaaaatgaactaatttttctttgaaaaatgaaaatcctttgaaaaaatggagttcacaaactagccctagccctaaatagattgatgaaataag

SEQ ID NO: 34530 - DNA, 3064 bp, Zea Mays
cttgccacctccttgctcctggcatgccgttgcagagagtaagaagaacttgaacctcagcggtaaagaagaatatggcagacacggtcacgggcagttcaaggaggtcacaagatgacactgcaacattaatcccacacagtggcaatttgggaggatcaagccggaagggcgtgaaggccgccaggttcaaagatgatgatgaggttgtggagatcaccatcgtacagcgcgattccatggcaatcgaagatgtcagggtagtcgatgatggcggctcagggcatggtggtgggtttgacggcctgtcacttgtgtcaccttcctcgtcaaggagcggcaagctagcatcaaagtttaggcaggtgaaaaatgggctaaagatgaataactcaagcaataaggcgccacagacacagttgggaaagaacgtgaggaagagattggacagaagcaagagcggtgctgctgttgcgctcaagggcttgcagtttgtgactgcgaaagttggtcatgatggctgggctgcagtggagaaacggttcaaccagctacaagttgatggcgtgctgctacgttcgagattcgggaaatgcattgggatggatggatctgatgagtttgcaatgcaagtcttcgattcattagcaaggaagagagggataacgaagcaggtgctgactaaggatgagctgaaagatttctgggaccaactaagtgatcagggttttgacaaccgtctgcggacattctttgatatggttgacaagaatgctgatggaaggatcacagcagaggaggttaaggagatcattagcctcagtgcatcagcaaacaagctttccaaactcaaggaacgagctgatgagtacacagcactcattatggaagaacttgaccgtgacaacctgggatacattgagcttgaggatctggaggcacttttgctgcaatcaccatctcaagctgctgcaagatcaacaacacatagttcgaaacttagcaaagctcttagcatgaagcttgcatcaaacaagggcacaggtccattttaccactactggcaagagttcatgtacttccttgaggagaactggaagcgcatttgggttatgactctctggctctcaatctgcatttgcctctttatatggaagttcatccaataccgtaatcgagctgtatttcacatcatgggttattgtgtgaccactgcaaaaggtgctgcagagactctcaaattcaatatggccttggttctatttcctgtttgccgaaatacaatcacttggattcgatcgaagacaaagatcggagctgttgtgcccttcaatgacaacataaacttccataaggtaatagcagcaggtgttgcagttggtgttgctttgcatgcaggtgctcacctgacatgtgattttcctcggctgctccatgcaagtgatgctgcctatgaaccaatgaagcctttctttggagacaaaaggccaccaaattactggtggtttgtaaagggaactgaagggtggacaggtgtggtcatggttgtacttatgactatagccttcgtattggcccagccatggtttcggcgtaataggctcaaggattctaatcccctcaagaaaatgactggcttcaatgccttttggtttacgcaccacttatttgttattgtgtatgcactgctcgttgtccatgggatctgcttatatctaagcaggaaatggtacaagaaaacgacctggatgtaccttgctgtccctgtgctcttgtatgtaagtgagcgcattcttcggctatttaggagccatgacgctgttaggattcagaaggttgcagtgtatccggggaatgttttggctctctatatgtctaagccacctggattcaggtaccggagtgggcagtatatcttcataaactgccgtgctgtctctccatacgaatggcatccattttccattacatcagcaccaggagatgattatcttagtgtccacattcgcacaaggggtgattggacttcacgtcttaggactatcttctctgagccgtgccgccctccaactgatggagaaagtggactcctaagagctgacctttccaaggggatcacagagagcagcgccaggttccctaaactcttgattgatggaccatatggtgctccggcgcaagactatcgggaatacgatgtgctcctgctcattggactgggcattggagccactccattgattagcattgtgaaggatgtgcttaaccacacccagcatggaggatctgtttcaggcacggagcctgagggcagtggcaaggccaagaagaggccattcatgacgaagagggcctacttctactgggtgaccagagaagagggatctttcgaatggttccgaggggtcatgaacgaggtggctgagaaggacaaggatggagtcattgaactccacaaccactgctctagtgtgtacgaggaaggggatgcacgttctgcactcattgtcatgctccaagagctccagcatgcgaagaaaggggtcgacatcttgtctggaactagtgtcaagacgcacttcgcgcgtcccaattggcgaagcgtcttcaaacatgttgcagtgaaccatgagaaccaacgcgttggagttttctactgcggtgagcctgtccttgtgccacagctacggcagtggtcagcagacttcacccacaagacgaacacaaagtttgagttccacaaggagaacttctaatggcataactggagaagctctggacgtggtcctctaatgatttcagaatgtgaattaccagggttgtaatatatatacgagtagaataaaatgatgggagttattttgttatagatgtcaaaagtcaaccatgttctttttgcaatgtgctctgtccatccctgtttactcctctatgccgtctaggcgaagtagataatgtatcttttgcatacaagcaacattagaaggtgtaacacatgattttttttttgataaaggaagattttattaataacttcaagcacattacatcgaggagatacacg

SEQ ID NO: 34531 - DNA, 3065 bp, Zea Mays
ctcggagttgcattcggtggctgaaacttctagaagggtttgagaagaacttgaacctcagcggtaaagaagaatatggcagacacggtcacgggcagttcaaggaggtcacaagatgacactgcaacattaatcccacacagtggcaatttgggaggatcaagccggaagggcgtgaaggccgccaggttcaaagatgatgatgaggttgtggagatcaccatcgtacagcgcgattccatggcaatcgaagatgtcagggtagtcgatgatggcggctcagggcatggtggtgggtttgacggcctgtcacttgtgtcaccttcctcgtcaaggagcggcaagctagcatcaaagtttaggcaggtgaaaaatgggctaaagatgaataactcaagcaataaggcgccacagacacagttgggaaagaacgtgaggaagagattggacagaagcaagagcggtgctgctgttgcgctcaagggcttgcagtttgtgactgcgaaagttggtcatgatggctgggctgcagtggagaaacggttcaaccagctacaagttgatggcgtgctgctacgttcgagattcgggaaatgcattgggatggatggatctgatgagtttgcaatgcaagtcttcgattcattagcaaggaagagagggataacgaagcaggtgctgactaaggatgagctgaaagatttctgggaccaactaagtgatcagggttttgacaaccgtctgcggacattctttgatatggttgacaagaatgctgatggaaggatcacagcagaggaggttaaggagatcattagcctcagtgcatcagcaaacaagctttccaaactcaaggaacgagctgatgagtacacagcactcattatggaagaacttgaccgtgacaacctgggatacattgagcttgaggatctggaggcacttttgctgcaatcaccatctcaagctgctgcaagatcaacaacacatagttcgaaacttagcaaagctcttagcatgaagcttgcatcaaacaagggcacaggtccattttaccactactggcaagagttcatgtacttccttgaggagaactggaagcgcatttgggttatgactctctggctctcaatctgcatttgcctctttatatggaagttcatccaataccgtaatcgagctgtatttcacatcatgggttattgtgtgaccactgcaaaaggtgctgcagagactctcaaattcaatatggccttggttctatttcctgtttgccgaaatacaatcacttggattcgatcgaagacaaagatcggagctgttgtgcccttcaatgacaacataaacttccataaggtaatagcagcaggtgttgcagttggtgttgctttgcatgcaggtgctcacctgacatgtgattttcctcggctgctccatgcaagtgatgctgcctatgaaccaatgaagcctttctttggagacaaaaggccaccaaattactggtggtttgtaaagggaactgaagggtggacaggtgtggtcatggttgtacttatgactatagccttcgtattggcccagccatggtttcggcgtaataggctcaaggattctaatcccctcaagaaaatgactggcttcaatgccttttggtttacgcaccacttatttgttattgtgtatgcactgctcgttgtccatgggatctgcttatatctaagcaggaaatggtacaagaaaacgacctggatgtaccttgctgtccctgtgctcttgtatgtaagtgagcgcattcttcggctatttaggagccatgacgctgttaggattcagaaggttgcagtgtatccggggaatgttttggctctctatatgtctaagccacctggattcaggtaccggagtgggcagtatatcttcataaactgccgtgctgtctctccatacgaatggcatccattttccattacatcagcaccaggagatgattatcttagtgtccacattcgcacaaggggtgattggacttcacgtcttaggactatcttctctgagccgtgccgccctccaactgatggagaaagtggactcctaagagctgacctttccaaggggatcacagagagcagcgccaggttccctaaactcttgattgatggaccatatggtgctccggcgcaagactatcgggaatacgatgtgctcctgctcattggactgggcattggagccactccattgattagcattgtgaaggatgtgcttaaccacacccagcatggaggatctgtttcaggcacggagcctgagggcagtggcaaggccaagaagaggccattcatgacgaagagggcctacttctactgggtgaccagagaagagggatctttcgaatggttccgaggggtcatgaacgaggtggctgagaaggacaaggatggagtcattgaactccacaaccactgctctagtgtgtacgaggaaggggatgcacgttctgcactcattgtcatgctccaagagctccagcatgcgaagaaaggggtcgacatcttgtctggaactagtgtcaagacgcacttcgcgcgtcccaattggcgaagcgtcttcaaacatgttgcagtgaaccatgagaaccaacgcgttggagttttctactgcggtgagcctgtccttgtgccacagctacggcagtggtcagcagacttcacccacaagacgaacacaaagtttgagttccacaaggagaacttctaatggcataactggagaagctctggacgtggtcctctaatgatttcagaatgtgaattaccagggttgtaatatatatacgagtagaataaaatgatgggagttattttgttatagatgtcaaaagtcaaccatgttctttttgcaatgtgctctgtccatccctgtttactcctctatgccgtctaggcgaagtagataatgtatcttttgcatacaagcaacattagaaggtgtaacacatgattttttttttgataaaggaagattttattaataacttcaagcacattacatcgaggagatacacg

SEQ ID NO: 34532 - DNA, 3203 bp, Zea Mays
ctgctttctagtacctgcccacctgcgcttgcatctgttgcttccctgctgctggcctgcgaatccacctgcatttgctgaggctcatcgccgcgtgtactcctgctctgtggggaggattcaggaaatgctcggagttgcattcggtggctgaaacttctagaagggtttgagagagtaagaagaacttgaacctcagcggtaaagaagaatatggcagacacggtcacgggcagttcaaggaggtcacaagatgacactgcaacattaatcccacacagtggcaatttgggaggatcaagccggaagggcgtgaaggccgccaggttcaaagatgatgatgaggttgtggagatcaccatcgtacagcgcgattccatggcaatcgaagatgtcagggtagtcgatgatggcggctcagggcatggtggtgggtttgacggcctgtcacttgtgtcaccttcctcgtcaaggagcggcaagctagcatcaaagtttaggcaggtgaaaaatgggctaaagatgaataactcaagcaataaggcgccacagacacagttgggaaagaacgtgaggaagagattggacagaagcaagagcggtgctgctgttgcgctcaagggcttgcagtttgtgactgcgaaagttggtcatgatggctgggctgcagtggagaaacggttcaaccagctacaagttgatggcgtgctgctacgttcgagattcgggaaatgcattgggatggatggatctgatgagtttgcaatgcaagtcttcgattcattagcaaggaagagagggataacgaagcaggtgctgactaaggatgagctgaaagatttctgggaccaactaagtgatcagggttttgacaaccgtctgcggacattctttgatatggttgacaagaatgctgatggaaggatcacagcagaggaggttaaggagatcattagcctcagtgcatcagcaaacaagctttccaaactcaaggaacgagctgatgagtacacagcactcattatggaagaacttgaccgtgacaacctgggatacattgagcttgaggatctggaggcacttttgctgcaatcaccatctcaagctgctgcaagatcaacaacacatagttcgaaacttagcaaagctcttagcatgaagcttgcatcaaacaagggcacaggtccattttaccactactggcaagagttcatgtacttccttgaggagaactggaagcgcatttgggttatgactctctggctctcaatctgcatttgcctctttatatggaagttcatccaataccgtaatcgagctgtatttcacatcatgggttattgtgtgaccactgcaaaaggtgctgcagagactctcaaattcaatatggccttggttctatttcctgtttgccgaaatacaatcacttggattcgatcgaagacaaagatcggagctgttgtgcccttcaatgacaacataaacttccataaggtaatagcagcaggtgttgcagttggtgttgctttgcatgcaggtgctcacctgacatgtgattttcctcggctgctccatgcaagtgatgctgcctatgaaccaatgaagcctttctttggagacaaaaggccaccaaattactggtggtttgtaaagggaactgaagggtggacaggtgtggtcatggttgtacttatgactatagccttcgtattggcccagccatggtttcggcgtaataggctcaaggattctaatcccctcaagaaaatgactggcttcaatgccttttggtttacgcaccacttatttgttattgtgtatgcactgctcgttgtccatgggatctgcttatatctaagcaggaaatggtacaagaaaacgacctggatgtaccttgctgtccctgtgctcttgtatgtaagtgagcgcattcttcggctatttaggagccatgacgctgttaggattcagaaggttgcagtgtatccggggaatgttttggctctctatatgtctaagccacctggattcaggtaccggagtgggcagtatatcttcataaactgccgtgctgtctctccatacgaatggcatccattttccattacatcagcaccaggagatgattatcttagtgtccacattcgcacaaggggtgattggacttcacgtcttaggactatcttctctgagccgtgccgccctccaactgatggagaaagtggactcctaagagctgacctttccaaggggatcacagagagcagcgccaggttccctaaactcttgattgatggaccatatggtgctccggcgcaagactatcgggaatacgatgtgctcctgctcattggactgggcattggagccactccattgattagcattgtgaaggatgtgcttaaccacacccagcatggaggatctgtttcaggcacggagcctgagggcagtggcaaggccaagaagaggccattcatgacgaagagggcctacttctactgggtgaccagagaagagggatctttcgaatggttccgaggggtcatgaacgaggtggctgagaaggacaaggatggagtcattgaactccacaaccactgctctagtgtgtacgaggaaggggatgcacgttctgcactcattgtcatgctccaagagctccagcatgcgaagaaaggggtcgacatcttgtctggaactagtgtcaagacgcacttcgcgcgtcccaattggcgaagcgtcttcaaacatgttgcagtgaaccatgagaaccaacgcgttggagttttctactgcggtgagcctgtccttgtgccacagctacggcagtggtcagcagacttcacccacaagacgaacacaaagtttgagttccacaaggagaacttctaatggcataactggagaagctctggacgtggtcctctaatgatttcagaatgtgaattaccagggttgtaatatatatacgagtagaataaaatgatgggagttattttgttatagatgtcaaaagtcaaccatgttctttttgcaatgtgctctgtccatccctgtttactcctctatgccgtctaggcgaagtagataatgtatcttttgcatacaagcaacattagaaggtgtaacacatgattttttttttgataaaggaagattttattaataacttcaagcacattacatcgaggagatacacg

SEQ ID NO: 34533 - DNA, 3160 bp, Zea Mays
cggaagtctgctgctgctcctgctttctagtacctgcccacctgcgcttgcatctgttgcttccctgctgctggcctgcgaatccacctgcatttgctgaggctcatcgccgcgtgtactcctgctctgtgagagtaagaagaacttgaacctcagcggtaaagaagaatatggcagacacggtcacgggcagttcaaggaggtcacaagatgacactgcaacattaatcccacacagtggcaatttgggaggatcaagccggaagggcgtgaaggccgccaggttcaaagatgatgatgaggttgtggagatcaccatcgtacagcgcgattccatggcaatcgaagatgtcagggtagtcgatgatggcggctcagggcatggtggtgggtttgacggcctgtcacttgtgtcaccttcctcgtcaaggagcggcaagctagcatcaaagtttaggcaggtgaaaaatgggctaaagatgaataactcaagcaataaggcgccacagacacagttgggaaagaacgtgaggaagagattggacagaagcaagagcggtgctgctgttgcgctcaagggcttgcagtttgtgactgcgaaagttggtcatgatggctgggctgcagtggagaaacggttcaaccagctacaagttgatggcgtgctgctacgttcgagattcgggaaatgcattgggatggatggatctgatgagtttgcaatgcaagtcttcgattcattagcaaggaagagagggataacgaagcaggtgctgactaaggatgagctgaaagatttctgggaccaactaagtgatcagggttttgacaaccgtctgcggacattctttgatatggttgacaagaatgctgatggaaggatcacagcagaggaggttaaggagatcattagcctcagtgcatcagcaaacaagctttccaaactcaaggaacgagctgatgagtacacagcactcattatggaagaacttgaccgtgacaacctgggatacattgagcttgaggatctggaggcacttttgctgcaatcaccatctcaagctgctgcaagatcaacaacacatagttcgaaacttagcaaagctcttagcatgaagcttgcatcaaacaagggcacaggtccattttaccactactggcaagagttcatgtacttccttgaggagaactggaagcgcatttgggttatgactctctggctctcaatctgcatttgcctctttatatggaagttcatccaataccgtaatcgagctgtatttcacatcatgggttattgtgtgaccactgcaaaaggtgctgcagagactctcaaattcaatatggccttggttctatttcctgtttgccgaaatacaatcacttggattcgatcgaagacaaagatcggagctgttgtgcccttcaatgacaacataaacttccataaggtaatagcagcaggtgttgcagttggtgttgctttgcatgcaggtgctcacctgacatgtgattttcctcggctgctccatgcaagtgatgctgcctatgaaccaatgaagcctttctttggagacaaaaggccaccaaattactggtggtttgtaaagggaactgaagggtggacaggtgtggtcatggttgtacttatgactatagccttcgtattggcccagccatggtttcggcgtaataggctcaaggattctaatcccctcaagaaaatgactggcttcaatgccttttggtttacgcaccacttatttgttattgtgtatgcactgctcgttgtccatgggatctgcttatatctaagcaggaaatggtacaagaaaacgacctggatgtaccttgctgtccctgtgctcttgtatgtaagtgagcgcattcttcggctatttaggagccatgacgctgttaggattcagaaggttgcagtgtatccggggaatgttttggctctctatatgtctaagccacctggattcaggtaccggagtgggcagtatatcttcataaactgccgtgctgtctctccatacgaatggcatccattttccattacatcagcaccaggagatgattatcttagtgtccacattcgcacaaggggtgattggacttcacgtcttaggactatcttctctgagccgtgccgccctccaactgatggagaaagtggactcctaagagctgacctttccaaggggatcacagagagcagcgccaggttccctaaactcttgattgatggaccatatggtgctccggcgcaagactatcgggaatacgatgtgctcctgctcattggactgggcattggagccactccattgattagcattgtgaaggatgtgcttaaccacacccagcatggaggatctgtttcaggcacggagcctgagggcagtggcaaggccaagaagaggccattcatgacgaagagggcctacttctactgggtgaccagagaagagggatctttcgaatggttccgaggggtcatgaacgaggtggctgagaaggacaaggatggagtcattgaactccacaaccactgctctagtgtgtacgaggaaggggatgcacgttctgcactcattgtcatgctccaagagctccagcatgcgaagaaaggggtcgacatcttgtctggaactagtgtcaagacgcacttcgcgcgtcccaattggcgaagcgtcttcaaacatgttgcagtgaaccatgagaaccaacgcgttggagttttctactgcggtgagcctgtccttgtgccacagctacggcagtggtcagcagacttcacccacaagacgaacacaaagtttgagttccacaaggagaacttctaatggcataactggagaagctctggacgtggtcctctaatgatttcagaatgtgaattaccagggttgtaatatatatacgagtagaataaaatgatgggagttattttgttatagatgtcaaaagtcaaccatgttctttttgcaatgtgctctgtccatccctgtttactcctctatgccgtctaggcgaagtagataatgtatcttttgcatacaagcaacattagaaggtgtaacacatgattttttttttgataaaggaagattttattaataacttcaagcacattacatcgaggagatacacg

SEQ ID NO: 34534 - DNA, 3479 bp, Zea Mays
caatgccaccaaaagcacatgcgttttgtaggtagtagcagtccgagggagtcaagctgtccatccagcgtttgcgtttgctagggagaaaacgtaaaatacatcaactccccacaaagtgacacgaacactagcggcaccccaccccccagcccccacaccaccactgtacaccactgtagatccttcctcctcgtcgtttcctcagcgactactttaattgctgttatcgcatttgaggaggggaggccgggaccccggaagtctgctgctgctcctgctttctagtacctgcccacctgcgcttgcatctgttgcttccctgctgctggcctgcgaatccacctgcatttgctgaggctcatcgccgcgtgtactcctgctctgtgggaggattcaggaaatgctcggagttgcattcggtggctgaaacttctagaagggtttgagagagtaagaagaacttgaacctcagcggtaaagaagaatatggcagacacggtcacgggcagttcaaggaggtcacaagatgacactgcaacattaatcccacacagtggcaatttgggaggatcaagccggaagggcgtgaaggccgccaggttcaaagatgatgatgaggttgtggagatcaccatcgtacagcgcgattccatggcaatcgaagatgtcagggtagtcgatgatggcggctcagggcatggtggtgggtttgacggcctgtcacttgtgtcaccttcctcgtcaaggagcggcaagctagcatcaaagtttaggcaggtgaaaaatgggctaaagatgaataactcaagcaataaggcgccacagacacagttgggaaagaacgtgaggaagagattggacagaagcaagagcggtgctgctgttgcgctcaagggcttgcagtttgtgactgcgaaagttggtcatgatggctgggctgcagtggagaaacggttcaaccagctacaagttgatggcgtgctgctacgttcgagattcgggaaatgcattgggatggatggatctgatgagtttgcaatgcaagtcttcgattcattagcaaggaagagagggataacgaagcaggtgctgactaaggatgagctgaaagatttctgggaccaactaagtgatcagggttttgacaaccgtctgcggacattctttgatatggttgacaagaatgctgatggaaggatcacagcagaggaggttaaggagatcattagcctcagtgcatcagcaaacaagctttccaaactcaaggaacgagctgatgagtacacagcactcattatggaagaacttgaccgtgacaacctgggatacattgagcttgaggatctggaggcacttttgctgcaatcaccatctcaagctgctgcaagatcaacaacacatagttcgaaacttagcaaagctcttagcatgaagcttgcatcaaacaagggcacaggtccattttaccactactggcaagagttcatgtacttccttgaggagaactggaagcgcatttgggttatgactctctggctctcaatctgcatttgcctctttatatggaagttcatccaataccgtaatcgagctgtatttcacatcatgggttattgtgtgaccactgcaaaaggtgctgcagagactctcaaattcaatatggccttggttctatttcctgtttgccgaaatacaatcacttggattcgatcgaagacaaagatcggagctgttgtgcccttcaatgacaacataaacttccataaggtaatagcagcaggtgttgcagttggtgttgctttgcatgcaggtgctcacctgacatgtgattttcctcggctgctccatgcaagtgatgctgcctatgaaccaatgaagcctttctttggagacaaaaggccaccaaattactggtggtttgtaaagggaactgaagggtggacaggtgtggtcatggttgtacttatgactatagccttcgtattggcccagccatggtttcggcgtaataggctcaaggattctaatcccctcaagaaaatgactggcttcaatgccttttggtttacgcaccacttatttgttattgtgtatgcactgctcgttgtccatgggatctgcttatatctaagcaggaaatggtacaagaaaacgacctggatgtaccttgctgtccctgtgctcttgtatgtaagtgagcgcattcttcggctatttaggagccatgacgctgttaggattcagaaggttgcagtgtatccggggaatgttttggctctctatatgtctaagccacctggattcaggtaccggagtgggcagtatatcttcataaactgccgtgctgtctctccatacgaatggcatccattttccattacatcagcaccaggagatgattatcttagtgtccacattcgcacaaggggtgattggacttcacgtcttaggactatcttctctgagccgtgccgccctccaactgatggagaaagtggactcctaagagctgacctttccaaggggatcacagagagcagcgccaggttccctaaactcttgattgatggaccatatggtgctccggcgcaagactatcgggaatacgatgtgctcctgctcattggactgggcattggagccactccattgattagcattgtgaaggatgtgcttaaccacacccagcatggaggatctgtttcaggcacggagcctgagggcagtggcaaggccaagaagaggccattcatgacgaagagggcctacttctactgggtgaccagagaagagggatctttcgaatggttccgaggggtcatgaacgaggtggctgagaaggacaaggatggagtcattgaactccacaaccactgctctagtgtgtacgaggaaggggatgcacgttctgcactcattgtcatgctccaagagctccagcatgcgaagaaaggggtcgacatcttgtctggaactagtgtcaagacgcacttcgcgcgtcccaattggcgaagcgtcttcaaacatgttgcagtgaaccatgagaaccaacgcgttggagttttctactgcggtgagcctgtccttgtgccacagctacggcagtggtcagcagacttcacccacaagacgaacacaaagtttgagttccacaaggagaacttctaatggcataactggagaagctctggacgtggtcctctaatgatttcagaatgtgaattaccagggttgtaatatatatacgagtagaataaaatgatgggagttattttgttatagatgtcaaaagtcaaccatgttctttttgcaatgtgctctgtccatccctgtttactcctctatgccgtctaggcgaagtagataatgtatcttttgcatacaagcaacattagaaggtgtaacacatgattttttttttgataaaggaagattttattaataacttcaagcacattacatcgaggagatacacg

SEQ ID NO: 34535 - DNA, 3513 bp, Zea Mays
caatgccaccaaaagcacatgcgttttgtaggtagtagcagtccgagggagtcaagctgtccatccagcgtttgcgtttgctagggagaaaacgtaaaatacatcaactccccacaaagtgacacgaacactagcggcaccccaccccccagcccccacaccaccactgtacaccactgtagatccttcctcctcgtcgtttcctcagcgactactttaattgctgttatcgcatttgaggaggggaggccgggaccccggaagtctgctgctgctcctgctttctagtacctgcccacctgcgcttgcatctgttgcttccctgctgctggcctgcgaatccacctgcatttgctgaggctcatcgccgcgtgtactcctgctctgtgaccggggattccttggttttcctttgttcttcagggaggattcaggaaatgctcggagttgcattcggtggctgaaacttctagaagggtttgagagagtaagaagaacttgaacctcagcggtaaagaagaatatggcagacacggtcacgggcagttcaaggaggtcacaagatgacactgcaacattaatcccacacagtggcaatttgggaggatcaagccggaagggcgtgaaggccgccaggttcaaagatgatgatgaggttgtggagatcaccatcgtacagcgcgattccatggcaatcgaagatgtcagggtagtcgatgatggcggctcagggcatggtggtgggtttgacggcctgtcacttgtgtcaccttcctcgtcaaggagcggcaagctagcatcaaagtttaggcaggtgaaaaatgggctaaagatgaataactcaagcaataaggcgccacagacacagttgggaaagaacgtgaggaagagattggacagaagcaagagcggtgctgctgttgcgctcaagggcttgcagtttgtgactgcgaaagttggtcatgatggctgggctgcagtggagaaacggttcaaccagctacaagttgatggcgtgctgctacgttcgagattcgggaaatgcattgggatggatggatctgatgagtttgcaatgcaagtcttcgattcattagcaaggaagagagggataacgaagcaggtgctgactaaggatgagctgaaagatttctgggaccaactaagtgatcagggttttgacaaccgtctgcggacattctttgatatggttgacaagaatgctgatggaaggatcacagcagaggaggttaaggagatcattagcctcagtgcatcagcaaacaagctttccaaactcaaggaacgagctgatgagtacacagcactcattatggaagaacttgaccgtgacaacctgggatacattgagcttgaggatctggaggcacttttgctgcaatcaccatctcaagctgctgcaagatcaacaacacatagttcgaaacttagcaaagctcttagcatgaagcttgcatcaaacaagggcacaggtccattttaccactactggcaagagttcatgtacttccttgaggagaactggaagcgcatttgggttatgactctctggctctcaatctgcatttgcctctttatatggaagttcatccaataccgtaatcgagctgtatttcacatcatgggttattgtgtgaccactgcaaaaggtgctgcagagactctcaaattcaatatggccttggttctatttcctgtttgccgaaatacaatcacttggattcgatcgaagacaaagatcggagctgttgtgcccttcaatgacaacataaacttccataaggtaatagcagcaggtgttgcagttggtgttgctttgcatgcaggtgctcacctgacatgtgattttcctcggctgctccatgcaagtgatgctgcctatgaaccaatgaagcctttctttggagacaaaaggccaccaaattactggtggtttgtaaagggaactgaagggtggacaggtgtggtcatggttgtacttatgactatagccttcgtattggcccagccatggtttcggcgtaataggctcaaggattctaatcccctcaagaaaatgactggcttcaatgccttttggtttacgcaccacttatttgttattgtgtatgcactgctcgttgtccatgggatctgcttatatctaagcaggaaatggtacaagaaaacgacctggatgtaccttgctgtccctgtgctcttgtatgtaagtgagcgcattcttcggctatttaggagccatgacgctgttaggattcagaaggttgcagtgtatccggggaatgttttggctctctatatgtctaagccacctggattcaggtaccggagtgggcagtatatcttcataaactgccgtgctgtctctccatacgaatggcatccattttccattacatcagcaccaggagatgattatcttagtgtccacattcgcacaaggggtgattggacttcacgtcttaggactatcttctctgagccgtgccgccctccaactgatggagaaagtggactcctaagagctgacctttccaaggggatcacagagagcagcgccaggttccctaaactcttgattgatggaccatatggtgctccggcgcaagactatcgggaatacgatgtgctcctgctcattggactgggcattggagccactccattgattagcattgtgaaggatgtgcttaaccacacccagcatggaggatctgtttcaggcacggagcctgagggcagtggcaaggccaagaagaggccattcatgacgaagagggcctacttctactgggtgaccagagaagagggatctttcgaatggttccgaggggtcatgaacgaggtggctgagaaggacaaggatggagtcattgaactccacaaccactgctctagtgtgtacgaggaaggggatgcacgttctgcactcattgtcatgctccaagagctccagcatgcgaagaaaggggtcgacatcttgtctggaactagtgtcaagacgcacttcgcgcgtcccaattggcgaagcgtcttcaaacatgttgcagtgaaccatgagaaccaacgcgttggagttttctactgcggtgagcctgtccttgtgccacagctacggcagtggtcagcagacttcacccacaagacgaacacaaagtttgagttccacaaggagaacttctaatggcataactggagaagctctggacgtggtcctctaatgatttcagaatgtgaattaccagggttgtaatatatatacgagtagaataaaatgatgggagttattttgttatagatgtcaaaagtcaaccatgttctttttgcaatgtgctctgtccatccctgtttactcctctatgccgtctaggcgaagtagataatgtatcttttgcatacaagcaacattagaaggtgtaacacatgattttttttttgataaaggaagattttattaataacttcaagcacattacatcgaggagatacacg

SEQ ID NO: 34536 - DNA, 767 bp, Zea Mays
gtgcgcacaggaacaaggtgaaggaggccatggcgatgctcaggtcagtggtgttgtggtgcaagcgctttggcaaccatgagctctaggatgtcgacatcggcctaccggagctggagaacgtgatgttcctccacgtggttggctgacgctcgctgctcctcttccttcctcttccccatgaccgaccggtgcccacgacaaccttcctccgcacgttgtcgctccgtgtgacgcccacgttctcttgcgtcacgtccactccctgattatgataacataatttctcctgcttgtgttcttgcttaccgacacgcttggcatgggcaactgggtcagaatggagactgcgacgtgaacgaaggccttgttgggggtatgcttcgtagccgaagatcctaaaggaagaaaacaccttcggcagattctatcagaagcagcgccgaagctatcacctataaagcttcgtcacaatgacagatctcaagacgaaggggtgaaccgacttaaagatgaaatgacttaaagacccatgatgttttgtgtcattattgtagtcgattgtaaagggcataaatgtaattttacataggctgtgtcctgtgcttataaatagatgaacagtacccttgtactattcacgcaatcttgtaacaactggcacattacgctggaattattgctttctgccaagacaaaggtatacatgtacctaaatattatgttttaatatttgggttcatataataaaatatgtgaataatgtt

SEQ ID NO: 34537 - DNA, 466 bp, Zea Mays
ccgtgcgcacaggaacaaggtgaaggaggccatggcgatgctcagactgcgacgtgaacgaaggccttgttgggggtatgcttcgtagccgaagatcctaaaggaagaaaacaccttcggcagattctatcagaagcagcgccgaagctatcacctataaagcttcgtcacaatgacagatctcaagacgaaggggtgaaccgacttaaagatgaaatgacttaaagacccatgatgttttgtgtcattattgtagtcgattgtaaagggcataaatgtaattttacataggctgtgtcctgtgcttataaatagatgaacagtacccttgtactattcacgcaatcttgtaacaactggcacattacgctggaattattgctttctgccaagacaaaggtatacatgtacctaaatattatgttttaatatttgggttcatataataaaatatgtgaataatgtt

SEQ ID NO: 34538 - DNA, 1763 bp, Zea Mays
gtgatgttcctccacgtggttggctgacgctcgctgctcctcttccttcctcttccccatgaccgaccggtgcccacgacaaccttcctccgcacgttgtcgctccgtgtgacgcccacgttctcttgcgtcacgtccactccctgattatgataacataatttctcctgcttgtgttcttgcttaccgacacgcttggcatgggcaactgggtcagaatggaggttctgcaaaatcatatattttcatttttaatcatttgtgttggttggtgtagatgtacttcctgaggcataggatggtagaatttattttttcatctgggaatttgagtattccaaaggagaagatgcttttcaaaacctgaagttagttgctagcttttgattacatatatttccacaactttttacattgtgattagcaactctttttacctaaatattcactgcacctttttatccactcttgagtgtttcccctcttaattaattgctacatgctaggtgtatagtgtatacacagccacacaggtttaattgagtatactcaggcctcttaaggctagctttgttcatttacaccaatccagctctggattagcattgattggaattaaatccatgtcacaatctgttggggacttgttctcaaatactatgagttaagaacaaggcaacacaaaatgttaaaggttaatacccttcgtcattcgaagcattatctcccttaggacataatgatcttcagacgaaggccatgaagaaagtacctccttcatcttcatagtatatgttaatgaaagaagaagcatatgaaatatgaaagataatatgaataatcatataacatcatcaatgtaactttattgtatcatcatggataaacaagaacaatattgaattacatgagtaccttcggcttgacagaaggttaaagtccaagcgtgacgcacgaacgaatataagtcagcgtgaacagtatggaggtactgttcatctatttataggcacagggcgcagcctgtgtaaaattacaatcatgccctttatgtttactattgacttaatgacaatccaacgaggactagatagccttttcccctttaagtcggttcctttctctgccgttgaaccgaagcttccttgcgcgtagcttcgggacttgttcaaccttcgtcccgaccatgctttacatattgtatacagctttattccgagtccgaaggtttctgttcatatattacacttgggaaacattgttagtcatgtttttgaggaccttcataagacgaaggcccccaacagtagcccctcgcagtattaatttgttataacaacgaattcagactgcgacgtgaacgaaggccttgttgggggtatgcttcgtagccgaagatcctaaaggaagaaaacaccttcggcagattctatcagaagcagcgccgaagctatcacctataaagcttcgtcacaatgacagatctcaagacgaaggggtgaaccgacttaaagatgaaatgacttaaagacccatgatgttttgtgtcattattgtagtcgattgtaaagggcataaatgtaattttacataggctgtgtcctgtgcttataaatagatgaacagtacccttgtactattcacgcaatcttgtaacaactggcacattacgctggaattattgctttctgccaagacaaaggtatacatgtacctaaatattatgttttaatatttgggttcatataataaaatatgtgaat

SEQ ID NO: 34539 - DNA, 4229 bp, Zea Mays
ccctcatcgatttcacaccaccgagaacatcgcgccgtggggagagagatcagggggagggagttttgccgccgccgcgggctcaatcacccgccgccgatgaagccttcgtgaccatctagagtgcactacaagaagtctgggagggtcgacgttagcgtgctgtgagtgattatcggctggagtgcgcggaattcgtcgccaggattatcacctccgtcgcagatccaccgtccgtcgtggagcaacctctggctgcctgaatcatcggtacgttaccccctgcatactcgcagcgtgtgccctacgtcgtgtagaagtgtttcaatcgatatttagggcattgggggttggaaaccgggtgcctccggcgagatccgtcgtgaaggggagtggcgtcgccgtcacggtcgtcgctgagaagcgagaggagctgcggcgctcgctgcccgttggatcgtgtaatcaatagcacatattagatcatgggttcataaaatctggaccgtgggtcgcggatccatcgaccctggttggtgcctgggcataccgtttcgttgagacgatcgcgaccatcgcctgtcgataagccggactacctgaaaccctagcctccaccgtcgatctggggatcgatggccctcgatgtaagcttcataagggttaggccgatctaatctggatcccagaattcagatcgggcggcctagatctcgtgataccctttcgccatttgacttttacaaataaacccccgaacttaacagaaatgaacccacagtgcaaagtaattccatttgtgccctaggaatttatgaattaacccctatactatctagtaattgtgtacacagtccagagtcagtagagatattcaaaaataaaccaaaaaatgatttttagtatagaaataattccaggagcttgtttaattcatatttaattcattctaacacatttttgatccattccagttgcattaaatttatattaatattgtttatcatctaataactttattttgttgggaaacaaaggttaaaactattgtcacacccagatttaagggataaagtcgggtgcatctcatatgtgcgtcaaagaacaacaacacatctaatgaccaagtgtatggagataaatgtcataaacattattacatagcggaagtgtcttacaaaaataaatgataacaataaagcaaactaataattattcattggcgccatcaagttgactgggagacgccacctagacttcctcgtactccacgtagtagtcctcctcctggctacttgctcttcacctgtggagcggtttataatcgcaagagtgagctcacaaaagatcatagctcaacaagttatggggaataatgtgcatgaactcaccaaaggtgggagttcatgtgcagtgtaaggctgatcaataaataatggttaaagctgagcattgcttttaataagttggtcaaattttattagcaattactaagtataagtaaataccaacccaaataatgagatatcataattaataaataaaccacaatgtgatgcaaataactaattaaatttaattccataagttactcatgtgagggttcgagccgctcatgaccgtgagcaaggctgatcaagaggttttgataagcttgttttttcataattgtgaacttgactattacttgctgaatccaaaacatgttcaccatttgagaatggcacctagagtatataggatgtgtctgaaatcctttgtgctcccactagtatgctagatggctatgtctcatgctctgagtcattcattgtcttgaatcataagttatgttcttaaaatcaaaatcaaaataagtgaaaaattcagaaagattgagataggtttgcatttgtctccacctctctttatagaaactgcttccatttgcacctttagatgaacttgagcacggtagtggatgatcaaaccggtgtctttagcttctgatttcttttctgcatacgctacacccgattgaaaagttagacaatgacaatgcttataacctctcgtactcacattctttccttaaaacttgtaatccactgcaaaatccgataaatattgagattatcatctagtatcattttcaggtatgtttctaacatgatgagtggccactgtttgggggtacttcacctggtttaccttgactggcaattagttgatttccttcttactatatgcctagtgctgtctttagtagtgaacttctcttttgaactgtttaaaactaaatcaaattgcttacacttaatatatcttgtgcatatagtcagtttgaacatttgatggcatgtgaatttattgctgcacacatagcacaacaccacttagagcatttttacactgattggtatacttttgaagctcgtgcatattctcctttcttttgcatttctgcattttctcacggggagtttctgttttacccttgtttgtgcttgatgagttcacttgtcaatatgggggagagactttgagattttttgcctcctaacaaaggggagagatttttgctttgggagactactttcgcaaggggagagattctcagggggagagacattggattttggagcttttgctagatgtgttgagccacttgcctctttctggaggaactagctttgatttcagcttttgtgctgattttgttttgttggctggctagtggtgttgagccctactttttcctctttgtgaggacaaaccgttttatacttggtcgtgttgagtcgttgcccatttctttggagaccaagttttgcttactttggatgacttgtttggccattttctggcttttggtcatttgagtgagtttctcttcttcttcttcttcctctttctgcttatatatgttcatgtggtggtgttgacattgcactcatcaaatgggagattgcgaacacaagattgagttgtcccttgtggtttgggttgataatgagtgattgtcttaacgggtagcactcttgggtactcagtggactgacccgagtgtgagattatgtatgtgcaaccatgtcggtcggcttgtgctgtctaggtgtggagaacagggacagtaatcgacggctgaggtgaaggtcatgcggtctcgtgctgatggaccgggagcgatgaaggacgagtgttggatcttggctgacgaattggagtagatgggtgaccatccatggtggttgacacctgggacatgcactcgcgtaaggatatggtggagtggaccatcctgttggcgcgatcgaggactggcaggacacatgtctggtcatggaggacgcacatgtggtgctgtgatactcatgacggtttggtggttgagcctcaacaccatcctgcgttacggatgttgggttttgctaagtttgggcctcaaaactcgatggcggcggttctggagggatccggtggcggcacgtggcatcacagctaagggtttgtcaaggcgaagcaagttcgtgtggagcatgtggccatcaaatcgaaaacctatgagttggtctatttctcccctagcggagtcaatagactccatataaataggggtagtttacaaaatacaaataaccctctataaatagagggacaggcttgttagtcaagcatcttatggctgccatttctttaggcttcttattttagtactcctagttttctgtctcggtagtcaccagtttaaccaagggatccgcgtcaattttgtaaccgtcgacttggtttttgttcttcatgtataattcgaggaagggtcgccggtacgacccacatgttttgttcacttctcaatctcaatttttgataattgctaaattctgaagttttgttttatcctttcctcttctcttgtggatttgtggagaaccttcgagtttttgcgacatgagtattgttggggattgatttgggtggatatagactctttggattactgcgtacaccctcacagtgcagttcttggtcatgacccgagttgattctcatttaggctcgttttgagaaaaccccatctctctcggattttctgatctaagctttgatttttggtttgttcactagtaaccgtcttctaccccgcgcaaactatatgtgaagtttgagatcattctgggcatttttcggtgcccggcactgccgcccgtgtgctcggcacttctggacccagcactaccgaacttgag

SEQ ID NO: 34540 - DNA, 876 bp, Zea Mays
tggtcgaggtcaaagtcatccatatcccattttatttacacccgaagtggaattccaaaaaacccttgaaaacgacattacaccaataaataaatcaaagttaagatgttagaacagtgaagttcaacttcaacactttcgaaagacgagaagtcgaaacgggtttctctattgttctcctcactgacatgtgggtgctcaagtgctatagtccctgctttgccaagcttctcggactgctcccatggatgtctctccatagaagaggcgtgtcaggtttcgcccaccgcgccatgggatcgggatcgtgctgctgcatagggtgcaacggcggcggcggcgacgagggcggagttgacgccggcggcggcctcgaccccaaggggttcctgctggcgatgatgattgccctggtgcttctaatgctctgccacgtacgcccgcctcgccggaactcgtacgtcgtgtaccgcagctactgatcgccgacgggtgccaagctgaaaggtctctccatccggccccttcgtcgttccgattcctctttggccgacatgctttggtccaccgtccacgtcaacagatggtgtctcacaagatgaaaatgtcagctgttccatcgaaacctgaatattcgatgcttgctaggtttcacatcgcggtaggtaggtacagacaggaagccaatgagaaaaccggtctaccgaggacaaaattgagggaggatgttaaattaaatgagtatcacaaatcatggaagatcagcgacacaccagtatttgcctcatgcataccttttcgttatatttgacataataatatatttttatttaattaaatcaagttaattctaggtatatatcaaatatgttcaag

SEQ ID NO: 34541 - DNA, 934 bp, Zea Mays
tggtcgaggtcaaagtcatccatatcccattttatttacacccgaagtggaattccaaaaaacccttgaaaacgacattacaccaataaataaatcaaagttaagatgttagaacagtgaagttcaacttcaacactttcgaaagacgagaagtcgaaacgggtttctctattgttctcctcactgacatgtgggtgctcaagtgctatagtccctgctttgccaagcttctcggactgctcccatggatgtctctccatagaagaggcgtgtcaggtttcgcccaccgcgccatgggatcgggatcgtgctgctgcatagggtgcaacggcggcggcggcgacgagggcggagttgacgccggcggcggcctcgaccccaaggggttcctgctggcgatgatgattgccctggtgcttctaatgctctgccacgtacgcccgcctcgccggaactcgtacgtcgtgtaccgcagctactgatcgccgacgggtgccaagctgaaagtggcgcgcgcgcaattggctgggtttttaatattatatagcagtagtataacatagcgtatgtttttagaggggggggggggggggggggggatcagtagtacacgtttgatgtgaatgatgtacccaactgaaagagagattgcacagcgaacctttgcgtctgttcttggccggacaggataattttcaatttcctcgacccatcacttgttctgtcttctcttcatgtaaatattgtcgatatcagcagcaagataagaagatggagatcgtatttgttctctccatctctgtaggcaccgcacctggaaccaaggtctagcttaaactttgattaaggattcatctggtatgctttgttgttgtgatctagggacatcgcacacacagtcagctcactggcataacagagaaatgagttattt

SEQ ID NO: 34542 - DNA, 918 bp, Zea Mays
caacttcccaattggtgataagtgttttggatttcttgaccaaagaagattggcagcatcaaattggactggtgaaggatctttcctgtttacatcaagtacagctctgtatgattgcagtgacaacagcatgtgcaacgaggattgtctgtcagtgccaattggcaggagccctcgtactgatattcttctaaaagtggaaaatgttgttcttgaggcaggaggctgtgttctcaggctggctggactttataagatagacagaggtgcacatgttttctggttgaggaaaggaactttagacacacgaccagatcatatcatcaaccagattcattatgaggatgctgcctcccttgctgtagcaatcatgaaaaagggactgcggagtcgaatatttctgggttgtgacaacaagcccctttccaggcaagaaataatggatgctgttaacaatagtggaaaatttgacacgaagtttggaggctttactggtactgacggtccattggggaagagaatggagaattcaaaaactcgggctgagatcggttgggaaccaaagtatccaagcttcaccgaattccttggtatcagcagttaacatccttgcatactgttcagttagtctgactcagctgagtagcaaccgtgattagattgtaccatcgtttgaatttttatggcctgaaccggtgatggtgtacatctcagcctactttgggcctgtccccagtatttttgattttcacactatttgagctatgaaccagacagatgccaccccatcccatcggataatatatattgtcacgtgagtggatttgtcgatcatgaacctacgtggctacatatggtatactctaccgactatcgcgctgcaaattgatttcaacaaactgaaattgttgcagagaa

SEQ ID NO: 34543 - DNA, 1293 bp, Zea Mays
tgtacttctatatattcactccagaggctcaatgcaatacatcccacacattatacacaatctgtccatctataatcaatttttattgattgcgacgtgctcaaagttgtaacttgcaaagggatatctcatgataaagggttcgacatttctgaccccaatgttgttggacagaatgatttactgattgtgggccctggtgttcttgggcgaatcatagctgagaagtggaaaaaggagcatccaagttgcaaagtttatggccagaccgcaagcaaaaatcatcacaacgagttaacagatcttggcatcatcccctcattgaaaggcaccactattcatcagaaggttccacatgttattttctgcgctcccccgtctggttcagatgattaccctagggatgtcagaaaatgcgtgcagattggcagcatcaaattggactggtgaaggatctttcctgtttacatcaagtacagctctgtatgattgcagtgacaacagcatgtgcaacgaggattgtctgtcagtgccaattggcaggagccctcgtactgatattcttctaaaagtggaaaatgttgttcttgaggcaggaggctgtgttctcaggctggctggactttataagatagacagaggtgcacatgttttctggttgaggaaaggaactttagacacacgaccagatcatatcatcaaccagattcattatgaggatgctgcctcccttgctgtagcaatcatgaaaaagggactgcggagtcgaatatttctgggttgtgacaacaagcccctttccaggcaagaaataatggatgctgttaacaatagtggaaaatttgacacgaagtttggaggctttactggtactgacggtccattggggaagagaatggagaattcaaaaactcgggctgagatcggttgggaaccaaagtatccaagcttcaccgaattccttggtatcagcagttaacatccttgcatactgttcagttagtctgactcagctgagtagcaaccgtgattagattgtaccatcgtttgaatttttatggcctgaaccggtgatggtgtacatctcagcctactttgggcctgtccccagtatttttgattttcacactatttgagctatgaaccagacagatgccaccccatcccatcggataatatatattgtcacgtgagtggatttgtcgatcatgaacctacgtggctacatatggtatactctaccgactatcgcgctgcaaattgatttcaacaaactgaaattgttgcagagaa

SEQ ID NO: 34544 - DNA, 1426 bp, Zea Mays
caggctacagcgtacagggtatccgtcctctccgtttactctttcctcaccatcacatcgccgctgccgcgacccgcgggccgacgagatgagagccgccgctgcggcctccttccatctggcacccgccacgaaaccggcccatcgccgcggctgcaccacagagtcctgttccctgaagcctgcgccgactgctcggccacctcgcctccgctcgctcgccggccgggcgcctcttgtctgcgcctctctcgggatatctcatgataaagggttcgacatttctgaccccaatgttgttggacagaatgatttactgattgtgggccctggtgttcttgggcgaatcatagctgagaagtggaaaaaggagcatccaagttgcaaagtttatggccagaccgcaagcaaaaatcatcacaacgagttaacagatcttggcatcatcccctcattgaaaggcaccactattcatcagaaggttccacatgttattttctgcgctcccccgtctggttcagatgattaccctagggatgtcagaaaatgcgtgcagattggcagcatcaaattggactggtgaaggatctttcctgtttacatcaagtacagctctgtatgattgcagtgacaacagcatgtgcaacgaggattgtctgtcagtgccaattggcaggagccctcgtactgatattcttctaaaagtggaaaatgttgttcttgaggcaggaggctgtgttctcaggctggctggactttataagatagacagaggtgcacatgttttctggttgaggaaaggaactttagacacacgaccagatcatatcatcaaccagattcattatgaggatgctgcctcccttgctgtagcaatcatgaaaaagggactgcggagtcgaatatttctgggttgtgacaacaagcccctttccaggcaagaaataatggatgctgttaacaatagtggaaaatttgacacgaagtttggaggctttactggtactgacggtccattggggaagagaatggagaattcaaaaactcgggctgagatcggttgggaaccaaagtatccaagcttcaccgaattccttggtatcagcagttaacatccttgcatactgttcagttagtctgactcagctgagtagcaaccgtgattagattgtaccatcgtttgaatttttatggcctgaaccggtgatggtgtacatctcagcctactttgggcctgtccccagtatttttgattttcacactatttgagctatgaaccagacagatgccaccccatcccatcggataatatatattgtcacgtgagtggatttgtcgatcatgaacctacgtggctacatatggtatactctaccgactatcgcgctgcaaattgatttcaacaaactgaaattgttgcagagaa

SEQ ID NO: 34545 - DNA, 3334 bp, Zea Mays
ctcttctctcgcatgcgcgcccggcccatcctagcgtaccacacgcatcattggacgtgacactagcaagccaggcccacttgtcggccactcagcgtgcaccagtcattcttctagctgacgtgtggggcactctccccagccttgtttgtcttccacgtcgcggagctttcggcgaggaacattacaacaaccgccccgatggggtgagccaactggggggggatcctctctgctataaaccaatgcggtagggtcgcctaggccatatcgacccaccccaatcgcaccaggagcaatagccgagagccacttcgacgcagagtgtgaaacgagagtgagagcaggccgccggcatgggaaatcggaaccgcgacaagtctgggcttgggactcggctttgggggatcatcgcacctcgtagaaggcgtgctcctcattgattcgggcgaagttcactggagccctgtgtaatttctcgtcgtcgagcctaatccaccacagatccgctcttccaagtggattgcccgcctgcgcgcatcatcctcggtaaggtttcctcacccgcattcgcttttatttccgcatcgtgtagagctgtttgggttagaggttggggcgctaggaccgtagactcgcctcatcggtgaagtcctccgccgtggtagtcttacgattcgacccttggttcctgggccatagatttcgtgtgtaacgaccacgattaggtggggataccccttcggttgtattgcactcggaccattgagatcgaatccaagggtcagatttgggtcacgtttcataaaaccctagccatcgatctcacgttgggcgtttcagattagcgcatgaacataccccattgcgacaataagatttggccgtcgatcggttagctagtggttatgttgtcacgtgggcctcggaccgtagatccccgatctgaggactcgtatagcatactgatcttctcaccgctccaatctaacctgaatcgtctgtgttcgttctggtggcccatatgcgatggtaccccttcagccatccagctatacaaaatagcccctagtgcttttacttatcaacccacactccaggttattgataaaaccattacacatgagtcctggatattgtaggatagaccttggagaactccagaatagtggcgtagcccaattagaaacttgtttaattaataagtgattcatttaaactcctttttgatccattttgttatgaagcataggttaaaattatgcacttaattcattctatatctaacacttaaaacttcagaaaatcataactcttcaaccgtaactccgaatttagtgattctcgaacctacgatctcgttacgatgtgtagaacattattatgcagtatgatcttatgtttggtgtgatgttaatttctcctataccatgtttgtttgtattgttgcgagtacgaggaagcatccgaggatcccggtacccaataggtggaaaatactgagcaggagctcattgaaggcaacttgtgcccttgatcacttctctttacccaataatgttcatgttaatcgttatgatctgcataggctaattttgctgggacccaataggtcaccctagtttggtcatctttataccttgtttaccactcaacttttgagtagtacctgttattgctttatgtggttttaggtgttaagatacacattattcatgatcatgcttttattacaaatgagttatttactgttcatgacaagatcattatgttaattagaacatggagcgaccacccgggaaaatagtgctaccacaagggtggtatcggatgcccttggctaactaattaggaaatctagtggaggactaccttactcgaaaggggcaagggcggggagttgtcgttatagggaggttctcaggttgatcttgctgagatggcttttcagacggaggattcctatattgcgctccttagaaatcgtagagggttttctgaagctaatggaactttgtaaatgcttcatagtgttaccgtgcctcgcttccttggtagaggtgtgtggggcctatacaaccccatggcagatggataacatgacttgtgggtaaagatgtgcaacctctgcagagtgtaaaactggtatatcagccgtgctcacggtcatgagcggctcggaccctcacatgagtaacttatggaattaaatttaataggtcatttgcatcgcattgtggtttatttattaattgcgatctctcaatatttggactggtacttacttatacttagtaagtgctaataatacttgaccaacttattaaaagcaatgatttacctttacccattatttgttgatcaactttacacttcacatgagctcccacctttggtgagttcatgcacattatttcccacaacttgttgagctatgatcttttgtgatctcgcccttgagatatataacccccacatgtgaagagcaggtagcctaggaggaggactactacgaggagtacgaggaagtctaggtggtgtctcccagtcttaatggcgccaaggaataatattagttcgtttatttgttatcatttatttttgtaagacacttccacaatgtaataatatttgtgacatttatctctatacacttggtcattatatgtgttgttcttttttggcgcacatatgagacgcacataggtttaccccttaaatccgggtgtgacagcaacccttgaccgaagaaggtcactacaatgttgactaggcattggccaaaccaagggataaaatcaccgtgtcttttgtctatttactttattgcgattagtgtcttctagagttatcatatttcacttgtattattgctcctaagtatgatacacatctcaaaggagcaatcaagtgaagaattctcctctcctccatatctgctcgtatcaacttggttttagctttcaataacactcattagaaaccaagtttgtgttgtttagaattgatttttgcaggatcacctattgaccccctctaggcaagtgtcttcatcaagggactaaccgcccgaagagatggatcctaagggcaagggaattgtgataacgacaaggagaatgagatcctcaacaataacgaccaaaaggagataaacccaaaaacttaggatcaaacaacaagaggaaggacaagaagaagaggcgcaccaagaagatcatctactatgaaaaaggcagttaatcaaaagaattcttttaattattttcgaattccatacaactccaatgctcatttattatctatatctcttggcaagccccctcactttgat

SEQ ID NO: 34546 - DNA, 1385 bp, Zea Mays
ctcttctctcgcatgcgcgcccggcccatcctagcgtaccacacgcatcattggacgtgacactagcaagccaggcccacttgtcggccactcagcgtgcaccagtcattcttctagctgacgtgtggggcactctccccagccttgtttgtcttccacgtcgcggagctttcggcgaggaacattacaacaaccgccccgatggggtgagccaactggggggggatcctctctgctataaaccaatgcggtagggtcgcctaggccatatcgacccaccccaatcgcaccaggagcaatagccgagagccacttcgacgcagagtgtgaaacgagagtgagagcaggccgccggcatgggaaatcggaaccgcgacaagtctgggcttgggactcggctttgggggatcatcgcacctcgtagaaggcgtgctcctcattgattcgggcgaagttcactggagccctgtgtaatttctcgtcgtcgagcctaatccaccacagatccgctcttccaagtggattgcccgcctgcgcgcatcatcctcggtagcctaggaggaggactactacgaggagtacgaggaagtctaggtggtgtctcccagtcttaatggcgccaaggaataatattagttcgtttatttgttatcatttatttttgtaagacacttccacaatgtaataatatttgtgacatttatctctatacacttggtcattatatgtgttgttcttttttggcgcacatatgagacgcacataggtttaccccttaaatccgggtgtgacagcaacccttgaccgaagaaggtcactacaatgttgactaggcattggccaaaccaagggataaaatcaccgtgtcttttgtctatttactttattgcgattagtgtcttctagagttatcatatttcacttgtattattgctcctaagtatgatacacatctcaaaggagcaatcaagtgaagaattctcctctcctccatatctgctcgtatcaacttggttttagctttcaataacactcattagaaaccaagtttgtgttgtttagaattgatttttgcaggatcacctattgaccccctctaggcaagtgtcttcatcaagggactaaccgcccgaagagatggatcctaagggcaagggaattgtgataacgacaaggagaatgagatcctcaacaataacgaccaaaaggagataaacccaaaaacttaggatcaaacaacaagaggaaggacaagaagaagaggcgcaccaagaagatcatctactatgaaaaaggcagttaatcaaaagaattcttttaattattttcgaattccatacaactccaatgctcatttattatctatatctcttggcaagccccct

SEQ ID NO: 34547 - DNA, 857 bp, Zea Mays
ctcttctctcgcatgcgcgcccggcccatcctagcgtaccacacgcatcattggacgtgacactagcaagccaggcccacttgtcggccactcagcgtgcaccagtcattcttctagctgacgtgtggggcactctccccagccttgtttgtcttccacgtcgcggagctttcggcgaggaacattacaacaaccgccccgatggggtgagccaactggggggggatcctctctgctataaaccaatgcggtagggtcgcctaggccatatcgacccaccccaatcgcaccaggagcaatagccgagagccacttcgacgcagagtgtgaaacgagagtgagagcaggccgccggcatgggaaatcggaaccgcgacaagtctgggcttgggactcggctttgggggatcatcgcacctcgtagaaggcgtgctcctcattgattcgggcgaagttcactggagccctgtgtaatttctcgtcgtcgagcctaatccaccacagatccgctcttccaagtggattgcccgcctgcgcgcatcatcctcggatcacctattgaccccctctaggcaagtgtcttcatcaagggactaaccgcccgaagagatggatcctaagggcaagggaattgtgataacgacaaggagaatgagatcctcaacaataacgaccaaaaggagataaacccaaaaacttaggatcaaacaacaagaggaaggacaagaagaagaggcgcaccaagaagatcatctactatgaaaaaggcagttaatcaaaagaattcttttaattattttcgaattccatacaactccaatgctcatttattatctatatctcttggcaagccccct

SEQ ID NO: 34548 - DNA, 1123 bp, Zea Mays
gtaacatttttctggtgccttacactgtggctgcgcgaatgactcgctctgagccttcagcggcctcctcgctcggcaaattctccgccgacgacagggagaaggtgctcactgccgttggagtacacacggcgatatctattgcacaacctacttcctagatacaggaagatggtgataaccacactgggaatcatgaaatcataccaaggtcaaatagaatgggcaggcaacttgaatcgttaagcagaggactgggaatcaagattccaacccaaatcactgaagggaacaaaagccagagccacctattcaagctactaagtttgcattagagctagagggatggtcgccaaggccagggatttactgtcgaggtgtacaagtccatggcagtggctgtttgtggagattagaagctgatgagggagtctcgtagcagaacttcaatgttgagatatggaaaagctacatatgtatcaagatatgtgaagactgtccgcctcaaacaagaggagtattttggtggagcgaagtttatgaagacttttgtgtgtgtgttttgaactgcagggcatggaggtactgctggtaacaagttctggatgtcattaggtctaccattgatagctactgtgaactgtgctggtaacactggagccaagaacctctacatcatttctgtgaagggaatcaagggcgccttaacaggcgtccttctgcctgtgttggtgaccatggagaatggaaagcctaaccttaggaagaagaagcaagacaaatataaggatgctgaacctagtgcaatagatctttttaaggagatgcattgcagcaaaaagaaaggttttagcaaaaatgttcagaaagctattgttgatatggaagaaatggtggcaacatcagttcaagatggacaacaaccgaaatatcctacagaagttgtttatagtgtgcaactgggctccagtgtgttcttatgcaatcttggtctttagtccgtctccaagaaaagctcaacatcaatagtttttataaaggttcaacaacttcaggatcgactggaggccaagaagcaagaaaaagatggactttgggaagaagtgtaaaccttaaatgctca

SEQ ID NO: 34549 - DNA, 1127 bp, Zea Mays
gtaacatttttctggtgccttacactgtggctgcgcgaatgactcgctctgagccttcagcggcctcctcgctcggcaaattctccgccgacgacagggagaaggtgctcactgccgttggagtacacacggcgatatctattgcacaacctacttcctagatacaggaagatggtgataaccacactgggaatcatggcaaaaatcataccaaggtcaaatagaatgggcaggcaacttgaatcgttaagcagaggactgggaatcaagattccaacccaaatcactgaagggaacaaaagccagagccacctattcaagctactaagtttgcattagagctagagggatggtcgccaaggccagggatttactgtcgaggtgtacaagtccatggcagtggctgtttgtggagattagaagctgatgagggagtctcgtagcagaacttcaatgttgagatatggaaaagctacatatgtatcaagatatgtgaagactgtccgcctcaaacaagaggagtattttggtggagcgaagtttatgaagacttttgtgtgtgtgttttgaactgcagggcatggaggtactgctggtaacaagttctggatgtcattaggtctaccattgatagctactgtgaactgtgctggtaacactggagccaagaacctctacatcatttctgtgaagggaatcaagggcgccttaacaggcgtccttctgcctgtgttggtgaccatggagaatggaaagcctaaccttaggaagaagaagcaagacaaatataaggatgctgaacctagtgcaatagatctttttaaggagatgcattgcagcaaaaagaaaggttttagcaaaaatgttcagaaagctattgttgatatggaagaaatggtggcaacatcagttcaagatggacaacaaccgaaatatcctacagaagttgtttatagtgtgcaactgggctccagtgtgttcttatgcaatcttggtctttagtccgtctccaagaaaagctcaacatcaatagtttttataaaggttcaacaacttcaggatcgactggaggccaagaagcaagaaaaagatggactttgggaagaagtgtaaaccttaaatgctca

SEQ ID NO: 34550 - DNA, 1162 bp, Zea Mays
gctagcctgctaccatggtatgatcagtaacatttttctggtgccttacactgtggctgcgcgaatgactcgctctgagccttcagcggcctcctcgctcggcaaattctccgccgacgacagggagaaggtgctcactgccgttggagtacacacggcgatatctattgcacaacctacttcctagatacaggaagatggtgataaccacactgggaatcatggcaaaaatcataccaaggtcaaatagaatgggcaggcaacttgaatcgttaagcagaggactgggaatcaagattccaacccaaatcactgaagggaacaaaagccagagccacctattcaagctactaagtttgcattagagctagagggatggtcgccaaggccagggatttactgtcgaggtgtacaagtccatggcagtggctgtttgtggagattagaagctgatgagggagtctcgtagcagaacttcaatgttgagatatggaaaagctacatatgtatcaagatatgtgaagactgtccgcctcaaacaagaggagtattttggtggagcgaagtttatgaagactctattcctgcttgtacacttcaatgctttgcttgggcatggaggtactgctggtaacaagttctggatgtcattaggtctaccattgatagctactgtgaactgtgctggtaacactggagccaagaacctctacatcatttctgtgaagggaatcaagggcgccttaacaggcgtccttctgcctgtgttggtgaccatggagaatggaaagcctaaccttaggaagaagaagcaagacaaatataaggatgctgaacctagtgcaatagatctttttaaggagatgcattgcagcaaaaagaaaggttttagcaaaaatgttcagaaagctattgttgatatggaagaaatggtggcaacatcagttcaagatggacaacaaccgaaatatcctacagaagttgtttatagtgtgcaactgggctccagtgtgttcttatgcaatcttggtctttagtccgtctccaagaaaagctcaacatcaatagtttttataaaggttcaacaacttcaggatcgactggaggccaagaagcaagaaaaagatggactttgggaagaagtgtaaaccttaaatgctca

SEQ ID NO: 34551 - DNA, 1420 bp, Zea Mays
ctgctagcctgctaccatggtatgatcagtaacatttttctggtgccttacactgtggctgcgcgaatgactcgctctgagccttcagcggcctcctcgctcggcaaattctccgccgacgacagggagaaggtgctcactgccgttggagtacacacggcgatatctattgcacaacctacttcctagatacaggaagatggtgataaccacactgggaatcatggcaagtaggcatcttaactttttggactgcgatatctatcattactaggataatatcatgaatgattttggcgagtcacaaatatatattgagaacctatacttaccccatttgtgtaaaacttcattttgaactcaattattcatatgttgtattatgttttatcacaactaatgtttagttatatgcaacattactcttataaaaacagtctgtgtctatacaattataattatttatatttgacactaattgtgtaagataatgtacattttttggcatgaccacaaacaacagaaatcataccaaggtcaaatagaatgggcaggcaacttgaatcgttaagcagaggactgggaatcaagattccaacccaaatcactgaagggaacaaaagccagagccacctattcaagctactaagtttgcattagagctagagggatggtcgccaaggccagggatttactgtcgaggtgtacaagtccatggcagtggctgtttgtggagattagaagctgatgagggagtctcgtagcagaacttcaatgttgagatatggaaaagctacatatgtatcaagatatgtgaagactgtccgcctcaaacaagaggagtattttggtggagcgaagtttatgaagggcatggaggtactgctggtaacaagttctggatgtcattaggtctaccattgatagctactgtgaactgtgctggtaacactggagccaagaacctctacatcatttctgtgaagggaatcaagggcgccttaacaggcgtccttctgcctgtgttggtgaccatggagaatggaaagcctaaccttaggaagaagaagcaagacaaatataaggatgctgaacctagtgcaatagatctttttaaggagatgcattgcagcaaaaagaaaggttttagcaaaaatgttcagaaagctattgttgatatggaagaaatggtggcaacatcagttcaagatggacaacaaccgaaatatcctacagaagttgtttatagtgtgcaactgggctccagtgtgttcttatgcaatcttggtctttagtccgtctccaagaaaagctcaacatcaatagtttttataaaggttcaacaacttcaggatcgactggaggccaagaagcaagaaaaagatggactttgggaagaagtgtaaaccttaaatgctca

SEQ ID NO: 34552 - DNA, 1130 bp, Zea Mays
tagctgctagcctgctaccatggtatgatcagtaacatttttctggtgccttacactgtggctgcgcgaatgactcgctctgagccttcagcggcctcctcgctcggcaaattctccgccgacgacagggagaaggtgctcactgccgttggagtacacacggcgatatctattgcacaacctacttcctagatacaggaagatggtgataaccacactgggaatcatggcaaaaatcataccaaggtcaaatagaatgggcaggcaacttgaatcgttaagcagaggactgggaatcaagattccaacccaaatcactgaagggaacaaaagccagagccacctattcaagctactaagtttgcattagagctagagggatggtcgccaaggccagggatttactgtcgaggtgtacaagtccatggcagtggctgtttgtggagattagaagctgatgagggagtctcgtagcagaacttcaatgttgagatatggaaaagctacatatgtatcaagatatgtgaagactgtccgcctcaaacaagaggagtattttggtggagcgaagtttatgaagggcatggaggtactgctggtaacaagttctggatgtcattaggtctaccattgatagctactgtgaactgtgctggtaacactggagccaagaacctctacatcatttctgtgaagggaatcaagggcgccttaacaggcgtccttctgcctgtgttggtgaccatggagaatggaaagcctaaccttaggaagaagaagcaagacaaatataaggatgctgaacctagtgcaatagatctttttaaggagatgcattgcagcaaaaagaaaggttttagcaaaaatgttcagaaagctattgttgatatggaagaaatggtggcaacatcagttcaagatggacaacaaccgaaatatcctacagaagttgtttatagtgtgcaactgggctccagtgtgttcttatgcaatcttggtctttagtccgtctccaagaaaagctcaacatcaatagtttttataaaggttcaacaacttcaggatcgactggaggccaagaagcaagaaaaagatggactttgggaagaagtgtaaaccttaaatgctca

SEQ ID NO: 34553 - DNA, 1150 bp, Zea Mays
attttctatgattagtaacatttctagctgctagcctgctaccatggtatgatcagtaacatttttctggtgccttacactgtggctgcgcgaatgactcgctctgagccttcagcggcctcctcgctcggcaaattctccgccgacgacagggagaaggtgctcactgccgttggagtacacacggcgatatctattgcacaacctacttcctagatacaggaagatggtgataaccacactgggaatcatgaaatcataccaaggtcaaatagaatgggcaggcaacttgaatcgttaagcagaggactgggaatcaagattccaacccaaatcactgaagggaacaaaagccagagccacctattcaagctactaagtttgcattagagctagagggatggtcgccaaggccagggatttactgtcgaggtgtacaagtccatggcagtggctgtttgtggagattagaagctgatgagggagtctcgtagcagaacttcaatgttgagatatggaaaagctacatatgtatcaagatatgtgaagactgtccgcctcaaacaagaggagtattttggtggagcgaagtttatgaagggcatggaggtactgctggtaacaagttctggatgtcattaggtctaccattgatagctactgtgaactgtgctggtaacactggagccaagaacctctacatcatttctgtgaagggaatcaagggcgccttaacaggcgtccttctgcctgtgttggtgaccatggagaatggaaagcctaaccttaggaagaagaagcaagacaaatataaggatgctgaacctagtgcaatagatctttttaaggagatgcattgcagcaaaaagaaaggttttagcaaaaatgttcagaaagctattgttgatatggaagaaatggtggcaacatcagttcaagatggacaacaaccgaaatatcctacagaagttgtttatagtgtgcaactgggctccagtgtgttcttatgcaatcttggtctttagtccgtctccaagaaaagctcaacatcaatagtttttataaaggttcaacaacttcaggatcgactggaggccaagaagcaagaaaaagatggactttgggaagaagtgtaaaccttaaatgctca

SEQ ID NO: 34554 - DNA, 1043 bp, Zea Mays
caaacatcttccccaacctcgtactagccggctgcgagatccaacgacctccgcacggcagttccattagagatgcctctagggaagagatccacacgactatcctagaaatccgaagaaatcataccaaggtcaaatagaatgggcaggcaacttgaatcgttaagcagaggactgggaatcaagattccaacccaaatcactgaagggaacaaaagccagagccacctattcaagctactaagtttgcattagagctagagggatggtcgccaaggccagggatttactgtcgaggtgtacaagtccatggcagtggctgtttgtggagattagaagctgatgagggagtctcgtagcagaacttcaatgttgagatatggaaaagctacatatgtatcaagatatgtgaagactgtccgcctcaaacaagaggagtattttggtggagcgaagtttatgaagacttttgtgtgtgtgttttgaactgcagggcatggaggtactgctggtaacaagttctggatgtcattaggtctaccattgatagctactgtgaactgtgctggtaacactggagccaagaacctctacatcatttctgtgaagggaatcaagggcgccttaacaggcgtccttctgcctgtgttggtgaccatggagaatggaaagcctaaccttaggaagaagaagcaagacaaatataaggatgctgaacctagtgcaatagatctttttaaggagatgcattgcagcaaaaagaaaggttttagcaaaaatgttcagaaagctattgttgatatggaagaaatggtggcaacatcagttcaagatggacaacaaccgaaatatcctacagaagttgtttatagtgtgcaactgggctccagtgtgttcttatgcaatcttggtctttagtccgtctccaagaaaagctcaacatcaatagtttttataaaggttcaacaacttcaggatcgactggaggccaagaagcaagaaaaagatggactttgggaagaagtgtaaaccttaaatgctca

SEQ ID NO: 34555 - DNA, 1052 bp, Zea Mays
caaacatcttccccaacctcgtactagccggctgcgagatccaacgacctccgcacggcagttccattagagatgcctctagggaagagatccacacgactatcctagaaatccgaagaaatcataccaaggtcaaatagaatgggcaggcaacttgaatcgttaagcagaggactgggaatcaagattccaacccaaatcactgaagggaacaaaagccagagccacctattcaagctactaagtttgcattagagctagagggatggtcgccaaggccagggatttactgtcgaggtgtacaagtccatggcagtggctgtttgtggagattagaagctgatgagggagtctcgtagcagaacttcaatgttgagatatggaaaagctacatatgtatcaagatatgtgaagactgtccgcctcaaacaagaggagtattttggtggagcgaagtttatgaagactctattcctgcttgtacacttcaatgctttgcttgggcatggaggtactgctggtaacaagttctggatgtcattaggtctaccattgatagctactgtgaactgtgctggtaacactggagccaagaacctctacatcatttctgtgaagggaatcaagggcgccttaacaggcgtccttctgcctgtgttggtgaccatggagaatggaaagcctaaccttaggaagaagaagcaagacaaatataaggatgctgaacctagtgcaatagatctttttaaggagatgcattgcagcaaaaagaaaggttttagcaaaaatgttcagaaagctattgttgatatggaagaaatggtggcaacatcagttcaagatggacaacaaccgaaatatcctacagaagttgtttatagtgtgcaactgggctccagtgtgttcttatgcaatcttggtctttagtccgtctccaagaaaagctcaacatcaatagtttttataaaggttcaacaacttcaggatcgactggaggccaagaagcaagaaaaagatggactttgggaagaagtgtaaaccttaaatgctca

SEQ ID NO: 34556 - DNA, 794 bp, Zea Mays
cggcagttcccacaaacatcttccccaacctcgtactagccggctgcgagatccaacgacctccgcacggcagttccattagagatgcctctagggaagagatccacacgactatcctagaaatccgaagatggaaaagctacatatgtatcaagatatgtgaagactgtccgcctcaaacaagaggagtattttggtggagcgaagtttatgaagacttttgtgtgtgtgttttgaactgcagggcatggaggtactgctggtaacaagttctggatgtcattaggtctaccattgatagctactgtgaactgtgctggtaacactggagccaagaacctctacatcatttctgtgaagggaatcaagggcgccttaacaggcgtccttctgcctgtgttggtgaccatggagaatggaaagcctaaccttaggaagaagaagcaagacaaatataaggatgctgaacctagtgcaatagatctttttaaggagatgcattgcagcaaaaagaaaggttttagcaaaaatgttcagaaagctattgttgatatggaagaaatggtggcaacatcagttcaagatggacaacaaccgaaatatcctacagaagttgtttatagtgtgcaactgggctccagtgtgttcttatgcaatcttggtctttagtccgtctccaagaaaagctcaacatcaatagtttttataaaggttcaacaacttcaggatcgactggaggccaagaagcaagaaaaagatggactttgggaagaagtgtaaaccttaaatgctca

SEQ ID NO: 34557 - DNA, 778 bp, Zea Mays
gatatgttaggacggcagttcccacaaacatcttccccaacctcgtactagccggctgcgagatccaacgacctccgcacggcagttccattagagatgcctctagggaagagatccacacgactatcctagaaatccgaagatggaaaagctacatatgtatcaagatatgtgaagactgtccgcctcaaacaagaggagtattttggtggagcgaagtttatgaagggcatggaggtactgctggtaacaagttctggatgtcattaggtctaccattgatagctactgtgaactgtgctggtaacactggagccaagaacctctacatcatttctgtgaagggaatcaagggcgccttaacaggcgtccttctgcctgtgttggtgaccatggagaatggaaagcctaaccttaggaagaagaagcaagacaaatataaggatgctgaacctagtgcaatagatctttttaaggagatgcattgcagcaaaaagaaaggttttagcaaaaatgttcagaaagctattgttgatatggaagaaatggtggcaacatcagttcaagatggacaacaaccgaaatatcctacagaagttgtttatagtgtgcaactgggctccagtgtgttcttatgcaatcttggtctttagtccgtctccaagaaaagctcaacatcaatagtttttataaaggttcaacaacttcaggatcgactggaggccaagaagcaagaaaaagatggactttgggaagaagtgtaaaccttaaatgctca

SEQ ID NO: 34558 - DNA, 1104 bp, Zea Mays
caaaaataaaaattcgatgccgccaaaaaactaatatatgggaagggatatttatttccttctccgatatgttaggacggcagttcccacaaacatcttccccaacctcgtactagccggctgcgagatccaacgacctccgcacggcagttccattagagatgcctctagggaagagatccacacgactatcctagaaatccgaagaaatcataccaaggtcaaatagaatgggcaggcaacttgaatcgttaagcagaggactgggaatcaagattccaacccaaatcactgaagggaacaaaagccagagccacctattcaagctactaagtttgcattagagctagagggatggtcgccaaggccagggatttactgtcgaggtgtacaagtccatggcagtggctgtttgtggagattagaagctgatgagggagtctcgtagcagaacttcaatgttgagatatggaaaagctacatatgtatcaagatatgtgaagactgtccgcctcaaacaagaggagtattttggtggagcgaagtttatgaagggcatggaggtactgctggtaacaagttctggatgtcattaggtctaccattgatagctactgtgaactgtgctggtaacactggagccaagaacctctacatcatttctgtgaagggaatcaagggcgccttaacaggcgtccttctgcctgtgttggtgaccatggagaatggaaagcctaaccttaggaagaagaagcaagacaaatataaggatgctgaacctagtgcaatagatctttttaaggagatgcattgcagcaaaaagaaaggttttagcaaaaatgttcagaaagctattgttgatatggaagaaatggtggcaacatcagttcaagatggacaacaaccgaaatatcctacagaagttgtttatagtgtgcaactgggctccagtgtgttcttatgcaatcttggtctttagtccgtctccaagaaaagctcaacatcaatagtttttataaaggttcaacaacttcaggatcgactggaggccaagaagcaagaaaaagatggactttgggaagaagtgtaaaccttaaatgctca

SEQ ID NO: 34559 - DNA, 453 bp, Zea Mays
aacagatcaaagagctatcttaaaaggacattaggttggcataagtatccccatggaatatggggtgattctcgaaacccatcatgtggagcatttactgatcaccaggagtggcatgtgttcccacacgaatttggtactaaaaccttcaattagaaacatgcttaaagctccaagtgctagccggtgattcacaaacatcgaacgatgataagaaagttaaagatcgtcgcaaggtcggcacataccagcaaaatagttttgtttgccgagtcagggttgtcgttctgtagtatttttcatttccaagtattggcagaagaagaaaagggaggatcaacatgcacgtctactaaagctatttgtaaatcacttgaagcattagcttatttgtgaatgcttttgtgaagtgtttgcaaatatgtgaaaaacataatgagatgtgtgataaac

SEQ ID NO: 34560 - DNA, 996 bp, Zea Mays
cttgtggccccagtgccagtggccactgctggctacagcaattccaaccaaatgggcaggcaccgatctctagcacggacaagcaaatcccagcacaggtgaaccattccggtgacgtcaacacgttcgcggtgcctcggagactagagacagaggagataccacacgtcgtcaatgacttccgggttgccgccagaaacgccatcaaagcaggctttgatggagtggagatccacgcggcaaacgggtacctgttcgatcagttcatgaaggacagcaccaatgaccgagacgactcctacgggggcagcttggagaaccggtgccgtttcacagccgaggtgatggcagccgtcgcggacgaggtcggtgccaaccgcctcggtgtgcgcctctctccgttcgcggattatatggactgccacgactccaacccagaggcgctcgcgcttcatgtcatcgacgagacgctgaacccgctcggcgtgctttactgccacatggtagagccaaggatgcgggtgaacccagacgacggtattatgactctcgagcacatgctgctaccgttcaggagggcgtttcgcgggacgttcattgctaatggaggctacgaccgtgaggaaggcaatgacgccattgcccgtggccgtggctatgcagatctcatcgcatacggccggatattccttgccaacccggaccttccgatgcgttttgccaagaatgccccgctgaacaagtatgataggagcaccttctatacctctgatccggtggttgggtacacagattatccatttctcgatcaactctaggatgattggcttataaacaatttccccacctggagtactatcttgaccttaaaataaaatgagtgtcactataatattaatgtcgatcaaagttttctaagtttaactaaatctacaaaaattattattaagcatttgtcaaagtatctatacacttagtgattttgttcattaataa

SEQ ID NO: 34561 - DNA, 150 bp, Zea Mays
gatgctgcggacggcggtagactagtccgtggttgcttggtcaggggtagcgcacccgcaggggcctccagtgttctgtcagggcaaacgcacccgcaggaacctccggtggcggaggtctgcaacacagagtgcgaggagggaaggagg

SEQ ID NO: 34562 - DNA, 593 bp, Zea Mays
ctgcctaggtcacgcttcgctgcaactgcaccccatggatcaaaaggcctaagctgaggaacagtggagaggcatgaagggggaaatggcgcaggtttccgttggtgaaacatgggagagtgtcgagtttgaagaggactaccagcaatggcggacaagaccaagcaactttgggagcagcaacagctcatgcaaaattaagcatgtgacgatgaaattgtaaacacaaaaaagagaacagcatgggcaatcaattttactactgcctggtgcaagttgttggttactagcagttgatttgtggttggcagcacttggttgcttgagaagagaaagcaaggagcaaggcacaaggaaaaaggcagttgtgtgcatgaactcgactcccgtagggttacagtgggtggatcgacagttccattggctagcatatattgccaaatttattttctttgtttttttttttgctttttgcatcactttgtattgatattctacaactacttatgtgtggtacacagtgttcttaaggcaaggcgaagcattggaccaccgccttaacgcctaggcgagcaagacgcctagaattattc

SEQ ID NO: 34563 - DNA, 457 bp, Zea Mays
ctctagaaaagatatttgtagagcagccttgctgcgcagcactatttgctgtttttgatgagaatgcagaaggcacatcctctgtacttgtctggtgtgcaaagaaattctgcctgcaattctgacagcggatctgacgattgagtatgtcaccatggtacttatattttgttttacagtgaatgcatacggtccaaaatgtccaaggtccatatcctgctgcactactatttgtgctatttttgttgattggctctgtagtccacattggttgtgtagcctgctttggctgtgcagcctgctttggtttagcaacatgctttggttttgcatcctgtttctgttgtgtagcctgatttggttgtgtcggctgtgtagcctgctttggtgcaactttgggagcagccctccatttgacatcatatgcatatcgtttggttcgatcagacaatgttga

SEQ ID NO: 34564 - DNA, 2246 bp, Zea Mays
gtaaattgtgttccatatgaacgaaacagttcaatgtttctaacatattaggcccaattgagcaatcgtccgagagggaaattaagagtgcatttcataccgtatgtgccgaagctaagatcatcagctttcattgtcatgagtgaaacttccattccatcatcctacacctcttgtaactcactctcagaaataggtaaaaatgatctagctactgggaaatgggaatggccttagcagttagtgcaaaccgaaataatgcccccctagccccctgcacaagattacgatattcattgcaactagaccttatagcatcatcaggccaacaaaccaacggcaaataaaaacagaaagtgctaaatttacagtagtggatttgagactcaacatgttcctggaacacaaactaaatttctagctgttttgcagagagcactaccaaatggtgattatagtttcataggcatcagcgttagaatcaaattgtatgctcagtacagtacaaaaggcaccgaggcctaccgagtggagtgtgtaggtttggcaaggcttggccgaaaccagagttgcccccacacacacactaacgtccagaagagcatgcaatatcaccagttcaatgacggaggtaatcgaattcagccttcgcgagtcagtgggtacccgcagagaggaaggaatcaggaatagcagcaggatccagctcgtagaagccacagagctcgccacccttctctgttgtcagctggaaagagggtatccggtgagaaaacagcaagtcatcctttgttggcacctccagaatactcctctcattgtctggcttgaatacagttttgtagccatctacctgagtcagaaataagactttcgtgctagcttcattgcgctcagttatctcgccaatggcatattcgcaggtatctttgctaggaacccagccaggtgaccaattgtggtagatcgcccaaatttcccctacttctgggtggatttcaaagttccgcttcgaaccaccttgtgtttctactacatgagagaatgcatcgtttatgtcgtacttcatcctccagttatgaagtttaaatgtcccacagctcacgggtaagtcatgctctaaccatgtgttctcatgctctgatcgagggcaagcttccagccaagtcaggtgcactccaaatggatctgaatcaacttttgtaacccaaccatagtatttgggaaggccatcaaaatcactgtaaagagcccatatctgtcctcgttcaaacttattatatgaccggtcttcttcaaagttgtagaacaatgaatctggatatgtgaaaacagaggtggatgcacagacttggggagcagaataaccagacatgctagcaaggcgggcattatgctgctgagtttgaacggattgttttctccacttgcctgcatttctatggttgcccttatgagcacttcgtccatttccatggctgggtgtagtattgtcagtcaaatcaacagactcgctgcccattgttctattggtagccacacatgaatcaagatcaacaggtggaaatgctacgtccaggttactaggaagcgatacggtatctagttcaagaaacccacaagggacaccaaccttctcgtttcccactgttctgaaaaatgggatgctgtgggaaaagcgaagtagttcacttgatggtataacaaatgatggtttgtcctttgctggtgcaaacagactcacaaaacctttaaccttgaccaaggggataacagtcacaccagcttccactgtgaagtttgaaaggacctccaccacttcatactcgtaggatctatgactgtctgcatctgagacccactgcatactccagcccttataaagagcccaaacctcacctatatttggatatattacataagaacccctttttcttcctttaacccacgaaaccatgtgagaaaacatgaggggatcttgtgactcctctgtgtttcctaacgtaaagttcccacaagccacaggaagtttattatcaatccatttttcctcatcatcattcactgtagaatgctccagccaagtgtacttaactctgaagttggtggtattaacatgtcttattctagcatagaatcttggcatggcatcgaattcatcataaagtgcccatatctgatcaactgcaaacagtttgacatctctgcacttgtcgaagtcaaaaaattctgggtcagggtacgtg

SEQ ID NO: 34565 - DNA, 803 bp, Zea Mays
gtcggttgcaacggccaagtctgccagatgagggtctgtaacagcctcgggctataagtcgtgctccaagccctctggttaacacctctgcgctcccaactcgagaccaaggaaaaagagaagggggacgagtgcggctgtgggcgggattctgttcgaccgccgattcgaccccggggaagcctctggttaacacctctgcgcacccaactcgagaccgaggaaaaagagaagggaaagcatagggtggcggggaaggtatcgcctcggaaggactcaaatcaacggcaattcctcgccggacattgctttccgtcgtgaagtcgctccgctctgtggacaggctcgtcatcaagccaatcgcgagtacgctacaggatatggttgatggtgtgacttggccttctaccctgccaccgggttggacggttgagtgggatgctgcctcgacaggagaggagcaggaggagaggggataggccttgccctattcctcagtattcgacgtcatcgattatccgctgcactttaattatgaactagttcccttttatttaaaactcctatttatgtaataactctagtaccttaatttgtggtttcatgttttattgtattctctttgtgcctcaccttcgcgtgagctagtggtattcgatccttgggaagtggctttatcagactagatctgagggactgacgggttattccgatttaagtgtgttgctgcctctaaggtgtgacttgggcacttaagctggaataattcgggtggttccgccacagaaaacctagattaaaaa

SEQ ID NO: 34566 - DNA, 492 bp, Zea Mays
gtcggttgcaacggccaagtctgccagatgagggtctgtaacagcctcgggctataagtcgtgctccaagccctctggttaacacctctgcgctcccaactcgagaccaaggaaaaagagaagggggacgagtgcggctgtgggcgggattctgttcgaccgccgattcgaccccggggaagcctctggttaacacctctgcgcacccaactcgagaccgaggaaaaagagaagggaaagcatagggtggcggggaaggtatcgcctcggaaggactcaaatcaacggcaattcctcgccggacattgctttccgtcgtgaagtcgctccgctctgtggacaggctcgtcatcaagccaatcgcgaatttcaacctcgctgacggagagtgcgtgctcattcccgagcaaggagctgtccaaaaggaagcccaggagccaactcccgagcctgccaccgaggatctcctcgcagcctcagcttttgaaggca

SEQ ID NO: 34567 - DNA, 495 bp, Zea Mays
caccttccctggatggatcggtgggtcggttgcaacggccaagtctgccagatgagggtctgtaacagcctcgggctataagtcgtgctccaagccctctggttaacacctctgcgctcccaactcgagaccaaggaaaaagagaagggggacgagtgcggctgtgggcgggattctgttcgaccgccgattcgaccccggggaagcctctggttaacacctctgcgcacccaactcgagaccgaggaaaaagagaagggaaagcatagggtggcggggaaggtatcgcctcggaaggactcaaatcaacggcaattcctcgccggacattgctttccgtcgtgaagtcgctccgctctgtggacaggctcgtcatcaagccaatcgcgaagtgcgtgctcattcccgagcaaggagctgtccaaaaggaagcccaggagccaactcccgagcctgccaccgaggatctcctcgcagcctcagcttttgaaggca

SEQ ID NO: 34568 - DNA, 471 bp, Zea Mays
caccttccctggatggatcggtgggtcggttgcaacggccaagtctgccagatgagggtctgtaacagcctcgggctataagtcgtgctccaagccctctggttaacacctctgcgctcccaactcgagaccaaggaaaaagagaagggggacgagtgcggctgtgggcgggattctgttcgaccgccgattcgaccccggggaagcctctggttaacacctctgcgcacccaactcgagaccgaggaaaaagagaagggaaagcatagggtggcggggaaggtatcgcctcggaaggactcaaatcaacggcaattcctcgccggacattgctttccgtcgtgaagtcgctccgctctgtggacaggctcgtcatcaagccaatcgcgagagctgtccaaaaggaagcccaggagccaactcccgagcctgccaccgaggatctcctcgcagcctcagcttttgaaggca

SEQ ID NO: 34569 - DNA, 710 bp, Zea Mays
cgtactcagggttttcaaacccatgttgttgtaggtgatgaaacaacagacttctgctgtttttgcactaaggtggtgcccaaggatgtggtgcccaaggacgaacctcaacagtaacgtggttgcagaaggacgtggtctttccttttgaaaaacaatatacttttatgtgggaggggtttttgcctcccatggttgtaataataatacttatgcactcttatatcctggtgatgtaatcataacactctttctatattttaatgaatgtaagataagttattgtaatttgcttccgcttattcgttcctccgatgtgttgtaatatctgcgtgacgggtgaaacactcttgggaaaggtaaaggatacagatatcgaacttgtcaagtgattatgtgcatttacagggttgtccgaggtccgttggacaaggacaactgtaggcgggcctaatgacttgggaggttccgtcacactttgtcttggcactcgttcagattatccatctttaggttggtccgactgacgacatcgtcttgcggagatgcccactctctgcatcatcttgggaatgacttggctctgatcttccgcatcacgtgatcacttaacgtacctaaatgatatgcataatgcacatgaatgaacatacagaggaataacatactacaacataatactatatggacgaggattaaacacttaaagc

SEQ ID NO: 34570 - DNA, 4815 bp, Zea Mays
gccaagtcggacacatccctcttcatctctcggcggggcgaggacatcgtctacctactcctctacgtcgacgacattgtgctcatagcgcccaacgccaatctcctgcagcgcacgatcgtcgccctccagcgggagttcgcgatgaaggatttggggcctctccaccactttctcggcaacacacagaacgccggccccagggtctcttcctgcaccagcgtcactacgccatcgacattctggagcgggctggcatgtccgactgcaagccttgctccacgcctgtcgacactcaggcgaagctctctgaggacgacgggcccccggtcgccgacgcgacatcttacaggagcctgacgtgcgctctccagtacctcacattctcccgaccggacatcacctacgccgttcagcaggtgtgccttcatatgcacaccccacggtagccccacctcaccgctctcaagcgcattctgtgctacctctggggctccctcgactacgacctcctcctccgaccatcctcgacgtcggaccttgtggtctacaccgacgccaactaggctggctgccccgacacgcgacgctctacctccggctatgccgtattcctgggcgccaacctcgtcccttgggccgccaagcgccaacccgtcgtctcccgctccagcgtcgaggccgagtaccgcgttgtggctaacggcgtggccaaggcatcttggatgcgccagctcctccacgagctctacagcccccttcagcgcgccacccttgtctactgcgacaatgtcagcgccgtctacctctccaccaaccccgtacagcatcagcgcacgaagcatgtggagatcgacctccacttcgttcgggaacgtgtcgcagcaggcgacgttcgggttctcagcatcccacaacgctacagttcgccgacatcttcaccaagggtctgccatccagtgtcttcctagactttcgatctagtctcaaagtctgtccaggatagagttgtgactgcgggggggggggggggtgttagaactatattagggtttacccctaccgggtccctctgtaatgggcctaggcccaactattcctagtataatatttcccaaccctgctagggttagggtttcactgttcaacatcctccaccacagcccctcgccggacttcactctgaacccggtgaacacctccacgaaccaccctttcccgacgccaggtcctgctgatcacgtcgttttggtttcctagactgggtggtcaaagttccagagatggagtaacgccagtcctgtctcctcgttttccggcggctcctgcgtggtacctcactcctacaaagaggtcatgctcttcaatggtgggagtgtagcctctcctctgctgagtgttgccgcttcccctacgaagagaggtgccattcaatcgcgatcggtgaagacgttcgatgtgcgtctggtagtgcagagtcgggtatatgtgttgcctaaccgttctgaaggtggttggcaggtggtgcgaaggagagctagacgagctgcacccgttcctcgtgatggtcccttgaggatctccgaggcaggtgcttcagttgtctctctccctcccactttgctgagacctgcaagcggcctacccgttgctttaggggtttggccaccgtgcttttggttgtccgatccagtcggacactaagtgggtggcggggccgcaccgtgagcactagggtgttaccgtcccggtgtggcagcgcctgatgaagatgcaaggttctcgctcgcgcagaggtggttcccaggatatcaagtgcacggaatcggtttggaagcgtgtcaccccgttgcagccgaccaagggggttgagcacccttcacccctgtttttggcatcaggctccagggaggctgctccaatagttcgtaacagcaaaagaaagcggcatcgagcgaaacgccagtgggttgcgatcaaagaaacacatacaaggagtctgcattcttcaggttcggtttctgctaaagattctgattctccgacggcaatggatagggtcgcaacagaggtgaaggagcagcctgtcatgcccatgatttcccatccctgtctgttggatttctagactgagatggcgcgggaggaagcagtgttgcggaaggcattgttggtcattattgttggtactaggcctgaggtcctaggggttgaagtcattgatgaagtagctcgacactttcacgttgaggcgggcgcaatgtccattcatcaggccttgctagaggacatcattctgttcctgtcggacgaggatgcagcttcaagggtctttaatgagggaaggattttcagaggtccacagtttgatctcgtttttaagagatggacgcgttgtgcaaatgcttctgcagcgacgctctcaaccttggtcaatgtggaaatcaaaggcattccggcgcatgcgtggtcaagaggtgctgcagaacatctattacgagattcatgtcttatctctaaattacacctgccaacagttttgaagacggatttttcgtccttcgggttgaggacgtggtgtgtggatctaaagaattttcaccgtgaaatgatcctcctcatctctgagtcggggctggcagcaagagagaagcgatgtctgtcctacaaggcgacgctcggttctctctcgcttgggcccgaagcatcttctcgtggagaggaggaaagcctgatggagtctgaggtctcagttaagggcatggagggcgaagcgacaaaggtgctgccaccagatccatacccaattagtgggggtctagtgctaagcgacgactttaatgaagacccaagggagattttgctcagtcccgagaaatcggctctacaaactgaggacatggtgcaaggagatatcaatctggttgggagagcgttgcaagttcctgagaaggcgggcgtgctggactttcaagttgttgttgggctcgaggatgttatctctggtgatgggtcgttgggacaggccgctatagattcaccccaacaatcggttgggttgttggagtctatggggtcggtctcgccccatggtcgggtcgccgtctctggtgatgggccactgggtcaggcctcatctgattcgccccagcacttggctgggtcgctagagtctgatgggccggtctcgccttaaagccagcttgtgcaagttgatgttaccgaaaatttttcttcttcccccctgctacaacggggtcgctgggtcaagttgggttggtttcgcctccgtagcctggggctgagctgcagggacaaaccaaatttgtctccccccgacattgcaagattatggaccagaatggctttgtgctctctgttcttgataacgcaactctgaaagtttacagcagaaggggcgggacttcaggcgacaagagacattcaatcttttgtcgtcataatcagtggcaaacccctattagaccttggccagctccaatccaggataaagcaagaatgcaaatagatggctcgcggaagtccaatcgaccagagcgagtttttatagtaggttgtgtaagctgaagcgccacagggaattttcctctatgaagcggttcaagaagcgaaagcaacacagggttacagaatctgaagcgtcaatttagtaattgaccaagtcttgaacaataagttgagtctgcaaactcgggggctacttgatagaattaggaactcagacagaagatggaaagactcaaacacatcaagatcaagattatcaataatattcaagataagtgactcatctggccgattcaatgatatgtaccacaaacacccaaatctagcttttagaagatgaagactggaacacatgggtccatgggctcggctaagggcccaaggacttagacggtgcgagtgagaccaaaagaaaggccttctaccagaaggattcctaaagaataaacatggcaaaaatctagatcatgatagatatggcaaaaccccagacagataagtgaaagcacttgtaaagatagagtttactccctgatagacttggttagattccctatttagtaacctactcggatacacttgttgtaaaccattgtccctccttagactataaaaaaaggagggtcagggtgacctatgagggcagaagagatcattagatcagaatacaaacgccaacaacaatcaggacatagagtattatcttatctcgagagctcgaacctatataaaacttcgtgtctcccgtgcctttaccttcagctttcgattatgtaacctaccacataaatttactatcgaataatcttcgacaccattcaattaaaatagttgtgggtaaccattctagaaaaccctattcaaggcatatgtggtcttaatcatagtcacaagacgagtacagtggtagcgaccctcgacccagaaatgtcgtccctttaccggatacacatggtcatttttgtttccaccatgtaaaagtttctcacatgcaacataccacgttcctcgaccctatcgatccaggaactttgtgactatggtcttaatagttgtccttggatttaacaaaatcaataatgttggtccaaatttaatagtttacatttgttaaaacagcactagtatctctaaaactgattcaaatccaaaacttcagtgatgacatttcatcagcatatattgactcttcatagatattatactggttaggacaagtgtatgttgcgcaatgaatcatatagtaaagtgaggcagcctgctttttataaaaacaaaggtttctag

SEQ ID NO: 34571 - DNA, 2403 bp, Zea Mays
ccaccgctcaaccttttccttatctctttgccgaatctctccaatgccttgttcaactttatctccatgtagattttcatggatggatacgtatgcacttcttgattcttgctctcgtctcctccacgtgcttgatctctagagaattcccattgcaccaggttgtctctcacgcgctcaaggccaactcttttcctttcctagcgcccaggttccctgccctagcgtctcccacctcctgccaaagctccctggccgacgccatagtgcccagcctctgtaccgccgcgtcctgcacttggcgctcgtcctcacccttctgttgaccgcccttgctccctgttgcgtccctcccatggctgcctctcttcaatctcctccctccccagccaggtgcccagccctagatgtccatggcgcaggagcaccccatctcctctgccacaattttcgccctccaagccgatgcccaaaccatggcgccctggacaccattcatctccctggtggccgagcctggcccctgtgcccagcacatgcccaaggatatggagcagcaatagccatgaagccccttcgtgtcgcgtcctcggcgtgttcgacaaaatatcgcagcgtgctacatccgatctgtgcagccctattgtgacctcatcgcaccccggcgaggcaagctgtgcgacaagtgccagatgttcgatagaagacttcaatcaaaggctatcgtcgttcgtacgaatattgagttaaattgtgatgtggtacgttaattaatcacgtgatgtggaggacaagagctgggttgatcacaagacgatgctgataaacgaagctaaagtggatgagtcaaccaagtgccaggatgtgaggtgctcgccaagcgagtatcatctaacaacactaacatagtgttatcccaggcaagccccggtgcatttgccacctcccttgtgtttacaaaattttatcacttatatgttgcattaggtgataggagttggttgattaaacacttgatgcattaccatccttgaaagattgattaccataccttgtcacctgttttataaaagctagagatgcttagtcatgctgatagactaagaaaaatgtttttgatctatgactcatgttttttactaacaagaaaatggcttgggataatgaaggcatcaagacgttgataaattcattatccaggcatggcctctctgtcaggcgccaaagttttgaaatagtttaaaatgggaccagacgttgagcaggaaaggtcgcccgtctgtgtcgattaaggaccgtaccgattgttggcctgatgatctaggaccttttaactggccacatacctcgtcatgggtaagcctgaacccggctattccctatgtgaaaagacaatcgcgcactgggagtggagagatggtgagagtagcgtgtaccccctggcaagaggctgcatggggagtactgtgctctcgggtggcacggaccggttcacgtagtggaagatccgtgggaatggtagacatatgcaagggttaagtgctacatatatcgtgtggttggagatcgccagctgggtattaatcggttcagattgccgttacttctcggatatgaagactggatcgctgcccttcatcgtagataacaagcgaaacaaaattttgattttaaaagaaagctagtgtaggacaagtgaatgctctagattcgacaaatctagattcaggaaaagtacttaacttatgatgtaaaaatttggcataaggatccactactagtaaccttttctgcaaaaatgagtctttgaaatttgataagctttacctttattcccgacaaaccagcatacccttgagagtcttttcttttgtcgggtacgtcttgctgagtaattgcgtactcagagttttattcccattgttgctgcaggttacgagtcactttaattgtgattgatgttaagtgtcggtgggctcgtccttcttatataagtatatcccttctataatttctttaataaggattatcacttaagctagcatgtatttcaaatttacaaatattctataacattttaaagtgtaattcttttgaaacacttatttttgtaaccactccgataaatataatgtaaattttgttgtaacttgtaactttttgtaataaagaaattctgctgcaaatgttggtgtgtgatttgtgtttacttaatcttgcgatcctggttgtaagtggtttatccggggtccttgggacactcgagcggatcctgttaagttatctggtgcacatgcatagccgtctgaggtctttgagataagggcaggtgcatgtgagcccaataacttgggaggttctgccacaagacatatggttgaaatagttatgggtgagatggac

SEQ ID NO: 34572 - DNA, 2420 bp, Zea Mays
ccaccgctcaaccttttccttatctctttgccgaatctctccaatgccttgttcaactttatctccatgtagattttcatggatggatacgtatgcacttcttgattcttgctctcgtctcctccacgtgcttgatctctagagaattcccattgcaccaggttgtctctcacgcgctcaaggccaactcttttcctttcctagcgcccaggttccctgccctagcgtctcccacctcctgccaaagctccctggccgacgccatagtgcccagcctctgtaccgccgcgtcctgcacttggcgctcgtcctcacccttctgttgaccgcccttgctccctgttgcgtccctcccatggctgcctctcttcaatctcctccctccccagccaggtgcccagccctagatgtccatggcgcaggagcaccccatctcctctgccacaattttcgccctccaagccgatgcccaaaccatggcgccctggacaccattcatctccctggtggccgagcctggcccctgtgcccagcacatgcccaaggatatggagcagcaatagccatgaagccccttcgtgtcgcgtcctcggcgtgttcgacaaaatatcgcagcgtgctacatccgatctgtgcagccctattgtgacctcatcgcaccccgaatttcatatttatcaggcgaggcaagctgtgcgacaagtgccagatgttcgatagaagacttcaatcaaaggctatcgtcgttcgtacgaatattgagttaaattgtgatgtggtacgttaattaatcacgtgatgtggaggacaagagctgggttgatcacaagacgatgctgataaacgaagctaaagtggatgagtcaaccaagtgccaggatgtgaggtgctcgccaagcgagtatcatctaacaacactaacatagtgttatcccaggcaagccccggtgcatttgccacctcccttgtgtttacaaaattttatcacttatatgttgcattaggtgataggagttggttgattaaacacttgatgcattaccatccttgaaagattgattaccataccttgtcacctgttttataaaagctagagatgcttagtcatgctgatagactaagaaaaatgtttttgatctatgactcatgttttttactaacaagaaaatggcttgggataatgaaggcatcaagacgttgataaattcattatccaggcatggcctctctgtcaggcgccaaagttttgaaatagtttaaaatgggaccagacgttgagcaggaaaggtcgcccgtctgtgtcgattaaggaccgtaccgattgttggcctgatgatctaggaccttttaactggccacatacctcgtcatgggtaagcctgaacccggctattccctatgtgaaaagacaatcgcgcactgggagtggagagatggtgagagtagcgtgtaccccctggcaagaggctgcatggggagtactgtgctctcgggtggcacggaccggttcacgtagtggaagatccgtgggaatggtagacatatgcaagggttaagtgctacatatatcgtgtggttggagatcgccagctgggtattaatcggttcagattgccgttacttctcggatatgaagactggatcgctgcccttcatcgtagataacaagcgaaacaaaattttgattttaaaagaaagctagtgtaggacaagtgaatgctctagattcgacaaatctagattcaggaaaagtacttaacttatgatgtaaaaatttggcataaggatccactactagtaaccttttctgcaaaaatgagtctttgaaatttgataagctttacctttattcccgacaaaccagcatacccttgagagtcttttcttttgtcgggtacgtcttgctgagtaattgcgtactcagagttttattcccattgttgctgcaggttacgagtcactttaattgtgattgatgttaagtgtcggtgggctcgtccttcttatataagtatatcccttctataatttctttaataaggattatcacttaagctagcatgtatttcaaatttacaaatattctataacattttaaagtgtaattcttttgaaacacttatttttgtaaccactccgataaatataatgtaaattttgttgtaacttgtaactttttgtaataaagaaattctgctgcaaatgttggtgtgtgatttgtgtttacttaatcttgcgatcctggttgtaagtggtttatccggggtccttgggacactcgagcggatcctgttaagttatctggtgcacatgcatagccgtctgaggtctttgagataagggcaggtgcatgtgagcccaataacttgggaggttctgccacaagacatatggttgaaatagttatgggtgagatggac

SEQ ID NO: 34573 - DNA, 1593 bp, Zea Mays
atccaggagccttcttttcttcggtaactaattgctgaagatcttttcttcgattgaataatttcgacgaattgaacttgagtcgcgcaggatgtctgagctttttggtcgcgcacttggtgaatatcacgctgctggcttcgtcttcactcgattcttggaatttcttgatgacgcacggaacgacgacgacacaagagggtgacgtatatagagctacacacgcgacacgatgacgaacgacgctgaccagcggaatcgatgacgcgatgagaattaaggccaagcgagccgagagggcacactggcgagcagaaaataggaaacgactgcgtgtagaggataactcggcacgacgagggaccacgaaacgctgcgcacgagaaaactacgacaagggagcttagcgcgcagcgagctgaagaacgacagtgaggttgtggctgaggcgattagggagcagcagccgaccatggcgagcaactgagaacggctccccagcacacgaatcagccgacttgaactagggagttatggatctgggcgagcagggttggtgacgaggacaggcgttgtcttcggcaggactcgagacggctcatcagcatccatggccatgaaccataaacaaacctccaatatccaactaatctctccaagaaaatgcaccgctatcctgagctgctatgccacgttcattgctgaggatagcatacgaattctgcacctcccgtgagattgagtgctggtctgaacacaattcagcacccatattttggggtattcgacatgctttccatgccaccagcgaccacgacatcgttgattcccagctgaatactttgagccgcaacatgacagccttcatacccgaggagaaaactttgttgacggtggtacatggcacggagttgggcaagccggcgccaagggctgcctgccctgccggagcttggccgaggttgacgttaaggatgttgtccacgaaaacctcctgcacgagcgccgggtcgaccaagattgtcggggatggggcgggagaggttgtggtcgccgagctggagatgaaacgcgcagagaagaagcctcggaaccgggcacggcggctggacgcagggcgagccatggagatgggcgccgagctccatggatgcagggaggagggaggagctcgctggctggctggggatggaggaggagaaatccacgcgcgccatagaagggcttcgacagggcgtagggagagagaggagcagaggctgggggagcacgacgctgggcacttgaagtcgcgtcgttggggagggagacatcggaggggagggagaagaaaaaaaatcagacttgaacggcggcagaaaaaatcggagtacggctgggcgctgtggagaagatagggatgcgctcggcgatggaaaaatcgagcagagccaaggcggctggacgaagatttggcgcgtagaagacgagctacaggagggagatggcaacggctgtagaggagtggctgggcaccgatttcagcagaagagcacggcgaggaaaaaaaatcctggcgacggcatcgatcctcatccaggtgcttgagcggcg

SEQ ID NO: 34574 - DNA, 603 bp, Zea Mays
tggggagggagacatcggaggggagggagaagataagcacacggcgaggagatgaggccaacggccgtaggcggtgagaacaaaaaaatcagacttgaacggcggcagaaaaaatcggagtacggctgggcgctgtggagaagatagggatgcactcggcgatggaaaaatcgagcagagccaaggcggctggacgaagatctggcgcgtagaagacgagctacaggagggagatggcaacggctgtagaggagtggctgggcaccgatttcagcagaagagcacggcgaggaaaaaaaatcctggcgacagcatcgatcctcatccaggtgcttgagcggcggtgaagaaaaaaatccggggagggcggcgggatggggataggaaggagacgactggagattgagatgaagggatatttcctttttttatttctctctttttattaacagaaatcgaagatattttggatcccgatatttagcgatgtttacgatgtaaacagtaattgtgacacggttttgatttgacgaatactcgggagtcggatgaatgcgtaccgttaattcacctttttaaatcaaggcaaaaagaaacggaccg

SEQ ID NO: 34575 - DNA, 1719 bp, Zea Mays
cgttccaacttgtttgttcacgtatgtggaaaggcatatttgccatctgtgagcctatgggtatgtgagtttaatcaggattctttaccctttgtattataatgatacaccactctcttgcatgttcatgaaaaaaatatttgaggaaaaaattgatgacatgtaataaggtatctgtatttaatcactagctgcaattacgtttgctttttgttatcgtagtcaatgtatttatttatttgtcctttacagtattgttctcaattctgcataaaatgctacaacatgatacttttactgatctggacagttggaggacatatatgcaagcttgtttcttgtgaaatgtgatacacttttgaacagagctaatcatcgtcagggagaaaaacaaacaaaaacgacgaaattctgcagtgggatatgcttattctttgtacttatttgtgttatttgggctcctatgttgatttatagtagtggtaaccctacaaatattgccaatcccattgttgatgtaagtgttaagattgatataaaggcacttggtgggagattaaacttgtttaagactactgcttgtgaaaaaataccttggaagtacttgaaggcctatgatgatgttgatcctctagattaccttggggcatacaatgtggatgacattcagctgatttgctgccagcctgatgcatcaacaatgtggttgatacctcctccagtccaaaacagattcatccagtcccttgaggagagagagatgctttttggaaagatggaacttattttaaattgggattttctcagagctagaccaaaagggaaggaattagtgcgatatgaatcccctattgaacactgcccgagtgtagatgatgttaaacgagtgcttaatggaactgcaaacagcttcagtataattgatgcttacccaaggtactttcgagttactggatcaggtgaagtccggcgattagaagcagcgatagattcagtaagtggcgaattgctattaaataatggcactccttggtggtcattctatgatacaaacccatcagatttggcaggctgtcaagggctgaatggtcccatggctatagttgtttctgaggagacacctcagggcattattggcgaaacactcagtaaatttagcatatggagtttatatattacttttgttctagctgttgcgagatttattaggcttcagtgctcagacttgagaatgagaataccatatgagaaccttccgtcatgtgacaggctacttgacatctgtgaaggaatatatgcagcaagagctgaaggagagttagaagtggaagaagttctgtattggacattggtaaacatctatagatcaccacatatgctgcttgaatacacaaagcctgactagggcacccgttctgctaaggaagccattctgcaaaaaaattccatgtaatgtagtaatgtacaagtagaacacttctttcctttgaggtcacaacgaagctaacttaatcctctcccccccttgtgtcaggacaaaaaacgtgcaaataggctttgtagttgtagttcgtttttgctaacatgtatacggttgaccattatttttggagaagtatacatcaaagtttcattgtgaaagttatctcatgctactaaaatgtgttaagaaagttgcgaatgaagatgtaatccatgtcatcctaatcaaaatgtctt

SEQ ID NO: 34576 - DNA, 2810 bp, Zea Mays
  misc_feature (1)..(2): n is a, c, g, or t
nnactccaatgagcatcatgcagaaagtgacatctatgatgttgttgaaagtcagagggaaacacaagatgggcagcttccaagaacacattcagttccagataccacatggactaaagcgaaatcaagcatgccaattggtgtgatttttcagtatatatggtatcagatgcgaagtaattatgattatgtttgctattgctgttttattctggttttcatgtggaattttagtttgttatccatggcctaccttggggcacttttcttatatgctctttgcgtgaactatggcccaagttacttgttttgggtcatcattctgatctacaccgagagctcgatcactgccaaagatggtgaatgggttccggtaacagaattcagctttcttagtgcaaggaacaacattgaagagaaacactgtgtagcttacagttggagagagaagctaaaaagtttgcccttgcctgtttttgatctcataaggatgattgttagaggcttatctagatactggatgtcattaacacatggagctgaatctcctccatattttgtgcaagttacaatggaggtaagccattggccagaagatggaatccagccagagaggatagagtctgccataaatagggtgcttgctattgctcatgaagaaagatgtcaggcaaacttgccttcctcttgccactgttgtagtaaagtccggattcaaagtattgaaaaaagcaaagaaaattgtaatatggctcttgctgtactagaagttgtttatgctgctcctgtagagtgccaatctaagggatggcacaaatctctcactccagcagctgatgtagaaagagagattcatgaatcacagaaagcaggattttttgaagaaataaattttccttacccgatcgtctcggtgattggtgggggtaaaagagagatcgatctttatgcatattattttggcgccgacttggcagttttcttccttgttgcaatgttctatcaatctatcctaaaaaataagagtgaattcttggaagtttaccagctggaggatcagttcccaaaagaatttgttttcatccttatggttctctttttcttgatagtggttgaccgcattatatatctttggtcctttgctaccggcaaagttgttttctatctttttaaccttgtgcttttcacgtattctgtcactgaatatgcttggggaacggagctagctcacagggatattggaggacttgtactacgtgcaatctaccttacaaaatcaatttccctagcactgcaagctttacagatcagatatggtattcctaacaaaagcaacctatataggcagttcttgactagcaaagttactcaagtgaattacttgggcttccgtctgtatcgtgctttaccattcttgtatgaattgcggtgtgtacttgattggtcttgcacaaccacatctttaacaatgtatgattggctgaagttggaggacatatatgcaagcttgtttcttgtgaaatgtgatacacttttgaacagagctaatcatcgtcagggagaaaaacaaacaaaaacgacgaaattctgcagtgggatatgcttattctttgtacttatttgtgttatttgggctcctatgttgatttatagtagtggtaaccctacaaatattgccaatcccattgttgatgtaagtgttaagattgatataaaggcacttggtgggagattaaacttgtttaagactactgcttgtgaaaaaataccttggaagtacttgaaggcctatgatgatgttgatcctctagattaccttggggcatacaatgtggatgacattcagctgatttgctgccagcctgatgcatcaacaatgtggttgatacctcctccagtccaaaacagattcatccagtcccttgaggagagagagatgctttttggaaagatggaacttattttaaattgggattttctcagagctagaccaaaagggaaggaattagtgcgatatgaatcccctattgaacactgcccgagtgtagatgatgttaaacgagtgcttaatggaactgcaaacagcttcagtataattgatgcttacccaaggtactttcgagttactggatcaggtgaagtccggcgattagaagcagcgatagattcagtaagtggcgaattgctattaaataatggcactccttggtggtcattctatgatacaaacccatcagatttggcaggctgtcaagggctgaatggtcccatggctatagttgtttctgaggagacacctcagggcattattggcgaaacactcagtaaatttagcatatggagtttatatattacttttgttctagctgttgcgagatttattaggcttcagtgctcagacttgagaatgagaataccatatgagaaccttccgtcatgtgacaggctacttgacatctgtgaaggaatatatgcagcaagagctgaaggagagttagaagtggaagaagttctgtattggacattggtaaacatctatagatcaccacatatgctgcttgaatacacaaagcctgactagggcacccgttctgctaaggaagccattctgcaaaaaaattccatgacaaaaaacgtgcaaataggctttgtagttgtagttcgtttttgctaacatgtatacggttgaccattatttttggagaagtatacatcaaagtttcattgtgaaagttatctcatgctactaaaatgtgttaagaaagttgcgaatgaagatgtaatccatgtcatcctaatcaaaatgtctt

SEQ ID NO: 34577 - DNA, 2863 bp, Zea Mays
  misc_feature (1)..(2): n is a, c, g, or t
nnactccaatgagcatcatgcagaaagtgacatctatgatgttgttgaaagtcagagggaaacacaagatgggcagcttccaagaacacattcagttccagataccacatggactaaagcgaaatcaagcatgccaattggtgtgatttttcagtatatatggtatcagatgcgaagtaattatgattatgtttgctattgctgttttattctggttttcatgtggaattttagtttgttatccatggcctaccttggggcacttttcttatatgctctttgcgtgaactatggcccaagttacttgttttgggtcatcattctgatctacaccgagagctcgatcactgccaaagatggtgaatgggttccggtaacagaattcagctttcttagtgcaaggaacaacattgaagagaaacactgtgtagcttacagttggagagagaagctaaaaagtttgcccttgcctgtttttgatctcataaggatgattgttagaggcttatctagatactggatgtcattaacacatggagctgaatctcctccatattttgtgcaagttacaatggaggtaagccattggccagaagatggaatccagccagagaggatagagtctgccataaatagggtgcttgctattgctcatgaagaaagatgtcaggcaaacttgccttcctcttgccactgttgtagtaaagtccggattcaaagtattgaaaaaagcaaagaaaattgtaatatggctcttgctgtactagaagttgtttatgctgctcctgtagagtgccaatctaagggatggcacaaatctctcactccagcagctgatgtagaaagagagattcatgaatcacagaaagcaggattttttgaagaaataaattttccttacccgatcgtctcggtgattggtgggggtaaaagagagatcgatctttatgcatattattttggcgccgacttggcagttttcttccttgttgcaatgttctatcaatctatcctaaaaaataagagtgaattcttggaagtttaccagctggaggatcagttcccaaaagaatttgttttcatccttatggttctctttttcttgatagtggttgaccgcattatatatctttggtcctttgctaccggcaaagttgttttctatctttttaaccttgtgcttttcacgtattctgtcactgaatatgcttggggaacggagctagctcacagggatattggaggacttgtactacgtgcaatctaccttacaaaatcaatttccctagcactgcaagctttacagatcagatatggtattcctaacaaaagcaacctatataggcagttcttgactagcaaagttactcaagtgaattacttgggcttccgtctgtatcgtgctttaccattcttgtatgaattgcggtgtgtacttgattggtcttgcacaaccacatctttaacaatgtatgattggctgaagttggaggacatatatgcaagcttgtttcttgtgaaatgtgatacacttttgaacagagctaatcatcgtcagggagaaaaacaaacaaaaacgacgaaattctgcagtgggatatgcttattctttgtacttatttgtgttatttgggctcctatgttgatttatagtagtggtaaccctacaaatattgccaatcccattgttgatgtaagtgttaagattgatataaaggcacttggtgggagattaaacttgtttaagactactgcttgtgaaaaaataccttggaagtacttgaaggcctatgatgatgttgatcctctagattaccttggggcatacaatgtggatgacattcagctgatttgctgccagcctgatgcatcaacaatgtggttgatacctcctccagtccaaaacagattcatccagtcccttgaggagagagagatgctttttggaaagatggaacttattttaaattgggattttctcagagctagaccaaaagggaaggaattagtgcgatatgaatcccctattgaacactgcccgagtgtagatgatgttaaacgagtgcttaatggaactgcaaacagcttcagtataattgatgcttacccaaggtactttcgagttactggatcaggtgaagtccggcgattagaagcagcgatagattcagtaagtggcgaattgctattaaataatggcactccttggtggtcattctatgatacaaacccatcagatttggcaggctgtcaagggctgaatggtcccatggctatagttgtttctgaggagacacctcagggcattattggcgaaacactcagtaaatttagcatatggagtttatatattacttttgttctagctgttgcgagatttattaggcttcagtgctcagacttgagaatgagaataccatatgagaaccttccgtcatgtgacagcaagagctgaaggagagttagaagtggaagaagttctgtattggacattggtaaacatctatagatcaccacatatgctgcttgaatacacaaagcctgactagggcacccgttctgctaaggaagccattctgcaaaaaaattccatgtaatgtagtaatgtacaagtagaacacttctttcctttgaggtcacaacgaagctaacttaatcctctcccccccttgtgtcaggacaaaaaacgtgcaaataggctttgtagttgtagttcgtttttgctaacatgtatacggttgaccattatttttggagaagtatacatcaaagtttcattgtgaaagttatctcatgctactaaaatgtgttaagaaagttgcgaatgaagatgtaatccatgtcatcctaatcaaaatgtctt

SEQ ID NO: 34578 - DNA, 2223 bp, Zea Mays
  misc_feature (1)..(2): n is a, c, g, or t
nnactccaatgagcatcatgcagaaagtgacatctatgatgttgttgaaagtcagagggaaacacaagatgggcagcttccaagaacacattcagttccagataccacatggactaaagcgaaatcaagcatgccaattggtgtgatttttcagtatatatggtatcagatgcgaagtaattatgattatgtttgctattgctgttttattctggttttcatgtggaattttagtttgttatccatggcctaccttggggcacttttcttatatgctctttgcgtgaactatggcccaagttacttgttttgggtcatcattctgatctacaccgaggtcaacattctgtcacagtatatatatcagattatcattcaacactgtggtttgaatatacatttacctcttcttcagagattaggtttccctgacaataaaataaaagcatcatttgtcgtcagcatattgcctctctttttagtctatatatccactctcttgcagagctcgatcactgccaaagatggtgaatgggttccggtaacagaattcagctttcttagtgcaaggaacaacattgaagagaaacactgtgtagcttacagttggagagagaagctaaaaagtttgcccttgcctgtttttgatctcataaggatgattgttagaggcttatctagatactggatgtcattaacacatggagctgaatctcctccatattttgtgcaagttacaatggaggtaagccattggccagaagatggaatccagccagagaggatagagtctgccataaatagggtgcttgctattgctcatgaagaaagatgtcaggcaaacttgccttcctcttgccactgttgtagtaaagtccggattcaaagtattgaaaaaagcaaagaaaattgtaatatggctcttgctgtactagaagttgtttatgctgctcctgtagagtgccaatctaagggatggcacaaatctctcactccagcagctgatgtagaaagagagattcatgaatcacagaaagcaggattttttgaagaaataaattttccttacccgatcgtctcggtgattggtgggggtaaaagagagatcgatctttatgcatattattttggcgccgacttggcagttttcttccttgttgcaatgttctatcaatctatcctaaaaaataagagtgaattcttggaagtttaccagctggaggatcagttcccaaaagaatttgttttcatccttatggtgagctaatttactgttttagttaagtttcatcttatgagatgttttccttattgattgccaaacctcttgcaggttctctttttcttgatagtggttgaccgcattatatatctttggtcctttgctaccggcaaagttgttttctatctttttaaccttgtgcttttcacgtattctgtcactgaatatgcttggggaacggagctagctcacagggatattggaggacttgtactacgtgcaatctaccttacaaaatcaatttccctagcactgcaagctttacagatcagatatggtattcctaacaaaagcaacctatataggcagttcttgactagcaaagttactcaagtgaattacttgggcttccgtctgtatcgtgctttaccattcttgtatgaattgcggtgtgtacttgattggtcttgcacaaccacatctttaacaatgtatgattggctgaagttggaggacatatatgcaagcttgtttcttgtgaaatgtgatacacttttgaacagagctaatcatcgtcagggagaaaaacaaacaaaaacgacgaaattctgcagtgggatatgcttattctttgtacttatttgtgttatttgggctcctatgttgatagattcagtaagtggcgaattgctattaaataatggcactccttggtggtcattctatgatacaaacccatcagatttggcaggctgtcaagggctgaatggtcccatggctatagttgtttctgaggagacacctcagggcattattggcgaaacactcagtaaatttagcatatggagtttatatattacttttgttctagctgttgcgagatttattaggcttcagtgctcagacttgagaatgagaataccatatgagaaccttccgtcatgtgacaggacctactaaacaagagttgagaaagggacataatttggaccaagtatttt

SEQ ID NO: 34579 - DNA, 732 bp, Zea Mays
  misc_feature (732)..(732): n is a, c, g, or t
ataattgctgatgatcctcgaatgctgattagctactatgttgtgtttatattttcctcttttaagcttcggtctgatcacttttcgagcttctcagactcggacacatatcggcagatgatgtcccaaaggaaaaatgcagtagtatggagggacctctcactggaaacaaaaagcttttggacattccttgactatgtgcggctttatgcctattgccatttattggacatagttttggcactaattgcaattaccggtactctagagtatgatgttctgcaccttggttatctcggatttgctctggttttctttagaatgagacttgaaatcttgaagaagaagaataggattttcaagtttctacggatgtataattttggtctcattgttttgtcacttgcttatcaatctccttatgttgggcaatttagctctggcaagtgcgatcaaattgactacctatatgagataattggattatacaaatatgactatgggtttaagataacatcacggtcagcttttgttgagatagtaatcttcctattggtatctgttcaatcatacatctttagctctagtgagttcgattatgtgtcaagatatcttgaagcagagcaaattggtgccatggtccgtgagcaggaaaaaaaagctttaaagaaaactgagcagctgcatcatcttcgcaggtctgaggagcataaacgtcagcggaatatgcan

SEQ ID NO: 34580 - DNA, 3405 bp, Zea Mays
  misc_feature (3405)..(3405): n is a, c, g, or t
atcacttcaaaaagtaggaagctttactgagttctgacttctcgttatccgaaagatctttaccttctaatactggtgcttgtctgcttactgtagttgtcatcagcgaaacgagacatacaggaaatgggttcacttatatctctagaaaatgatagcttaacagaggaccttctgccttctagaaatgcgtttttggtccgccaatctcgatctggcagaaggcatggaaacatattactgagaggatcagttttccgaactttcagcattaatttcttcacttatggattcccggtcttgctgcttgccctttccttctggagtttcaacttcactagtatttgtgcttttggtctcctagcatacgttgggtacattttatatgcttttccttctttgttccaaatgcatcggctgaattggtcacttctagtgttcattctgctttgggcagccagcacatatgtcttcaatgtggcattcacattcttcaacaaaagatttcaaaaggatatgatgatttgggagactgttgggctttggcactattctattcctggattatttttacttgcccaattctgccttggagtttttgtggcactgtgtaatcttgttaacaattctgtttttctttacttgacttctgaagggggtccttcaacaagtgatgatcacctcattgatgagaaggaagatacaatggttctgattgtagcaacaatagcatggggtctacgcaaactttcacgtgcaattactttaacattactctttctacttgtgatgaaacgaggatttattcatgctgtttacatgtgctttttcttggtgtttctggtgaatcattcaatcgacaagagactgcgccagatcttagtattgttttgtgaggttcatttttcgatactgtacattctccagcttgatctagtgtccagtgctctggagcgcagtggttcattaacaatggaggtactctcacagtctctcaaataatgctacagcaaaggatttcatggagataggctcaatagtttgcttctgtgctgtgcatagccatggttttaagatgcttttttcattatcggcggttcttcggcatacaccttgtccacctgttggattcactattctaaaggctggtttgaacaagtcagttctactgtcagtttatagctcgcaaaattcacgagacggtgaagaccaccgtaatttacatgagaaaaaaatcgcatcatatctgagtaaaattggtcagaaatttctcttagtgtaccgctcatatggaacttatgtggcttttctcacaatacttttgactctatacttggtgacccctaattatatatcatttggttacctatttttccttctattttggattattggaaggcagcttgtggagaaaacaaaaaggcgactgtggtttcctctaaaagtatatgctacggttgtttttatttttacctacagcctgagtgtttcaccgatctttgcagaatcagtctcaaagttccttaaactataccctgatctgggatttgaccctgaagcttctttgctggaaaatgtttggcaatcattggccattctagtcgtaatgcaactttacagttatgaacgaagacaaaacagtgacaagaactttggtgtatctgatgcttcagaatctggacttctggggttcctaagaaggtttctaatttggcacagcgacaagatattatcagtttgtgtgttttatgcttgcttatcatcaatcagtttatctggcctaatttacctgttagggcttattgtgttttctacgttaccaaaagtttctcgaattccttccaaggtttaccttgtctacactggtttgcttgctgcatctgaatatctatttcaaatggtgtgcaaacctgcacagatgtgtcctcatcagcacttctatggtttgtctgtgtttcttggtctgaaatactatgattctgggttttggggtatcgaatacaggcttaggggaaaagttttagtgattgtggcctgtaccattcagtataatgttttccattggctagatttgatgccaacatctctagtacataagggtaaatgggaagagccctgtcaactttttatctcttccaacccaccttatagtcctgtcagaagcaacgaagaaagtcattcatctaataggtttacttcattgttttctaaagttcaaggtcttataggtagtagttcaagttcaagctcatcagtgggtccaggcagcattcaccagaaattagagtatgttgataatgccatcgaaggctcagatgaggacaaaagacactcatttgcaaagatttggggattgtcaaaagaaagccacaagtgggacaagaaaagggttatttttctgagaagagaaagattcgaaacccagaagacaacattcaaatgttacatgaaattctggatagaaaatcttttcaaactgcgagagatctaatccagaaattgtggcccctttttgtgtttctgtttgcttctgtcttaatacttgaatatgttgctctttggaatgatgagataacctggtatcatggtaccaatgacattgaagtccattgccgtgagtgctggaagaattcaaggattttttttgactactgctcaaaatgctggcttgggataattgctgatgatcctcgaatgctgattagctactatgttgtgtttatattttcctcttttaagcttcggtctgatcacttttcgagcttctcagactcggacacatatcggcagatgatgtcccaaaggaaaaatgcagtagtatggagggacctctcactggaaacaaaaagcttttggacattccttgactatgtgcggctttatgcctattgccatttattggacatagttttggcactaattgcaattaccggtactctagagtatgatgttctgcaccttggttatctcggatttgctctggttttctttagaatgagacttgaaatcttgaagaagaagaataggattttcaagtttctacggatgtataattttggtctcattgttttgtcacttgcttatcaatctccttatgttgggcaatttagctctggcaagtgcgatcaaattgactacctatatgagataattggattatacaaatatgactatgggtttaagataacatcacggtcagcttttgttgagatagtaatcttcctattggtatctgttcaatcatacatctttagctctagtgagttcgattatgtgtcaagatatcttgaagcagagcaaattggtgccatggtccgtgagcaggaaaaaaaagctttaaagaaaactgagcagctgcatcatcttcgcaggtctgaggagcataaacgtcagcggaatatgcan

SEQ ID NO: 34581 - DNA, 4386 bp, Zea Mays
  misc_feature (4386)..(4386): n is a, c, g, or t
ggtgcgccggcggcttcctgctgccgttgctgctcctggcagcaaagagaatatggagctttttttaggttacaggctctgaagaatgtgatgcctgatggtaagaaaagggaacatggtaggaagtggttagtatgtttaaaggttacaggctctgaggctctgaagaatgtgatgcctgatgcttctttacttgattggagcttggtttctcttattaatatggtcatcttctttgctattcgatttgctgttccaagaagaggtctttacacctggaggctgcacattgtattgtggtgtacaattatttactcagtccttgctattttagcacaagttgcgtttcatataatctggtacattgagggcaagggatggtctgtggctcattcttggtgggcgaagctggtgggtttagcaagggaccagccatgggaatcaccatcagttatctattttcttgcattacagctatctgctgcaggccttgctttggtcgaagtccttggaggaaggcttcaagattcttgctggttgaacttctcttttgaggttgagcaaataggttaccatttgcgggtagcatgctgcttattactgcctgctgctcagttagttgtcggtattagccatccttcatggatttcattaccgttctttgtatttagctgcattggccttgtggattggtccttaacaagtaactttcttggccttttccgatggtggaggttacttgagatatactcggtgttcagtattcttctgctttatctctaccagttacctatgaaatttccctatattgcgttagcatttgctgacttcattggtcttttcaaaatttcctcgaaatcagaatggcctgagctgtcttctggaatttctcttctggtatattatttcatgttgtcatcagcgaaacgagacatacaggaaatgggttcacttatatctctagaaaatgatagcttaacagaggaccttctgccttctagaaatgcgtttttggtccgccaatctcgatctggcagaaggcatggaaacatattactgagaggatcagttttccgaactttcagcattaatttcttcacttatggattcccggtcttgctgcttgccctttccttctggagtttcaacttcactagtatttgtgcttttggtctcctagcatacgttgggtacattttatatgcttttccttctttgttccaaatgcatcggctgaattggtcacttctagtgttcattctgctttgggcagccagcacatatgtcttcaatgtggcattcacattcttcaacaaaagatttcaaaaggatatgatgatttgggagactgttgggctttggcactattctattcctggattatttttacttgcccaattctgccttggagtttttgtggcactgtgtaatcttgttaacaattctgtttttctttacttgacttctgaagggggtccttcaacaagtgatgatcacctcattgatgagaaggaagatacaatggttctgattgtagcaacaatagcatggggtctacgcaaactttcacgtgcaattactttaacattactctttctacttgtgatgaaacgaggatttattcatgctgtttacatgtgctttttcttggtgtttctggtgaatcattcaatcgacaagagactgcgccagatcttagtattgttttgtgaggttcatttttcgatactgtacattctccagcttgatctagtgtccagtgctctggagcgcagtggttcattaacaatggaggtactctcacagttaggtctctcaaataatgctacagcaaaggatttcatggagataggctcaatagtttgcttctgtgctgtgcatagccatggttttaagatgcttttttcattatcggcggttcttcggcatacaccttgtccacctgttggattcactattctaaaggctggtttgaacaagtcagttctactgtcagtttatagctcgcaaaattcacgagacggtgaagaccaccgtaatttacatgagaaaaaaatcgcatcatatctgagtaaaattggtcagaaatttctcttagtgtaccgctcatatggaacttatgtggcttttctcacaatacttttgactctatacttggtgacccctaattatatatcatttggttacctatttttccttctattttggattattggaaggcagcttgtggagaaaacaaaaaggcgactgtggtttcctctaaaagtatatgctacggttgtttttatttttacctacagcctgagtgtttcaccgatctttgcagaatcagtctcaaagttccttaaactataccctgatctgggatttgaccctgaagcttctttgctggaaaatgtttggcaatcattggccattctagtcgtaatgcaactttacagttatgaacgaagacaaaacagtgacaagaactttggtgtatctgatgcttcagaatctggacttctggggttcctaagaaggtttctaatttggcacagcgacaagatattatcagtttgtgtgttttatgcttgcttatcatcaatcagtttatctggcctaatttacctgttagggcttattgtgttttctacgttaccaaaagtttctcgaattccttccaaggtttaccttgtctacactggtttgcttgctgcatctgaatatctatttcaaatggtgtgcaaacctgcacagatgtgtcctcatcagcacttctatggtttgtctgtgtttcttggtctgaaatactatgattctgggttttggggtatcgaatacaggcttaggggaaaagttttagtgattgtggcctgtaccattcagtataatgttttccattggctagatttgatgccaacatctctagtacataagggtaaatgggaagagccctgtcaactttttatctcttccaacccaccttatagtcctgtcagaagcaacgaagaaagtcattcatctaataggtttacttcattgttttctaaagttcaaggtcttataggtagtagttcaagttcaagctcatcagtgggtccaggcagcattcaccagaaattagagtatgttgataatgccatcgaaggctcagatgaggacaaaagacactcatttgcaaagatttggggattgtcaaaagaaagccacaagtgggacaagaaaagggttatttttctgagaagagaaagattcgaaacccagaagacaacattcaaatgttacatgaaattctggatagaaaatcttttcaaactgcgaggtctggaaattaacatgattgtgttactattagcaagctttacactgttgaatgttgtatcgatcttctatatcatgtgccttgtcctttgcattcttatgaacagagatctaatccagaaattgtggcccctttttgtgtttctgtttgcttctgtcttaatacttgaatatgttgctctttggaatgatgagataacctggtatcatggtaccaatgacattgaagtccattgccgtgagtgctggaagaattcaaggattttttttgactactgctcaaaatgctggcttgttcggtacatcagaatatttatttaccaactatttctacatgaacatgatccagggataattgctgatgatcctcgaatgctgattagctactatgttgtgtttatattttcctcttttaagcttcggtctgatcacttttcgagcttctcagactcggacacatatcggcagatgatgtcccaaaggaaaaatgcagtagtatggagggacctctcactggaaacaaaaagcttttggacattccttgactatgtgcggctttatgcctattgccatttattggacatagttttggcactaattgcaattaccggtactctagagtatgatgttctgcaccttggttatctcggatttgctctggttttctttagaatgagacttgaaatcttgaagaagaagaataggattttcaagtttctacggatgtataattttggtctcattgttttgtcacttgcttatcaatctccttatgttgggcaatttagctctggcaagtgcgatcaaattgactacctatatgagataattggattatacaaatatgactatgggtttaagataacatcacggtcagcttttgttgagatagtaatcttcctattggtatctgttcaatcatacatctttagctctagtgagttcgattatgtgtcaagatatcttgaagcagagcaaattggtgccatggtccgtgagcaggaaaaaaaagctttaaagaaaactgagcagctgcatcatcttcgcaggtctgaggagcataaacgtcagcggaatatgcan

SEQ ID NO: 34582 - DNA, 4620 bp, Zea Mays
  misc_feature (4620)..(4620): n is a, c, g, or t
cacctctacggaaatggtctacgggctaaggcctaggatcgcggggccacacgagacggagcaatcgaatcacgggcgagctcgacggtcggtgcaggcagctgcacccagtccggctccggcccgtgcccgtcacgactcacgcgagacagcgaaacttttcccagcggcgaagcggagatcggagaaggaaccccaccctgcccagtgagatcttctcctagcagccgcaatctctcctccctcggcgcggaggacgagcagcgctgtagattcgatcgtgtgtgctcccgagatggcgatcgggtcggactaagccgaagcgaaagcgagagccgctgcccccgtcgtcactcgatgaccaggcggacgggtgggtgcgccggcggcttcctgctgccgttgctgctcctggcagcttctttacttgattggagcttggtttctcttattaatatggtcatcttctttgctattcgatttgctgttccaagaagaggtctttacacctggaggctgcacattgtattgtggtgtacaattatttactcagtccttgctattttagcacaagttgcgtttcatataatctggtacattgagggcaagggatggtctgtggctcattcttggtgggcgaagctggtgggtttagcaagggaccagccatgggaatcaccatcagttatctattttcttgcattacagctatctgctgcaggccttgctttggtcgaagtccttggaggaaggcttcaagattcttgctggttgaacttctcttttgaggttgagcaaataggttaccatttgcgggtagcatgctgcttattactgcctgctgctcagttagttgtcggtattagccatccttcatggatttcattaccgttctttgtatttagctgcattggccttgtggattggtccttaacaagtaactttcttggccttttccgatggtggaggttacttgagatatactcggtgttcagtattcttctgctttatctctaccagttacctatgaaatttccctatattgcgttagcatttgctgacttcattggtcttttcaaaatttcctcgaaatcagaatggcctgagctgtcttctggaatttctcttctggtatattatttcatgttgtcatcagcgaaacgagacatacaggaaatgggttcacttatatctctagaaaatgatagcttaacagaggaccttctgccttctagaaatgcgtttttggtccgccaatctcgatctggcagaaggcatggaaacatattactgagaggatcagttttccgaactttcagcattaatttcttcacttatggattcccggtcttgctgcttgccctttccttctggagtttcaacttcactagtatttgtgcttttggtctcctagcatacgttgggtacattttatatgcttttccttctttgttccaaatgcatcggctgaattggtcacttctagtgttcattctgctttgggcagccagcacatatgtcttcaatgtggcattcacattcttcaacaaaagatttcaaaaggatatgatgatttgggagactgttgggctttggcactattctattcctggattatttttacttgcccaattctgccttggagtttttgtggcactgtgtaatcttgttaacaattctgtttttctttacttgacttctgaagggggtccttcaacaagtgatgatcacctcattgatgagaaggaagatacaatggttctgattgtagcaacaatagcatggggtctacgcaaactttcacgtgcaattactttaacattactctttctacttgtgatgaaacgaggatttattcatgctgtttacatgtgctttttcttggtgtttctggtgaatcattcaatcgacaagagactgcgccagatcttagtattgttttgtgaggttcatttttcgatactgtacattctccagcttgatctagtgtccagtgctctggagcgcagtggttcattaacaatggaggtactctcacagttaggtctctcaaataatgctacagcaaaggatttcatggagataggctcaatagtttgcttctgtgctgtgcatagccatggttttaagatgcttttttcattatcggcggttcttcggcatacaccttgtccacctgttggattcactattctaaaggctggtttgaacaagtcagttctactgtcagtttatagctcgcaaaattcacgagacggtgaagaccaccgtaatttacatgagaaaaaaatcgcatcatatctgagtaaaattggtcagaaatttctcttagtgtaccgctcatatggaacttatgtggcttttctcacaatacttttgactctatacttggtgacccctaattatatatcatttggttacctatttttccttctattttggattattggaaggcagcttgtggagaaaacaaaaaggcgactgtggtttcctctaaaagtatatgctacggttgtttttatttttacctacagcctgagtgtttcaccgatctttgcagaatcagtctcaaagttccttaaactataccctgatctgggatttgaccctgaagcttctttgctggaaaatgtttggcaatcattggccattctagtcgtaatgcaactttacagttatgaacgaagacaaaacagtgacaagaactttggtgtatctgatgcttcagaatctggacttctggggttcctaagaaggtttctaatttggcacagcgacaagatattatcagtttgtgtgttttatgcttgcttatcatcaatcagtttatctggcctaatttacctgttagggcttattgtgttttctacgttaccaaaagtttctcgaattccttccaaggtttaccttgtctacactggtttgcttgctgcatctgaatatctatttcaaatggtgtgcaaacctgcacagatgtgtcctcatcagcacttctatggtttgtctgtgtttcttggtctgaaatactatgattctgggttttggggtatcgaatacaggcttaggggaaaagttttagtgattgtggcctgtaccattcagtataatgttttccattggctagatttgatgccaacatctctagtacataagggtaaatgggaagagccctgtcaactttttatctcttccaacccaccttatagtcctgtcagaagcaacgaagaaagtcattcatctaataggtttacttcattgttttctaaagttcaaggtcttataggtagtagttcaagttcaagctcatcagtgggtccaggcagcattcaccagaaattagagtatgttgataatgccatcgaaggctcagatgaggacaaaagacactcatttgcaaagatttggggattgtcaaaagaaagccacaagtgggacaagaaaagggttatttttctgagaagagaaagattcgaaacccagaagacaacattcaaatgttacatgaaattctggatagaaaatcttttcaaactgcgaggtctggaaattaacatgattgtgttactattagcaagctttacactgttgaatgttgtatcgatcttctatatcatgtgccttgtcctttgcattcttatgaacagagatctaatccagaaattgtggcccctttttgtgtttctgtttgcttctgtcttaatacttgaatatgttgctctttggaatgatgagataacctggtatcatggtaccaatgacattgaagtccattgccgtgagtgctggaagaattcaaggattttttttgactactgctcaaaatgctggcttgttcggtacatcagaatatttatttaccaactatttctacatgaacatgatccagggataattgctgatgatcctcgaatgctgattagctactatgttgtgtttatattttcctcttttaagcttcggtctgatcacttttcgagcttctcagactcggacacatatcggcagatgatgtcccaaaggaaaaatgcagtagtatggagggacctctcactggaaacaaaaagcttttggacattccttgactatgtgcggctttatgcctattgccatttattggacatagttttggcactaattgcaattaccggtactctagagtatgatgttctgcaccttggttatctcggatttgctctggttttctttagaatgagacttgaaatcttgaagaagaagaataggattttcaagtttctacggatgtataattttggtctcattgttttgtcacttgcttatcaatctccttatgttgggcaatttagctctggcaagtgcgatcaaattgactacctatatgagataattggattatacaaatatgactatgggtttaagataacatcacggtcagcttttgttgagatagtaatcttcctattggtatctgttcaatcatacatctttagctctagtgagttcgattatgtgtcaagatatcttgaagcagagcaaattggtgccatggtccgtgagcaggaaaaaaaagctttaaagaaaactgagcagctgcatcatcttcgcaggtctgaggagcataaacgtcagcggaatatgcan

SEQ ID NO: 34583 - DNA, 4552 bp, Zea Mays
  misc_feature (4552)..(4552): n is a, c, g, or t
cacctctacggaaatggtctacgggctaaggcctaggatcgcggggccacacgagacggagcaatcgaatcacgggcgagctcgacggtcggtgcaggcagctgcacccagtccggctccggcccgtgcccgtcacgactcacgcgagacagcgaaacttttcccagcggcgaagcggagatcggagaaggaaccccaccctgcccagtgagatcttctcctagcagccgcaatctctcctccctcggcgcggaggacgagcagcgctgtagattcgatcgtgtgtgctcccgagatggcgatcgggtcggactaagccgaagcgaaagcgagagccgctgcccccgtcgtcactcgatgaccaggcggacgggtgggtgcgccggcggcttcctgctgccgttgctgctcctggcagcttctttacttgattggagcttggtttctcttattaatatggtcatcttctttgctattcgatttgctgttccaagaagaggtctttacacctggaggctgcacattgtattgtggtgtacaattatttactcagtccttgctattttagcacaagttgcgtttcatataatctggtacattgagggcaagggatggtctgtggctcattcttggtgggcgaagctggtgggtttagcaagggaccagccatgggaatcaccatcagttatctattttcttgcattacagctatctgctgcaggccttgctttggtcgaagtccttggaggaaggcttcaagattcttgctggttgaacttctcttttgaggttgagcaaataggttaccatttgcgggtagcatgctgcttattactgcctgctgctcagttagttgtcggtattagccatccttcatggatttcattaccgttctttgtatttagctgcattggccttgtggattggtccttaacaagtaactttcttggccttttccgatggtggaggttacttgagatatactcggtgttcagtattcttctgctttatctctaccagttacctatgaaatttccctatattgcgttagcatttgctgacttcattggtcttttcaaaatttcctcgaaatcagaatggcctgagctgtcttctggaatttctcttctggtatattatttcatgttgtcatcagcgaaacgagacatacaggaaatgggttcacttatatctctagaaaatgatagcttaacagaggaccttctgccttctagaaatgcgtttttggtccgccaatctcgatctggcagaaggcatggaaacatattactgagaggatcagttttccgaactttcagcattaatttcttcacttatggattcccggtcttgctgcttgccctttccttctggagtttcaacttcactagtatttgtgcttttggtctcctagcatacgttggccagcacatatgtcttcaatgtggcattcacattcttcaacaaaagatttcaaaaggatatgatgatttgggagactgttgggctttggcactattctattcctggattatttttacttgcccaattctgccttggagtttttgtggcactgtgtaatcttgttaacaattctgtttttctttacttgacttctgaagggggtccttcaacaagtgatgatcacctcattgatggactgttctttacagagaaggaagatacaatggttctgattgtagcaacaatagcatggggtctacgcaaactttcacgtgcaattactttaacattactctttctacttgtgatgaaacgaggatttattcatgctgtttacatgtgctttttcttggtgtttctggtgaatcattcaatcgacaagagactgcgccagatcttagtattgttttgtgaggttcatttttcgatactgtacattctccagcttgatctagtgtccagtgctctggagcgcagtggttcattaacaatggaggtactctcacagttaggtctctcaaataatgctacagcaaaggatttcatggagataggctcaatagtttgcttctgtgctgtgcatagccatggttttaagatgcttttttcattatcggcggttcttcggcatacaccttgtccacctgttggattcactattctaaaggctggtttgaacaagtcagttctactgtcagtttatagctcgcaaaattcacgagacggtgaagaccaccgtaatttacatgagaaaaaaatcgcatcatatctgagtaaaattggtcagaaatttctcttagtgtaccgctcatatggaacttatgtggcttttctcacaatacttttgactctatacttggtgacccctaattatatatcatttggttacctatttttccttctattttggattattggaaggcagcttgtggagaaaacaaaaaggcgactgtggtttcctctaaaagtatatgctacggttgtttttatttttacctacagcctgagtgtttcaccgatctttgcagaatcagtctcaaagttccttaaactataccctgatctgggatttgaccctgaagcttctttgctggaaaatgtttggcaatcattggccattctagtcgtaatgcaactttacagttatgaacgaagacaaaacagtgacaagaactttggtgtatctgatgcttcagaatctggacttctggggttcctaagaaggtttctaatttggcacagcgacaagatattatcagtttgtgtgttttatgcttgcttatcatcaatcagtttatctggcctaatttacctgttagggcttattgtgttttctacgttaccaaaagtttctcgaattccttccaaggtttaccttgtctacactggtttgcttgctgcatctgaatatctatttcaaatggtgtgcaaacctgcacagatgtgtcctcatcagcacttctatggtttgtctgtgtttcttggtctgaaatactatgattctgggttttggggtatcgaatacaggcttaggggaaaagttttagtgattgtggcctgtaccattcagtataatgttttccattggctagatttgatgccaacatctctagtacataagggtaaatgggaagagccctgtcaactttttatctcttccaacccaccttatagtcctgtcagaagcaacgaagaaagtcattcatctaataggtttacttcattgttttctaaagttcaaggtcttataggtagtagttcaagttcaagctcatcagtgggtccaggcagcattcaccagaaattagagtatgttgataatgccatcgaaggctcagatgaggacaaaagacactcatttgcaaagatttggggattgtcaaaagaaagccacaagtgggacaagaaaagggttatttttctgagaagagaaagattcgaaacccagaagacaacattcaaatgttacatgaaattctggatagaaaatcttttcaaactgcgaggtctggaaattaacatgattgtgttactattagcaagctttacactgttgaatgttgtatcgatcttctatatcatgtgccttgtcctttgcattcttatgaacagagatctaatccagaaattgtggcccctttttgtgtttctgtttgcttctgtcttaatacttgaatatgttgctctttggaatgatgagataacctggtatcatggtaccaatgacattgaagtccattgccgtgagtgctggaagaattcaaggattttttttgactactgctcaaaatgctggcttgttcggtacatcagaatatttatttaccaactatttctacatgaacatgatccagggataattgctgatgatcctcgaatgctgattagctactatgttgtgtttatattttcctcttttaagcttcggtctgatcacttttcgagcttctcagactcggacacatatcggcagatgatgtcccaaaggaaaaatgcagtagtatggagggacctctcactggaaacaaaaagcttttggacattccttgactatgtgcggctttatgcctattgccatttattggacatagttttggcactaattgcaattaccggtactctagagtatgatgttctgcaccttggttatctcggatttgctctggttttctttagaatgagacttgaaatcttgaagaagaagaataggattttcaagtttctacggatgtataattttggtctcattgttttgtcacttgcttatcaatctccttatgttgggcaatttagctctggcaagtgcgatcaaattgactacctatatgagataattggattatacaaatatgactatgggtttaagataacatcacggtcagcttttgttgagatagtaatcttcctattggtatctgttcaatcatacatctttagctctagtgagttcgattatgtgtcaagatatcttgaagcagagcaaattggtgccatggtccgtgagcaggaaaaaaaagctttaaagaaaactgagcagctgcatcatcttcgcaggtctgaggagcataaacgtcagcggaatatgcan

SEQ ID NO: 34584 - DNA, 4444 bp, Zea Mays
  misc_feature (4444)..(4444): n is a, c, g, or t
cacctctacggaaatggtctacgggctaaggcctaggatcgcggggccacacgagacggagcaatcgaatcacgggcgagctcgacggtcggtgcaggcagctgcacccagtccggctccggcccgtgcccgtcacgactcacgcgagacagcgaaacttttcccagcggcgaagcggagatcggagaaggaaccccaccctgcccagtgagatcttctcctagcagccgcaatctctcctccctcggcgcggaggacgagcagcgctgtagattcgatcgtgtgtgctcccgagatggcgatcgggtcggactaagccgaagcgaaagcgagagccgctgcccccgtcgtcactcgatgaccaggcggacgggtgggtgcgccggcggcttcctgctgccgttgctgctcctggcagcttctttacttgattggagcttggtttctcttattaatatggtcatcttctttgctattcgatttgctgttccaagaagaggtctttacacctggaggctgcacattgtattgtggtgtacaattatttactcagtccttgctattttagcacaagttgcgtttcatataatctggtacattgagggcaagggatggtctgtggctcattcttggtgggcgaagctggtgggtttagcaagggaccagccatgggaatcaccatcagttatctattttcttgcattacagctatctgctgcaggccttgctttggtcgaagtccttggaggaaggcttcaagattcttgctggttgaacttctcttttgaggttgagcaaataggttaccatttgcgggtagcatgctgcttattactgcctgctgctcagttagttgtcggtattagccatccttcatggatttcattaccgttctttgtatttagctgcattggccttgtggattggtccttaacaagtaactttcttggccttttccgatggtggaggttacttgagatatactcggtgttcagtattcttctgctttatctctaccagttacctatgaaatttccctatattgcgttagcatttgctgacttcattggtcttttcaaaatttcctcgaaatcagaatggcctgagctgtcttctggaatttctcttctggtatattatttcatgttgtcatcagcgaaacgagacatacaggaaatgggttcacttatatctctagaaaatgatagcttaacagaggaccttctgccttctagaaatgcgtttttggtccgccaatctcgatctggcagaaggcatggaaacatattactgagaggatcagttttccgaactttcagcattaatttcttcacttatggattcccggtcttgctgcttgccctttccttctggagtttcaacttcactagtatttgtgcttttggtctcctagcatacgttgggtacattttatatgcttttccttctttgttccaaatgcatcggctgaattggtcacttctagtgttcattctgctttgggcagccagcacatatgtcttcaatgtggcattcacattcttcaacaaaagatttcaaaaggatatgatgatttgggagactgttgggctttggcactattctattcctggattatttttacttgcccaattctgccttggagtttttgtggcactgtgtaatcttgttaacaattctgtttttctttacttgacttctgaagggggtccttcaacaagtgatgatcacctcattgatgagaaggaagatacaatggttctgattgtagcaacaatagcatggggtctacgcaaactttcacgtgcaattactttaacattactctttctacttgtgatgaaacgaggatttattcatgctgtttacatgtgctttttcttggtgtttctggtgaatcattcaatcgacaagagactgcgccagatcttagtattgttttgtgaggttcatttttcgatactgtacattctccagcttgatctagtgtccagtgctctggagcgcagtggttcattaacaatggaggtctctcaaataatgctacagcaaaggatttcatggagataggctcaatagtttgcttctgtgctgtgcatagccatggttttaagatgcttttttcattatcggcggttcttcggcatacaccttgtccacctgttggattcactattctaaaggctggtttgaacaagtcagttctactgtcagtttatagctcgcaaaattcacgagacggtgaagaccaccgtaatttacatgagaaaaaaatcgcatcatatctgagtaaaattggtcagaaatttctcttagtgtaccgctcatatggaacttatgtggcttttctcacaatacttttgactctatacttggtgacccctaattatatatcatttggttacctatttttccttctattttggattattggaaggcagcttgtggagaaaacaaaaaggcgactgtggtttcctctaaaagtatatgctacggttgtttttatttttacctacagcctgagtgtttcaccgatctttgcagaatcagtctcaaagttccttaaactataccctgatctgggatttgaccctgaagcttctttgctggaaaatgtttggcaatcattggccattctagtcgtaatgcaactttacagttatgaacgaagacaaaacagtgacaagaactttggtgtatctgatgcttcagaatctggacttctggggttcctaagaaggtttctaatttggcacagcgacaagatattatcagtttgtgtgttttatgcttgcttatcatcaatcagtttatctggcctaatttacctgttagggcttattgtgttttctacgttaccaaaagtttctcgaattccttccaaggtttaccttgtctacactggtttgcttgctgcatctgaatatctatttcaaatggtgtgcaaacctgcacagatgtgtcctcatcagcacttctatggtttgtctgtgtttcttggtctgaaatactatgattctgggttttggggtatcgaatacaggcttaggggaaaagttttagtgattgtggcctgtaccattcagtataatgttttccattggctagatttgatgccaacatctctagtacataagggtaaatgggaagagccctgtcaactttttatctcttccaacccaccttatagtcctgtcagaagcaacgaagaaagtcattcatctaataggtttacttcattgttttctaaagttcaaggtcttataggtagtagttcaagttcaagctcatcagtgggtccaggcagcattcaccagaaattagagtatgttgataatgccatcgaaggctcagatgaggacaaaagacactcatttgcaaagatttggggattgtcaaaagaaagccacaagtgggacaagaaaagggttatttttctgagaagagaaagattcgaaacccagaagacaacattcaaatgttacatgaaattctggatagaaaatcttttcaaactgcgagagatctaatccagaaattgtggcccctttttgtgtttctgtttgcttctgtcttaatacttgaatatgttgctctttggaatgatgagataacctggtatcatggtaccaatgacattgaagtccattgccgtgagtgctggaagaattcaaggattttttttgactactgctcaaaatgctggcttgggataattgctgatgatcctcgaatgctgattagctactatgttgtgtttatattttcctcttttaagcttcggtctgatcacttttcgagcttctcagactcggacacatatcggcagatgatgtcccaaaggaaaaatgcagtagtatggagggacctctcactggaaacaaaaagcttttggacattccttgactatgtgcggctttatgcctattgccatttattggacatagttttggcactaattgcaattaccggtactctagagtatgatgttctgcaccttggttatctcggatttgctctggttttctttagaatgagacttgaaatcttgaagaagaagaataggattttcaagtttctacggatgtataattttggtctcattgttttgtcacttgcttatcaatctccttatgttgggcaatttagctctggcaagtgcgatcaaattgactacctatatgagataattggattatacaaatatgactatgggtttaagataacatcacggtcagcttttgttgagatagtaatcttcctattggtatctgttcaatcatacatctttagctctagtgagttcgattatgtgtcaagatatcttgaagcagagcaaattggtgccatggtccgtgagcaggaaaaaaaagctttaaagaaaactgagcagctgcatcatcttcgcaggtctgaggagcataaacgtcagcggaatatgcan

SEQ ID NO: 34585 - DNA, 4338 bp, Zea Mays
  misc_feature (4338)..(4338): n is a, c, g, or t
cacctctacggaaatggtctacgggctaaggcctaggatcgcggggccacacgagacggagcaatcgaatcacgggcgagctcgacggtcggtgcaggcagctgcacccagtccggctccggcccgtgcccgtcacgactcacgcgagacagcgaaacttttcccagcggcgaagcggagatcggagaaggaaccccaccctgcccagtgagatcttctcctagcagccgcaatctctcctccctcggcgcggaggacgagcagcgctgtagattcgatcgtgtgtgctcccgagatggcgatcgggtcggactaagccgaagcgaaagcgagagccgctgcccccgtcgtcactcgatgaccaggcggacgggtgggtgcgccggcggcttcctgctgccgttgctgctcctggcagcttctttacttgattggagcttggtttctcttattaatatggtcatcttctttgctattcgatttgctgttccaagaagaggtctttacacctggaggctgcacattgtattgtggtgtacaattatttactcagtccttgctattttagcacaagttgcgtttcatataatctggtacattgagggcaagggatggtctgtggctcattcttggtgggcgaagctggtgggtttagcaagggaccagccatgggaatcaccatcagttatctattttcttgcattacagctatctgctgcaggccttgctttggtcgaagtccttggaggaaggcttcaagattcttgctggttgaacttctcttttgaggttgagcaaataggttaccatttgcgggtagcatgctgcttattactgcctgctgctcagttagttgtcggtattagccatccttcatggatttcattaccgttctttgtatttagctgcattggccttgtggattggtccttaacaagtaactttcttggccttttccgaatggcctgagctgtcttctggaatttctcttctggtatattatttcatgttgtcatcagcgaaacgagacatacaggaaatgggttcacttatatctctagaaaatgatagcttaacagaggaccttctgccttctagaaatgcgtttttggtccgccaatctcgatctggcagaaggcatggaaacatattactgagaggatcagttttccgaactttcagcattaatttcttcacttatggattcccggtcttgctgcttgccctttccttctggagtttcaacttcactagtatttgtgcttttggtctcctagcatacgttgggtacattttatatgcttttccttctttgttccaaatgcatcggctgaattggtcacttctagtgttcattctgctttgggcagccagcacatatgtcttcaatgtggcattcacattcttcaacaaaagatttcaaaaggatatgatgatttgggagactgttgggctttggcactattctattcctggattatttttacttgcccaattctgccttggagtttttgtggcactgtgtaatcttgttaacaattctgtttttctttacttgacttctgaagggggtccttcaacaagtgatgatcacctcattgatggactgttctttacagagaaggaagatacaatggttctgattgtagcaacaatagcatggggtctacgcaaactttcacgtgcaattactttaacattactctttctacttgtgatgaaacgaggatttattcatgctgtttacatgtgctttttcttggtgtttctggtgaatcattcaatcgacaagagactgcgccagatcttagtattgttttgtgaggttcatttttcgatactgtacattctccagcttgatctagtgtccagtgctctggagcgcagtggttcattaacaatggaggtactctcacagttaggtctctcaaataatgctacagcaaaggatttcatggagataggctcaatagtttgcttctgtgctgtgcatagccatggttttaagatgcttttttcattatcggcggttcttcggcatacaccttgtccacctgttggattcactattctaaaggctggtttgaacaagtcagttctactgtcagtttatagctcgcaaaattcacgagacggtgaagaccaccgtaatttacatgagaaaaaaatcgcatcatatctgagtaaaattggtcagaaatttctcttagtgtaccgctcatatggaacttatgtggcttttctcacaatacttttgactctatacttggtgacccctaattatatatcatttggttacctatttttccttctattttggattattggaaggcagcttgtggagaaaacaaaaaggcgactgtggtttcctctaaaagtatatgctacggttgtttttatttttacctacagcctgagtgtttcaccgatctttgcagaatcagtctcaaagttccttaaactataccctgatctgggatttgaccctgaagcttctttgctggaaaatgtttggcaatcattggccattctagtcgtaatgcaactttacagttatgaacgaagacaaaacagtgacaagaactttggtgtatctgatgcttcagaatctggacttctggggttcctaagaaggtttctaatttggcacagcgacaagatattatcagtttgtgtgttttatgcttgcttatcatcaatcagtttatctggcctaatttacctgttagggcttattgtgttttctacgttaccaaaagtttctcgaattccttccaaggtttaccttgtctacactggtttgcttgctgcatctgaatatctatttcaaatggtgtgcaaacctgcacagatgtgtcctcatcagcacttctatggtttgtctgtgtttcttggtctgaaatactatgattctgggttttggggtatcgaatacaggcttaggggaaaagttttagtgattgtggcctgtaccattcagtataatgttttccattggctagatttgatgccaacatctctagtacataagggtaaatgggaagagccctgtcaactttttatctcttccaacccaccttatagtcctgtcagaagcaacgaagaaagtcattcatctaataggtttacttcattgttttctaaagttcaaggtcttataggtagtagttcaagttcaagctcatcagtgggtccaggcagcattcaccagaaattagagtatgttgataatgccatcgaaggctcagatgaggacaaaagacactcatttgcaaagatttggggattgtcaaaagaaagccacaagtgggacaagaaaagggttatttttctgagaagagaaagattcgaaacccagaagacaacattcaaatgttacatgaaattctggatagaaaatcttttcaaactgcgagagatctaatccagaaattgtggcccctttttgtgtttctgtttgcttctgtcttaatacttgaatatgttgctctttggaatgatgagataacctggtatcatggtaccaatgacattgaagtccattgccgtgagtgctggaagaattcaaggattttttttgactactgctcaaaatgctggcttgggataattgctgatgatcctcgaatgctgattagctactatgttgtgtttatattttcctcttttaagcttcggtctgatcacttttcgagcttctcagactcggacacatatcggcagatgatgtcccaaaggaaaaatgcagtagtatggagggacctctcactggaaacaaaaagcttttggacattccttgactatgtgcggctttatgcctattgccatttattggacatagttttggcactaattgcaattaccggtactctagagtatgatgttctgcaccttggttatctcggatttgctctggttttctttagaatgagacttgaaatcttgaagaagaagaataggattttcaagtttctacggatgtataattttggtctcattgttttgtcacttgcttatcaatctccttatgttgggcaatttagctctggcaagtgcgatcaaattgactacctatatgagataattggattatacaaatatgactatgggtttaagataacatcacggtcagcttttgttgagatagtaatcttcctattggtatctgttcaatcatacatctttagctctagtgagttcgattatgtgtcaagatatcttgaagcagagcaaattggtgccatggtccgtgagcaggaaaaaaaagctttaaagaaaactgagcagctgcatcatcttcgcaggtctgaggagcataaacgtcagcggaatatgcan

SEQ ID NO: 34586 - DNA, 4460 bp, Zea Mays
  misc_feature (4460)..(4460): n is a, c, g, or t
cacctctacggaaatggtctacgggctaaggcctaggatcgcggggccacacgagacggagcaatcgaatcacgggcgagctcgacggtcggtgcaggcagctgcacccagtccggctccggcccgtgcccgtcacgactcacgcgagacagcgaaacttttcccagcggcgaagcggagatcggagaaggaaccccaccctgcccagtgagatcttctcctagcagccgcaatctctcctccctcggcgcggaggacgagcagcgctgtagattcgatcgtgtgtgctcccgagatggcgatcgggtcggactaagccgaagcgaaagcgagagccgctgcccccgtcgtcactcgatgaccaggcggacgggtgggtgcgccggcggcttcctgctgccgttgctgctcctggcagcttctttacttgattggagcttggtttctcttattaatatggtcatcttctttgctattcgatttgctgttccaagaagaggtctttacacctggaggctgcacattgtattgtggtgtacaattatttactcagtccttgctattttagcacaagttgcgtttcatataatctggtacattgagggcaagggatggtctgtggctcattcttggtgggcgaagctggtgggtttagcaagggaccagccatgggaatcaccatcagttatctattttcttgcattacagctatctgctgcaggccttgctttggtcgaagtccttggaggaaggcttcaagattcttgctggttgaacttctcttttgaggttgagcaaataggttaccatttgcgggtagcatgctgcttattactgcctgctgctcagttagttgtcggtattagccatccttcatggatttcattaccgttctttgtatttagctgcattggccttgtggattggtccttaacaagtaactttcttggccttttccgatggtggaggttacttgagatatactcggtgttcagtattcttctgctttatctctaccagttacctatgaaatttccctatattgcgttagcatttgctgacttcattggtcttttcaaaatttcctcgaaatcagaatggcctgagctgtcttctggaatttctcttctggtatattatttcatgttgtcatcagcgaaacgagacatacaggaaatgggttcacttatatctctagaaaatgatagcttaacagaggaccttctgccttctagaaatgcgtttttggtccgccaatctcgatctggcagaaggcatggaaacatattactgagaggatcagttttccgaactttcagcattaatttcttcacttatggattcccggtcttgctgcttgccctttccttctggagtttcaacttcactagtatttgtgcttttggtctcctagcatacgttgggtacattttatatgcttttccttctttgttccaaatgcatcggctgaattggtcacttctagtgttcattctgctttgggcagccagcacatatgtcttcaatgtggcattcacattcttcaacaaaagatttcaaaaggatatgatgatttgggagactgttgggctttggcactattctattcctggattatttttacttgcccaattctgccttggagtttttgtggcactgtgtaatcttgttaacaattctgtttttctttacttgacttctgaagggggtccttcaacaagtgatgatcacctcattgatgagaaggaagatacaatggttctgattgtagcaacaatagcatggggtctacgcaaactttcacgtgcaattactttaacattactctttctacttgtgatgaaacgaggatttattcatgctgtttacatgtgctttttcttggtgtttctggtgaatcattcaatcgacaagagactgcgccagatcttagtattgttttgtgaggttcatttttcgatactgtacattctccagcttgatctagtgtccagtgctctggagcgcagtggttcattaacaatggaggtactctcacagttaggtctctcaaataatgctacagcaaaggatttcatggagataggctcaatagtttgcttctgtgctgtgcatagccatggttttaagatgcttttttcattatcggcggttcttcggcatacaccttgtccacctgttggattcactattctaaaggctggtttgaacaagtcagttctactgtcagtttatagctcgcaaaattcacgagacggtgaagaccaccgtaatttacatgagaaaaaaatcgcatcatatctgagtaaaattggtcagaaatttctcttagtgtaccgctcatatggaacttatgtggcttttctcacaatacttttgactctatacttggtgacccctaattatatatcatttggttacctatttttccttctattttggattattggaaggcagcttgtggagaaaacaaaaaggcgactgtggtttcctctaaaagtatatgctacggttgtttttatttttacctacagcctgagtgtttcaccgatctttgcagaatcagtctcaaagttccttaaactataccctgatctgggatttgaccctgaagcttctttgctggaaaatgtttggcaatcattggccattctagtcgtaatgcaactttacagttatgaacgaagacaaaacagtgacaagaactttggtgtatctgatgcttcagaatctggacttctggggttcctaagaaggtttctaatttggcacagcgacaagatattatcagtttgtgtgttttatgcttgcttatcatcaatcagtttatctggcctaatttacctgttagggcttattgtgttttctacgttaccaaaagtttctcgaattccttccaaggtttaccttgtctacactggtttgcttgctgcatctgaatatctatttcaaatggtgtgcaaacctgcacagatgtgtcctcatcagcacttctatggtttgtctgtgtttcttggtctgaaatactatgattctgggttttggggtatcgaatacaggcttaggggaaaagttttagtgattgtggcctgtaccattcagtataatgttttccattggctagatttgatgccaacatctctagtacataagggtaaatgggaagagccctgtcaactttttatctcttccaacccaccttatagtcctgtcagaagcaacgaagaaagtcattcatctaataggtttacttcattgttttctaaagttcaaggtcttataggtagtagttcaagttcaagctcatcagtgggtccaggcagcattcaccagaaattagagtatgttgataatgccatcgaaggctcagatgaggacaaaagacactcatttgcaaagatttggggattgtcaaaagaaagccacaagtgggacaagaaaagggttatttttctgagaagagaaagattcgaaacccagaagacaacattcaaatgttacatgaaattctggatagaaaatcttttcaaactgcgagagatctaatccagaaattgtggcccctttttgtgtttctgtttgcttctgtcttaatacttgaatatgttgctctttggaatgatgagataacctggtatcatggtaccaatgacattgaagtccattgccgtgagtgctggaagaattcaaggattttttttgactactgctcaaaatgctggcttgggataattgctgatgatcctcgaatgctgattagctactatgttgtgtttatattttcctcttttaagcttcggtctgatcacttttcgagcttctcagactcggacacatatcggcagatgatgtcccaaaggaaaaatgcagtagtatggagggacctctcactggaaacaaaaagcttttggacattccttgactatgtgcggctttatgcctattgccatttattggacatagttttggcactaattgcaattaccggtactctagagtatgatgttctgcaccttggttatctcggatttgctctggttttctttagaatgagacttgaaatcttgaagaagaagaataggattttcaagtttctacggatgtataattttggtctcattgttttgtcacttgcttatcaatctccttatgttgggcaatttagctctggcaagtgcgatcaaattgactacctatatgagataattggattatacaaatatgactatgggtttaagataacatcacggtcagcttttgttgagatagtaatcttcctattggtatctgttcaatcatacatctttagctctagtgagttcgattatgtgtcaagatatcttgaagcagagcaaattggtgccatggtccgtgagcaggaaaaaaaagctttaaagaaaactgagcagctgcatcatcttcgcaggtctgaggagcataaacgtcagcggaatatgcan

SEQ ID NO: 34587 - DNA, 1382 bp, Zea Mays
cacctctacggaaatggtctacgggctaaggcctaggatcgcggggccacacgagacggagcaatcgaatcacgggcgagctcgacggtcggtgcaggcagctgcacccagtccggctccggcccgtgcccgtcacgactcacgcgagacagcgaaacttttcccagcggcgaagcggagatcggagaaggaaccccaccctgcccagtgagatcttctcctagcagccgcaatctctcctccctcggcgcggaggacgagcagcgctgtagattcgatcgtgtgtgctcccgagatggcgatcgggtcggactaagccgaagcgaaagcgagagccgctgcccccgtcgtcactcgatgaccaggcggacgggtgggtgcgccggcggcttcctgctgccgttgctgctcctggcagcttctttacttgattggagcttggtttctcttattaatatggtcatcttctttgctattcgatttgctgttccaagaagaggtctttacacctggaggctgcacattgtattgtggtgtacaattatttactcagtccttgctattttagcacaagttgcgtttcatataatctggtacattgagggcaagggatggtctgtggctcattcttggtgggcgaagctggtgggtttagcaagggaccagccatgggaatcaccatcagttatctattttcttgcattacagctatctgctgcaggccttgctttggtcgaagtccttggaggaaggcttcaagattcttgctggttgaacttctcttttgaggttgagcaaataggttaccatttgcgggtagcatgctgcttattactgcctgctgctcagttagttgtcggtattagccatccttcatggatttcattaccgttctttgtatttagctgcattggccttgtggattggtccttaacaagtaactttcttggccttttccgatggtggaggttacttgagatatactcggtgttcagtattcttctgctttatctctaccagttacctatgaaatttccctatattgcgttagcatttgctgacttcattggtcttttcaaaatttcctcgaaatcagaatggcctgagctgtcttctggaatttctcttctggtatattatttcatgttgtcatcagcgaaacgagacatacaggaaatgggttcacttatatctctagaaaatgatagcttaacagaggaccttctgccttctagaaatgcgtttttggtccgccaatctcgatctggcagaaggcatggaaacatattactgagaggatcagttttccgaactttcagcattaatttcttcacttatggattcccgtcattgatgatgggagaacatggccagggacaaac

SEQ ID NO: 34588 - DNA, 946 bp, Zea Mays
gtcaccgatcagatgctcgtcctcacacttctccgtggtttgaacccgcgggttttgccgagtcttgaaaatgaatttgcaagtttaaaggaggaaatgacagaaatggcattacaaccagctgaactcaaaccatctgatcggagaaagtacaacacacgaaaaacggaggttagacgtagaataaagaagcacgagaagttgatgaatggcatctctaccttactctgttctcttcagcacgcacttgatgaagtttctagcattgaaggagttgtcctgatacttggaggaagccttgtacggcccctatttgtttatgacattacaatttctcatggtatctttggtccaggaagtgccaaagaacatgctctaaccaagttagcccaatctgtttctcggaaggctatccgtgctcttgtatcacgtggagctgggagtctgtcctacacaggacctagcaagttgtttttgttggtaagatgctccagtacattaaagctaccactggatttcctgccaaagcttgattttcgttacagcaaaaaggttgtacctcttcaaatgcatataaagtgcagtaaatcagggtgttcagggcataaccagcaccatatgcctcttgttgattccccatgttcgacttcagaatcttctctttcagatgttatttggttccagtgcaagcatacaataagaggtttaccaggcaaggcgtcactagaagggtgatgtgttcatgatatcaaagtttacccaacatgtctttgttgttgtagcgagtaatataacatatatgtacagtagatgatgcttattactttgatgaattgtagcgagtaatatcaaatcagttactacgtaccttgtgtaaagcaacttttgctagttttcaggcaaattaatccgatgttcggttggagcacattggtagacgatggta

SEQ ID NO: 34589 - DNA, 1142 bp, Zea Mays
agcaaccaaccttcccaaaatttcgaactcgtattaacggtcggcggtgggtgtggagcgggacggggcggcgagatcacgacgagatggagactgacatctcttcatgcggaggcggcggcgcccaacagcggggtataggacctgtggaggtgcaagcggcgacggcagcactgcggcggtcagaggtgttccacgtcttgaaggagctcgtaggcttcgtcctctacatgcaccaccagatcccctcggttttgccgagtcttgaaaatgaatttgcaagtttaaaggaggaaatgaaatggcattacaaccagctgaactcaaaccatctgatcggagaaagtacaacacacgaaaaacggaggttagacgtagaataaagaagcacgagaagttgatgaatggcatctctaccttactctgttctcttcagcacgcacttgatgaagtttctagcattgaaggagttgtcctgatacttggaggaagccttgtacggcccctatttgtttatgacattacaatttctcatggtatctttggtccaggaagtgccaaagaacatgctctaaccaagttagcccaatctgtttctcggaaggctatccgtgctcttgtatcacgtggagctgggagtctgtcctacacaggacctagcaagttgtttttgttggtaagatgctccagtacattaaagctaccactggatttcctgccaaagcttgattttcgttacagcaaaaaggttgtacctcttcaaatgcatataaagtgcagtaaatcagggtgttcagggcataaccagcaccatatgcctcttgttgattccccatgttcgacttcagaatcttctctttcagatgttatttggttccagtgcaagcatacaataagaggtttaccaggcaaggcgtcactagaagggtgatgtgttcatgatatcaaagtttacccaacatgtctttgttgttgtagcgagtaatataacatatatgtacagtagatgatgcttattactttgatgaattgtagcgagtaatatcaaatcagttactacgtaccttgtgtaaagcaacttttgctagttttcaggcaaattaatccgatgttcggttggagcacattggtagacgatggta

SEQ ID NO: 34590 - DNA, 1168 bp, Zea Mays
aaccgagcaaccaaccttcccaaaatttcgaactcgtattaacggtcggcggtgggtgtggagcgggacggggcggcgagatcacgacgagatggagactgacatctcttcatgcggaggcggcggcgcccaacagcggggtataggacctgtggaggtgcaagcggcgacggcagcactgcggcggtcagaggtgttccacgtcttgaaggagctcgtaggcttcgtcctctacatgcaccaccagatcccctcggttttgccgagtcttgaaaatgaatttgcaagtttaaaggaggaaatgacagaaatggcattacaaccagctgaactcaaaccatctgatcggagaaagtacaacacacgaaaaacggaggttagacgtagaataaagaagcacgagaagttgatgaatggcatctctaccttactctgttctcttcagcacgcacttgatgaagtttctagcattgaaggagttgtcctgatacttggaggaagccttgtacggcccctatttgtttatgacattacaatttctcatggtatctttggtccaggaagtgccaaagaacatgctctaaccaagttagcccaatctgtttctcggaagaacttgtatatttctaggctatccgtgctcttgtatcacgtggagctgggagtctgtcctacacaggacctagcaagttgtttttgttggtaagatgctccagtacattaaagctaccactggatttcctgccaaagcttgattttcgttacagcaaaaaggttgtacctcttcaaatgcatataaagtgcagtaaatcagggtgttcagggcataaccagcaccatatgcctcttgttgattccccatgttcgacttcagaatcttctctttcagatgttatttggttccagtgcaagcatacaataagaggtttaccaggcaaggcgtcactagaagggtgatgtgttcatgatatcaaagtttacccaacatgtctttgttgttgtagcgagtaatataacatatatgtacagtagatgatgcttattactttgatgaattgtagcgagtaatatcaaatcagttactacgtaccttgtgtaaagcaacttttgctagttttcaggcaaattaatccgatgttcggttggagcacattggtagacgatggta

SEQ ID NO: 34591 - DNA, 765 bp, Zea Mays
gttccgcccaaccgagcaaccaaccttcccaaaatttcgaactcgtattaacggtcggcggtgggtgtggagcgggacggggcggcgagatcacgacgagatggagactgacatctcttcatgcggaggcggcggcgcccaacagcggggtataggacctgtggaggtgcaagcggcgacggcagcactgcggcggtcagaggtgttccacgtcttgaaggagctcgtaggcttcgtcctctacatgcaccaccagatcccctcgctatccgtgctcttgtatcacgtggagctgggagtctgtcctacacaggacctagcaagttgtttttgttggtaagatgctccagtacattaaagctaccactggatttcctgccaaagcttgattttcgttacagcaaaaaggttgtacctcttcaaatgcatataaagtgcagtaaatcagggtgttcagggcataaccagcaccatatgcctcttgttgattccccatgttccagtgcaagcatacaataagaggtttaccaggcaaggcgtcactagaagggtgatgtgttcatgatatcaaagtttacccaacatgtctttgttgttgtagcgagtaatataacatatatgtacagtagatgatgcttattactttgatgaattgtagcgagtaatatcaaatcagttactacgtaccttgtgtaaagcaacttttgctagttttcaggcaaattaatccgatgttcggttggagcacattggtagacgatggta

SEQ ID NO: 34592 - DNA, 1114 bp, Zea Mays
ctcggctttagtcccccgcatcatgtgatcaattaacgtacctaaatgatatgcataatgcatatgaatgagaacaaggaagagtaacgcaagatattatgatgctccacaatataaaattaagtacttaatgatgaggcatcataacacttcatcggcaaacactagttattgacatatgaccaagcgcaataatcacacttctctagattaaccgaatctaacgcaaacatcacgaaatagtaaactatgcacaccaagcataacactcatgttcctcctctctaattggatctaattccgaaatcaaggaagaataaattatttaatctgcactatcatccatagtaaaagatttcatcggaagtataataaaacttggactcgtcattattgaataccaacaacttaaaataagtataagaacaatctaattaactccttaaactatgcgtcttaattaacttgaattacacacttaactaaatcaaacatcacaatatttactctaacatatataacattaatagataacatagcgttcggtaaaactaatttctcagcgacttaaatatctagagtacttatgtacactggccaacgacagatgactaagtacaacaatcatgcttctcaagattagtcgaatctaatacgactaccctaacaaaacatgtcagctagctgatttaataataaacctatttttaacgtcatcgattcactaacatcgtatacttgtctaccaaaatctccttcgtctaaaccgtactttaaacctgagctttacacgatgtgtctacgccacaactacgatcacaagcacatcacaaatattaaatcaattaaattaccctagtcatttatatccaccaccaaagcactcctcgcctaaattacattgccgcctatattttaccgtatacatctaattaataattattaccagaaattacataaacattaataacctatttttaaataaaaatagcatataatgactatcattacgaccagtaatttaatccaacacatccaatcattaaaacaaaataatagaagtagcgaatcagcttacctaaatccgacttggatttcgcagaaataacaacga

SEQ ID NO: 34593 - DNA, 778 bp, Zea Mays
cggcgatccgaatcgattaatacccagctagggatctccaatcacatgacatatgtagcacttaacccttgcatatgtcaactcgccaccgggtttcttaagactagaccgggttcacaccaaccgagagcataaatacaccaccgtccagcctcttgccacggagggtacacgctactctcgccatctctccactcccattgcgtgttggcctttctggtattagtctgcccaaggcaaagcttacccatgatgaggcatgtgaccagttaaaaggacctcgatcagcaagcctacattctctataatccttaatcaatgtgggttgaacatcacctgttcctagcccaagtcccgatttaagtacttccatccttaggattgtttgtgttccttaggatgaaaagagcattatagggagcttttacagtaagatcccaccacgctctcaattaaaataatcttgcaggaagaagccatccttcctcaggataacccctgagctaggtattagtgcaaaggacaaactctatccgcaagatttacctctaggcagggctaagcaatttttgtaaatcataattgatacttcatcagaagtatctataaaaggaatggattttaaggtagccaatgcatcaaagggtttccaagcaactcctataaacctaatgctcatttcgctagactttaagtgtgtaaaatttttatttaaaaacacaaggaaaggattgcatgcaccagggcttgcctggaataaatactacgttaatgtttg

SEQ ID NO: 34594 - DNA, 1530 bp, Zea Mays
ttattaaacaaaagcagttgtctcgataccaaaaccgcgtatctcaccccgcctccttttcttcgcgtcccccgcctcgatccgatcggggacgggtcgaggggcaggggaatgtcgtcgtcgtctgcgtcatcttcggcggcggcgcaccaccagcagcattaccggcggcagacaggagggagcggtctcgtgccgctcgccgcgctcatcaaggaggaggcccgcacggagcgccaatccatagccggcggcgaaagcaggatctccgcgcgcgacgatgacgcggcaggagtaggaagctccggcgtaggaggggaggcggcggaggcggcggtggagtcgcggctggagcgcccgctgctgcgctatgggtgcgccgctcagtgcaaaaagggcgaggacttctttttgctcagaacggactgtcttcgtcccgccatctccgtctcctcctcggcctccccgcaccccatcttcgccgtattcgctatacttgatggccataatggtaacgcagccgcaatatacacaagggacaatttgctcaaccatgtccttagtgctatgccacgggggctgtccagggaggagtggttgcacatgttgccccgagcactggttgcagggtttgttaagacggacaaggagttccagagcaaagggcaaacttctggcaccaccgctacatttgtgataattgatgggtggactatcactgttgcctctgttggtgattctcgctgtattttagatgctcagggtggggctgtttctttgcttactgtggatcacagactagaagaaaatgttgaggagagggagcgcgttacagcaagtggaggtgaagttggaagactcagtgttgttggtggagcagagattggtccgctacgatgctggcctggaggtctatgcttatcaagatccattggagatatcgatgttggcgaatttattgtccctgttccatatgtgaagcaagtgaagttgtcaaatgctggaggaagacttattattgcttcagatggcatttgggatgcattatcctcagaagccgctgctaagtcttgcagaggtttgcctgctgagcttgccgcaaagcaagttgttaaggaggcactcaggacaagagggctaaaggatgatacaacttgcattgttgttgacataatcccacctggtcaaacaatacggcctctgtctcctcctaaaaagacgagcaagctgaagtcttttatttttagaaagaaagcgaaggacccttctcagaagttgactaaacagcattcagctgttggtatcgttgaagagatatttgaagaaggttcagcgatgctatcagaaagttcgaatattacctgcttgaaaaagggccagctgtgctcattcataaggagtgagtggaaaattttatgttttggaacagttaatgtacaaaagggtgaatcctacagtacaaacagtataaattatgtgaagatttaccggctcctaaagcttggtatgggtgtgtttttcagtttgttt

SEQ ID NO: 34595 - DNA, 1553 bp, Zea Mays
ttattaaacaaaagcagttgtctcgataccaaaaccgcgtatctcaccccgcctccttttcttcgcgtcccccgcctcgatccgatcggggacgggtcgaggggcaggggaatgtcgtcgtcgtctgcgtcatcttcggcggcggcgcaccaccagcagcattaccggcggcagacaggagggagcggtctcgtgccgctcgccgcgctcatcaaggaggaggcccgcacggagcgccaatccatagccggcggcgaaagcaggatctccgcgcgcgacgatgacgcggcaggagtaggaagctccggcgtaggaggggaggcggcggaggcggcggtggagtcgcggctggagcgcccgctgctgcgctatgggtgcgccgctcagtgcaaaaagggcgaggacttctttttgctcagaacggactgtcttcgtcccgccatctccgtctcctcctcggcctccccgcaccccatcttcgccgtattcgctatacttgatggccataatggtaacgcagccgcaatatacacaagggacaatttgctcaaccatgtccttagtgctatgccacgggggctgtccagggaggagtggttgcacatgttgccccgagcactggttgcagggtttgttaagacggacaaggagttccagagcaaagggcaaacttctggcaccaccgctacatttgtgataattgatgggtggactatcactgttgcctctgttggtgattctcgctgtattttagatgctcagggtggggctgtttctttgcttactgtggatcacagactagaagaaaatgttgaggagagggagcgcgttacagcaagtggaggtgaagttggaagactcagtgttgttggtggagcagagattggtccgctacgatgctggcctggaggtctatgcttatcaagatccattggagatatcgatgttggcgaatttattgtccctgttccatatgtgaagcaagtgaagttgtcaaatgctggaggaagacttattattgcttcagatggcatttgggatgcattatcctcagaagccgctgctaagtcttgcagaggtttgcctgctgagcttgccgcaaagcaagttgttaaggaggcactcaggacaagagggctaaaggatgatacaacttgcattgttgttgacataatcccacctggtcaaacaatacggcctctgtctcctcctaaaaagacgagcaagctgaagtcttttatttttagaaagaaagcgaaggacccttctcagaagttgactaaacagcattcagctgttggtatcgttgaagagatatttgaagaaggttcagcgatgctatcagaaagcctgcttgaaacttgatttccagttcgaatattacctgcttgaaaaagggccagctgtgctcattcataaggagtgagtggaaaattttatgttttggaacagttaatgtacaaaagggtgaatcctacagtacaaacagtataaattatgtgaagatttaccggctcctaaagcttggtatgggtgtgtttttcagtttgttt

SEQ ID NO: 34596 - DNA, 4083 bp, Zea Mays
ctcggtaccaatattatatgctaattaagattttatgtaacaaattgttgttgggtcgagccacgagccaactcgcgagctgcaccgagccgatccgagttggctcgctcttttcacgagccacaaaaacaggctcggcttgggctcgttctgagcgtcgagccgatccgagccgagctactgcgagcccgagccagctcgtcgagctcgagctttttttccagccctaacccactcacacaggaccctaactgtacaaaccagttctaaaacatgaccaaaagataaggcaaagacaaactaatttggtgaagatcatcaatgaccaactaataaaatcttgcagatttgaagcaccagcccaccaccatatcctgcattcctccatgatctgtccaaggatgtcaagaatgcaaggcctagcaagttcaaaaacacatgaattcatatgcttccaaatctctcaggtcgttaaaatgattaacgaattcagccccttttgcctttcttttggcacaagtctagctacttttctccaccatttggggagtgtcgattcagccatcgtaggtaccaaatccagtaatcttagtgccaagaaaatgtgtgaccagagctatcttgagaagacacaaggtgatggatggtttcttcttcctgatcacaaagaggacaggtctcaggatgagatagccctcttttagctagcctatctgctgtccagcagcggtttttgaataccagccagatgaagaatttgcagcgtagtggagcccaactcttccaaactctcttccaaggtgcaaaacgtatggaaccaaaatagaacgcagcataagcagacctgctactatactctccagactgagttaaatcccacttatgcatgtcaggcacaccttgttgcaggatgatcccctctacttgatcccatatctggatgtactcttccagcacttgaactgttaatgcccctctaatgtcagccacccattgcctattatttagtgcagctgctactgttcttctattagccactctccttgttatgatctgaagcagattgggggcaatttcagcaatacctttcccattcagccacctgtctttccagaacatagttctttctccattgccgacaattggggtgaatgttctaggtttgacttgttacggactcttttattaggagaacctaccaatgccgacccaggccagagaatagtaatgaaaatctattgggatagggataagtattagtagtttagaaataagaataatctgttgggatagacataagtattagcagtttagagataagaataatgtgttgaaatagggataagtattagcaatctgttgttcccaacagtttaggctggcgcccttgaggattacaaaatctggggcgcaccaccttgtatgggtagagaagaagaaacccatggccttagagaaggcacaggagcttctcctcaccttccagtcatccaatacaatctttagccataacatcttggaacttatttttttctaaaacgcgcagaagaactgcgcattaagtatattaagaggatagaaatagaggtctaaaatagaccaaacatccaaggaaaccaccttaaggtggacaaaagcaaaaatacacaaaaagatccagcaattctccctccctttatctgcgtcattccgtgatcaccaccgttccctgcaccatcaccagatcccatctccatcacttacgccaccaccatggcctctaacaatagcaacaaaaccgtcacgctcgacgacctcgtcacccagatccaaaacctcaccatcaccctcaatgatgtgctcagcaaggtgaccaacaattcgttgcggttgacgtgttgggcgataacgtcaacactatgtctgtcgaggtctcttccttcaaggctgatcaaggccgcctccatgtcaccgtaaacaacgtgcagtcaagataacttgaggccaacaacaagcatcttgtggccgatcagggggccaaacccattgaccgaccacaacgtgcgctcaatagtcagatttggcatgtgttgtttatcaggtgtgcctattcatgtataactcgtgtgaacctcaccttacgttggtcaagcatcttccataatatcaagggcactctcgacactgacctccacataggggttggtcctagagatagcaatggggacccaatcctcgattccccgcggggaattcctctattaggagatggtgatgtttcttcgcccatggggatgtaaacgggtaaaaattcttcaccgacgggtaaacggggatggggaagcattcctcatccccgttccctacagggacccgtaaaacttgcatgcgacaatttttttgtataatagttaatgataaaaataaataattacattgtcaaaagatcactcattgtacaaatatgttcattttgatgtacacataataatttcttgcatctgacacaatgtgtataagtgacaatggtttgcattaataacaaaggacatacgtcataattataatttaagcgggatgggatccccgtcggggatttatccccacggggaacggggatggggaagaaatgtcccctgcaagctttcgtggggatctctatggagaaaaaattcgtcgcggggacagggatggggacctattccccgatagggaattccccattgccatcactagttggtcctctctagttttttatagcatactcttatgcagagtgagcaggttgtcaagattcccaatgctctacatccggctactttttcctcgatgataatttgatgaactggtcctccaaatggcaatcactgtgtttcattctagcggggaggtagagtaccatgttgttgcccacatcattgttgtgtgttgctaggttcgccaaatgctacagggtgtttcacgtcctgattgcttccacaatgcagtgatgtctatatgaccctaatctcattcagcatcgtcgcacgaagcacatcgagattgccatccacttcgtctgcaaaaaggccgtaataggacaagttcacatgctccacgtctcgtcctctcgctagttcgcggacatttcgacgaaaggactacctagacagtagttcactgacttttggtccactctttgtgttctaaattctcctgcttgggtattagagatagagtagttgtctaacttgacttgtgctccaagtagaattaaataatcacaaaaaactcaaattactttaatcaagacaaaaagaataagtagaaccactggaattagaaaacaacatatcaatgtatgatgtatgataccagaattgatggtttcccagtggccaatatctcggtgcacgtcatggcaccagctcgagaaattacaacatcacaggcagcatatgccatttccagttcatgcaagaaccttcacaagtaggaacatctgaaactgtcagaatcagtgaatcaacctagtgcagaggataaaacatgtgcaacgcagaagaaaatggcattgacatgcctgagaattgtttatgatattggaatgccaagcaataaagattgaaagaaattgcatttagcaattggaccaattgaatgcatcaagcagaattgtaaagcttttagaatgtggcaaagttttgagcgcatacaagaatgtggcacataggttccttgtgtgaaacatattcatccaatttcaagtcttagacataatatgggtgcttgtattttcttagattcatcatagaataaatacggcaattcattctagggtacacaatatcaatatgtcaattaattgggaaaagctcctagtgactttatcaatcttaagatctaccggctctgtctctaatgtggggtgtgctgcatgtgttgaaaggatgcatgaatgtgttgatataggtgagaaatcatataactaagggggtgtttggtttctagagactaatttttagtccattttattctattttagtctctaaatttccaaaagaattttaatttctgtatttgataatttagggactaaaatgtaataaaatgggaggagcataa

SEQ ID NO: 34597 - DNA, 1477 bp, Zea Mays
gttttagcgtcacccatcctctttatattcaattttgatctcaaggtataggataagtagtagaataatcacataacttttgataagcagtgaatttagcatgttggctagtagcatgagaacctgaatttagataccacacataccaaaaatttcatcaactgcagatgtgagactgctagaatcaagttcatcttcagtgatgaccattgctcccatgatatcagccatgatatatgcatttctcgtttggtgatggtccagaattgttggcaatggtatctgaaagacatggaacaatgaacagctgtgcataactgaactcagttaaaagatggatacttatgtagagggatgattatcaaaaaagcatgttaaccaactagtgatgctttgtaagttgatcttttatgttaatgtgaatcatcaatacttatgtagcagagtagcttctggcacagcagaacagctttgagcatctcatgggccatggaaagatcaaagatcttttcagttgcgccgtactagaagagaggtaacaatgatatggaactgaattttttgtacatctaccttttcaacaaaataaattaagtttgtcaatgatgcagttggtgtataatttctttctttcaataggttatcctgaagaggtaaccacatccagatattgtcctctttttgataaagaagctgagaacattcaacatatatgtgatctctcttttgtcacaatggtttgccagttttctcaccatcctagatgacaagtttctgactggtggttaaggatttgctttggtgcccagcaacattaagcgaggtttaaactcgctgataaccctggtccctgcgcgcagcaatattgtggagacaatgaaactattgtgtgtttagtgatgccaaacctagcatatatctcgtccttagacaattttttaaagaggctcacctgtggttcctggcaggtgctagaggtttaactgatctagaggttgctgccagttatttagcaagcgtgttttttttgggtcaggccatgtttggttgtaaagaaataattgaaattttgccacttgaaacgttaccttcttgttataattacccatgtgtctataaattgtgggtccatctgtgtctatgaattgtgggtttgatggaaattttgcgaacgtgtttcgtgataatggcaaatatcagattctcccggatgtaaaagggtgtgaatgttcttatttttctcgaacaaagcaagagatttgcgtgtcatttcattaagaaggaaagagacaaaattgtccagctaaggccagacttacaagacccacagtgtggaaacgagccgagctcggctcggctcgcccatctggcgagctcggaaaagcggctcggctcgctccgggctcgcgagccggctcgccgagccaacgatcctagccataaacgtaaatatgctctctaaattataatataaaat

SEQ ID NO: 34598 - DNA, 3279 bp, Zea Mays
gccaactccgctttgggcggcagctacgcagcaatcctctcatcgaactagcacgcctacccttccgcacaacagtggatgactaccaggagaggttttgggacctcctagcccaagcagctccactctcctaggagcagaaggtgcagctcggccagacttctagatcgacgtggaactcatggcaccacgtgatctaaatcacgccccaacctgccgccgccctactcggtgcttcaaatgcctcaggctaggccatcaagctgtcagatgctccacctttagtaaagaagagaaggagaagacgatcgtttggcagcgtctgagaaagaagagtgtgcgagtcccggtgtggcaacgtctgtccctgctcaaggaagctctgccggctgcagaagcaggctcaggcctccaatgcaagaagtcggtgtgggtgtggatcagcccactaagggaagatatgaagaaagggaatctgccctcgatggcaaatgaggtagtctctcagagaagcacccgcaacaagagaaaaaggagatccaagaaaggaaaaggtcttatggagactggccctagcgcaagacaagtttctccggtttcttcagaagaggatgtcgccactcagtcccagcaattgatcaactcgatagactccaccctggcaccaagaccttcttgcgttatggagttcacccctgagatggcaagggaagaggtattacttcgacgtgccctgcttgtcacaattgttgggacccgacctgaggtgatgagtgctgaggtgctggatgaagtcgttcgtagttttgacgtcgacgttcaagccatgtcaattcatcacaccaggccagaggacttcctcctggttttacctgacgaagaatctgcatctaaagtgttcaatggtggaagtattctcagagggcctcttttcagtttgtcgttcaaacgttggtcaagatttgcacatgcttcatcaacaatcatgtctaatattgtggatattgaaatgcatgggattccagagcatgcctagttcaggtcaacggcagaatttatactgaaggattcgtgctgcattattgaggttcatccggacacattgcagaagaggaggttatcatcttttctcgtgagagcttggtgttttgattcaggaaaactgtggcctgatagggatcttcacattattgaacctgggttgaaatgctgaatacacttggaaagagatgtttgacatacaaaatcagtatggtcgtttccccagtggactcgcattatgctacctcgggccctacagacccgcagccagatggcagtcttcctgggaatgaagatggcaatggcgatcaagatacccaggatccccgggcccggcgtccgagtggatctcatgaccggcggagacctgttcacctttgtctggggccgcagcagattgtgggaagtgcaagggtcgcgcatgcgtctgtggcgggggctttgacgccgccatgcatcttgatcaaagtgccagagttggctggagctgcaccaggaaccgaggcgaccattgatgaggttggggatcttccgtcttgtgagccatgcgacttgaatacagggacattaactctggcgcaaatgacaccttcactcccttcggctggagctgcaccaggaaccgaggcgaccattgatgaggctggggatcttctgtcttctgagccatgcaacttgaatacaggggcattaactctggcgcaaatgacaccttcactcccttcggctggaactgcaccaggaaacgaggcggccattgatgaggacgtgggggaattcgatgggccgctggacccacccaggctgttctcgccccagcctttgctgactgggctgctgggaacggcagggcagggttcgccccatttgttttgcacggaagaacccttgacccaatttctggatgagtcgcctgagttggcccagctgacacacgtctcgccccagcatacacctgggtcgccagagacgacgcccctagtgcctgtctcgccccatttggaagttggatggcttgagaggaccctgcatgtctactcacgtaggaaggcaatgacaggacagatgcctgacaaccaaaggaactcgacaacttggatggtggatgctctggtttccaatttagttccaggtgctgagccaccaatgctggccctgcctgaacctggtcttggacctatggtccttgcttcagatgatatgtccctaagtgaccaggcacaagacgaagcaagaagggtggacttcttcaacaaaatcagtaaaaggccatctgaaattctcccaattccaaagcccagtcggaggaaagtgacatccttagggttggctgctcctcgtcgaagcaggatgttctaggggtccttttctccagggctgaggaggctggtttacttcaacaactttatttggggaaaaatcttcacagaatttcaatttatgcagatgatgtagtcttgttcctgcaccccattcagtcggatatctccattactctggatattcttgaactctttggagatgcctctgggcttcataacaatactcataaatccaatatttaccctataaggtgctctgaggagactatcttggacgtccagcatatgttaccttgtgatattgcctccttcccctgcaaatatctgggccttcctctatcccttcatagattatccaaccaacaactctggcccctggtggataagattgctgacagattacctaactggaaggttgacttattaaatagggctccctggagcgacgaaggaacttcacaatacgagcaggccctccaggcgaatgatcagatgccacctgaccagaaacaacaccagcaaccttcctcctcctctgtcctcgacgagtgcgcttcttcagcccactagaaaggactgcctccatcgcaccgggaggagtcgccaccgaagaggactccctggagaccggacgccacacctgagcacgtccagacagagaagcggcccccctactgactgagcgccacacccgagcaggtcgagagggggacagaggcgaccgccgggaagggcacgagagcgcccggtgaccaggctgtcggcaggagaagcagcgaactaagctccggcacgcagcagcacgatgggaagaggagaagcaattgaagcacttcccgcgcaagtcgactgggacaggccttggcaggggcttcgaagttccagcagttgcacgtcgagcccggcgaccttccac

SEQ ID NO: 34599 - DNA, 1691 bp, Zea Mays
gtcactgccgcgtgggccggcgcttcaactaccacctgagtcactgcctgtgggcccctctcgcggactggacttcttccccgcgaaatcggcgcggcgtgaacaacctcacgttcttcgcacgggtcgttcctccaatcgcgcatctcgggctccttggcaccagcacatataaacccggccgcgcgcaaaacctcgtcaacaatctgggcacaaccctcatcgacgtccgtgcctccactgggcagggtaggtccgccgagaaggataggagagagagagttgtgccgcaagcgccacagtcaccccgtcaacggtgtacttgcgtcggtggttggttgaggataatccccgggctcgacagaaccgtacgtggttgaagggtgggggcatcgccatctccgacgactgtctgctcaccactggtgtctgcacctcgagctgacctgcgtgaccatcgtcaaccggactgcagtccacgtgcaaggttacgaggatctgaagaatcatcctggtaattggaagctcaagtgcgaggcaagttgtgcccttgatcatttatgtttacccagtaatgttctttaatatcacttattcatgcataggtttaattttgatgggacccaataggtcaccctagcctgtttattcattttaccttgttatccctgaatcacttgggtagtttttctattgctttacatggttttgggataatatttcattatatctatgatccaattattttgttattctatttatgttcatctcaagatcattaatgttaattggaacatgaagcttaacttgagaaacacgtgccaccacaagggtggaatgggacgcccttgactaactaattagaaaagctagtggaagactaccttacccaaaaggggcaagggcagtaggggagttgcatgcaaggagattctcgggttgattttgctgcgatggcggtcagacgagggattcttgcaagtgctcttccatagtgggttttcggaagctagtggatctttgtaaaggcctcatagtggatccctagccattcacctcggtagtgtctcagggtctagctaaccctagcgacatgggatacacgacttgtgggtacagggtacaacctctgcagagtgtaaaactggtatactagccgagctcacggtcatgagtagctcaggactctcgcatgattaaattatgaaacttaaattcaatttgtcatatgcatttgcatgggattatgtattaattttgttctattattattatggtttggtatctacttatacttagtaattgctaataaaattttgaccaactttaaaagcaatgctcaactttaaccattctctttggtaagcctcacacttcatgagctcccacctttggtgagttcatgcacattattccccacaacttgttgagttataatcatgtgtgagctcacctttgctgtctcacaccccccacgggagaagaacaggtggttcaggaggagccacacttcgaggagttcgattcgatctaggtggcgtatcccagttgactttattgcaccaaggatggatttagtttgatctatatttataatttattttgtaagacttccgctatgtaataaatactctgatgttattgtgacatttatcgctatacactctgttattatatatgttgtcttcttt

SEQ ID NO: 34600 - DNA, 7128 bp, Zea Mays
gccgacccatctgggctggggcacgcggcgacaatttactcgtcggtccagggaccccccggggtcgaaacgccgacagctactatagtagtacaagtttgattaagtggttaagccctagagctatatagaaattggagaaaaaaggacttgaggtcaaacgctgaaacttgactgtcagtgagctctaatgaactttggggtcgaatttcgcatgatccagtgagtatccgagcaagagccttatgacaaagttgaagttggtatatagggcaacatctttggtataatcgagttggtagtttgttgtatggaaatcgcagaaaaatgcctctaaagtcgctcggtcaggcacactgaagaagattgctatggtacagtgcctgaaaaagatcacagattcactgaacccgccgccggtgaacccgcgccgcgatccacgccggcgttgtgattcgtggccagtggcgcgcggataattgttggggtaaaagatctcaacacggagaggagttggagccttatcgctagactattcaccgcgccacttgccgcgcgatcggccgaggtgccctcgccggagttcgccgctctttgtagtcgtgccacctgcttacgatcgttatcgtgtcgcaagacgtcggagtggacagcccatttaccgccagagtctttacctcaccgagcgccacgattgtatactccggtgactcaccttttctccggccgcgagttcatctcatcccaaattcgtgaagcatacgagtgatcactataaattgagtgctttgcctgctccgctatcttgttacgaagccagtgcaccgctcctcactgccgattaaccaccatagcccacgaacttctgttttcccccaaatcggccaagaacgtcgccgtgtgacctcgcgtcgtggtcagccatccacatgtccgttcgtgtccctcgggtttgtgtttctgcctcccctgatgctagtaaagctctcggtctcggccgattgaacgctaccgcgccatagtgtaaagaacgtgacggtactgttcgggaacgccgccgcggacatggcttccgtcgactggttgtgcctggcagttttcgtccgagtttgcgcaagcaccataacccttaaagccaatcagtccttccgcgtccttggattaagctagaccggctcgggtacaccggtaaagacgcgtcggtgatccgattccgccgccaccgcggataactaggagttagcggcgctctgatcaaattgagcgcgggaatggattcgggttgcatccatgatggtgtccgcatgctcgacaccatcagagcacgccctcgacggcgagtacgcacggctccggccatgcgcttggcgcgccgtcgccagggacttgaattgtgaaggaatagaaatacaggggcctctttgtcaatgtcagtgagacagatgaatagtgacatgggctctttactggttattcaaatacctaggggcctcgacgcaagtccgtaacgcggacgcgagcgcgtgtgtatttctccggttcgcgggctgacttgggccagaattggcccaacactattcattatttctctttttctttttactggcagattaggaaatttgtagaaaatttgttacatcgtgagaccaattttgctagacttctaaaatcacatagtatttaataaaaatagttccaggatttttatcccaaacctagaattatatagcctttaaaggtgctcaaaccaagccttttagaattttagaaataatttagaagctccaaaaatggtaaaactttttgtgtaggcttggtatgatgattgaagaccctgggtgaagtttgaaatgatttggacactatttgttcaaaaactcaataactagcctcctaggttaagttatttaatattgatagaataccaacttaagaaaccctagtgatgagtgtgtaccgtgaaggaaagttgtattcaagatacaacttagtatgtttctattgtgtaactgcatattcatgacatcacataagcattcatgtacatgtattatcatgtatagaacacgagaaagaaactgtggttgaagaagttgtctcccaagctgaaaatcctccagcagagaacaacttctacttcgacatctgcggagtggacccggaacctcctgcaacacaaggcaagccccggtgcattatctcttttccttgttgttttaaaaactttatcaccttatttgatgcattaggtgataggagttgggtgccaaacaattgatgcattctttccttggagaattgattatcattacttgattcccttttatgaaaaagatttttatggtgcttagccttgctttaggaaaataaatgttatgtgttaaaacaaaaaggtgatgcttcacactggatgggaatttttacaaagagaagacttgtgatggtgaatccatcatggctgtggtgggtttaacatctgaaaagatgtacctctaccaggtaccaaactttgggtttttaataataaagacgagaccgggcgggtgacttgcacgagaagaaagtctcgatgtagtgtctccgtctgagtcgcttaaggaccgaaccgatgtaggcttgatgatcgaggaccttttaactggccacatgccttgtcatgggtaagctttgcctcggccggaccaataccagaaaggctaccacgcaatgggagttgagagatggcgagagtagcgtgtaccctccgtggcaagaggctgaacagtggtgtatctgtgctctcggttggcgtgaacccattctggtcttgagaaacccggtggcgagttgacatatgcaagggttaagtgctacatatgtcgtgtggttggagatcccccagctaggtattaatcgattcagatcgtcgttacttctcggacatgaagacttggtcactgacttacacgtagcatcaagtgaactgaagggttgataaaagacggctagtataggccaagtgcttgatctaaaatagaaagaactctagatgcaggtaactactcaaactgataattaaaaatggatttttaaggatccacttatagtaagcttttctgcaaatggagtctttggattttgacaagctttaccttgatccctaaaagccagcatatccttgagagtcttttttcctttgacgggtaagacttgcgaaagtacactccgtactcagggtttccgaacccatgttgttgtaggtgatgaaacggctgagttctgttgtttctgttcgaaggtggttcccaagcaggaggaagaacactaaaacttatttggggagggtgttttgcctcccggaaatgtaataataagttccgcactcaaacacccgattatgtaataactactctttctatatttttggtatgaatgtaaattatattattgtaatccattccgctcattctctactccgattatgtgtaatgtctgtgtgatgggtcaagcgctcttgggcgatatgatggagatacagataaccgaacttaccgagtcattatgcacacctgcatgactgtctgaggtccttagggcaaggacatctgtaggtaggcctaataccttgggaggttccgtcacagcttattggatcttcgttgtcggtggtgaggcaatgcacgttgcactgtccagggacaaagtatctctcgttattgtgggcgacctgctggtctccatatatggttattacaccctggggacctggaatcttcatgcacagcgtggatggttgcttctagtttgtttgtagaccctctacccatgatggcgttgtatgggtagaccatatcaactatgccgaaggctacctgctcgcttcttgcatttggtgttgccaagggactgtggcaattctattttgcccgggaaagttccttttcctccgaagccgtacagggggttgtcggttggctggagcaggctgtgatttatgcccatgcattcgaagacgtgtaagaatatgatgttggcttgactaccttgccaatgaggactttgtgcaggtccccatcctacgatgttgcagtttatcactagcgcatctttggccaaacagatggttagatgggggttgcatcatggacattgcccctgctattgcctctaaggtgggtaagagcgctctttccactagaactgtggcccaggctcgtgaaaactggtagtgggtcaatgacataaagacccctctgtctttgattggagtgtaaaaattcttgcgactatgggatgctataagaagagtggtgttaactcaaggaactgataggcatgtgtggctgcatacctcctctggctagttcacttctaagtcatgctacaaggcattcttcatgggatacattacctttgagccatggaagaggttgtggaagtcttgagcccctccaaaatgcaaataattcctgtggttggcaaaaggaataagtgttggacttctgatagactggagaggagaggcttggaccacccagagtcttgcccactgtgactaggggcaggaaatcgtccaacatctcctttgcacatgcatctttgtaagacagttttggcatatcatcctttctcccttggggtttggaaatctctctccgtctggcgatgagatctcttttgcagaatggtggacaaaggtatgtaagaaggtgcacaaaagcaagagaaagggattgaatagcgtcatcattctagggcctggtgcctttggactcaccgtaacaaggcagtctttaatggagagaacccttctataagcacagttcgaagggttttcttagatgagttggtgtgttggagtaaggctggagctaaacatcttgagatgttaggcctagaggtcaccgttaatagggtcagggcgtagtgtttggagtttgggggtctgcctgcagtatagttgcaaggcagactgtgagtgttttctgttgccttttgtaggctttgtagctaggtccattttgggccgttttttctcctcttaaataaatgatgcgcagctcctgcgcgttcgagaaaaaaatcgtggggcgcgctgtgaaggtcaacgtcccttacatcgaaagtaagcgggatatgaaaccacttcgtttggaccactgttccagtgagagcgacgtgaaacgtgattgacccttcggtagtaatctttcttttatcgtttgttctcaaattctacattggaccctccggggatcatatggatgacccctctgaacaatgggttggcaaattcttcttgttttggtggtggtggggtggcagtgctaatctttcttggtgctgcaggtgcggttgctggggaaaagcatggttgaaattctgctggtgttgggggtggtatgggtgttcgtttcgttaatgaaggtggggggtgtgaatgatggctctctggttgtttgataggatggctctagccatgcggtcttttgtttccttggcttctgggcaatctctggttgggtgccctgcatcctcgccgtgaaagacacagtaaaacttcctttgctattgagggcctctgcctcttgttgcgccgccagtgtgaccttgttgtggagggtagtcctggcgccgaggggggcttcgcctggttgctattggttagcgatattatggacatggagctgttggccacgctcttggtgagggtggtcttgttgtggacccctggtccatgttctgctggactgtggagtctcttttgtctttcgttgcgccttgaccttcctgtggtggagctcttcagatcgggtgtatttttcgaagagttggtatcgttcctagaggttggatgggggtctcttgtgcagtgactataaagttggtctgcgcgaaggccgctgattgcataatggatggcaatcttgtcatcaacttagagtagttgcgatttcaggaggaggaatttcttgtagtagtcgcgaaggctttcttgttcctgttgcctgcagagggacaattcgccaatacatctgtctcaggcctatagccttggaaattgagcaggaatttatcacgaagggtcttccatgagttgatcgacaaaggcgatagccttgagtaccatgtgagggtgaggtcttccatgatgaatgacttagctatggtggagtcatctcctcccgaggatgcgacatcgacctggtaactcattatactgggttgggtctgtattgtcgttgtacttgggataggtgcccgctctgtagttttgcggccacggggaggcctggagctgtgctgataggaggcttcgctcatcgaggtagtttaatccttggaaagcaacttgcatgttggctggcctatggaagtgataaatattttggttgttgactgcaccaactggttgttggtgaggggggtcttcgcgttgcatgcctgcaatttcctgctccaatgctcttgctttccatgatcaattgtctcactttgcatgttggttcgttacctcttggctgtatctttgcctctgaagatgattgtttttttatgcggagagctcgtagtttgagttggtattctgttgagatccccaggtcttcgccttatgatgtcttcgaccccttttgctaggaggtgtgctgcgagagcaaatcccggtggggcatcgtcgcggggggttttcagagctgcatgtgtgaatgttgccttctagggtgggtgggtcttcaatacgagggtgcttgctgttgactgcccccgtctcattgttttcaactgtggcagatagggtgtcatctgcgagtactgctttgcctttcttgtcgacgagggccgccttcgtggcctcgtccatggaggagctagctctagtagtcacttttttggagccatcgtgggtgttggttttcggagcacaaacggtgggcgccaaattttggatttgccaacacgtggacgggcggacccaaaaactcggaagttgatagggctcaggtgcactacaaacgataggtagcaaactatagcatcttgttatgcgtgtacagaacggggatatttataggtaaccgggcgagtaggtggtcccaagtaccattatgcccccggttacctactgcattcctggaatattccccagca

SEQ ID NO: 34601 - DNA, 869 bp, Zea Mays
tatgggttcgaagcagcctctctgcatatgtgcagaaggccatgaaaagtgtcaagcaaactcctgcttacaaaaataggttaaaagctttggagtatgagcgaacaggaggaattgctagcaaaaagaagggcatcaagcaggtggataagaaagttgaagaagagctaagtaatgaagttgaattgcaaattcatggggttgaaaaaccgtctgtttggaggctgtttggtgtccaatttatactttggccttactctgttggcaaggcgcttacttggaagatttgttggttttggagataccgggtaaagaaattaccatatacatgggaggatgcttgctacttgacctggatttcactccaaatacctgcgaatgcatggaaaaatatggatgagtccaggaaggaggaccttgtgagaagacacctctgggaaaagagcaacatggagaggtatacttcagggacgaggaaggaaccaaagcgtaggaggtagctgtgcaacatttttgacctgagactacagcaactttaaacaatacaacatactcctatattggagtgaaaagttattgaccaggcttgagttcaccgatagctaattgctaggatccccgggaagtggcatggctaaggaatcatgtttggaggacaattcatgtaataaagtgatcaaggcgacttttgtaggtgtttcttaatcttaatttctgagtagctaataactgtaaacgaacgagtcatgcttcatcgctccactcaacgtaccaaaatcactgcaaagagaacatactaatgcacttcctctcgtctactgctgtatgcacctgcagccattttggtagtcatcaagttgaacacatgc

SEQ ID NO: 34602 - DNA, 1387 bp, Zea Mays
acgatttcaattgccacgatcatggtgccaatagtctgaagccggggcatagacggtgccatgtttgcaaaattctcaccgtatctaggggcaacaactaaaatcactccaccttagcccaaaatcaattcggatccgcctccatggctgccgcttcgcagctcctctctctgttcttcctcctcctcctccctgcttgtgatgccatctactgcgacgaagacgactgctacgacctcctagggacgcgaacgcgtcagacatcaagaaagcgtactacaagctctctctcaaacaccacccggacaagaatcccgatccggagtcgcggaagctcttcgtcaagatcgccaatgcttacgagattctgaaggatgaatccactagggcgcagtatgactttgccattgaacatccggaggaggttttctataacacagctcagtactatagggcatactatggacataaaacggatcctcgtgcagtgttgattggtcttcttctaattgtttcagcatttcaatacattaatcagctaacgaggtataaccaggccatgaaaagtgtcaagcaaactcctgcttacaaaaataggttaaaagctttggagtatgagcgaacaggaggaattgctagcaaaaagaagggcatcaagcaggtggataagaaagttgaagaagagctaagtaatgaagttgaattgcaaattcatggggttgaaaaaccgtctgtttggaggctgtttggtgtccaatttatactttggccttactctgttggcaaggcgcttacttggaagatttgttggttttggagataccgggtaaagaaattaccatatacatgggaggatgcttgctacttgacctggatttcactccaaatacctgcgaatgcatggaaaaatatggatgagtccaggaaggaggaccttgtgagaagacacctctgggaaaagagcaacatggagaggtatacttcagggacgaggaaggaaccaaagcgtaggaggtagctgtgcaacatttttgacctgagactacagcaactttaaacaatacaacatactcctatattggagtgaaaagttattgaccaggcttgagttcaccgatagctaattgctaggatccccgggaagtggcatggctaaggaatcatgtttggaggacaattcatgtaataaagtgatcaaggcgacttttgtaggtgtttcttaatcttaatttctgagtagctaataactgtaaacgaacgagtcatgcttcatcgctccactcaacgtaccaaaatcactgcaaagagaacatactaatgcacttcctctcgtctactgctgtatgcacctgcagccattttggtagtcatcaagttgaacacatgc

SEQ ID NO: 34603 - DNA, 1387 bp, Zea Mays
acgatttcaattgccacgatcatggtgccaatagtctgaagccggggcatagacggtgccatgtttgcaaaattctcaccgtatctaggggcaacaactaaaatcactccaccttagcccaaaatcaattcggatccgcctccatggctgccgcttcgcagctcctctctctgttcttcctcctcctcctccctgcttgtgatgccatctactgcgacgaagacgactgctacgacctcctaggggttaagcaggacgcgaacgcgtcagacatcaagaaagcgtactacaagctctctctcaaacaccacccggacaagaatcccgatccggagtcgcggaagctcttcgtcaagatcgccaatgcttacgagattctgaaggatgaatccactagggcgcagtatgactttgccattgaacatccggaggaggttttctataacacagctcagtactatagggcatactatggacataaaacggatcctcgtgcagtgttgattggtcttcttctaattgtttcagcatttcaatacattaatcagctaacgaggtataaccaggccatgaaaagtgtcaagcaaactcctgcttacaaaaataggttaaaagctttggagtatgagcgaacaggaggaattgctagcaaaaagaagggcatcaagcaggtggataagaaagttgaagaagagctaagtaatgaagttgaattgcaaattcatggggttgaaaaaccgtctgtttggaggctgtttggtgtccaatttatactttggccttactctgttggcaaggcgcttacttggaagatttgttggttttggagataccgggtaaagaaattaccatatacatgggaggatgcttgctacttgacctggatttcactccaaatacctgcgaatgcatggaaaaatatgggaaggaggaccttgtgagaagacacctctgggaaaagagcaacatggagaggtatacttcagggacgaggaaggaaccaaagcgtaggaggtagctgtgcaacatttttgacctgagactacagcaactttaaacaatacaacatactcctatattggagtgaaaagttattgaccaggcttgagttcaccgatagctaattgctaggatccccgggaagtggcatggctaaggaatcatgtttggaggacaattcatgtaataaagtgatcaaggcgacttttgtaggtgtttcttaatcttaatttctgagtagctaataactgtaaacgaacgagtcatgcttcatcgctccactcaacgtaccaaaatcactgcaaagagaacatactaatgcacttcctctcgtctactgctgtatgcacctgcagccattttggtagtcatcaagttgaacacatgc

SEQ ID NO: 34604 - DNA, 1377 bp, Zea Mays
acgatttcaattgccacgatcatggtgccaatagtctgaagccggggcatagacggtgccatgtttgcaaaattctcaccgtatctaggggcaacaactaaaatcactccaccttagcccaaaatcaattcggatccgcctccatggctgccgcttcgcagctcctctctctgttcttcctcctcctcctccctgcttgtgatgccatctactgcgacgaagacgactgctacgacctcctagggacgcgaacgcgtcagacatcaagaaagcgtactacaagctctctctcaaacaccacccggacaagaatcccgatccggagtcgcggaagctcttcgtcaagatcgccaatgcttacgagattctgaaggatgaatccactagggcgcagtatgactttgccattgaacatccggaggaggttttctataacacagctcagtactatagggcatactatggacataaaacggatcctcgtgcagtgttgattggtcttcttctaattgtttcagcatttcaatacattaatcagctaacgaggccatgaaaagtgtcaagcaaactcctgcttacaaaaataggttaaaagctttggagtatgagcgaacaggaggaattgctagcaaaaagaagggcatcaagcaggtggataagaaagttgaagaagagctaagtaatgaagttgaattgcaaattcatggggttgaaaaaccgtctgtttggaggctgtttggtgtccaatttatactttggccttactctgttggcaaggcgcttacttggaagatttgttggttttggagataccgggtaaagaaattaccatatacatgggaggatgcttgctacttgacctggatttcactccaaatacctgcgaatgcatggaaaaatatggatgagtccaggaaggaggaccttgtgagaagacacctctgggaaaagagcaacatggagaggtatacttcagggacgaggaaggaaccaaagcgtaggaggtagctgtgcaacatttttgacctgagactacagcaactttaaacaatacaacatactcctatattggagtgaaaagttattgaccaggcttgagttcaccgatagctaattgctaggatccccgggaagtggcatggctaaggaatcatgtttggaggacaattcatgtaataaagtgatcaaggcgacttttgtaggtgtttcttaatcttaatttctgagtagctaataactgtaaacgaacgagtcatgcttcatcgctccactcaacgtaccaaaatcactgcaaagagaacatactaatgcacttcctctcgtctactgctgtatgcacctgcagccattttggtagtcatcaagttgaacacatgc

SEQ ID NO: 34605 - DNA, 1838 bp, Zea Mays
acgatttcaattgccacgatcatggtgccaatagtctgaagccggggcatagacggtgccatgtttgcaaaattctcaccgtatctaggggcaacaactaaaatcactccaccttagcccaaaatcaattcggatccgcctccatggctgccgcttcgcagctcctctctctgttcttcctcctcctcctccctgcttgtgatgccatctactgcgacgaagacgactgctacgacctcctaggggttaagcaggacgcgaacgcgtcagacatcaagaaagcgtactacaagctctctctcaaacaccacccggacaagaatcccgatccggagtcgcggaagctcttcgtcaagatcgccaatgcttacgagattctgaaggatgaatccactagggcgcagtatgactttgccattgaacatccggaggaggttttctataacacagctcagtactatagggcatactatggacataaaacggatcctcgtgcagtgttgattggtcttcttctaattgtttcagcatttcaatacattaatcagctaacgaggtataaccaggtatgaacaaggaattgaaggcaaatataaagttgtcacaggatttcaatgctaatagacagcatgctttaagaaatttgaacatacgatcgggtatattgcttcaaaagagcggatgcagatttttagctatctgtgcattattttatttttattttcagcttttccacttaattctgctgaaccttttactatacaatctcaatgttgccgtcatttaaagtttaaaactgtacacacagttttgctcttggcaaaacatagcatagtaggttgaattgaactagttttattgaattagattagatacaatattaagtttcatctgtaatttttctctaatcaatattggttttatgttgaaagggcaggcctgtttcagtgatgagagttgtctcattgagtcaccaagttatgggttcgaagcagcctctctgcatatgtgcagaaggccatgaaaagtgtcaagcaaactcctgcttacaaaaataggttaaaagctttggagtatgagcgaacaggaggaattgctagcaaaaagaagggcatcaagcaggtggataagaaagttgaagaagagctaagtaatgaagttgaattgcaaattcatggggttgaaaaaccgtctgtttggaggctgtttggtgtccaatttatactttggccttactctgttggcaaggcgcttacttggaagatttgttggttttggagataccgggtaaagaaattaccatatacatgggaggatgcttgctacttgacctggatttcactccaaatacctgcgaatgcatggaaaaatatgggaaggaggaccttgtgagaagacacctctgggaaaagagcaacatggagaggtatacttcagggacgaggaaggaaccaaagcgtaggaggtagctgtgcaacatttttgacctgagactacagcaactttaaacaatacaacatactcctatattggagtgaaaagttattgaccaggcttgagttcaccgatagctaattgctaggatccccgggaagtggcatggctaaggaatcatgtttggaggacaattcatgtaataaagtgatcaaggcgacttttgtaggtgtttcttaatcttaatttctgagtagctaataactgtaaacgaacgagtcatgcttcatcgctccactcaacgtaccaaaatcactgcaaagagaacatactaatgcacttcctctcgtctactgctgtatgcacctgcagccattttggtagtcatcaagttgaacacatgc

SEQ ID NO: 34606 - DNA, 725 bp, Zea Mays
gcaccacgcgccacgaggatcagccacctctatcgaacgaacaaagaccaaagggaatccgccgtagtggatcctacccacatggccgctcagggaccaacaaagtgccctaggagcttcgccatgacacgacgaaggtgtccatggtagaggtggtggacattcattgccgagatcgctacaattgctcgtcgaagtggattgatgcctcggttccacgcctcaccacgggaagtagatcctcactgtgcgataaatggatcatggtgcatgttggactctaggggccctccgtcgtgccgggcgtgcaccgccgggctctgtccgtgggacgaagaacaggatgcatgggtcgtggatccgtgcatatatggctaggatttgagataagggataacccttccgtggtgaatcttagccattaatgagtgattctacgatctcgggagtgtaccaaatcaggggcagcgtcaaccgtgggatggggatcgaatggctgctaatacttaccggttgaattaacaagcttctaatgtgggtcgtcggtcgatgattggatggctctgagttatttgtaccccttcagtcgtgcaatttgcaaaggagtccctaggttgtttacaaaataacccgctgtctgtggtagttcacagaaacatgcatacaagttctaaaacttgcatagaagaccctgagttctcaggtaatagtggtgtcgtccaaag

SEQ ID NO: 34607 - DNA, 1747 bp, Zea Mays
cccacgcgcttctctctctcactagcaggccgcgccgccgctctaccaccgctctccggatcatcggccgtccccctcctcctcctcgcccactcagcggccatccctgctgcggtgtcgcgcgttcaagcaggaggccggcgacggcgacggcgacccgactgaggccgatgcgcggaagcgcaggaagggcccactatacaagctcaaggcggcgatccagggcctcgcgggatctcgctccgccgccacggaggtgtacgggggagagtaccagttccagcgcgccgtcgagaatttgtgcgagccaaggttccccaatccactcacgcgcgcgcatcgctgtggtttcctgtgttgctttccaccctcgcgcgctcttcttcttcatggagccatggcaggaagcgacaacaggagatttggccgggatatggtgtctagcagcacacatttctcccaatcgcagatggtctgggttggagaccacgttcctggcggcagagtcgatctgcaatgtggaggtccaatctagccaccgatgtcagctcgctccggagccaattccgattccctagcagtgacgacgttcagatgcagcttcagatgcagcgacgacctctctctccatccatggatctctaggcaactgtgaacaagggaaccaggcatcaaaatgaagggaagcaggaatcgaaacggccccgagaatcccaaagcacgagaaggggaacaagggaactaggcatcgtgaagagagcccgaggtgatgaattgttacggttcatggacggagcaagcaaggagcctctccgcaagagtacttgctctgttccacaatttgattcagaaaaaaaacaaatattcacctttattgcaatcaaacaagatatcagggacttgaaagtggcgaaagaggagcaagacattgggttttatgctggttttgttggggctacctatttccttggaagggccatcagcgccgtgccatggggcatgttcgctgacaagtatggaaggaagccatgcattgtgatcagcatcctctcagtgattgtgttcaacacactgtttggacttagcacaacttactggatggcaattgtgactaggggattacttgggttgctatgtggtatacttggacccatcaaggcttatgcttcagaagtctgcaggaaagagcaccaagctctgggaatctctcttgttacatcttcacgagccatagctcttgttattgggcctgctattggaggcttccttgcacagtggtcgacaaaaatatttctagcatcaggaaggtttccatacttccttccttgctttgtaatatcgttgctagcagcaggatcatgtattgcatgcatttggcttccggtatgccatatcatcttccctattattttctatcttgaatccaaatagttagatcctcttaagaaaataaaagaaaactctgacaacctatggaggtatgacatctcctgacatagcatgatagagaagaccttctcacctatacggctataccaagaaaagaaccgtgctccatccatacaaacaagatttgttaacccaacataaaattcactcctataaaaatttgaactagaaaggctactaaagggcctaaaacgaaatatgtttggacttatgtttctccactcaatatacctattttctagttagataaaaaatcgttcttttgaatctagatagaattggcaatatacctattttc

SEQ ID NO: 34608 - DNA, 2027 bp, Zea Mays
atggcggcggcatgggcggggctggctgtgttgctcgtcgcggcgcagttggcatcagcggcgcaggtcacggcgccagcgttcctgtgggcgcccaaaaactacggagtgacatacctgaaaatgggtcgagcaattagtctgtggaaacacatgcaaacaatggtaaaggagaaagccccggtgatggtgccgctagaatcactgaggtaaattcgagcaccgctgtcaaaaagaagaagaaacgcggtgaccgccagcagcaggatggcccacaacttaagaagttgctacacagggtcaccagccagcagttggaaatacttgaaggtttcttgagcatatgcgcacaccctgacgacatccaaaggaggcagctgaatgagtcgacgggtctttcggtacatcaagtgaagttttggttcgagaataaaaggacccatgtaaaggtatagttttatatcattgcgatttttccttggcaataatgttggtcgctagctatggaaatgtttagtttattcgttccactagccttaccattggacttccattttctggattgcctttttaatttttttgctaataatcgaactggggggtctaccatcgaaattaggactaatccttgacacctctgacacatctttgtattcatacttgagctactatattcgaccatttgggatctctaaccactctaagtatttcatatatggcacgaatagcatctgagtggaagagaagagaactacaggttgaaagcggagaatgaaatgctgaaggaggaaaacaataggcttattaggcaggaacagagcaatgctcctgcccctgctccctgtcccagatgcattaatgatgcggggcacctcctgctcgagaaagaagttgaacggctgaaggcgcttaaccagatgctgcagcaagagttgcagctacaaggcacggatggtgaaacacatagctctccttcacacgctcagagttttccatggcattcccctacgtttccacatcagtcaacgagaaactagaggactcgttgctatccagctttgccgagaactacaacaatggtttcggaagaaaccgcatcacctacacagacacgtgtaccggtcaagatctgaagaaataccacaacatggatgccatcaatgacctggtagtgtcaggggtagcgtcaaggagagtcaaccacccaagtggacaaaccgatataatcgtcttctgtagcggcgggttcgagaatccaggcactgcgaaatcaaaaggttaggttaaatactaccgctaattgttgttccacttccgattgttgtgccgaaagctaaatctctacgacgatgacgacaccgtttggttttcttgagatcccttcgggcctgccgctgagtaggcatctcgcggagaagaagactaacggcacaaaaactgtccagggcgaaaaatgcgatggcgagtgcctcgtcaaatcgagtctcctcgaaggaactttctttgggatagtgcttctcatcatcttgatatcaggactcatcatcttgtgagatactgttctatatgcatggtacttgagttattctacgctactactgacatactaaattggagccttggagtctggagaaaaaaaagggggtggctgtattctcaaggaacatgagaccactcagctctggagtgaatgaaggacgtcgtctatggaagtcagacatcacctagagctagggtgtccattcttgacatgtttctcttagttataggtggatactgtctagctaggaacaaagtcttgagggattgatggacgcatgcatcttcgattcctatgtgttgtattactactcgtacaatctccaattcttatgaacttatgtatttggactgtgaatttgtgatatgaacatatatcaatgtgtttgaaatctgtattgtatgtgatattctgtgttgcatgtgatattatgtgtgtctaatttttcatttctgtattttttatttttttctggaaaagggttaag

SEQ ID NO: 34609 - DNA, 1734 bp, Zea Mays
gagcagagatggcggcggcatgggcggggctggctgtgttgctcgtcgcggcgcagttggcatcagcggcgcaggtcacggcgccagcgttcctgtgggcgcccaaaaactacggagtgacatacctgaaaatgggtcgagcaattagtctgtggaaacacatgcaaacaatggtaaaggagaaagccccggtgatggtgccgctagaatcactgaggtaaattcgagcaccgctgtcaaaaagaagaagaaacgcggtgaccgccagcagcaggatggcccacaacttaagaagttgctacacagggtcaccagccagcagttggaaatacttgaagggtttcttgagcatatgcgcacaccctgacgacatccaaaggaggcagctgaatgagtcgacgggtctttcggtacatcaagtgaagttttggttcgagaataaaaggacccatgtaaagcatctgagtggaagagaagagaactacaggttgaaagcggagaatgaaatgctgaaggaggaaaacaataggcttattaggcaggaacagagcaatgctcctgcccctgctccctgtcccagatgcattaatgatgcggggcacctcctgctcgagaaagaagttgaacggctgaaggcgcttaaccagatgctgcagcaagagttgcagctacaaggcacggatggtgaaacacataggcactcatctctctcagatctcgtttactggagcatcaaagtgtcaactgcttataacccgctttgcttctaccagctctccttcacacgctcagagttttccatggcattcccctacgtttccacatcagtcaacgagaaactagaggactcgttgctatccagctttgccgagaactacaacaatggtttcggaagaaaccgcatcacctacacagacacgtgtaccggtcaagatctgaagaaataccacaacatggatgccatcaatgacctggtagtgtcaggggtagcgtcaaggagagtcaaccacccaagtggacaaaccgatataatcgtcttctgtagcggcgggttcgagaatccaggcactgcgaaatcaaaagatcccttcgggcctgccgctgagtaggcatctcgcggagaagaagactaacggcacaaaaactgtccagggcgaaaaatgcgatggcgagtgcctcgtcaaatcgagtctcctcgaaggaactttctttgggatagtgcttctcatcatcttgatatcaggactcatcatcttgtgagatactgttctatatgcatggtacttgagttattctacgctactactgacatactaaattggagccttggagtctggagaaaaaaaagggggtggctgtattctcaaggaacatgagaccactcagctctggagtgaatgaaggacgtcgtctatggaagtcagacatcacctagagctagggtgtccattcttgacatgtttctcttagttataggtggatactgtctagctaggaacaaagtcttgagggattgatggacgcatgcatcttcgattcctatgtgttgtattactactcgtacaatctccaattcttatgaacttatgtatttggactgtgaatttgtgatatgaacatatatcaatgtgtttgaaatctgtattgtatgtgatattctgtgttgcatgtgatattatgtgtgtctaatttttcatttctgtattttttatttttttctggaaaagggttaag

SEQ ID NO: 34610 - DNA, 1669 bp, Zea Mays
cctccaccgcacgtaccgcgctcactcctccaccgcgccgccgccagccaccgcgctcgccgcgcctccgccaccgctcctccaggattcagattgcggccgcggtgactccccgagcagaagaacccgatcgaacgcggccgtggcgactccccgagcagaagaacctgatcgaacgcggacgcggcggcgactccccgatctcagatccctgctgcgagcgaaggaccagcagtgttcgattcgagcagagatggcggcggcatgggcggggctggctgtgttgctcgtcgcggcgcagttggcatcagcggcgcaggtcacggcgccagcgttcctgtgggcgcccaaaaactacggagtgacatacctgaaaatgggtcgagcaattagtctgtggaaacacatgcaaacaatggtaaaggagaaagccccggtgatggtgccgctagaatcactgagtttcttgagcatatgcgcacaccctgacgacatccaaaggaggcagctgaatgagtcgacgggtctttcggtacatcaagtgaagttttggttcgagaataaaaggacccatgtaaagctacaaggcacggatggtgaaacacatagctctccttcacacgctcagagttttccatggcattcccctacgtttccacatcagtcaacgagaaactagaggactcgttgctatccagctttgccgagaactacaacaatggtttcggaagaaaccgcatcacctacacagacacgtgtaccggtcaagatctgaagaaataccacaacatggatgccatcaatgacctggtagtgtcaggggtagcgtcaaggagagtcaaccacccaagtggacaaaccgatataatcgtcttctgtagcggcgggttcgagaatccaggcactgcgaaatcaaaaggttaggttaaatactaccgctaattgttgttccacttccgattgttgtgccgaaagctaaatctctacgacgatgacgacaccgtttggttttcttgagatcccttcgggcctgccgctgagtaggcatctcgcggagaagaagactaacggcacaaaaactgtccagggcgaaaaatgcgatggcgagtgcctcgtcaaatcgagtctcctcgaaggaactttctttgggatagtgcttctcatcatcttgatatcaggactcatcatcttgtgagatactgttctatatgcatggtacttgagttattctacgctactactgacatactaaattggagccttggagtctggagaaaaaaaagggggtggctgtattctcaaggaacatgagaccactcagctctggagtgaatgaaggacgtcgtctatggaagtcagacatcacctagagctagggtgtccattcttgacatgtttctcttagttataggtggatactgtctagctaggaacaaagtcttgagggattgatggacgcatgcatcttcgattcctatgtgttgtattactactcgtacaatctccaattcttatgaacttatgtatttggactgtgaatttgtgatatgaacatatatcaatgtgtttgaaatctgtattgtatgtgatattctgtgttgcatgtgatattatgtgtgtctaatttttcatttctgtattttttatttttttctggaaaagggttaag

SEQ ID NO: 34611 - DNA, 2010 bp, Zea Mays
caaacccctaacccgtgcgggactcgtctatctcaccttctctcacacgctgaaatcccctccacgccgccgccgaacacataatcgcaagacgcgccgccggaacgccggacccgcgccgcccctccgccaccgcgcacactcctccaccgcacgtaccgcgctcactcctccaccgcgccgccgccagccaccgcgctcgccgcgcctccgccaccgctcctccaggattcagattgcggccgcggtgactccccgagcagaagaacccgatcgaacgcggccgtggcgactccccgagcagaagaacctgatcgaacgcggacgcggcggcgactccccgatctcagatccctgctgcgagcgaaggaccagcagtgttcgattcgagcagagatggcggcggcatgggcggggctggctgtgttgctcgtcgcggcgcagttggcatcagcggcgcaggtcacggcgccagcgttcctgtgggcgcccaaaaactacggagtgacatacctgaaaatgggtcgagcaattagtctgtggaaacacatgcaaacaatggtaaaggagaaagccccggtgatggtgccgctagaatcactgaggtaaattcgagcaccgctgtcaaaaagaagaagaaacgcggtgaccgccagcagcaggatggcccacaacttaagaagttgctacacagggtcaccagccagcagttggaaatacttgaaggtttcttgagcatatgcgcacaccctgacgacatccaaaggaggcagctgaatgagtcgacgggtctttcggtacatcaagtgaagttttggttcgagaataaaaggacccatgtaaagctacaaggcacggatggtgaaacacataggcactcatctctctcagatctcgtttactggagcatcaaagtgtcaactgcttataacccgctttgcttctaccagctctccttcacacgctcagagttttccatggcattcccctacgtttccacatcagtcaacgagaaactagaggactcgttgctatccagctttgccgagaactacaacaatggtttcggaagaaaccgcatcacctacacagacacgtgtaccggtcaagatctgaagaaataccacaacatggatgccatcaatgacctggtagtgtcaggggtagcgtcaaggagagtcaaccacccaagtggacaaaccgatataatcgtcttctgtagcggcgggttcgagaatccaggcactgcgaaatcaaaaggttaggttaaatactaccgctaattgttgttccacttccgattgttgtgccgaaagctaaatctctacgacgatgacgacaccgtttggttttcttgagatcccttcgggcctgccgctgagtaggcatctcgcggagaagaagactaacggcacaaaaactgtccagggcgaaaaatgcgatggcgagtgcctcgtcaaatcgagtctcctcgaaggaactttctttgggatagtgcttctcatcatcttgatatcaggactcatcatcttgtgagatactgttctatatgcatggtacttgagttattctacgctactactgacatactaaattggagccttggagtctggagaaaaaaaagggggtggctgtattctcaaggaacatgagaccactcagctctggagtgaatgaaggacgtcgtctatggaagtcagacatcacctagagctagggtgtccattcttgacatgtttctcttagttataggtggatactgtctagctaggaacaaagtcttgagggattgatggacgcatgcatcttcgattcctatgtgttgtattactactcgtacaatctccaattcttatgaacttatgtatttggactgtgaatttgtgatatgaacatatatcaatgtgtttgaaatctgtattgtatgtgatattctgtgttgcatgtgatattatgtgtgtctaatttttcatttctgtattttttatttttttctggaaaagggttaag

SEQ ID NO: 34612 - DNA, 1984 bp, Zea Mays
aaaaaacccaaacccctaacccgtgcgggactcgtctatctcaccttctctcacacgctgaaatcccctccacgccgccgccgaacacataatcgcaagacgcgccgccggaacgccggacccgcgccgcccctccgccaccgcgcacactcctccaccgcacgtaccgcgctcactcctccaccgcgccgccgccagccaccgcgctcgccgcgcctccgccaccgctcctccaggattcagattgcggccgcggtgactccccgagcagaagaacccgatcgaacgcggccgtggcgactccccgagcagaagaacctgatcgaacgcggacgcggcggcgactccccgatctcagatccctgctgcgagcgaaggaccagcagtgttcgattcgagcagagatggcggcggcatgggcggggctggctgtgttgctcgtcgcggcgcagttggcatcagcggcgcaggtcacggcgccagcgttcctgtgggcgcccaaaaactacggagtgacatacctgaaaatgggtcgagcaattagtctgtggaaacacatgcaaacaatggtaaaggagaaagccccggtgatggtgccgctagaatcactgaggtaaattcgagcaccgctgtcaaaaagaagaagaaacgcggtgaccgccagcagcaggatggcccacaacttaagaagttgctacacagggtcaccagccagcagttggaaatacttgaaggtttcttgagcatatgcgcacaccctgacgacatccaaaggaggcagctgaatgagtcgacgggtctttcggtacatcaagtgaagttttggttcgagaataaaaggacccatgtaaagcatctgagtggaagagaagagaactacaggttgaaagcggagaatgaaatgctgaaggaggaaaacaataggcttattaggcaggaacagagcaatgctcctgcccctgctccctgtcccagatgcattaatgatgcggggcacctcctgctcgagaaagaagttgaacggctgaaggcgcttaaccagatgctgcagcaagagttgcagctacaaggcacggatggtgaaacacatagctctccttcacacgctcagagttttccatggcattcccctacgtttccacatcagtcaacgagaaactagaggactcgttgctatccagctttgccgagaactacaacaatggtttcggaagaaaccgcatcacctacacagacacgtgtaccggtcaagatctgaagaaataccacaacatggatgccatcaatgacctggtagtgtcaggggtagcgtcaaggagagtcaaccacccaagtggacaaaccgatataatcgtcttctgtagcggcgggttcgagaatccaggcactgcgaaatcaaaagggcgaaaaatgcgatggcgagtgcctcgtcaaatcgagtctcctcgaaggaactttctttgggatagtgcttctcatcatcttgatatcaggactcatcatcttgtgagatactgttctatatgcatggtacttgagttattctacgctactactgacatactaaattggagccttggagtctggagaaaaaaaagggggtggctgtattctcaaggaacatgagaccactcagctctggagtgaatgaaggacgtcgtctatggaagtcagacatcacctagagctagggtgtccattcttgacatgtttctcttagttataggtggatactgtctagctaggaacaaagtcttgagggattgatggacgcatgcatcttcgattcctatgtgttgtattactactcgtacaatctccaattcttatgaacttatgtatttggactgtgaatttgtgatatgaacatatatcaatgtgtttgaaatctgtattgtatgtgatattctgtgttgcatgtgatattatgtgtgtctaatttttcatttctgtattttttatttttttctggaaaagggttaag

SEQ ID NO: 34613 - DNA, 676 bp, Zea Mays
cgatagttcagatttatttaagacgaagagaagcaaatgaatgcttcatacatcatttctgtggctaggaagcttggttgctccatttttttgttaccagaagatatattggaggtgaaccagaagatgatgctaactctgacagcaagcattatgtactggtatttgaaaaggccaacatcacaatcattggactctgaaaacgggagttcatgtgaaacaacctccatcacaacttcagatgattctgcatctgaatcatcgattgatgacaatacaactagataaaagagcagggtcatgaaaataattgatatgacctgtcattttgaaaacttgggattgattgtttgctgtaattttaagggcaaatacattcaagaccgaggcaagggaaatggttaagggctttgggtgtttttttgaggtttaatagtgtgattgggtgaaagatgtttgacatcctgtaaatatatctataactagtgacaataggttgtccaaaatccactatttgagttagaacaatttgagttacaatgtacaataaattagtgtcctatccgttaaagcttttaggcgcatgttgtcatatgcttatggaataactacaacattttccttgaaatatgcttaaattaacacgagcttaaatcgcttgtgatttggcttgatg

SEQ ID NO: 34614 - DNA, 2546 bp, Zea Mays
aaacccggctggtctctctcctctgagttgcccttgccccacattacaccacaccacccccctcccactccatgctgtcaggagcggaaggccgaagcgccaccgcgcccaccctgatctgcccgcccacctaacgtcggccgtcaatcggccgccgccgcgatggggtttgacgggctggtcgtggtgtcagatccttacctgcagcgccgcttcacgcaggccgaacttcgcgcgctccaggcccagtatgcggcgctgcgggacgcgtcgcctaacgggaggctgcggatgcgggacctccccgccgccatctctggcgtccgcggtgcggccaagagcagggacgccgagaaggagaatagcgcgccggagccaggcccctgccatggcctcactgacgaggagtgggcctccgtgcttaaggccgtcgcgcgtgctgacgagaagccgcaccaggacgcgagcttcgagctcttcctccgcgtctacgctgagatgcagctgcgactcaaggcagtaagcgtctgctccggccgcgccggaggaatcgtgcgctcctcctcctcctctgctgttgccttcctcacggcggccaccaccacactgcttcacaccatcagcgagtccgagaaggcgtcctatgttggccacatcaacgcttatctcgcggatgatccgtccctgaagagcgccctccccatcgatccggcgaccgatcacatcttccatatcaccaaggacggcgtgctcctatgcaaactcatcaacttggctgtaccgggcaccatcgatgagcgagccatcaataccaagagggtccttaatctttgggagaagaacgagaaccacacgctttgcctcaattctgccaaagcgatcggctgcactgtcgtcaacatcggcacacaagacctcgccgaagggaggcctcatctggtcctgggcttaatatctcaaataatcaagatacaactgttggcaaatgttaatctgaaaagcacacctcaattagttgaattggttgaggacagtaaggagatggaggagcttatgagtttatctcctgaaaagattctactaaggtggatgaactttcaactgaagaaagcaggtttccagaaaagagtaacaaatttttcatcagatataaaagatagtgaagcctatgcttgtctattgaatgtcctagcacctgaatgcagtgcaaaaccatctgcgatgtctgtaaaagatctacttcatagagcaaggttaattcttgagcatgcagataggatgggctgcaaaaggtacctgactccaaaagacatagttgatggtttacccaatctaaatcttgccttcgtggctcatattttccaaaaaagaaatgggttgtccaaacaaatgaaacaagtttcctttgtggatggactctctgatgatgctcaagtttccagggaagaaaggtcattccggctgtggattaacagccttggaatttcaacttacatcaacaatgtgtttgaagaccttagaaatggatgggttctccttgaggtgattgacaagattgctccaggctcagttaattggaagatggcaaatcgcccaccaatcaaattaccattcaggaaagttgaaaactgcaatcaagttttgaagattggaaaagaactaaaattttctttggtgaatattgctggaaatgatattgttcaagggaacaaaaaactgatattagcttttctatggcaattgatgcggtacaacattctacaactgctgaagaatcttagatttcactcaaatggaaaagagatcacagataatgacatattggcatgggccaataagaaagtaaaagattctggaaagcaccactcttatatgcaaagtttcaaggataaaagcctttcaagtggcacctttttccttgacttactaagtgctgtggagcctcgagttgtgaattggagccttgtgaccaaaggggaaaaaggtgaaccagaagatgatgctaactctgacagcaagcattatgtactggtatttgaaaaggccaacatcacaatcattggactctgaaaacgggagttcatgtgaaacaacctccatcacaacttcagatgattctgcatctgaatcatcgattgatgacaatacaactagataaaagagcagggtcatgaaaataattgatatgacctgtcattttgaaaacttgggattgattgtttgctgtaattttaagggcaaatacattcaagaccgaggcaagggaaatggttaagggctttgggtgtttttttgaggtttaatagtgtgattgggtgaaagatgtttgacatcctgtaaatatatctataactagtgacaataggttgtccaaaatccactatttgagttagaacaatttgagttacaatgtacaataaattagtgtcctatccgttaaagcttttaggcgcatgttgtcatatgcttatggaataactacaacattttccttgaaatatgcttaaattaacacgagcttaaatcgcttgtgatttggcttgatg

SEQ ID NO: 34615 - DNA, 2617 bp, Zea Mays
cagcgaacggacgctcctcggggcccaaacccggctggtctctctcctctgagttgcccttgccccacattacaccacaccacccccctcccactccatgctgtcaggagcggaaggccgaagcgccaccgcgcccaccctgatctgcccgcccacctaacgtcggccgtcaatcggccgccgccgcgatggggtttgacgggctggtcgtggtgtcagatccttacctgcagcgccgcttcacgcaggccgaacttcgcgcgctccaggcccagtatgcggcgctgcgggacgcgtcgcctaacgggaggctgcggatgcgggacctccccgccgccatctctggcgtccgcggtgcggccaagagcagggacgccgagaaggagaatagcgcgccggagccaggcccctgccatggcctcactgacgaggagtgggcctccgtgcttaaggccgtcgcgcgtgctgacgagaagccgcaccaggacgcgagcttcgagctcttcctccgcgtctacgctgagatgcagctgcgactcaaggcagtaagcgtctgctccggccgcgccggaggaatcgtgcgctcctcctcctcctctgctgttgccttcctcacggcggccaccaccacactgcttcacaccatcagcgagtccgagaaggcgtcctatgttggccacatcaacgcttatctcgcggatgatccgtccctgaagagcgccctccccatcgatccggcgaccgatcacatcttccatatcaccaaggacggcgtgctcctatgcaaactcatcaacttggctgtaccgggcaccatcgatgagcgagccatcaataccaagagggtccttaatctttgggagaagaacgagaaccacacgctttgcctcaattctgccaaagcgatcggctgcactgtcgtcaacatcggcacacaagacctcgccgaagggaggcctcatctggtcctgggcttaatatctcaaataatcaagatacaactgttggcaaatgttaatctgaaaagcacacctcaattagttgaattggttgaggacagtaaggagatggaggagcttatgagtttatctcctgaaaagattctactaaggtggatgaactttcaactgaagaaagcaggtttccagaaaagagtaacaaatttttcatcagatataaaagatagtgaagcctatgcttgtctattgaatgtcctagcacctgaatgcagtgcaaaaccatctgcgatgtctgtaaaagatctacttcatagagcaaggttaattcttgagcatgcagataggatgggctgcaaaaggtacctgactccaaaagacatagttgatggtttacccaatctaaatcttgccttcgtggctcatattttccaaaaaagaaatgggttgtccaaacaaatgaaacaagtttcctttgtggatggactctctgatgatgctcaagtttccagggaagaaaggtcattccggctgtggattaacagccttggaatttcaacttacatcaacaatgtgtttgaagaccttagaaatggatgggttctccttgaggtgattgacaagattgctccaggctcagttaattggaagatggcaaatcgcccaccaatcaaattaccattcaggaaagttgaaaactgcaatcaagttttgaagattggaaaagaactaaaattttctttggtgaatattgctggaaatgatattgttcaagggaacaaaaaactgatattagaatcttagatttcactcaaatggaaaagagatcacagataatgacatattggcatgggccaataagaaagtaaaagattctggaaagcaccactcttatatgcaaagtttcaaggataaaagcctttcaagtggcacctttttccttgacttactaagtgctgtggagcctcgagttgtgaattggagccttgtgaccaaaggggaaaaagacgaagagaagcaaatgaatgcttcatacatcatttctgtggctaggaagcttggttgctccatttttttgttaccagaagatatattggaggtgaaccagaagatgatgctaactctgacagcaagcattatgtactggtatttgaaaaggccaacatcacaatcattggactctgaaaacgggagttcatgtgaaacaacctccatcacaacttcagatgattctgcatctgaatcatcgattgatgacaatacaactagataaaagagcagggtcatgaaaataattgatatgacctgtcattttgaaaacttgggattgattgtttgctgtaattttaagggcaaatacattcaagaccgaggcaagggaaatggttaagggctttgggtgtttttttgaggtttaatagtgtgattgggtgaaagatgtttgacatcctgtaaatatatctataactagtgacaataggttgtccaaaatccactatttgagttagaacaatttgagttacaatgtacaataaattagtgtcctatccgttaaagcttttaggcgcatgttgtcatatgcttatggaataactacaacattttccttgaaatatgcttaaattaacacgagcttaaatcgcttgtgatttggcttgatg

SEQ ID NO: 34616 - DNA, 2743 bp, Zea Mays
cctgcttctgcctcaccatcattcttctcccctttcctttattttgaaccagcgaacggacgctcctcggggcccaaacccggctggtctctctcctctgagttgcccttgccccacattacaccacaccacccccctcccactccatgctgtcaggagcggaaggccgaagcgccaccgcgcccaccctgatctgcccgcccacctaacgtcggccgtcaatcggccgccgccgcgatggggtttgacgggctggtcgtggtgtcagatccttacctgcagcgccgcttcacgcaggccgaacttcgcgcgctccaggcccagtatgcggcgctgcgggacgcgtcgcctaacgggaggctgcggatgcgggacctccccgccgccatctctggcgtccgcggtgcggccaagagcagggacgccgagaaggagaatagcgcgccggagccaggcccctgccatggcctcactgacgaggagtgggcctccgtgcttaaggccgtcgcgcgtgctgacgagaagccgcaccaggacgcgagcttcgagctcttcctccgcgtctacgctgagatgcagctgcgactcaaggcagtaagcgtctgctccggccgcgccggaggaatcgtgcgctcctcctcctcctctgctgttgccttcctcacggcggccaccaccacactgcttcacaccatcagcgagtccgagaaggcgtcctatgttggccacatcaacgcttatctcgcggatgatccgtccctgaagagcgccctccccatcgatccggcgaccgatcacatcttccatatcaccaaggacggcgtgctcctatgcaaactcatcaacttggctgtaccgggcaccatcgatgagcgagccatcaataccaagagggtccttaatctttgggagaagaacgagaaccacacgctttgcctcaattctgccaaagcgatcggctgcactgtcgtcaacatcggcacacaagacctcgccgaagggaggcctcatctggtcctgggcttaatatctcaaataatcaagatacaactgttggcaaatgttaatctgaaaagcacacctcaattagttgaattggttgaggacagtaaggagatggaggagcttatgagtttatctcctgaaaagattctactaaggtggatgaactttcaactgaagaaagcaggtttccagaaaagagtaacaaatttttcatcagatataaaagatagtgaagcctatgcttgtctattgaatgtcctagcacctgaatgcagtgcaaaaccatctgcgatgtctgtaaaagatctacttcatagagcaaggttaattcttgagcatgcagataggatgggctgcaaaaggtacctgactccaaaagacatagttgatggtttacccaatctaaatcttgccttcgtggctcatattttccaaaaaagaaatgggttgtccaaacaaatgaaacaagtttcctttgtggatggactctctgatgatgctcaagtttccagggaagaaaggtcattccggctgtggattaacagccttggaatttcaacttacatcaacaatgtgtttgaagaccttagaaatggatgggttctccttgaggtgattgacaagattgctccaggctcagttaattggaagatggcaaatcgcccaccaatcaaattaccattcaggaaagttgaaaactgcaatcaagttttgaagattggaaaagaactaaaattttctttggtgaatattgctggaaatgatattgttcaagggaacaaaaaactgatattaggaccatataatgaaattgcatttatcctagcttttctatggcaattgatgcggtacaacattctacaactgctgaagaatcttagatttcactcaaatggaaaagagatcacagataatgacatattggcatgggccaataagaaagtaaaagattctggaaagcaccactcttatatgcaaagtttcaaggataaaagcctttcaagtggcacctttttccttgacttactaagtgctgtggagcctcgagttgtgaattggagccttgtgaccaaaggggaaaaagacgaagagaagcaaatgaatgcttcatacatcatttctgtggctaggaagcttggttgctccatttttttgttaccagaagatatattggaggtgaaccagaagatgatgctaactctgacagcaagcattatgtactggtatttgaaaaggccaacatcacaatcattggactctgaaaacgggagttcatgtgaaacaacctccatcacaacttcagatgattctgcatctgaatcatcgattgatgacaatacaactagataaaagagcagggtcatgaaaataattgatatgacctgtcattttgaaaacttgggattgattgtttgctgtaattttaagggcaaatacattcaagaccgaggcaagggaaatggttaagggctttgggtgtttttttgaggtttaatagtgtgattgggtgaaagatgtttgacatcctgtaaatatatctataactagtgacaataggttgtccaaaatccactatttgagttagaacaatttgagttacaatgtacaataaattagtgtcctatccgttaaagcttttaggcgcatgttgtcatatgcttatggaataactacaacattttccttgaaatatgcttaaattaacacgagcttaaatcgcttgtgatttggcttgatg

SEQ ID NO: 34617 - DNA, 480 bp, Zea Mays
gtcagtttccagcaaggattggccaccaaggtcgtggagtatatgttgcccaattttaatgaggtctggtgggatatcattaccttagatatcttgatatgcaaatagtttggtgtttggactggaatgcgcacagtctgttactttgatggcaaaacgcaacgaagtaccatgggtaaggatgtgctggagaatgaaagcttctgtcttaaaacaataggatacaagaagcttgcaagtggttttgtgaaggcttttgtgaatcacttgaatcattagttcttttaagaatggttttgtaaagcgttagcaaatatgtgtaaaacacaataagatgtgtggcaaagtcagtgatctagttgtacagttttttatgtttatgtgatatgtggatatttcattgtgcaatgttaatgaactgtgtatgtctatgtgattatgtgtataaaatatatgttttgtggtgcttttgtgataata

SEQ ID NO: 34618 - DNA, 840 bp, Zea Mays
catgtcagtttccagcaaggattggccaccaaggtcgtggagtatatgttgcccaattttaatgaggtctggtgggatatcattaccttagatatcttgatatgcaaatagtttggtgagacatttgaagataattaatgttcatgtcacaaacattcagttaccttgtttatattaatgtgatgtgcaataagttagaattaagcagccgacatgccctccgcttgcttgattttatacaatttctttacatcagatatatatctattagtcagaaaggaaataaaaactaatacatatttgacatacttctgacatcacattttgtttgactatactatttaatgttatgccacttgtcaaatatgcatggtcttgggaatccaagaagaattgttggcatttgtaataacattatttggtaatgatagttctaggttttctacttaaacaacaattatttttgatgcaggtgtttggactggaatgcgcacagtctgttactttgatggcaaaacgcaacgaagtaccatgggtaaggatgtgctggagaatgaaagcttctgtcttaaaacaataggatacaagaagcttgcaagtggttttgtgaaggcttttgtgaatcacttgaatcattagttcttttaagaatggttttgtaaagcgttagcaaatatgtgtaaaacacaataagatgtgtggcaaagtcagtgatctagttgtacagttttttatgtttatgtgatatgtggatatttcattgtgcaatgttaatgaactgtgtatgtctatgtgattatgtgtataaaatatatgttttgtggtgcttttgtgataata

SEQ ID NO: 34619 - DNA, 346 bp, Zea Mays
atcacatgtcagtttccagcaaggtgtttggactggaatgcgcacagtctgttactttgatggcaaaacgcaacgaagtaccatgggatacaagaagcttgcaagtggttttgtgaaggcttttgtgaatcacttgaatcattagttcttttaagaatggttttgtaaagcgttagcaaatatgtgtaaaacacaataagatgtgtggcaaagtcagtgatctagttgtacagttttttatgtttatgtgatatgtggatatttcattgtgcaatgttaatgaactgtgtatgtctatgtgattatgtgtataaaatatatgttttgtggtgcttttgtgataata

SEQ ID NO: 34620 - DNA, 488 bp, Zea Mays
tggatcacatgtcagtttccagcaagtaggattggccaccaaggtcgtggagtatatgttgcccaattttaatgaggtctggtgggatatcattaccttagatatcttgatatgcaaatagtttggtgtttggactggaatgcgcacagtctgttactttgatggcaaaacgcaacgaagtaccatgggatgtgctggagaatgaaagcttctgtcttaaaacaataggatacaagaagcttgcaagtggttttgtgaaggcttttgtgaatcacttgaatcattagttcttttaagaatggttttgtaaagcgttagcaaatatgtgtaaaacacaataagatgtgtggcaaagtcagtgatctagttgtacagttttttatgtttatgtgatatgtggatatttcattgtgcaatgttaatgaactgtgtatgtctatgtgattatgtgtataaaatatatgttttgtggtgcttttgtgataata

SEQ ID NO: 34621 - DNA, 846 bp, Zea Mays
gtggatcacatgtcagtttccagcaagtaggattggccaccaaggtcgtggagtatatgttgcccaattttaatgaggtctggtgggatatcattaccttagatatcttgatatgcaaatagtttggtgagacatttgaagataattaatgttcatgtcacaaacattcagttaccttgtttatattaatgtgatgtgcaataagttagaattaagcagccgacatgccctccgcttgcttgattttatacaatttctttacatcagatatatatctattagtcagaaaggaaataaaaactaatacatatttgacatacttctgacatcacattttgtttgactatactatttaatgttatgccacttgtcaaatatgcatggtcttgggaatccaagaagaattgttggcatttgtaataacattatttggtaatgatagttctaggttttctacttaaacaacaattatttttgatgcaggtgtttggactggaatgcgcacagtctgttactttgatggcaaaacgcaacgaagtaccatgggatgtgctggagaatgaaagcttctgtcttaaaacaataggatacaagaagcttgcaagtggttttgtgaaggcttttgtgaatcacttgaatcattagttcttttaagaatggttttgtaaagcgttagcaaatatgtgtaaaacacaataagatgtgtggcaaagtcagtgatctagttgtacagttttttatgtttatgtgatatgtggatatttcattgtgcaatgttaatgaactgtgtatgtctatgtgattatgtgtataaaatatatgttttgtggtgcttttgtgataata

SEQ ID NO: 34622 - DNA, 494 bp, Zea Mays
gtggatcacatgtcagtttccagcaagtaggattggccaccaaggtcgtggagtatatgttgcccaattttaatgaggtctggtgggatatcattaccttagatatcttgatatgcaaatagtttggtgtttggactggaatgcgcacagtctgttactttgatggcaaaacgcaacgaagtaccatgggtaaggatgtgctggagaatgaaagcttctgtcttaaaacaataggatacaagaagcttgcaagtggttttgtgaaggcttttgtgaatcacttgaatcattagttcttttaagaatggttttgtaaagcgttagcaaatatgtgtaaaacacaataagatgtgtggcaaagtcagtgatctagttgtacagttttttatgtttatgtgatatgtggatatttcattgtgcaatgttaatgaactgtgtatgtctatgtgattatgtgtataaaatatatgttttgtggtgcttttgtgataata

SEQ ID NO: 34623 - DNA, 437 bp, Zea Mays
gtggatcacatgtcagtttccagcaaggattggccaccaaggtcgtggagtatatgttgcccaattttaatgaggtgtttggactggaatgcgcacagtctgttactttgatggcaaaacgcaacgaagtaccatgggatgtgctggagaatgaaagcttctgtcttaaaacaataggatacaagaagcttgcaagtggttttgtgaaggcttttgtgaatcacttgaatcattagttcttttaagaatggttttgtaaagcgttagcaaatatgtgtaaaacacaataagatgtgtggcaaagtcagtgatctagttgtacagttttttatgtttatgtgatatgtggatatttcattgtgcaatgttaatgaactgtgtatgtctatgtgattatgtgtataaaatatatgttttgtggtgcttttgtgataata

SEQ ID NO: 34624 - DNA, 851 bp, Zea Mays
gtggatcacatgtcagtttccagcaagtaggattggccaccaaggtcgtggagtatatgttgcccaattttaatgaggtctggtgggatatcattaccttagatatcttgatatgcaaatagtttggtgagacatttgaagataattaatgttcatgtcacaaacattcagttaccttgtttatattaatgtgatgtgcaataagttagaattaagcagccgacatgccctccgcttgcttgattttatacaatttctttacatcagatatatatctattagtcagaaaggaaataaaaactaatacatatttgacatacttctgacatcacattttgtttgactatactatttaatgttatgccacttgtcaaatatgcatggtcttgggaatccaagaagaattgttggcatttgtaataacattatttggtaatgatagttctaggttttctacttaaacaacaattatttttgatgcaggtgtttggactggaatgcgcacagtctgttactttgatggcaaaacgcaacgaagtaccatgggtaaggatgtgctggagaatgaaagcttctgtcttaaaacaataggatacaagaagcttgcaagtggttttgtgaaggcttttgtgaatcacttgaatcattagttcttttaagaatggttttgtaaagcgttagcaaatatgtgtaaaacacaataagatgtgtggcaaagtcagtgatctagttgtacagttttttatgtttatgtgatatgtggatatttcattgtgcaatgttaatgaactgtgtatgtctatgtgattatgtgtataaaatatatgttttgtggtgcttttgtgataata

SEQ ID NO: 34625 - DNA, 446 bp, Zea Mays
ggtggatcacatgtcagtttccagcaagtaggattggccaccaaggtcgtggagtatatgttgcccaattttaatgaggtgtttggactggaatgcgcacagtctgttactttgatggcaaaacgcaacgaagtaccatgggtaaggatgtgctggagaatgaaagcttctgtcttaaaacaataggatacaagaagcttgcaagtggttttgtgaaggcttttgtgaatcacttgaatcattagttcttttaagaatggttttgtaaagcgttagcaaatatgtgtaaaacacaataagatgtgtggcaaagtcagtgatctagttgtacagttttttatgtttatgtgatatgtggatatttcattgtgcaatgttaatgaactgtgtatgtctatgtgattatgtgtataaaatatatgttttgtggtgcttttgtgataata

SEQ ID NO: 34626 - DNA, 393 bp, Zea Mays
gaggtggatcacatgtcagtttccagcaaggtgtttggactggaatgcgcacagtctgttactttgatggcaaaacgcaacgaagtaccatgggatgtgctggagaatgaaagcttctgtcttaaaacaataggatacaagaagcttgcaagtggttttgtgaaggcttttgtgaatcacttgaatcattagttcttttaagaatggttttgtaaagcgttagcaaatatgtgtaaaacacaataagatgtgtggcaaagtcagtgatctagttgtacagttttttatgtttatgtgatatgtggatatttcattgtgcaatgttaatgaactgtgtatgtctatgtgattatgtgtataaaatatatgttttgtggtgcttttgtgataata

SEQ ID NO: 34627 - DNA, 400 bp, Zea Mays
aggaggtggatcacatgtcagtttccagcaaggtgtttggactggaatgcgcacagtctgttactttgatggcaaaacgcaacgaagtaccatgggtaaggatgtgctggagaatgaaagcttctgtcttaaaacaataggatacaagaagcttgcaagtggttttgtgaaggcttttgtgaatcacttgaatcattagttcttttaagaatggttttgtaaagcgttagcaaatatgtgtaaaacacaataagatgtgtggcaaagtcagtgatctagttgtacagttttttatgtttatgtgatatgtggatatttcattgtgcaatgttaatgaactgtgtatgtctatgtgattatgtgtataaaatatatgttttgtggtgcttttgtgataata

SEQ ID NO: 34628 - DNA, 735 bp, Zea Mays
acgctgcatcgcgagggcggcctgctcaatgccgcgagctgtcccgtttgcatcgcgagggcggcctgctcaatgccgggagttgtcctcgtcgctagccatctttgccgaggtgggctagctcgccatctcccgcccgcgtgctctcgcgtcctcccgctcccgcgacctttcgctccgcgccatcccgctgtcggtcccgcgcccgcgatcttgcgaactcgcctccgtgtacagcctgcgccgctgcatacttccatcgccgacattcagccatgctcagaccgccacgaccccgtccaacggagagtagagaaaatgggatgtggactggacctgcagagaagcgccatgtttcccagtttctcccaggaagggtgaacaagagttgggtcatctggagagagaatttgacgaatccactgtcggatcgatgcacaatcggttggttcctctcacaatcgacgatcagattctagagaatgtgtcaaatggtactgaattccacgaagataagctggagggaagcagtgcagaagataatcacctgagttgttgcagcgcagagcactggcgaagaaaagtaaacaagcgacgcaaaaaatgacatgtggacgcccaactgcgtcatgcggtggctacgacagatgaaaaataaaaaaagcgacctgtggacgtccagcgcgtcagctacaagaaatgaaaaatcatgcgcccaaatttgaagagtttgtt

SEQ ID NO: 34629 - DNA, 469 bp, Zea Mays
attacttgctactagaaagtagaccatttctgctaccagacattgatttgtaccccggtatcaatatctgggtaactttgggaagcaagcattgggtagtcaaacaaagccctacagacattgatctgtaatccctatatttggtgagaattacaatggaaggaagcaagtcggtcctgctcttgatggtgatcctgggaagtttgatggttcctgcacactctcggaacgttgttcgtttttgcaaatgtcaaaaacagacctgcaacatgggagcactattcgacgctgtttgttactgctgtccaggcggcagttgttattcgacgatgcaggattgcgcaccagcttgccgctgcgacaagctttcgcacgccccactaaatgtaagggatcatgaatcggtcctgtgatttattgcaaagaaataaatgaaaaaagcggtggcatttgttgatgtttgatataa

SEQ ID NO: 34630 - DNA, 494 bp, Zea Mays
attacttgctactagaaagtagaccatttctgctaccagacattgatttgtaccccggtatcaatatctgggtaactttgggaaggagtatatatatatgaaccttgcagcaagcattgggtagtcaaacaaagccctacagacattgatctgtaatccctatatttggtgagaattacaatggaaggaagcaagtcggtcctgctcttgatggtgatcctgggaagtttgatggttcctgcacactctcggaacgttgttcgtttttgcaaatgtcaaaaacagacctgcaacatgggagcactattcgacgctgtttgttactgctgtccaggcggcagttgttattcgacgatgcaggattgcgcaccagcttgccgctgcgacaagctttcgcacgccccactaaatgtaagggatcatgaatcggtcctgtgatttattgcaaagaaataaatgaaaaaagcggtggcatttgttgatgtttgatataa

SEQ ID NO: 34631 - DNA, 892 bp, Zea Mays
ctctattcccagtcaaagcccgacctcctttatggagcgccgctgcattgcctaaaccctgcgcccacctcctgttgtgccccccgcactcttgttgtagaatagagctagcgaccgcacctggcgtctcagtgcgggctcagcgaagcggcgtcgacggtcgacccgatgctcagctcaacactgcccaggactccattcccagctagagcccgacctctccccgccattcgctttgttctcggacgcaaatcatgcgggctcatgcaacaagtgtcgccgcgtggtctggtgccgccaccgaccggagccccttgcctctcttgcatgcaataaagtttttggaaaaggactacttttagtacgatccttaatgcttagaatgcaatgttccatcataagattgagactgatctgattcagggctagaagagaaccttgtgcactgcatagtttatttctctttcttttgtattatgattagcactatctgatctgcaatagttttttgctaacttttgttgaccactcttgctttagttttagggaagggtcgtgatgtatccaagaaattttggagcaccaaggaccctgagcagcaaccattcactatttcactttcaacattggtcagggttcaatgatcaaagatgggagtaatggctaaccctcctaaacctggagatatctcataccaaaagactaaagtttagtgctgaaaggtcaaacatactgcccctcagaagttttagtccgcgtccaacttcagtacaaaacgaacctatgcgagatattgaacacttatttgtctttgtttacattcataagtttgatgtggcccaaaatgattatgatgttgcagcaagttcatccttgaatctttgaggaggag

SEQ ID NO: 34632 - DNA, 1566 bp, Zea Mays
agcacacttgccagtgagagaaacgacttgcagtggatcgtattgtgttgtcgctctctctaatttcttttgggaaaaggaacaggaacaggggtgcacacatcaacaggtgagaagagattggatgaacgatgggccatgcatggcaagtggtgtgatagaatacagatacatatatatggctatatgcatggggcagagaggagcccagggccagacagacaggcaagaaagagaggagatagataagcaacttgatatagatagatagataggtatccactaactccagacaaagttctttacctccagattcctcacaaataaaggccctcaattattaccctccaaagaaagcaaaaaaaaatccaatgctcctcctacctcgtcctcctttataaagcaaattgcaaactgcttctgatgcaccatcccagcaagagcaagcttcaacctttgcatgcagagacctagtggaatagagcgaggggaatggagcaaggagacgaggcgtcgtcggtgaccaaggagagcccggagcagcagcttacccgggaccgggagcagcagcacgacgccggcgtggcgtggctgaacctcacgcttcgcgcgggcgagtcgccctcgccggacgcggccgcgagctgctccgccgagtccgggtccgggtccgggtccgggtccgggtccgggcccgagcccaccgccaagccgtccgccgccccgcacaaggtgttctcctgcaacttctgcctgcgcaagttcttcagctcgcaggcgctaggcgggcaccagaacgcgcacaagcgggagcgcagcgccgccaagcgctcctaccacgcgcaccgcatgatcgtgggcctgccgctgcacgcgcaccactcggagcacgagcgagcgttcgagactgaacagagcaagatcgacttggacctcaggctctgatggggggatgtgcccgtgcatggtcagttcatctgctgaataaatctggtctggagatatgatcaggttcagctcactgtcaggtgaaaacccatagagttttggacatattgagtcgcttagaattgttttgatggtactgcaattatgcatttctgtagctggaaactgtactttagatctattgacagacatcagttttcttgcatgttttcgacaccgtcctctcaaagaacactcaaagcactgcatattgcaagagctattgtaggcatgcagccaacacactgtttcagacgcatttccaaaatggtgatttacgcgtctgagcaaaaccagcatatgcaattattattagaacaaatatataaatatatattgccacgatggcatcagagtgagaaagatagccgagctgcaggcagcaaacattcaaacaaacgtccatgctccaccagagattctgagaccagcacatgttgtgttgttgtatccgggaactacccatctgtgtcaaatctggggttacctgaacttaatcaaaagatgctccgaccataggttatggacatgtgttgatgattagggattagcagtgaaacaggcctctatgatttggtt

SEQ ID NO: 34633 - DNA, 620 bp, Zea Mays
gccctatcctccctcaggccaccgccgctctcccctggtagccgtcgcctctccctgctctgctcctctctctcccaagcggctctccctctctctcctcgcttctctcccctcctcttctccagccgctgctaggcaaccggccgccgagcagcgcagccacgctgttgctctcgccaggacgccaggaaccgctgccatggctgcagcaaatctgagcacagttggcttctttgcagtttattcctgcattttttggggtgattaattcctttttcaaggaacgtggatgcgggcgataaattgaagctgtgggtactctgttttctgaaagacaaatgatagctattcaaggagctagaggctgctcaacataaagcatcaacagcaacctctggaacagctgaaaatgctctactggaagctaagtcagtgactgatcttaaatctaaagatttggaggagaagaaaagggagctttgttcactgatacaagaagttggagtgcttttgtgaaggcttttgtgaatcacttgaagcgttagtacttttgtgaatgattttgtaaagtgtttgcaaatatgtgcaaaacataataacatgtgtaggttttgtgaatg

SEQ ID NO: 34634 - DNA, 672 bp, Zea Mays
gccgtccctgccctatcctccctcaggccaccgccgctctcccctggtagccgtcgcctctccctgctctgctcctctctctcccaagcggctctccctctctctcctcgcttctctcccctcctcttctccagccgctgctaggcaaccggccgccgagcagcgcagccacgctgttgctctcgccaggacgccaggaaccgctgccatggctgcagcaaatctgagcacagttggcttctttgcagtttgcaggctaaagtgtgttcctacttcctcctgtatacacagtttattcctgcattttttggggtgattaattcctttttcaaggaacgtggatgcgggcgataaattgaagctgtgggtactctgttttctgaaagacaaatgatagctattcaaggagctagaggctgctcaacataaagcatcaacagcaacctctggaacagctgaaaatgctctactggaagctaagtcagtgactgatcttaaatctaaagatttggaggagaagaaaagggagctttgttcactgatacaagaagttggagtgcttttgtgaaggcttttgtgaatcacttgaagcgttagtacttttgtgaatgattttgtaaagtgtttgcaaatatgtgcaaaacataataacatgtgtaggttttgtgaatg

SEQ ID NO: 34635 - DNA, 685 bp, Zea Mays
cttggcccatctccccagccgccgtccctgccctatcctccctcaggccaccgccgctctcccctggtagccgtcgcctctccctgctctgctcctctctctcccaagcggctctccctctctctcctcgcttctctcccctcctcttctccagccgctgctaggcaaccggccgccgagcagcgcagccacgctgttgctctcgccaggacgccaggaaccgctgccatggctgcagcaaatctgagcacagttggcttctttgcaggctaaagtgtgttcctacttcctcctgtatacacagtttattcctgcattttttggggtgattaattcctttttcaaggaacgtggatgcgggcgataaattgaagctgtgggtactctgttttctgaaagacaaatgatagctattcaaggagctagaggctgctcaacataaagcatcaacagcaacctctggaacagctgaaaatgctctactggaagctaagtcagtgactgatcttaaatctaaagatttggaggagaagaaaagggagctttgttcactgatacaagaagttggagtgcttttgtgaaggcttttgtgaatcacttgaagcgttagtacttttgtgaatgattttgtaaagtgtttgcaaatatgtgcaaaacataataacatgtgtaggttttgtgaatg

SEQ ID NO: 34636 - DNA, 773 bp, Zea Mays
cttggcccatctccccagccgccgtccctgccctatcctccctcaggccaccgccgctctcccctggtagccgtcgcctctccctgctctgctcctctctctcccaagcggctctccctctctctcctcgcttctctcccctcctcttctccagccgctgctaggcaaccggccgccgagcagcgcagccacgctgttgctctcgccaggacgccaggaaccgctgccatggctgcagcaaatctgagcacagttggcttctttgcaggctaaagtgtgttcctacttcctcctgtatacacagtttattcctgcattttttggggtgattaattcctttttcaaggaacgtggatgcgggcgataaattgaagctgtgggtactctgttttctgaaaggttgaggtctggtttgccaggagtttttaatgtatctgacttcccaatatccagcaagttagtcatatgatgctgcgacttcatcatgacaaatgatagctattcaaggagctagaggctgctcaacataaagcatcaacagcaacctctggaacagctgaaaatgctctactggaagctaagtcagtgactgatcttaaatctaaagatttggaggagaagaaaagggagctttgttcactgatacaagaagttggagtgcttttgtgaaggcttttgtgaatcacttgaagcgttagtacttttgtgaatgattttgtaaagtgtttgcaaatatgtgcaaaacataataacatgtgtaggttttgtgaatg

SEQ ID NO: 34637 - DNA, 944 bp, Zea Mays
cctccctcaggccaccgccgctctcccctggtagccgtcgcctctccctgctctgctcctctctctcccaagcggctctccctctctctcctcgcttctctcccctcctcttctccagccgctgctaggcaaccggccgccgagcagcgcagccacgctgttgctctcgccaggacgccaggaaccgctgccatggctgcagcaaatctgagcacagttggcttctttgcagtttattcctgcattttttggggtgattaattcctttttcaaggaacgtggatgcgggcgataaattgaagctgtgggtactctgttttctgaaaggttgaggtctggtttgccaggagtttttaatgtatctgacttcccaatatccagcaagttagtcatatgatgctgcgacttcatcatggtatccatgtttgccgagcatcttgaagaaaaataataatctgtgggtagctgtagtgtcctcgacctatgtatggattagcattgtagaatttgtcaccatgtcaacgtattgattacatgattttgttaattggagtatgtcacacttagtggaggcagggggcctaaaccagatagcatctcatgaatctatagcttttaataatcatctatgtcaaggcaggtagcagttcttgggttagctttgtaatggggaatatatgtatttgcagacatactatgtcttaacactaaattaattgagccatactattttaacatcctccattccaaagtttttttatgtctccaagctaaataggtatgtggcactatttggtgaatttagtcatgtaggtattttttcagacaaatgatagctattcaacatatgcaattgttctgtaaatagaggcacattgagtagttctattcaacctatcaattttttcagacaaatgatagctattcaaggagctagaggctgc

SEQ ID NO: 34638 - DNA, 449 bp, Zea Mays
cctccctcaggccaccgccgctctcccctggtagccgtcgcctctccctgctctgctcctctctctcccaagcggctctccctctctctcctcgcttctctcccctcctcttctccagccgctgctaggcaaccggccgccgagcagcgcagccacgctgttgctctcgccaggacgccaggaaccgctgccatggctgcagcaaatctgagcacagttggcttctttgcagtttattcctgcattttttggggtgattaattcctttttcaaggaacgtggatgcgggcgataaattgaagctgtgggtactctgttttctgaaaggttgaggtctggtttgccaggagtttttaatgtatctgacttcccaatatccagcaagttagtcatatgatgctgcgacttcatcatgacaaatgatagctattcaaggagctagaggctgc

SEQ ID NO: 34639 - DNA, 330 bp, Zea Mays
gccgccgtccctgccctatcctccctcaggccaccgccgctctcccctggtagccgtcgcctctccctgctctgctcctctctctcccaagcggctctccctctctctcctcgcttctctcccctcctcttctccagccgctgctaggcaaccggccgccgagcagcgcagccacgctgttgctctcgccaggacgccaggaaccgctgccatggctgcagcaaatctgagcacagttggcttctttgcagatgcgggcgataaattgaagctgtgggtactctgttttctgaaagacaaatgatagctattcaaggagctagaggctgc

SEQ ID NO: 34640 - DNA, 1016 bp, Zea Mays
catctccccagccgccgtccctgccctatcctccctcaggccaccgccgctctcccctggtagccgtcgcctctccctgctctgctcctctctctcccaagcggctctccctctctctcctcgcttctctcccctcctcttctccagccgctgctaggcaaccggccgccgagcagcgcagccacgctgttgctctcgccaggacgccaggaaccgctgccatggctgcagcaaatctgagcacagttggcttctttgcagtttgcaggctaaagtgtgttcctacttcctcctgtatacacagtttattcctgcattttttggggtgattaattcctttttcaaggaacgtggatgcgggcgataaattgaagctgtgggtactctgttttctgaaaggttgaggtctggtttgccaggagtttttaatgtatctgacttcccaatatccagcaagttagtcatatgatgctgcgacttcatcatggtatccatgtttgccgagcatcttgaagaaaaataataatctgtgggtagctgtagtgtcctcgacctatgtatggattagcattgtagaatttgtcaccatgtcaacgtattgattacatgattttgttaattggagtatgtcacacttagtggaggcagggggcctaaaccagatagcatctcatgaatctatagcttttaataatcatctatgtcaaggcaggtagcagttcttgggttagctttgtaatggggaatatatgtatttgcagacatactatgtcttaacactaaattaattgagccatactattttaacatcctccattccaaagtttttttatgtctccaagctaaataggtatgtggcactatttggtgaatttagtcatgtaggtattttttcagacaaatgatagctattcaacatatgcaattgttctgtaaatagaggcacattgagtagttctattcaacctatcaattttttcagacaaatgatagctattcaaggagctagaggctgc

SEQ ID NO: 34641 - DNA, 432 bp, Zea Mays
ggcccatctccccagccgccgtccctgccctatcctccctcaggccaccgccgctctcccctggtagccgtcgcctctccctgctctgctcctctctctcccaagcggctctccctctctctcctcgcttctctcccctcctcttctccagccgctgctaggcaaccggccgccgagcagcgcagccacgctgttgctctcgccaggacgccaggaaccgctgccatggctgcagcaaatctgagcacagttggcttctttgcagatgcgggcgataaattgaagctgtgggtactctgttttctgaaaggttgaggtctggtttgccaggagtttttaatgtatctgacttcccaatatccagcaagttagtcatatgatgctgcgacttcatcatgacaaatgatagctattcaaggagctagaggctgc

SEQ ID NO: 34642 - DNA, 1016 bp, Zea Mays
cttggcccatctccccagccgccgtccctgccctatcctccctcaggccaccgccgctctcccctggtagccgtcgcctctccctgctctgctcctctctctcccaagcggctctccctctctctcctcgcttctctcccctcctcttctccagccgctgctaggcaaccggccgccgagcagcgcagccacgctgttgctctcgccaggacgccaggaaccgctgccatggctgcagcaaatctgagcacagttggcttctttgcaggctaaagtgtgttcctacttcctcctgtatacacagtttattcctgcattttttggggtgattaattcctttttcaaggaacgtggatgcgggcgataaattgaagctgtgggtactctgttttctgaaaggttgaggtctggtttgccaggagtttttaatgtatctgacttcccaatatccagcaagttagtcatatgatgctgcgacttcatcatggtatccatgtttgccgagcatcttgaagaaaaataataatctgtgggtagctgtagtgtcctcgacctatgtatggattagcattgtagaatttgtcaccatgtcaacgtattgattacatgattttgttaattggagtatgtcacacttagtggaggcagggggcctaaaccagatagcatctcatgaatctatagcttttaataatcatctatgtcaaggcaggtagcagttcttgggttagctttgtaatggggaatatatgtatttgcagacatactatgtcttaacactaaattaattgagccatactattttaacatcctccattccaaagtttttttatgtctccaagctaaataggtatgtggcactatttggtgaatttagtcatgtaggtattttttcagacaaatgatagctattcaacatatgcaattgttctgtaaatagaggcacattgagtagttctattcaacctatcaattttttcagacaaatgatagctattcaaggagctagaggctgc

SEQ ID NO: 34643 - DNA, 525 bp, Zea Mays
cggcccacttggcccatctccccagccgccgtccctgccctatcctccctcaggccaccgccgctctcccctggtagccgtcgcctctccctgctctgctcctctctctcccaagcggctctccctctctctcctcgcttctctcccctcctcttctccagccgctgctaggcaaccggccgccgagcagcgcagccacgctgttgctctcgccaggacgccaggaaccgctgccatggctgcagcaaatctgagcacagttggcttctttgcaggctaaagtgtgttcctacttcctcctgtatacacagtttattcctgcattttttggggtgattaattcctttttcaaggaacgtggatgcgggcgataaattgaagctgtgggtactctgttttctgaaagacaaatgatagctattcaacatatgcaattgttctgtaaatagaggcacattgagtagttctattcaacctatcaattttttcagacaaatgatagctattcaaggagctagaggctgc

SEQ ID NO: 34644 - DNA, 1214 bp, Zea Mays
cggcgttggagccttgccttggaggagccaatattaagaggatgatgacggacaggcagcgcgtgaggcaatgcgacattgaggtcatgaagatggccatgctcaagcacgaagaaaccttcaggcagcaggtccacgagctacaccgcctgtaccgtatacagagggagctgatgatgacgacgagtgacgacctgaccggagccaagccggtgaccaccccccgccggcgcagcaagcagccgcggcgggcgctgccgctgggcctgcagctcccggccgacgagtacatagccagcgccgacgaggacgaggacgccgccgccggcacggagctggagctgacgctcgccgtcggcgggcgctgctcacccgccggccgtcgcaagagcgacaggaggaggaggaggcaagcagcagagcctcgcgacgacgccggcgccgtctcctcccccttcgggcccgactgctccggcgcgagcgtcctatcgtcgccttcgtcggccgagtactgctccgatgacgggcctgcggcagcattccacgttccgccgccgccgtgccagagggccgtggcgtttgaccttgaagaaagcatgatgatgcggcagcacgcgccgtggctgctgcagtgccggcagtacctcaccctgaggatgacatgaaaccctgcaggctgctgcagcaagctgcagctcgccgtccatgtccatcgatcaatcaatcacattgtacctggtttgcgttgtgttgtagaagcagtagccactagttttttgttttgtttgtttttgctatgtcctaggtggcgcttgtgtcctaataatcctgatccaaagatgctaattgatcatgactaatgagtgcatcctgattgattaataatgttcaaactagtgctgattcaggagtaataatattgccactattcattcaaaattcttggcattctttagactatctctaacaacttacttatttacatcttttatttcaaactatattgtttcaagcagcttaggtagtgtttggttactaggtgttaaagatagaagtaaatcatctatacatagaatgcttgcatgcattctttccttagttcgcctgcgtccctgtaatttcgtccctgtaatttggcttgccaattctgcatgcatgtaatctgtatatatataagagaatgacagcagtctgtgcggtagcacattacgtct

SEQ ID NO: 34645 - DNA, 633 bp, Zea Mays
aaaaaactccaattgcggcgggtggggaaaaaaagagagaaagaaatttttttctccgttttttgaccccaattctgactgactcgccgccggcggctcgatcacgccggaaccctagtcgaggcgtcggggttttatctgcattgtggtatgattcatttgctacaagagcgttccatgttgtacccactccagtctgtcttttgtcttccctgtatatattatagagagaaaaaaagactgttacagatttatacagaggacccaagatgcagaaagctgaagatatgattcggcaagtccacggtgtcaggcattcaggccttcgtagaggattctggtgagcatgaagccgtcggtcccttcttagatggcaacgggcctcgattcccaattcaccatgggaaattctttcattagagacagtgaagtttcgtttcccacgaggatataaatgtgtaaacgaggacggaaatcattttctatctctgttctctacggagacacgttaaacatgtacgtggtggtgttttcgtgtaatagttaacgataaaaataaataattatcatgtcaatagaccacactcattgtataattgtgattcattttaatatatacataatgatattttt

SEQ ID NO: 34646 - DNA, 672 bp, Zea Mays
aaaaaactccaattgcggcgggtggggaaaaaaagagagaaagaaatttttttctccgttttttgaccccaattctgactgactcgccgccggcggctcgatcacgccggaaccctagtcgaggtccagcttgactcggagccaacatatagctacgaaactgcgtcggggttttatctgcattgtggtatgattcatttgctacaagagcgttccatgttgtacccactccagtctgtcttttgtcttccctgtatatattatagagagaaaaaaagactgttacagatttatacagaggacccaagatgcagaaagctgaagatatgattcggcaagtccacggtgtcaggcattcaggccttcgtagaggattctggtgagcatgaagccgtcggtcccttcttagatggcaacgggcctcgattcccaattcaccatgggaaattctttcattagagacagtgaagtttcgtttcccacgaggatataaatgtgtaaacgaggacggaaatcattttctatctctgttctctacggagacacgttaaacatgtacgtggtggtgttttcgtgtaatagttaacgataaaaataaataattatcatgtcaatagaccacactcattgtataattgtgattcattttaatatatacataatgatattttt

SEQ ID NO: 34647 - DNA, 3030 bp, Zea Mays
aaaaaactccaattgcggcgggtggggaaaaaaagagagaaagaaatttttttctccgttttttgaccccaattctgactgactcgccgccggcggctcgatcacgccggaaccctagtcgaggtctggggtagtttcggccgtgctcgggagctcgtttacgcggcgagctcgaccgccgcgggtctccggagccggtggacggcatcatcgtctagggtttgctcttaatcatctagggtttgctcttaccggagctgctcggccgcatcgtccgcgggcctacattttgtgctgccgccgagatgccgccgccgtctaagaagttggctcgcgtcgacacgctccagctcaaggatcagatcgtcaagcggctggggcccctgcgcgctgagctctacttccgcagcctcaagaagttcctcggctgtcagctcggcaaggatgagtttgagaagatctgtgttactacattggggaaggagaacatcaagctccacaatttcctcctccggtccatcctcagcaatgcttgtctatcggatgggcctccgccaagcatgcaggcggccactggaaactcgcagactagcacggtgtccaatgggacattcagcaatggcttattgccggtgaggagggtgaggccccggactaagaggttcagtgataagccgagcccgattgggaagtctcctcttggtcatccgagtgctgggggggagtttgtgtcagctggttgcaaggttttgcaggaggtaatctctgtggaggatggcgaggaggtcaaccaggcccgtggtagcccagtctgtgtgcagagccgaagcccgataaggcccccagtgggggttccaaaggttcagaattctgagcctttgatatcttgcgctttagatgtgtgctgcaattatggtgaactgccagattctcagacgctgtccaagctacttgatgataagttgaaggctcaaggtctcagtgtatccaaagagtttgctgatgtgttgaacgctgggttgaatgcatacatgactcggatgctgaagccctgtctaggtattgcgaaggcaaggggaatcaacaggacgatgcaccaagcaaatagccgcaccactgcttcagtaaatagtgggcagaacaatggctttcctttggaatcaagccattgttatcaagcttccctgcctgatctctcgacagcagtgctatcagatgctcagttagtggggtccgtggtgattcatgagaagatttcttcctatctccacaactgatagagagcagttagtttcctccacatttttggcaaaccctatggtggagttggtcaagtttaggcagtatgttgtagggccttctatcctgctgtagaaactacagctacaggtagttaggttgaggtatagtgaagttttactataggactgggtagtgtacccatggctggtgagggtgatacttcttaggatgcagtacatgatagtgagttccatttagctgtgattattcgcaaaggaaataattataacaaaagattctggaatgtgtcgtgccttttttttcgagcgttttgcagatatttgccattatgaaaaatgtgttttctaaaactgtcattataattcgtgcggtgattcccattatttgataaaaaaattggcgcatccattatatacgttggcccctaccagatgcccttgttgacttccttttacatactgcttgtctccaagcaccaagctcaagcagccaccagcggcaagctcaagcagccatggacatgggccggctccactccctgcagtaagcagcggcagccatggacatgggccagctccagcacgcgacctcctcgtcctccggcagcggcagccatggacgcggcacccggtgttctgtggtgtgcggcgtccttctccctgctgacttctttgccgccgtcattcctgttcttgttgtccagcaaatcctccgcacattccctcgactttactgcctactttccatgtggctgacatgtccaatgtggtgacctggacttcgttgctagggaatagggataaaacatgccatacgaatgtacaatatggcacgggttaatttttttgatcaaataatggcaactaccggatatcatgaactataatgacatttttagaatacacaattttcataatggcatatatatgaaaacccctttttttcaacgccttatgcaccaatgttaccatgttgtgcctgtacagagaatcaggtactgtgtttagaatattttgctgttggatatcttgggtttgttgcctcttgtctgctgtgatctagtttgtctggccaggttattggtttgtttattttaatgtgcataggcatccatctatttggctattactgttgatcatttattaattagtgttgcttaagggtgccatataaattcttgtttctttttttctctcttcctgtcattatctggtataggtccagcttgactcggagccaacatatagctacgaaactgcgtcggggttttatctgcattgtggtatgattcatttgctacaagagcgttccatgttgtacccactccagtctgtcttttgtcttccctgtatatattatagagagaaaaaaagactgttacagatttatacagaggacccaagatgcagaaagctgaagatatgattcggcaagtccacggtgtcaggcattcaggccttcgtagaggattctggtgagcatgaagccgtcggtcccttcttagatggcaacgggcctcgattcccaattcaccatgggaaattctttcattagagacagtgaagtttcgtttcccacgaggatataaatgtgtaaacgaggacggaaatcattttctatctctgttctctacggagacacgttaaacatgtacgtggtggtgttttcgtgtaatagttaacgataaaaataaataattatcatgtcaatagaccacactcattgtataattgtgattcattttaatatatacataatgatattttt

SEQ ID NO: 34648 - DNA, 3041 bp, Zea Mays
ataaatttggggaaaaaactccaattgcggcgggtggggaaaaaaagagagaaagaaatttttttctccgttttttgaccccaattctgactgactcgccgccggcggctcgatcacgccggaaccctagtcgaggctggggtagtttcggccgtgctcgggagctcgtttacgcggcgagctcgaccgccgcgggtctccggagccggtggacggcatcatcgtctagggtttgctcttaatcatctagggtttgctcttaccggagctgctcggccgcatcgtccgcgggcctacattttgtgctgccgccgagatgccgccgccgtctaagaagttggctcgcgtcgacacgctccagctcaaggatcagatcgtcaagcggctggggcccctgcgcgctgagctctacttccgcagcctcaagaagttcctcggctgtcagctcggcaaggatgagtttgagaagatctgtgttactacattggggaaggagaacatcaagctccacaatttcctcctccggtccatcctcagcaatgcttgtctatcggatgggcctccgccaagcatgcaggcggccactggaaactcgcagactagcacggtgtccaatgggacattcagcaatggcttattgccggtgaggagggtgaggccccggactaagaggttcagtgataagccgagcccgattgggaagtctcctcttggtcatccgagtgctgggggggagtttgtgtcagctggttgcaaggttttgcaggaggtaatctctgtggaggatggcgaggaggtcaaccaggcccgtggtagcccagtctgtgtgcagagccgaagcccgataaggcccccagtgggggttccaaaggttcagaattctgagcctttgatatcttgcgctttagatgtgtgctgcaattatggtgaactgccagattctcagacgctgtccaagctacttgatgataagttgaaggctcaaggtctcagtgtatccaaagagtttgctgatgtgttgaacgctgggttgaatgcatacatgactcggatgctgaagccctgtctaggtattgcgaaggcaaggggaatcaacaggacgatgcaccaagcaaatagccgcaccactgcttcagtaaatagtgggcagaacaatggctttcctttggaatcaagccattgttatcaagcttccctgcctgatctctcgacagcagtgctatcagatgctcagttagtggggtccgtggtgattcatgagaagatttcttcctatctccacaactgatagagagcagttagtttcctccacatttttggcaaaccctatggtggagttggtcaagtttaggcagtatgttgtagggccttctatcctgctgtagaaactacagctacaggtagttaggttgaggtatagtgaagttttactataggactgggtagtgtacccatggctggtgagggtgatacttcttaggatgcagtacatgatagtgagttccatttagctgtgattattcgcaaaggaaataattataacaaaagattctggaatgtgtcgtgccttttttttcgagcgttttgcagatatttgccattatgaaaaatgtgttttctaaaactgtcattataattcgtgcggtgattcccattatttgataaaaaaattggcgcatccattatatacgttggcccctaccagatgcccttgttgacttccttttacatactgcttgtctccaagcaccaagctcaagcagccaccagcggcaagctcaagcagccatggacatgggccggctccactccctgcagtaagcagcggcagccatggacatgggccagctccagcacgcgacctcctcgtcctccggcagcggcagccatggacgcggcacccggtgttctgtggtgtgcggcgtccttctccctgctgacttctttgccgccgtcattcctgttcttgttgtccagcaaatcctccgcacattccctcgactttactgcctactttccatgtggctgacatgtccaatgtggtgacctggacttcgttgctagggaatagggataaaacatgccatacgaatgtacaatatggcacgggttaatttttttgatcaaataatggcaactaccggatatcatgaactataatgacatttttagaatacacaattttcataatggcatatatatgaaaacccctttttttcaacgccttatgcaccaatgttaccatgttgtgcctgtacagagaatcaggtactgtgtttagaatattttgctgttggatatcttgggtttgttgcctcttgtctgctgtgatctagtttgtctggccaggttattggtttgtttattttaatgtgcataggcatccatctatttggctattactgttgatcatttattaattagtgttgcttaagggtgccatataaattcttgtttctttttttctctcttcctgtcattatctggtataggtccagcttgactcggagccaacatatagctacgaaactgcgtcggggttttatctgcattgtggtatgattcatttgctacaagagcgttccatgttgtacccactccagtctgtcttttgtcttccctgtatatattatagagagaaaaaaagactgttacagatttatacagaggacccaagatgcagaaagctgaagatatgattcggcaagtccacggtgtcaggcattcaggccttcgtagaggattctggtgagcatgaagccgtcggtcccttcttagatggcaacgggcctcgattcccaattcaccatgggaaattctttcattagagacagtgaagtttcgtttcccacgaggatataaatgtgtaaacgaggacggaaatcattttctatctctgttctctacggagacacgttaaacatgtacgtggtggtgttttcgtgtaatagttaacgataaaaataaataattatcatgtcaatagaccacactcattgtataattgtgattcattttaatatatacataatgatattttt

SEQ ID NO: 34649 - DNA, 2352 bp, Zea Mays
atgtccaggctccaccaccaccatcttctccaactgatgtgctcgctgctaatctccgcggaactggtaagcgggaccaccggcggcgacgacatggcggtgctcatccagctcaaggccttcctgcgggcgcacaaccagataaaccggggcgcgtacgacggatggccggaggcctcgccgtcgccgtgcggcagctggcggggggtcgggtgcgacgcggacggccgcgtgagctccctcgacctctccagctccagcatatcgggcccgctcttcggcaacttctcggggctcagcggcctcgtccgcctggacctctccgacaactccatcgccggcgagctcccggctgacctcgacaggtgcgtggggctgcaacacctcaacctctcgtacaacctcatatccggagcccttggcgtgcccagcctgacaaagctgaggacgttagacgtgtcgcggaaccggctcgagggcgaagtcgtcgtcgtcagcgggaacttcaacttcctcggagcatgtgacgacctcgtcgtgctcaacgtctccggcaacagcctcggaggcgacatcgccggcttgctcggtaactgcccgcggcttcggtacgtggatctcagcatgaacggcttcactggccgggtcacgcagggcatcgcgagcctagctcagttcagtgctgccgagaatcggctgtccgggaccgttcctcctggcgtgttcccagagcggtgtgggctgcagtccctggacctctccggcaaccgtttgtctggcagctttcctgattccgtgtccaactgccccggcttgacgtacctgtcgctgtcggggaacggtttcggcgggcagataccggcaggggttggagccatccctgggcttgagacactgatcctggggagcaacagcttcgaccgcgagatgccacttagcctgacgaactgtactgcgctcaggtatctggacatcagtggcaacggttttggtggggaggtgcaaggattgtttgccaagttagaaagcctgacgcacctcatacttcactcgaacagctatactggtggaatcgtgtcctctggcattcttgggctgcctaagctcgccatgctcgatctcagcctcaaccggttctccggaaagctgcccacggaggtcacaagcatggcaagcatcaagtacctcgtgctggccgagaacaccttctccgggcagatccccgcggcgtatggacagatcgcgcagctacaggtattggacctgtcatacaacaacctgactggtggtatccctgcagatgtcggtagcctctcctcgcttctcgtgttgatgctcgctggaaaccagctctctggagagatcccaaaggaaatagggaactgtaccagcttgctgtggctcaaccttgcggcgaacaggctatctggccagatccccccggagatagcgggtgtcgggagagaccctagtccaacatttgctaggaaccaaaaggatgctgcagaactggagattggcaccgggaagtgtccctctgtggtgcggtggattccccttggttacccagggttcaactacgtcgaatcggagatgtcttggaaggactgccggagcctggaggaccggatcttgaagggctatggtatcgttacaccgccttctgtccagccatgtatcatcctgggttatgttaggctgtcagggaacctgttgtcaggacaaataccacccatggtttctgcaatgaggaacttcaacctcctcatccttgatgaaaacttgctctccggtgtcctgccgtcagagatcagccagatgtcactcgtcgcgcttaacgtctctaggaacatgatttctggtgagattccaaccgagattggtcggatggtactccttgagaccctcgacttgtctttcaacaacttctctgaccaacttccgtctagcctgaaccagctctataaactcagcaagttcaacgtttcctacaatccacttctctccggcaatgttccatctactggccagctctccaccttcaacgagcaatcgtttcttggaaaccctctcctgtctttacacttcgctaactatgggccccgttcagaatcaaacaatgaagacgcctcaacacaaggtacagcaaagggccctgttagagaagagataacggtgctcgtcatttcatttgttgtctttttctttgccacagttgctatcagagaacatgacagcttcatgtatgtgtactataccataaaatgcagacatgacagtacgaagatttatgcggaattgtaacccttgagctttgtaacattcagttaatagagtagtagaatagtgtca

SEQ ID NO: 34650 - DNA, 1903 bp, Zea Mays
atgcggcgctcctccccgtactcgtacgccttcttcgagcgcctcctccaggagcacttcccatttccgcgccgcctcttccaggtgcacgcgctgctcctcacctctggcgtgctgctccttgactcacaatgctccgcggcggcctttccttacaactgcctcgcccacgcgcaccgccgcgtccccgccgcctcctcttcgcgccccccgtccgccccactgcgcctcttctgcgctatgctcgcccgcggcgcgcgccccaactgccactccttcccgtccctcctcatgtccgcctccgcgtccgccgcggcggcgctccacgcgcagtgcctccgccgcggcctcgcggctgactgcttcgtcgcctgctcgctcgtcagcgtctatggccgaacgggacacccgtcttgcgacgcgcgcaaggtgttcgacgagatggagggtcccccggacctggcctcctgcaacgcactgctcgacgcgctgtgccacgccggggacctggacggtgccggggacttctttgagcggatggcggtgagggaccccgtgtcgtggacgacgctcgtgtctgggctgtcgcggggcggacgccaccggtgcgctctcgaggtgttcaggggatttttgctgggtaacgtgggacgacggctcgaggaagcaacgctggtcagcgttttctcggcctgtgccaacgttgacggcggtgagggtcttgccgcgggcatggctgtccacgcatacctcatccgtcatgagattgagctcactgcgttcctgggcacagccctggttgacatgtatgggaagcatgggaggattggcttctgtaagagtgcttttgcggtcgtctgcacgaaggaggtttgcacgtggaatgcgctgttatcagcattggctaatcacgggaaggagactgacgcgctggtgaagttcgacatgatgaggggtgaaggcttcttgccggatcagataagctttcttgctcttctgacggcttgtgctcgtgcaggattggtggaggttgggttatactggttcgacgcaatggttgctgaatacaaggtggtaccgttgatgatccattatggatgtgttgtggacctcttaggccgtgctagccgttttggagaagccattcaggttatagagaggatgcccttcgcggctgatgcttctgtgtggggtgctcttcttggggcttgcaagctccatggaaatgtggagcttgcagtggagattgggcagaaactaatgtctcttggcccccagcaatccggtcggtatgtgactattaggaatgtctatttagaaggcgggaattggcatgctggcgcaagaatgggagaggtgatgctggaggctggaatcaagaaaacagtagggcagagcagtgtggtgcttcatggcactgacattccttcatcaccgttcactgcaaaatgtgctggtcaggaatggatgaacttttacgattcttaacagataaatggaccatacttcgtcgccgaaggtcctgcagaaagaaacagcttcggatgaagctgctcgtacgtgacgccgaaggcaccatttatcaagcttcggtattacaacatatccgaagatgaagggtcgaaccgacttaaagatataatgatcttttagtccataagggtctgagtcattgttgtaaacttttatgaggggcatgattgtaattcctcacaggctgtgtcctgtgcctataaatagtgaacagtattcctttactgttcacggattcctgtaattgcaaacgcatcactcgggaattattgtttgtacctaaacgttatagtgaaacatcttagattcatgtaataagatatgtaaatgatgtcatttatttccaatatatttatctttaatgtttcac

SEQ ID NO: 34651 - DNA, 2351 bp, Zea Mays
ggaggaggcggcggtggcgagaaccctgggcccgcgcggcggcgtgcgcccatgcggcgctcctccccgtactcgtacgccttcttcgagcgcctcctccaggagcacttcccatttccgcgccgcctcttccaggtgcacgcgctgctcctcacctctggcgtgctgctccttgactcacaatgctccgcggcggcctttccttacaactgcctcgcccacgcgcaccgccgcgtccccgccgcctcctcttcgcgccccccgtccgccccactgcgcctcttctgcgctatgctcgcccgcggcgcgcgccccaactgccactccttcccgtccctcctcatgtccgcctccgcgtccgccgcggcggcgctccacgcgcagtgcctccgccgcggcctcgcggctgactgcttcgtcgcctgctcgctcgtcagcgtctatggccgaacgggacacccgtcttgcgacgcgcgcaaggtgttcgacgagatggagggtcccccggacctggcctcctgcaacgcactgctcgacgcgctgtgccacgccggggacctggacggtgccggggacttctttgagcggatggcggtgagggaccccgtgtcgtggacgacgctcgtgtctgggctgtcgcggggcggacgccaccggtgcgctctcgaggtgttcaggggatttttgctgggtaacgtgggacgacggctcgaggaagcaacgctggtcagcgttttctcggcctgtgccaacgttgacggcggtgagggtcttgccgcgggcatggctgtccacgcatacctcatccgtcatgagattgagctcactgcgttcctgggcacagccctggttgacatgtatgggaagcatgggaggattggcttctgtaagagtgcttttgcggtcgtctgcacgaaggaggtttgcacgtggaatgcgctgttatcagcattggctaatcacgggaaggagactgacgcgctggtgaagttcgacatgatgaggggtgaaggcttcttgccggatcagataagctttcttgctcttctgacggcttgtgctcgtgcaggattggtggaggttgggttatactggttcgacgcaatggttgctgaatacaaggtggtaccgttgatgatccattatggatgtgttgtggacctcttaggccgtgctagccgttttggagaagccattcaggttatagagaggatgcccttcgcggctgatgcttctgtgtggggtgctcttcttggggcttgcaagctccatggaaatgtggagcttgcagtggagattgggcagaaactaatgtctcttggcccccagcaatccggtcggtatgtgactattaggaatgtctatttagaaggcgggaattggcatgctggcgcaagaatgggagaggtgatgctggaggctggaatcaagaaaacagtagggcagagcagtgtggtgcttcatggcactgacattccttcatcaccgttcactgcaaaatgtgctggtcaggaatggatgaacttttacgattcttaacagataaatggtattgttgctgtcgtagataaaatgattgtgtaactttatactaaagagtaaacatagaagatagtggaatttggcctttgtttgaatactaaagttgtagcttatgttttgtagatgctcatagagtacttagttgttgttgtagctactgcaaaattaaagatacaaaaaaaaccagcaacagtgtcgttttcaccgggttttcagatggattaaggagcactatgtcaattacttgtaatacactatatgagatgtttgtattgagttgtacattataaaacaggtggtagtgctctagagtgctcctagtgcttttggcatcttcaatgaagacaagtgaattatagcggtttgctaccgttttgacttgttattttcatcactgctgttaggaccatacttcgtcgccgaaggtcctgcagaaagaaacagcttcggatgaagctgctcgtacgtgacgccgaaggcaccatttatcaagcttcggtattacaacatatccgaagatgaagggtcgaaccgacttaaagatataatgatcttttagtccataagggtctgagtcattgttgtaaacttttatgaggggcatgattgtaattcctcacaggctgtgtcctgtgcctataaatagtgaacagtattcctttactgttcacggattcctgtaattgcaaacgcatcactcgggaattattgtttgtacctaaacgttatagtgaaacatcttagattcatgtaataagatatgtaaatgatgtcatttatttccaatatatttatctttaatgtttcac

SEQ ID NO: 34652 - DNA, 3388 bp, Zea Mays
atttagaggacgagacgagagcagttcgaatccgttcgagaaaaaaaattctcaccctctggccccgaccccgagcaacggtcgcctcctcctcctctgctgcggctgcgctatcgtcgcttttgctttctcgcccactcgccctgattcaattcaaacgaggatccgatcccgcgacccccaccactcccttcacctcgtccgcccttccttcctcaccgcccgcgccgacgtgatcagggatcaggcgctcagtgatcgtcaccgcgcacgactcgtccgttcgtccgtccctcatcgccgcaccgatccgggcaggcggcgtgagatggaggacgaggggagcggcggccggagccggggcccggacgggttggccatcgcaccctcctctcctccgccgagggccaagacggtgaggatgtccgaggcccgcgaattcatcatcccctacgccgccgaccagggccgcttcgacgtcggccaacgcttccgcgggagcggcgcaggacacgccggactacatccggaggggcgccgcgcggcacagggtcgtgccgctcaagcccttctccgccccagcctcgccgccagctgagggaccggcttcgagtgagagatgcggcgccgcgggcggtggtcgagccgtcccagggggcccgcaaccggaagagtctggagaggatacatccgattgctgcggtgtgttaaaacagcagtacggtgtgcttctgcgggagaaggaggaatgcaggaggctgttagaggacctcatgagggagaacgtgctcaagactagggagtgccgtgaagcccaggagtctctccatgatctgcggatggagctgatgagaaagtccatgcacgttggctcactagcctctgcagttgaagggcaagtgaaagagaagagtcgtttgtgtcaattactgaaagaattgagcgaaaaatttatggtattaaagtcagagcaccagaatctaagacaagaatcagtagagtacagaaaatgtgtgttagatgcttcacaaatgtctgcagcaattcaacaatatgtgagtcgatatgtaagtctggaatgtgagtttaaagacctcaaagagaagttcaatgaggaggcaaaggagcggaaagacttatacaacaagcttatagagctaaagggcaatataagagttttttgtcggtgccgaccacttaatgcagaagaaatagcagaaggagcttcgtcagccattgattttgactctgcaaaagatggagagctcattgttaggggtcatgtatcgtccagaaaaatatacaaatttgattctgtcttcagccctgaagaagaccaagaaaaggtttttgagaaaactgcgccatatgcaatttctgtgttggacggatttaatgtttgcatctttgcttatgggcaaactggtactggtaaaacatttaccatggaagggattgaaggtgctcgtggtgttaactatcgaattctagaagaactttttcaaataatcaaagaaagggagggcacattccaatatgagattactgtcagtgtattggaggtgtacaatgagcagattcatgatttgctactgacaggatctcaaccaggagcaacaacaaaaagactagaagtaagacaagttggagaaggggctcaccatgtaccaggacttgttgaagcacgagtgactaacatgaaagaagcttgggaagtactacgcactggcagcaaagctagagtcgtgggttccacaaatgctaatgagcatagtagtcgatctcactgtatacattgtgtaatggtcaaaggagaaaacttgatgaatggagaatgtacaaagagcaaattatggctaattgaccttgctggaagtgaacgggtagcaaagaccgatgcacaaggagaaagattgaaagaagcacagaatataaacaaatcactttctgcacttggtgatgtcatatccgctcttgcaacaaagacctcacatataccctttaggaattcgaagctaacacacttgctacaagactcattaagtggagattccaaaactttgatgtttgttcaaatcagtcctaatgagaacgacgtgggtgaaactctttgttcattgaacttcgcgagcagagtacgaggcatagagcttggtcaggctaaaaaacaagtcgatgttggagaattgtcaagatacaagctcatggttgggagagccaaacaggatagcaagaacaaagatgctcagattaagagtatggaagaaaggatacaagcacttgaagtgaagaataaggccaaagacttgctcaccctgaatctccaagagaagatcaaagagctggaatcccagcttctagttgaaagaaagatagcacggcagcacgtcgacaacaagattgcccaggatcatctgcagaagcagcacggcatgaaagaagagaacaactcgtacctgagaagcccaatggccgagaggaacctcaactccacagcagagaaagcagcagcaacacctaaaggcctgtgcatctccaagcagatgttctccgacagcaacaccgacgcctacagcttcaagcagctgatgtcactaggggaggaggaggagaaggagaacaaccctgaagccgccgcgcagctgccggcgcccagtacgaaagcgaggcgagtctcgctcggcaacggcggaggttaccagcagccgctgaagccgatttcgcgccggacgtccctgataccgcttccgcgccacaactcgctgctgccaatgcccacagcagcagcagcagcagtgtcgccgcttgacaggatcacggagaacctgtcgtcgcgctcgccctcgccgtgctctcctccggtcgtctccgtcgacaagggcagccggagtagaagggtcagcagcctcctgcgccgaagcctgcagaagaaggtagtcatcaggccgtcagtggcggcgcaggcagcgaagaaagccggtgctgctgcacctgctgctcaagggactgacagtagtgcacgcagagcggctcggcgagtgcctgcgagcggcggcggtgttggtgggcagaaggtgcggcaacagaacagggacaaggagcgggggtggaacaacgggacgagcctcaggaatttctgaccagtaaaaggagtgttctgttagattgcttgtacaaaattcaggtgatgctcggtttgagtttgtgagttctcgcgtattgtgagagaactctacgaattgctgccggctacagtcagtctcacaaacttgtgtgatgctgtaaaaccacttcgtgctgattttcatttggagggttatcattgtcattgagaatccgtctataattaagaaaatttgcaaatgggtttcaagaccttttgattgag

SEQ ID NO: 34653 - DNA, 782 bp, Zea Mays
gtgtttttttctcgttggggttgataactggaactggcgtgccttaagctgtttgtgggaagagcaggtagcaggaaatggcggcgttcctgaggtcaaaatgttcaccagttggacgtactttgatgggaagccttggaaatagtttgtttggggctgccaactcttctgttggggcaataacaaggccttctcattgcgatgctatcagtcagcaaatcagaacattcatccagatgaggactaacctgaaggtggtcgataactccggggccaagcgggtgatgtgcatccagtccctgagggggaagaaaggagcaaggctcggggacatgatcatcggatccgtaaaggaggcccagcctcgtggcaaggtcaagaaaggagacgtagtctacggcgtggtcgtccgtgccgccatgaagaaaggacgcagcgatggcagcgaggtccagttcgacgacaacgcggtggtcctcgtgaacaagaagggcgagctgatcggcacccgcgtctttggccccgtcccccacgagctgaggaagaagaagcacctcaagatcctggccctggctgaacacattgtttgaggtgtgtcgcatagccaagtgtttgtgggaatgtttttttttgtgtgttctctgtttgaataatgcattgtgaaacgatagcatggaccgtttgaactattttgatgacattgctcgtccatttggatggccaatacgtgtcgtgatcgattctggagttccatttttttttgttacaagctgctttcacat

SEQ ID NO: 34654 - DNA, 659 bp, Zea Mays
acaaaaacctcctgcagtcgttttcacctcctccctctctcacggcggcttttctggcgacggcggcggcggcgacgacgagcagccacctgcaaatcagaacattcatccagatgaggactaacctgaaggtggtcgataactccggggccaagcgggtgatgtgcatccagtccctgagggggaagaaaggagcaaggctcggggacatgatcatcggatccgtaaaggaggcccagcctcgtggcaaggtcaagaaaggagacgtagtctacggcgtggtcgtccgtgccgccatgaagaaaggacgcagcgatggcagcgaggtccagttcgacgacaacgcggtggtcctcgtgaacaagaagggcgagctgatcggcacccgcgtctttggccccgtcccccacgagctgaggaagaagaagcacctcaagatcctggccctggctgaacacattgtttgaggtgtgtcgcatagccaagtgtttgtgggaatgtttttttttgtgtgttctctgtttgaataatgcattgtgaaacgatagcatggaccgtttgaactattttgatgacattgctcgtccatttggatggccaatacgtgtcgtgatcgattctggagttccatttttttttgttacaagctgctttcacat

SEQ ID NO: 34655 - DNA, 5839 bp, Zea Mays
cccgcccagcgccggggacagcgagaggcggacgaagccccgcgcggcgctccggtcgcctcaacatcttatccatccacccagctctcctccgacttcgccaagccccgcagccagataaaaagtacggcctcccctccggcgcgcgaacgcgacacggcgcagtgtctcctcgccctccggtggtcctcgtgcgcgcgcaccgacacgtcccggcgaaccgctccgttgtccgttccggtagtttcggtacgcgcgccgctcgccttggcgccatggcgtcggctgccgcttcggcggcggcggcgctggcgcggcacgtcctcctccccccgcgctaccacgcgtcgccgccctccgccgctcgccgggcccgcgccgcgcccgcgctcacctcggcgtcgccccgctgcgtcctccgtcgcgtgggtaggacgccccggtacgggacgaccgggaagaagaggactaggcgcttcggggctccgcgcgcggggatggacatggacctggccagcggcgccgtcgaggtgatcaacgacctgggcttcgacacgctcaccttcctcggcgtcacggtcctcgtcgtccccgccttccgcgtcgtcaaggccagcccaattctcggcttcttctgcgccggcgtcgtgctcaaccagttcggcctcatcaggaacctcaccgacgttaagctgctctccgagtggggaatccttttcctgctgtttgagatggggctggagctctccctctctcgcctcaaggctcttgcgaggtacgcctttgggatgggcttgcctcaggttcttttgtcaacccttgctttcacggcgttcgagcttcctcctaatgatgccataggaacaaagatattgcagtttctctttgattcaagacctgatcttgtgaacatcaggagtatcgatgaagcaatagtaattggagctgccctctcactatcttcatctgcttttgttctccagcttcttgccgagaaaggtgaacttccaacaagatttggttcagctacactgggaattcttctcctgcaggacattgcagttgtccccctgttggtcatactccctgtgctggagagtcagaatattatagagcaaagtgtgtggccaattttactagctgagagcttaaaggcactgggcgggcttggcttactttcccttggtgggaaatacttcataagacgtgtctttgagtttgttgcagagtcaaggagttcagaggcatttgttgcgctctgtcttcttacagtcgcagggacatcacttatcacccagaagctgggatttagtgatacattgggtgcatttctggctggagccattcttgcagaaacaaatttccggacacaaattgaagctgacataaggccattcaggggcttgttgcttgggctgttctttgtgactacagggacttccattgacatgcaggtacaattgtttatgtttttccaagtgaacaaatggttgaatgtcaatcacactttttattcaagagtagttcatgtatttccatggctaagatatataggcttacatgtcttcatttccatttccatttccatttgctggattcttactaagtaatatttaaaggggcattgctgtgttttttcgttagttaacaaaagattgtttatatgctcattgatccatcttgaccttttgcatgatatgtagcttctcatccgggagtggcctaatgttctgtcactgttggggggtcttattgtaatcaagacactgataatcaccgcaattgggcctagagtcgggttaactcttaaagaaagtgtaaggatagggctgctactttctcaaggaggcgagtttggatttgtggtgttttctttggcaaacaggctcggtgtcctaccacttgagttgaataaactgcttataattgttgttgtgctgtcgatggcattaactcccttactcaatgaagttggaagaagagtagcagggatgattgatgaaagatctgaagaaaaagaaaagcctgctgagatggtgaattatggtgccactgaacctgttgtaattcttggttttggagagatgggacaggtgcttgctaaatttttatctgcaccattgtcatttggaattgagaaagacacagaaggatggccatatgttgcattcgatctgaatcctgttgttgtaaagtcagctagaaaatcaggatttcctgtgctattcggagatggttcacgccctgcagttctgcaatctgctggcataacgtttccaaaagctatcatggttatgtatactggaaaggaaaaaacaattgagtctgtaagcagattgcgtcaagctttcactgcggttccgatatacgctagagctcaagacctctcacatttgttagatcttaagaaagcaggcgcaacagacgttgtcctggaaaatgccgagaccagcttgcagctaggttcaatacttttgaaaggactgggcgtcatgtctgatgatgtatccttcttgagtaagcttgtgagggactcaatggagctacaagctcaggaagcactgaaagacattggggaccaagaagttgatattatgaagcctcttcaggtaagagtgtcagatttagtggagagcaatggtaatagttcaagaatggtagccccagagcagtcgttaagtctaagtagccgcccagacataaaggcaataaaaccaccagtggcgaatgggatacctgatatgaaggtggaaaatgacaagacaggatacgattttgacagggtggattctgaaaatggtgtgacatactgtctattggaatctgatgaccaaagcgatgaagcctccagtacaagcaaggaaatgatcgatcagtctgctgatacaagggttaatgtcaatgataagaagatactctagctctacttgtaggatcaagttcattggtgattggctgatcgctgggctgatcagaactgccgcatttcttgcagctcctataggtttcttgaagcacttctaaagactgcaatactgcatttaagttcctggtacatggagtcctacagaatagcaaccataaacacttgtgtcatgtggagatattgcggaaccgaccagccgtgcagcaaatctaaaggctgaaaatactgagcttgagttgtgcaggtgtacagcagatctaaagccatgcagcaaccataaacagttgaagattttcagctggcaaatttgccaacgcagctgagtgcatgcatggctttggcaggatccggttgtaactagcaacatttcagaatttagaatatcattttttcacagctcagattatatttgactgaagccacaacataataaagggacttccattgatagatacattcttgtacaatatctgtatctgattcctagtgtgtactagatggtacatacctgagcagtttattatgtatcatcatcatccaataaagtgctgaactaaattttgggtattgatcaatccagtaaaccataatagcctctgctctgacgaattattcacaaataatggggagaattaaatacataccatgtctcttggtgccaaccaagctggatgcagatcagtagtccatggagccgaaatccggctccggcggcctgggaagcatgatgaggctgtcggcccggacggatcgctggcgctgcacgccgcgcatggcgttcttggcgaagcgcgacacgaggagcgtggtcttgaacctgctcgtggaaaccccggacgagtcggcctccatctcctcctcccggcgccgctgctcggccgccttccgcttgaggtacctcctccatgcggcctgtatgaagcaggaggcccaggtgcgccactgctgcgagtagaagcggaaggtctgctgcagctgcttgctgtgcaggcgccggaactgccccgccacgaacttgagctcgtcagcgcgcagcgcgaacgcctccacctcggagatggccctaacggtgcgcgtggacagcgggaagttggcgccggcctttgggtcgagcgcccacgtgagtagctcctccccgcagaagtcgccctccttgagcagcccccggttgtagaaccccatccggccgccgtcggtggtggagctctcgaggcggccgcgaatgatgaagagcatctcgtcgacggggtccccctcgcgcacgatgtaggtggactcggtgcagaggctgggcttgaggcgctcgcagatagcgtcgaggaggcgctcgtccatgttggcgaagagcgggacgcggcggacgaggcggaggcagaggtgccgcttgacgtcgcggcgcaggtccttgggcaggctgcgcacgaggctgtcctcgtcgacgccgcgcgtctcgagccacttgtactggttgtgccgccacacccgctcccggagctcgtcggggaggacgcggtggtgcatccactgctccgagtccctgcgcttgaggcgcatctcctccaggcgcagcgtcatggactgcaggtacgtctgcatgttgccgatgaggagcgccatgaggatgaggcccagcagcgcgagcgtgatggagaagagctgctcccccttgtagtgggtcgtctccaggccctggccgatggtgctcaggttctgcaggccccaccagaggcagaagaggatcttggccgtcaggttctccgtggagtagacgcccgactggatggccgtggtgtagatgccgtaggggaaccccgtgccgctgccgtcgacgggggcgcactcctgcgccagcacctgccggatcatggtgcgccactcgaggaagcccgactggccctggctgccgccgccgcagtacatgtaggtgcggcactggtggaagttgaggttggtgcacttgtcccgccagcagtcgtccagccgctcgatggccagcaggtaccagaaggcccccaccatgtggctggccagcatgtagagcagcaggtagaaggcggcgccgccgaaggccgtctcggcgaacacccccgtggtgcgcttcagctccgaggtgatggggtagaagcgcaccaggcggggcacgtactgcgacagcaccgtgaagagcagcgcgttcttggtgggcagcaggtccgcgcccttgggccggttgaggaagttccagatggagacctgcggcagcggcagcacggacagcaggtcgacggcgaagaatcggcgcaggtagcggcgcgcgatggcggacgagtcgatgaccagctcgccgcgcccgaacacgcgcgacgacggcgcgatgtacgccgtccggaactgcagcgcgatccgcgccaggtagaaggcgtccacggcggtgcgcaccacggtggcgacggtggccaggttgcggtcgaagccgatgcaggtgttcttgtccgtgtacttgacggccaggaggtagaggaagagcgggtcgatggccacggacacgatgcacgcgaagacgaaggcgcggttcatgcgcgccaggaacgcgtcctgcgggtcgaacacctgctgcgacatcttccggaagtcctcctggaacacgaggccgatgctcctcagccgctccgaccggttcatcacgcccgccgccacccgaaccgaccgcgcacggaacttggcggcggccgccgccgggttgcccgagaagtagctgtccatgtggaacccgccgccgtgcccgtgcccgtgcccgtgctccatgctggcaccgccgccgctgccggaagtggggctggacgccgaatccgccggcgcgtctgcctcgacgagcctcacgaacttctccctgcgcccgttgatgaactgggtccggtagccgcacccgaacat

SEQ ID NO: 34656 - DNA, 2682 bp, Zea Mays
atttttttaacttcctttgcagtattggacactgctgctggagtttggtgtgataccaaatcagtagttacaactccaaggacaggaagatatagtgcagatgcagcaggtggtgatgcttctgtagagctcacacggcggtgcaggcatgcagcagccgctgttggtgatttgatatttgtttatggaggtttaaggggaggtgtgctgctagatgacctcctagttgctgaagatcttgctgctgctgaaacaaccagtgcagctaatcatgcagcagcagcagctgcatccacaaatggacaaagagaacctggtagatatgcctacaacgatgaacaatcaggacaaactgttacagtttcaagtcctgatggagctgttgttcttgggactcctgttgctcctccggtcaatggggacatgtatactgatattagtcctgagaatgccattatccagggacagagaaaaatgagcaaaggtgttgattatttggttgaagcatcagctgcagaggctgaggcaatcagtgctactttagctgctgtaaaggctaggcaagttaatggtgagatggagcattcacctgatagggaacagtctccagatgctgcaccaagtaccaagcaaaattcaagcctcataaaaccagatgttgctcttgtcaacaattcaacagcacctcctggtgttcggttgcaccatagagcagttgtggtggctgcagaaactggaggtgccttaggtggcatggttaggcagttgtccattgatcagtttgagaatgaaggtagaagggtcatttatggaacccctgagaatgcaactgcggcaaggaaattattagatcgacaaatgtctattaatagtgtgcccaaaaaggtaattgcttctcttctgaaacctcgtggctggaagccccctgttcgaaggcagttctttcttgactgcaatgagattgcagatctatgtgatagtgctgaaagaatattttcaagtgaacctagtgtcttacagctgaaagctcccattaagatatttggtgatctgcatggtcaatttggtgacctcatgcgcttatttgatgaatatggcgctccttcaacagctggagacattgcttacattgattatcttttcttgggagattatgtcgatcgtggtcagcatagtctggagacaatcagtcttctccttgcactgaaggttgaatatcctcacaatgtacatttaattcgagggaatcatgaagcagcggatatcaatgctctttttgggttccgaatagagtgcatagagagaatgggtgagcgggatggaatctggacctggcaccgtgtgaacaggttatttaattggcttcctttggctgcactaatagaaaagaagataatttgtatgcatggtggtattggtcggtccatcaaccatatagagcaaattgaaaatcttcaaagaccaattaccatggaagcaggctcagttgttctgatggatcttctgtggtctgatccaactgagaatgatagcgtagagggactcaggccgaatgcacggggccctggtcttgttacctttgggcctgatagagttatggagttctgcaacaacaatgacctgcagttgattgtgcgagcacatgagtgtgtgatggatggctttgagcgattcgcccaaggtcacttgatcactcttttctcggcaacgaattactgtggaacggcaaacaacgcaggtgcaattttagttctcggaagggatctggtggttgttccgaaactcatccatcctttgccgcctgctatcacgtcacctgagacctctccggagcatcatattgaggacacatggatgcaggagttgaatgcaaacagaccaccaacaccaaccaggggccgccctcaagcccccaacaatgaccgaggctcccttgcctggatataacaggctggccatattattaaacaattgatttcttgtctcctatcattggcttgaggctaaaattatccatccattctggacacatggaagcactctgctgaaagcacacactggcccaaaacaatgtcgaaagaaaactgttcagggagcgagactaagcggtgctctgaaggcgaaggccagagaagagtcactgtcgacagcgctccccaaatcctttccacaaacaagtagaagagcagaaccaagtgttggtaaaccacaggatcttgcctgggatcgcgcctgtacatactcagacgccagcagatagaggaggggttgtgtatgtgttctttttgtcttagcgtcgaaagggatagcagcgtccattgtactaggtattcatttgctgtagattttgatttgttgcctcatgttgcaaagtatggagtgggaaagttggtttcctcgtgtgacggacggtggtctgtcaggtcttgtataatagcgttgtcggctgtttatgtttgcagcgcgtcagctgttacttagcacaccttacacctccctcatgttgtaattcccatcaccggtgctgatgaatgtgcacaatatattgttgtctgttgtccaaagttttgggtcctggacgggttaggtgatttgatttggtttattggagaagcaatacgttgtttgattttgagctgtatgctgtgcacctttgggatttattttattttgcaaatttgt

SEQ ID NO: 34657 - DNA, 4270 bp, Zea Mays
ataaaatacgacaaaatctaagggtgaaaacgcgagtgccaggccagcacacacaaaaaaaaaagatcttatgaaaattcttgacgctatagacaccacgagtccacgacacggcgccctttccctgtccgtcctccgtcgtctccgccggctcttcttcactcctcttttccgctggagtccccgatctcccccgcatttcccactcccacttctagcctcccccacgcccccatcctcagttcctcaccaccacttgccccgccaattcccaaatctcccaggggcttctccgcttaccacccccgcccgctcgcgatcccatcgcctcgacccgacccgagacttgctcgtcgcggagcgccaccaccacgcctcgccgccggcggcgagtggacaagcctagggcttatctacgggtgatggcggccgcgccggccgccgcaagctcgaccgtctcctagggcggcggttacccgaggctgagctcgtgcgcgcgcgtggggggatccttgtgctcagctcgcgaaaccctaggggcagcaggaggcgaagcttgcagggcggcgatggacgtggactcccgcatggcgacagagtccgactccgactccgacgctcgcggcggcgggtcggggtccgggagcgagacccccacggcgtccgcgtccgcgtccgcgtccccgtccacgtccgcgcccgcgcccgggacgcccacggccgcggccgcgtccccggggctggtggcggggcccaggccggcgccggggtacacggtggtggacgccgcgatggacaagaaggaggacgggccgggatgccggtgcgggcacacgctaacggcagtgccggcagtcggggaggagggctcgccggggtacgtgggcccgcgcctgatactctttggtggtgccaccgcgctcgagggcaactctgccacgccgccctcgccggctgggagcgccgggatccgccttgctggtgccaccgcagatgtccattgttatgatgtgttatcaaataagtggaccaggcttactccacttggtgaacctccttcaccaagagctgcacatgtagccactgctgttggtaccatggtggtcattcagggtggaattggccctgccggcttatctgctgaggaccttcatgttctggatcttacacaacaacgaccgcgatggcatagagtggtggttcaaggtcctggtcctggtccacggtatggacatgtgatggccttggttgggcagcgattcttattgacaattggtggcaatgatggaaaacggcccctggcagatgtatgggcccttgatactgcggctaagccatatgaatggagaaaacttgagccggaaggtgaaggaccaccaccatgcatgtatgcaactgctagtgcccgttctgatggtctccttttgctttgtggtggaagggatgccaatagtgtgcccctatcgagtgcatatgggcttgctaagcatagagatggtcgctgggagtgggcaatggcccctggtgtgtctccatcacccagatatcaacatgcagctgaggggctcttgggggtggtcgcatggtagaagattcctcaagcgttgcagtattggacactgctgctggagtttggtgtgataccaaatcagtagttacaactccaaggacaggaagatatagtgcagatgcagcaggtggtgatgcttctgtagagctcacacggcggtgcaggcatgcagcagccgctgttggtgatttgatatttgtttatggaggtttaaggggaggtgtgctgctagatgacctcctagttgctgaagatcttgctgctgctgaaacaaccagtgcagctaatcatgcagcagcagcagctgcatccacaaatggacaaagagaacctggtagatatgcctacaacgatgaacaatcaggacaaactgttacagtttcaagtcctgatggagctgttgttcttgggactcctgttgctcctccggtcaatggggacatgtatactgatattagtcctgagaatgccattatccagggacagagaaaaatgagcaaaggtgttgattatttggttgaagcatcagctgcagaggctgaggcaatcagtgctactttagctgctgtaaaggctaggcaagttaatggtgagatggagcattcacctgatagggaacagtctccagatgctgcaccaagtaccaagcaaaattcaagcctcataaaaccagatgttgctcttgtcaacaattcaacagcacctcctggtgttcggttgcaccatagagcagttgtggtggctgcagaaactggaggtgccttaggtggcatggttaggcagttgtccattgatcagtttgagaatgaaggtagaagggtcatttatggaacccctgagaatgcaactgcggcaaggaaattattagatcgacaaatgtctattaatagtgtgcccaaaaaggtaattgcttctcttctgaaacctcgtggctggaagccccctgttcgaaggcagttctttcttgactgcaatgagattgcagatctatgtgatagtgctgaaagaatattttcaagtgaacctagtgtcttacagctgaaagctcccattaagatatttggtgatctgcatggtcaatttggtgacctcatgcgcttatttgatgaatatggcgctccttcaacagctggagacattgcttacattgattatcttttcttgggagattatgtcgatcgtggtcagcatagtctggagacaatcagtcttctccttgcactgaaggttgaatatcctcacaatgtacatttaattcgagggaatcatgaagcagcggatatcaatgctctttttgggttccgaatagagtgcatagagagaatgggtgagcgggatggaatctggacctggcaccgtgtgaacaggttatttaattggcttcctttggctgcactaatagaaaagaagataatttgtatgcatggtggtattggtcggtccatcaaccatatagagcaaattgaaaatcttcaaagaccaattaccatggaagcaggctcagttgttctgatggatcttctgtggtctgatccaactgagaatgatagcgtagagggactcaggccgaatgcacggggccctggtcttgttacctttgggcctgatagagttatggagttctgcaacaacaatgacctgcagttgattgtgcgagcacatgagtgtgtgatggatggctttgagcgattcgcccaaggtcacttgatcactcttttctcggcaacgaattactgtggaacggcaaacaacgcaggtgcaattttagttctcggaagggatctggtggttgttccgaaactcatccatcctttgccgcctgctatcacgtcacctgagacctctccggagcatcatattgaggacacatggatgcaggagttgaatgcaaacagaccaccaacaccaaccaggggccgccctcaagcccccaacaatgaccgaggctcccttgcctggatataacaggctggccatattattaaacaattgatttcttgtctcctatcattggcttgaggctaaaattatccatccattctggacacatggaagcactctgctgaaagcacacactggcccaaaacaatgtcgaaagaaaactgttcagggagcgagactaagcggtgctctgaaggcgaaggccagagaagagtcactgtcgacagcgctccccaaatcctttccacaaacaagtagaagagcagaaccaagtgttggtaaaccacaggatcttgcctgggatcgcgcctgtacatactcagacgccagcagatagaggaggggttgtgtatgtgttctttttgtcttagcgtcgaaagggatagcagcgtccattgtactaggtattcatttgctgtagattttgatttgttgcctcatgttgcaaagtatggagtgggaaagttggtttcctcgtgtgacggacggtggtctgtcaggtcttgtataatagcgttgtcggctgtttatgtttgcagcgcgtcagctgttacttagcacaccttacacctccctcatgttgtaattcccatcaccggtgctgatgaatgtgcacaatatattgttgtctgttgtccaaagttttgggtcctggacgggttaggtgatttgatttggtttattggagaagcaatacgttgtttgattttgagctgtatgctgtgcacctttgggatttattttattttgcaaatttgt

SEQ ID NO: 34658 - DNA, 4314 bp, Zea Mays
ataaaatacgacaaaatctaagggtgaaaacgcgagtgccaggccagcacacacaaaaaaaaaagatcttatgaaaattcttgacgctatagacaccacgagtccacgacacggcgccctttccctgtccgtcctccgtcgtctccgccggctcttcttcactcctcttttccgctggagtccccgatctcccccgcatttcccactcccacttctagcctcccccacgcccccatcctcagttcctcaccaccacttgccccgccaattcccaaatctcccaggggcttctccgcttaccacccccgcccgctcgcgatcccatcgcctcgacccgacccgagacttgctcgtcgcggagcgccaccaccacgcctcgccgccggcggcgagtggacaagcctagggcttatctacgggtgatggcggccgcgccggccgccgcaagctcgaccgtctcctagggcggcggttacccgaggctgagctcgtgcgcgcgcgtggggggatccttgtgctcagctcgcgaaaccctaggggcagcaggaggcgaagcttgcagggcggcgatggacgtggactcccgcatggcgacagagtccgactccgactccgacgctcgcggcggcgggtcggggtccgggagcgagacccccacggcgtccgcgtccgcgtccgcgtccccgtccacgtccgcgcccgcgcccgggacgcccacggccgcggccgcgtccccggggctggtggcggggcccaggccggcgccggggtacacggtggtggacgccgcgatggacaagaaggaggacgggccgggatgccggtgcgggcacacgctaacggcagtgccggcagtcggggaggagggctcgccggggtacgtgggcccgcgcctgatactctttggtggtgccaccgcgctcgagggcaactctgccacgccgccctcgccggctgggagcgccgggatccgccttgctggtgccaccgcagatgtccattgttatgatgtgttatcaaataagtggaccaggcttactccacttggtgaacctccttcaccaagagctgcacatgtagccactgctgttggtaccatggtggtcattcagggtggaattggccctgccggcttatctgctgaggaccttcatgttctggatcttacacaacaacgaccgcgatggcatagagtggtggttcaaggtcctggtcctggtccacggtatggacatgtgatggccttggttgggcagcgattcttattgacaattggtggcaatgatggaaaacggcccctggcagatgtatgggcccttgatactgcggctaagccatatgaatggagaaaacttgagccggaaggtgaaggaccaccaccatgcatgtatgcaactgctagtgcccgttctgatggtctccttttgctttgtggtggaagggatgccaatagtgtgcccctatcgagtgcatatgggcttgctaagcatagagatggtcgctgggagtgggcaatggcccctggtgtgtctccatcacccagatatcaacatgcagctgtttttgtcaatgcacggcttcatgtctcaggaggggctcttgggggtggtcgcatggtagaagattcctcaagcgttgcagtattggacactgctgctggagtttggtgtgataccaaatcagtagttacaactccaaggacaggaagatatagtgcagatgcagcaggtggtgatgcttctgtagagctcacacggcggtgcaggcatgcagcagccgctgttggtgatttgatatttgtttatggaggtttaaggggaggtgtgctgctagatgacctcctagttgctgaagatcttgctgctgctgaaacaaccagtgcagctaatcatgcagcagcagcagctgcatccacaaatggacaaagagaacctggtagatatgcctacaacgatgaacaatcaggacaaactgttacagtttcaagtcctgatggagctgttgttcttgggactcctgttgctcctccggtcaatggggacatgtatactgatattagtcctgagaatgccattatccagggacagagaaaaatgagcaaaggtgttgattatttggttgaagcatcagctgcagaggctgaggcaatcagtgctactttagctgctgtaaaggctaggcaagttaatggtgagatggagcattcacctgatagggaacagtctccagatgctgcaccaagtaccaagcaaaattcaagcctcataaaaccagatgttgctcttgtcaacaattcaacagcacctcctggtgttcggttgcaccatagagcagtgagttgaaaacgttgtggtggctgcagaaactggaggtgccttaggtggcatggttaggcagttgtccattgatcagtttgagaatgaaggtagaagggtcatttatggaacccctgagaatgcaactgcggcaaggaaattattagatcgacaaatgtctattaatagtgtgcccaaaaaggtaattgcttctcttctgaaacctcgtggctggaagccccctgttcgaaggcagttctttcttgactgcaatgagattgcagatctatgtgatagtgctgaaagaatattttcaagtgaacctagtgtcttacagctgaaagctcccattaagatatttggtgatctgcatggtcaatttggtgacctcatgcgcttatttgatgaatatggcgctccttcaacagctggagacattgcttacattgattatcttttcttgggagattatgtcgatcgtggtcagcatagtctggagacaatcagtcttctccttgcactgaaggttgaatatcctcacaatgtacatttaattcgagggaatcatgaagcagcggatatcaatgctctttttgggttccgaatagagtgcatagagagaatgggtgagcgggatggaatctggacctggcaccgtgtgaacaggttatttaattggcttcctttggctgcactaatagaaaagaagataatttgtatgcatggtggtattggtcggtccatcaaccatatagagcaaattgaaaatcttcaaagaccaattaccatggaagcaggctcagttgttctgatggatcttctgtggtctgatccaactgagaatgatagcgtagagggactcaggccgaatgcacggggccctggtcttgttacctttgggcctgatagagttatggagttctgcaacaacaatgacctgcagttgattgtgcgagcacatgagtgtgtgatggatggctttgagcgattcgcccaaggtcacttgatcactcttttctcggcaacgaattactgtggaacggcaaacaacgcaggtgcaattttagttctcggaagggatctggtggttgttccgaaactcatccatcctttgccgcctgctatcacgtcacctgagacctctccggagcatcatattgaggacacatggatgcaggagttgaatgcaaacagaccaccaacaccaaccaggggccgccctcaagcccccaacaatgaccgaggctcccttgcctggatataacaggctggccatattattaaacaattgatttcttgtctcctatcattggcttgaggctaaaattatccatccattctggacacatggaagcactctgctgaaagcacacactggcccaaaacaatgtcgaaagaaaactgttcagggagcgagactaagcggtgctctgaaggcgaaggccagagaagagtcactgtcgacagcgctccccaaatcctttccacaaacaagtagaagagcagaaccaagtgttggtaaaccacaggatcttgcctgggatcgcgcctgtacatactcagacgccagcagatagaggaggggttgtgtatgtgttctttttgtcttagcgtcgaaagggatagcagcgtccattgtactaggtattcatttgctgtagattttgatttgttgcctcatgttgcaaagtatggagtgggaaagttggtttcctcgtgtgacggacggtggtctgtcaggtcttgtataatagcgttgtcggctgtttatgtttgcagcgcgtcagctgttacttagcacaccttacacctccctcatgttgtaattcccatcaccggtgctgatgaatgtgcacaatatattgttgtctgttgtccaaagttttgggtcctggacgggttaggtgatttgatttggtttattggagaagcaatacgttgtttgattttgagctgtatgctgtgcacctttgggatttattttattttgcaaatttgt

SEQ ID NO: 34659 - DNA, 4166 bp, Zea Mays
ataaaatacgacaaaatctaagggtgaaaacgcgagtgccaggccagcacacacaaaaaaaaaagatcttatgaaaattcttgacgctatagacaccacgagtccacgacacggcgccctttccctgtccgtcctccgtcgtctccgccggctcttcttcactcctcttttccgctggagtccccgatctcccccgcatttcccactcccacttctagcctcccccacgcccccatcctcagttcctcaccaccacttgccccgccaattcccaaatctcccaggggcttctccgcttaccacccccgcccgctcgcgatcccatcgcctcgacccgacccgagacttgctcgtcgcggagcgccaccaccacgcctcgccgccggcggcgagtggacaagcctagggcttatctacgggtgatggcggccgcgccggccgccgcaagctcgaccgtctcctagggcggcggttacccgaggctgagctcgtgcgcgcgcgtggggggatccttgtgctcagctcgcgaaaccctaggggcagcaggaggcgaagcttgcagggcggcgatggacgtggactcccgcatggcgacagagtccgactccgactccgacgctcgcggcggcgggtcggggtccgggagcgagacccccacggcgtccgcgtccgcgtccgcgtccccgtccacgtccgcgcccgcgcccgggacgcccacggccgcggccgcgtccccggggctggtggcggggcccaggccggcgccggggtacacggtggtggacgccgcgatggacaagaaggaggacgggccgggatgccggtgcgggcacacgctaacggcagtgccggcagtcggggaggagggctcgccggggtacgtgggcccgcgcctgatactctttggtggtgccaccgcgctcgagggcaactctgccacgccgccctcgccggctgggagcgccgggatccgccttgctggtgccaccgcagatgtccattgttatgatgtgttatcaaataagtggaccaggcttactccacttggtgaacctccttcaccaagagctgcacatgtagccactgctgttggtaccatggtggtcattcagggtggaattggccctgccggcttatctgctgaggaccttcatgttctggatcttacacaacaacgaccgcgatggcatagagtggtggttcaaggtcctggtcctggtccacggtatggacatgtgatggccttggttgggcagcgattcttattgacaattggtggcaatgatggaaaacggcccctggcagatgtatgggcccttgatactgcggctaagccatatgaatggagaaaacttgagccggaaggtgaaggaccaccaccatgcatgtatgcaactgctagtgcccgttctgatggtctccttttgctttgtggtggaagggatgccaatagtgtgcccctatcgagtgcatatgggcttgctaagcatagagatggtcgctgggagtgggcaatggcccctggtgtgtctccatcacccagatatcaacatgcagctgtttttgtcaatgcacggcttcatgtctcaggaggggctcttgggggtggtcgcatggtagaagattcctcaagcgttgcagtattggacactgctgctggagtttggtgtgataccaaatcagtagttacaactccaaggacaggaagatatagtgcagatgcagcaggtggtgatgcttctgtagagctcacacggcggtgcaggcatgcagcagccgctgttggtgatttgatatttgtttatggaggtttaaggggaggtgtgctgctagatgacctcctagttgctgaagatcttgctgctgctgaaacaaccagtgcagctaatcatgcagcagcagcagctgcatccacaaatggacaaagagaacctggtagatatgcctacaacgatgaacaatcaggacaaactgttacagtttcaagtcctgatggagctgttgttcttgggactcctgttgctcctccggtcaatggggacatgtatactgatattagtcctgagaatgccattatccagggacagagaaaaatgagcaaaggtgttgattatttggttgaagcatcagctgcagaggctgaggcaatcagtgctactttagctgctgtaaaggctaggcaagttaatggtgagatggagcattcacctgatagggaacagtctccagatgctgcaccaagtaccaagcaaaattcaagcctcataaaaccagatgttgctcttgtcaacaattcaacagcacctcctggtgttcggttgcaccatagagcagttgtggtggctgcagaaactggaggtgccttaggtggcatggttaggcagttgtccattgatcagtttgagaatgaaggtagaagggtcatttatggaacccctgagaatgcaactgcggcaaggaaattattagatcgacaaatgtctattaatagtgtgcccaaaaagctgaaagctcccattaagatatttggtgatctgcatggtcaatttggtgacctcatgcgcttatttgatgaatatggcgctccttcaacagctggagacattgcttacattgattatcttttcttgggagattatgtcgatcgtggtcagcatagtctggagacaatcagtcttctccttgcactgaaggttgaatatcctcacaatgtacatttaattcgagggaatcatgaagcagcggatatcaatgctctttttgggttccgaatagagtgcatagagagaatgggtgagcgggatggaatctggacctggcaccgtgtgaacaggttatttaattggcttcctttggctgcactaatagaaaagaagataatttgtatgcatggtggtattggtcggtccatcaaccatatagagcaaattgaaaatcttcaaagaccaattaccatggaagcaggctcagttgttctgatggatcttctgtggtctgatccaactgagaatgatagcgtagagggactcaggccgaatgcacggggccctggtcttgttacctttgggcctgatagagttatggagttctgcaacaacaatgacctgcagttgattgtgcgagcacatgagtgtgtgatggatggctttgagcgattcgcccaaggtcacttgatcactcttttctcggcaacgaattactgtggaacggcaaacaacgcaggtgcaattttagttctcggaagggatctggtggttgttccgaaactcatccatcctttgccgcctgctatcacgtcacctgagacctctccggagcatcatattgaggacacatggatgcaggagttgaatgcaaacagaccaccaacaccaaccaggggccgccctcaagcccccaacaatgaccgaggctcccttgcctggatataacaggctggccatattattaaacaattgatttcttgtctcctatcattggcttgaggctaaaattatccatccattctggacacatggaagcactctgctgaaagcacacactggcccaaaacaatgtcgaaagaaaactgttcagggagcgagactaagcggtgctctgaaggcgaaggccagagaagagtcactgtcgacagcgctccccaaatcctttccacaaacaagtagaagagcagaaccaagtgttggtaaaccacaggatcttgcctgggatcgcgcctgtacatactcagacgccagcagatagaggaggggttgtgtatgtgttctttttgtcttagcgtcgaaagggatagcagcgtccattgtactaggtattcatttgctgtagattttgatttgttgcctcatgttgcaaagtatggagtgggaaagttggtttcctcgtgtgacggacggtggtctgtcaggtcttgtataatagcgttgtcggctgtttatgtttgcagcgcgtcagctgttacttagcacaccttacacctccctcatgttgtaattcccatcaccggtgctgatgaatgtgcacaatatattgttgtctgttgtccaaagttttgggtcctggacgggttaggtgatttgatttggtttattggagaagcaatacgttgtttgattttgagctgtatgctgtgcacctttgggatttattttattttgcaaatttgt

SEQ ID NO: 34660 - DNA, 4314 bp, Zea Mays
ataaaatacgacaaaatctaagggtgaaaacgcgagtgccaggccagcacacacaaaaaaaaaagatcttatgaaaattcttgacgctatagacaccacgagtccacgacacggcgccctttccctgtccgtcctccgtcgtctccgccggctcttcttcactcctcttttccgctggagtccccgatctcccccgcatttcccactcccacttctagcctcccccacgcccccatcctcagttcctcaccaccacttgccccgccaattcccaaatctcccaggggcttctccgcttaccacccccgcccgctcgcgatcccatcgcctcgacccgacccgagacttgctcgtcgcggagcgccaccaccacgcctcgccgccggcggcgagtggacaagcctagggcttatctacgggtgatggcggccgcgccggccgccgcaagctcgaccgtctcctagggcggcggttacccgaggctgagctcgtgcgcgcgcgtggggggatccttgtgctcagctcgcgaaaccctaggggcagcaggaggcgaagcttgcagggcggcgatggacgtggactcccgcatggcgacagagtccgactccgactccgacgctcgcggcggcgggtcggggtccgggagcgagacccccacggcgtccgcgtccgcgtccgcgtccccgtccacgtccgcgcccgcgcccgggacgcccacggccgcggccgcgtccccggggctggtggcggggcccaggccggcgccggggtacacggtggtggacgccgcgatggacaagaaggaggacgggccgggatgccggtgcgggcacacgctaacggcagtgccggcagtcggggaggagggctcgccggggtacgtgggcccgcgcctgatactctttggtggtgccaccgcgctcgagggcaactctgccacgccgccctcgccggctgggagcgccgggatccgccttgctggtgccaccgcagatgtccattgttatgatgtgttatcaaataagtggaccaggcttactccacttggtgaacctccttcaccaagagctgcacatgtagccactgctgttggtaccatggtggtcattcaggtacctagcttagggtggaattggccctgccggcttatctgctgaggaccttcatgttctggatcttacacaacaacgaccgcgatggcatagagtggtggttcaaggtcctggtcctggtccacggtatggacatgtgatggccttggttgggcagcgattcttattgacaattggtggcaatgatggaaaacggcccctggcagatgtatgggcccttgatactgcggctaagccatatgaatggagaaaacttgagccggaaggtgaaggaccaccaccatgcatgtatgcaactgctagtgcccgttctgatggtctccttttgctttgtggtggaagggatgccaatagtgtgcccctatcgagtgcatatgggcttgctaagcatagagatggtcgctgggagtgggcaatggcccctggtgtgtctccatcacccagatatcaacatgcagctgtttttgtcaatgcacggcttcatgtctcaggaggggctcttgggggtggtcgcatggtagaagattcctcaagcgttgcagtattggacactgctgctggagtttggtgtgataccaaatcagtagttacaactccaaggacaggaagatatagtgcagatgcagcaggtggtgatgcttctgtagagctcacacggcggtgcaggcatgcagcagccgctgttggtgatttgatatttgtttatggaggtttaaggggaggtgtgctgctagatgacctcctagttgctgaagatcttgctgctgctgaaacaaccagtgcagctaatcatgcagcagcagcagctgcatccacaaatggacaaagagaacctggtagatatgcctacaacgatgaacaatcaggacaaactgttacagtttcaagtcctgatggagctgttgttcttgggactcctgttgctcctccggtcaatggggacatgtatactgatattagtcctgagaatgccattatccagggacagagaaaaatgagcaaaggtgttgattatttggttgaagcatcagctgcagaggctgaggcaatcagtgctactttagctgctgtaaaggctaggcaagttaatggtgagatggagcattcacctgatagggaacagtctccagatgctgcaccaagtaccaagcaaaattcaagcctcataaaaccagatgttgctcttgtcaacaattcaacagcacctcctggtgttcggttgcaccatagagcagttgtggtggctgcagaaactggaggtgccttaggtggcatggttaggcagttgtccattgatcagtttgagaatgaaggtagaagggtcatttatggaacccctgagaatgcaactgcggcaaggaaattattagatcgacaaatgtctattaatagtgtgcccaaaaaggtaattgcttctcttctgaaacctcgtggctggaagccccctgttcgaaggcagttctttcttgactgcaatgagattgcagatctatgtgatagtgctgaaagaatattttcaagtgaacctagtgtcttacagctgaaagctcccattaagatatttggtgatctgcatggtcaatttggtgacctcatgcgcttatttgatgaatatggcgctccttcaacagctggagacattgcttacattgattatcttttcttgggagattatgtcgatcgtggtcagcatagtctggagacaatcagtcttctccttgcactgaaggttgaatatcctcacaatgtacatttaattcgagggaatcatgaagcagcggatatcaatgctctttttgggttccgaatagagtgcatagagagaatgggtgagcgggatggaatctggacctggcaccgtgtgaacaggttatttaattggcttcctttggctgcactaatagaaaagaagataatttgtatgcatggtggtattggtcggtccatcaaccatatagagcaaattgaaaatcttcaaagaccaattaccatggaagcaggctcagttgttctgatggatcttctgtggtctgatccaactgagaatgatagcgtagagggactcaggccgaatgcacggggccctggtcttgttacctttgggcctgatagagttatggagttctgcaacaacaatgacctgcagttgattgtgcgagcacatgagtgtgtgatggatggctttgagcgattcgcccaaggtcacttgatcactcttttctcggcaacgaattactgtggaacggcaaacaacgcaggtgcaattttagttctcggaagggatctggtggttgttccgaaactcatccatcctttgccgcctgctatcacgtcacctgagacctctccggagcatcatattgaggacacatggatgcaggagttgaatgcaaacagaccaccaacaccaaccaggggccgccctcaagcccccaacaatgaccgaggctcccttgcctggatataacaggctggccatattattaaacaattgatttcttgtctcctatcattggcttgaggctaaaattatccatccattctggacacatggaagcactctgctgaaagcacacactggcccaaaacaatgtcgaaagaaaactgttcagggagcgagactaagcggtgctctgaaggcgaaggccagagaagagtcactgtcgacagcgctccccaaatcctttccacaaacaagtagaagagcagaaccaagtgttggtaaaccacaggatcttgcctgggatcgcgcctgtacatactcagacgccagcagatagaggaggggttgtgtatgtgttctttttgtcttagcgtcgaaagggatagcagcgtccattgtactaggtattcatttgctgtagattttgatttgttgcctcatgttgcaaagtatggagtgggaaagttggtttcctcgtgtgacggacggtggtctgtcaggtcttgtataatagcgttgtcggctgtttatgtttgcagcgcgtcagctgttacttagcacaccttacacctccctcatgttgtaattcccatcaccggtgctgatgaatgtgcacaatatattgttgtctgttgtccaaagttttgggtcctggacgggttaggtgatttgatttggtttattggagaagcaatacgttgtttgattttgagctgtatgctgtgcacctttgggatttattttattttgcaaatttgt

SEQ ID NO: 34661 - DNA, 4259 bp, Zea Mays
ataaaatacgacaaaatctaagggtgaaaacgcgagtgccaggccagcacacacaaaaaaaaaagatcttatgaaaattcttgacgctatagacaccacgagtccacgacacggcgccctttccctgtccgtcctccgtcgtctccgccggctcttcttcactcctcttttccgctggagtccccgatctcccccgcatttcccactcccacttctagcctcccccacgcccccatcctcagttcctcaccaccacttgccccgccaattcccaaatctcccaggggcttctccgcttaccacccccgcccgctcgcgatcccatcgcctcgacccgacccgagacttgctcgtcgcggagcgccaccaccacgcctcgccgccggcggcgagtggacaagcctagggcttatctacgggtgatggcggccgcgccggccgccgcaagctcgaccgtctcctagggcggcggttacccgaggctgagctcgtgcgcgcgcgtggggggatccttgtgctcagctcgcgaaaccctaggggcagcaggaggcgaagcttgcagggcggcgatggacgtggactcccgcatggcgacagagtccgactccgactccgacgctcgcggcggcgggtcggggtccgggagcgagacccccacggcgtccgcgtccgcgtccgcgtccccgtccacgtccgcgcccgcgcccgggacgcccacggccgcggccgcgtccccggggctggtggcggggcccaggccggcgccggggtacacggtggtggacgccgcgatggacaagaaggaggacgggccgggatgccggtgcgggcacacgctaacggcagtgccggcagtcggggaggagggctcgccggggtacgtgggcccgcgcctgatactctttggtggtgccaccgcgctcgagggcaactctgccacgccgccctcgccggctgggagcgccgggatccgccttgctggtgccaccgcagatgtccattgttatgatgtgttatcaaataagtggaccaggcttactccacttggtgaacctccttcaccaagagctgcacatgtagccactgctgttggtaccatggtggtcattcagggtggaattggccctgccggcttatctgctgaggaccttcatgttctggatcttacacaacaacgaccgcgatggcatagagtggtggttcaaggtcctggtcctggtccacggtatggacatgtgatggccttggttgggcagcgattcttattgacaattggtggcaatgatggaaaacggcccctggcagatgtatgggcccttgatactgcggctaagccatatgaatggagaaaacttgagccggaaggtgaaggaccaccaccatgcatgtatgcaactgctagtgcccgttctgatggtctccttttgctttgtggtggaagggatgccaatagtgtgcccctatcgagtgcatatgggcttgctaagcatagagatggtcgctgggagtgggcaatggcccctggtgtgtctccatcacccagatatcaacatgcagctgtttttgtcaatgcacggcttcatgtctcaggaggggctcttgggggtggtcgcatggtagaagattcctcaagcgttgcagtattggacactgctgctggagtttggtgtgataccaaatcagtagttacaactccaaggacaggaagatatagtgcagatgcagcaggtggtgatgcttctgtagagctcacacggcggtgcaggcatgcagcagccgctgttggtgatttgatatttgtttatggaggtttaaggggaggtgtgctgctagatgacctcctagttgctgaagatcttgctgctgctgaaacaaccagtgcagctaatcatgcagcagcagcagctgcatccacaaatggacaaagagaacctggtagatatgcctacaacgatgaacaatcaggacaaactgttacagtttcaagtcctgatggagctgttgttcttgggactcctgttgctcctccggtcaatggggacatgtatactgatattagtcctgagaatgccattatccagggacagagaaaaatgagcaaaggtgttgattatttggttgaagcatcagctgcagaggctgaggcaatcagtgctactttagctgctgtaaaggctaggcaagttaatggtgagatggagcattcacctgatagggaacagtctccagatgctgcaccaagtaccaagcaaaattcaagcctcataaaaccagatgttgctcttgtcaacaattcaacagcacctcctggtgttcggttgcaccatagagcagttgtggtggctgcagaaactggaggtgccttaggtggcatggttaggcagttgtccattgatcagtttgagaatgaaggtagaagggtcatttatggaacccctgagaatgcaactgcggcaaggaaattattagatcgacaaatgtctattaatagtgtgcccaaaaaggtaattgcttctcttctgaaacctcgtggctggaagccccctgttcgaaggcagttctttcttgactgcaatgagattgcagatctatgtgatagtgctgaaagaatattttcaagtgaacctagtgtcttacagctgaaagctcccattaagatatttggtgatctgcatggtcaatttggtgacctcatgcgcttatttgatgaatatggcgctccttcaacagctggagacattgcttacattgattatcttttcttgggagattatgtcgatcgtggtcagcatagtctggagacaatcagtcttctccttgcactgaaggttgaatatcctcacaatgtacatttaattcgagggaatcatgaagcagcggatatcaatgctctttttgggttccgaatagagtgcatagagagaatgggtgagcgggatggaatctggacctggcaccgtgtgaacaggttatttaattggcttcctttggctgcactaatagaaaagaagataatttgtatgcatggtggtattggtcggtccatcaaccatatagagcaaattgaaaatcttcaaagaccaattaccatggaagcaggctcagttgttctgatggatcttctgtggtctgatccaactgagaatgatagcgtagagggactcaggccgaatgcacggggccctggtcttgttacctttgggttgattgtgcgagcacatgagtgtgtgatggatggctttgagcgattcgcccaaggtcacttgatcactcttttctcggcaacgaattactgtggaacggcaaacaacgcaggtgcaattttagttctcggaagggatctggtggttgttccgaaactcatccatcctttgccgcctgctatcacgtcacctgagacctctccggagcatcatattgaggacacatggatgcaggagttgaatgcaaacagaccaccaacaccaaccaggggccgccctcaagcccccaacaatgaccgaggctcccttgcctggatataacaggctggccatattattaaacaattgatttcttgtctcctatcattggcttgaggctaaaattatccatccattctggacacatggaagcactctgctgaaagcacacactggcccaaaacaatgtcgaaagaaaactgttcagggagcgagactaagcggtgctctgaaggcgaaggccagagaagagtcactgtcgacagcgctccccaaatcctttccacaaacaagtagaagagcagaaccaagtgttggtaaaccacaggatcttgcctgggatcgcgcctgtacatactcagacgccagcagatagaggaggggttgtgtatgtgttctttttgtcttagcgtcgaaagggatagcagcgtccattgtactaggtattcatttgctgtagattttgatttgttgcctcatgttgcaaagtatggagtgggaaagttggtttcctcgtgtgacggacggtggtctgtcaggtcttgtataatagcgttgtcggctgtttatgtttgcagcgcgtcagctgttacttagcacaccttacacctccctcatgttgtaattcccatcaccggtgctgatgaatgtgcacaatatattgttgtctgttgtccaaagttttgggtcctggacgggttaggtgatttgatttggtttattggagaagcaatacgttgtttgattttgagctgtatgctgtgcacctttgggatttattttattttgcaaatttgt

SEQ ID NO: 34662 - DNA, 4285 bp, Zea Mays
ataaaatacgacaaaatctaagggtgaaaacgcgagtgccaggccagcacacacaaaaaaaaaagatcttatgaaaattcttgacgctatagacaccacgagtccacgacacggcgccctttccctgtccgtcctccgtcgtctccgccggctcttcttcactcctcttttccgctggagtccccgatctcccccgcatttcccactcccacttctagcctcccccacgcccccatcctcagttcctcaccaccacttgccccgccaattcccaaatctcccaggggcttctccgcttaccacccccgcccgctcgcgatcccatcgcctcgacccgacccgagacttgctcgtcgcggagcgccaccaccacgcctcgccgccggcggcgagtggacaagcctagggcttatctacgggtgatggcggccgcgccggccgccgcaagctcgaccgtctcctagggcggcggttacccgaggctgagctcgtgcgcgcgcgtggggggatccttgtgctcagctcgcgaaaccctaggggcagcaggaggcgaagcttgcagggcggcgatggacgtggactcccgcatggcgacagagtccgactccgactccgacgctcgcggcggcgggtcggggtccgggagcgagacccccacggcgtccgcgtccgcgtccgcgtccccgtccacgtccgcgcccgcgcccgggacgcccacggccgcggccgcgtccccggggctggtggcggggcccaggccggcgccggggtacacggtggtggacgccgcgatggacaagaaggaggacgggccgggatgccggtgcgggcacacgctaacggcagtgccggcagtcggggaggagggctcgccggggtacgtgggcccgcgcctgatactctttggtggtgccaccgcgctcgagggcaactctgccacgccgccctcgccggctgggagcgccgggatccgccttgctggtgccaccgcagatgtccattgttatgatgtgttatcaaataagtggaccaggcttactccacttggtgaacctccttcaccaagagctgcacatgtagccactgctgttggtaccatggtggtcattcagggtggaattggccctgccggcttatctgctgaggaccttcatgttctggatcttacacaacaacgaccgcgatggcatagagtggtggttcaaggtcctggtcctggtccacggtatggacatgtgatggccttggttgggcagcgattcttattgacaattggtggcaatgatggaaaacggcccctggcagatgtatgggcccttgatactgcggctaagccatatgaatggagaaaacttgagccggaaggtgaaggaccaccaccatgcatgtatgcaactgctagtgcccgttctgatggtctccttttgctttgtggtggaagggatgccaatagtgtgcccctatcgagtgcatatgggcttgctaagcatagagatggtcgctgggagtgggcaatggcccctggtgtgtctccatcacccagatatcaacatgcagctgtttttgtcaatgcacggcttcatgtctcaggaggggctcttgggggtggtcgcatggtagaagattcctcaagcgttgcagtattggacactgctgctggagtttggtgtgataccaaatcagtagttacaactccaaggacaggaagatatagtgcagatgcagcaggtggtgatgcttctgtagagctcacacggcggtgcaggcatgcagcagccgctgttggtgatttgatatttgtttatggaggtttaaggggaggtgtgctgctagatgacctcctagttgctgaagatcttgctgctgctgaaacaaccagtgcagctaatcatgcagcagcagcagctgcatccacaaatggacaaagagaacctggtagatatgcctacaacgatgaacaatcaggacaaactgttacagtttcaagtcctgatggagctgttgttcttgggactcctgttgctcctccggtcaatggggacatgtatactgatattagtcctgagaatgccattatccagggacagagaaaaatgagcaaaggtgttgattatttggttgaagcatcagctgcagaggctgaggcaatcagtgctactttagctgctgtaaaggctaggcaagttaatggtgagatggagcattcacctgatagggaacagtctccagatgctgcaccaagtaccaagcaaaattcaagcctcataaaaccagatgttgctcttgtcaacaattcaacagcacctcctggtgttcggttgcaccatagagcaaaactggaggtgccttaggtggcatggttaggcagttgtccattgatcagtttgagaatgaaggtagaagggtcatttatggaacccctgagaatgcaactgcggcaaggaaattattagatcgacaaatgtctattaatagtgtgcccaaaaaggtaattgcttctcttctgaaacctcgtggctggaagccccctgttcgaaggcagttctttcttgactgcaatgagattgcagatctatgtgatagtgctgaaagaatattttcaagtgaacctagtgtcttacagctgaaagctcccattaagatatttggtgatctgcatggtcaatttggtgacctcatgcgcttatttgatgaatatggcgctccttcaacagctggagacattgcttacattgattatcttttcttgggagattatgtcgatcgtggtcagcatagtctggagacaatcagtcttctccttgcactgaaggttgaatatcctcacaatgtacatttaattcgagggaatcatgaagcagcggatatcaatgctctttttgggttccgaatagagtgcatagagagaatgggtgagcgggatggaatctggacctggcaccgtgtgaacaggttatttaattggcttcctttggctgcactaatagaaaagaagataatttgtatgcatggtggtattggtcggtccatcaaccatatagagcaaattgaaaatcttcaaagaccaattaccatggaagcaggctcagttgttctgatggatcttctgtggtctgatccaactgagaatgatagcgtagagggactcaggccgaatgcacggggccctggtcttgttacctttgggcctgatagagttatggagttctgcaacaacaatgacctgcagttgattgtgcgagcacatgagtgtgtgatggatggctttgagcgattcgcccaaggtcacttgatcactcttttctcggcaacgaattactgtggaacggcaaacaacgcaggtgcaattttagttctcggaagggatctggtggttgttccgaaactcatccatcctttgccgcctgctatcacgtcacctgagacctctccggagcatcatattgaggacacatggatgcaggagttgaatgcaaacagaccaccaacaccaaccaggggccgccctcaagcccccaacaatgaccgaggctcccttgcctggatataacaggctggccatattattaaacaattgatttcttgtctcctatcattggcttgaggctaaaattatccatccattctggacacatggaagcactctgctgaaagcacacactggcccaaaacaatgtcgaaagaaaactgttcagggagcgagactaagcggtgctctgaaggcgaaggccagagaagagtcactgtcgacagcgctccccaaatcctttccacaaacaagtagaagagcagaaccaagtgttggtaaaccacaggatcttgcctgggatcgcgcctgtacatactcagacgccagcagatagaggaggggttgtgtatgtgttctttttgtcttagcgtcgaaagggatagcagcgtccattgtactaggtattcatttgctgtagattttgatttgttgcctcatgttgcaaagtatggagtgggaaagttggtttcctcgtgtgacggacggtggtctgtcaggtcttgtataatagcgttgtcggctgtttatgtttgcagcgcgtcagctgttacttagcacaccttacacctccctcatgttgtaattcccatcaccggtgctgatgaatgtgcacaatatattgttgtctgttgtccaaagttttgggtcctggacgggttaggtgatttgatttggtttattggagaagcaatacgttgtttgattttgagctgtatgctgtgcacctttgggatttattttattttgcaaatttgt

SEQ ID NO: 34663 - DNA, 917 bp, Zea Mays
ctcagatcagttcatatttccatacaagaaatgaatgtgcaagtcacagcataaaatataacagtgtcctattaagcttgtgccaaatttaaaatacaattctcttattacaaggcataaaaatatttacctataaatatattataactttaatttcctactatcgtatcaatgatactattaaatattgtttcatgacttcttttgtggactcattaaaaagtgaaacgaacaaaaaaagaacgggtcaaaaacaaaccataaaaggatgctaccaaaaacaaaaaatgcaatggagaacaacaaggaccagaaaccaaaagcagaggaagattcaaaatcaggctaaataaagaaaaaaaataaaaaagacaaaactaataaactctatgatttaatattgggtcagatgagataagataaagatttatactattatatttttctatttgggttaggattccaggttactcaagagaggattctattaggattaggattcctagctatctagtcaagaagtcatgtaagtgtcatataaaagaggagggcagagggctatagataaacgaatagagactgttttgggaggaccatacccaaaaaaatggttaagatcttttggctctttaatattgtatataaatattaggcatagtttagaagagaaaacaatcatcatgtgataaaccatgtaatgttggaagaacagatccatagactggtacaactacagactaaaatgtcaatatcatctgtccattatttttgtaacagttgtagactgtggacccaaatgcatgatcatgctaataaaaccaacaattactcccagtaattacagaaaagagcatattacctgtgtattctctagatttttgtagtcctcaatgaaatgtgtaataactggagtcggt

SEQ ID NO: 34664 - DNA, 763 bp, Zea Mays
cacataaacacaaaagcaccacaattatatattcacaaaagcatcacaattataatatcattcacaactagatcactaatgtttcatatcactccaactattgttcaaaagcccacaactaccagctcatcttttaaatcaacgttgaaatagcagataggagctgagcaagctatgctgaatatgcatttcaacagtggaagcatgaacatggctacatcagttcttctcgtcttctgttttgcttgacgtagtggcagcctgggtgcttgacgtggtgtgctttcaactgtggtgtgcttgacatagtggcggcatgggtgctaagtgatctactagcaggacaaagaccaacaccattgagagaatgagcaggctgtgcccttgataaagaatgaatgtactcaattgcagcctgaaagaaagttaaaagtgaggggcagtagtctgggaaataacatattgttaggaaaaagtgcttttacactattcataaattgatatattcatagttagtttactgcagtgactattagaaattcagaagcaaaaggtggaaagattcattcccgtgtgagtaaagcggtactgacatttcaaatttcatcgataggattcaaataccatgatcaacatatggcaatgaatttatatggactctgttgcctccagtatatcaagtagcacagagtaaattgataaagaaaaaaggaaaaaagaggcagtgactagataagaactaagacatcacagccaatttttt

SEQ ID NO: 34665 - DNA, 1777 bp, Zea Mays
tcatcactccctcgtcccccttccactttccccacctcacccggtcaccccttctctgcctcgtctccactcctccccccgccgccctcgccccagagccccgccgcgcgattgggctctgcaccctcctcggatccgctgccgcacgtcgtcgccaatcgacattccccgtttccctccgccggttcccgttgctgcgcctgcctgctttacccccttaccgtttcctgaccctgtcctggttcgcgggtttcccgaattcgcgcgctcttgcggcggcgagatccggcccgctcgtcgtagggagagggagccgaccgctcctgatccgagccgcgccccgcgggggtttcgtatcccgttctcccttctggtccggccacaggatcgcagtcgcaaggctgaggagcagcagggggagatggcgccgccctacgtgctgtcgctgctgctgctgctggtgctgtccgtcccggccgtcttcctcgtcgcgccgcgcctcatcccgccccgcgcgctcccggccatcccggacgccgacgagacggaggacctcgcgctgttccgccgcgccgtgctcctctccgccgcgccctcctccaaggccggcgctggccccgcctccccctcgcgtttcttcggcgctgcccaccgccgacagaggaagcagaaggtggcctttctcttcctcaccaactccgacctcgtcttcgccccgctctgggagaggttcttcgcgggccaccacggcctcctcaacgtctacgtccacgccgacccggctgcggcgttcgccctcccgcccacgccctccttccgcggccgcgtaatccgggggaaggccacccagcgcgcctccgccacgctcatctccgccgcgcgccgcctcctcgccaccgcgctgctcgacgacccggccaaccacttcttcgcgatgctctcccagtcctgcgtcccgctgcggcccttcccggccctctaccgcacgctcaccgctgacactgccggcccgcgcggccgccaccgcagcttcatcgagatcctcgacgccgagcccactctgcacgaccgctactacgcgcgcggcgacgacgccatgctcccggaggtgccctacgagagcttccgcgtcggctcccagttcttcgtgctcaccaggaggcacgctgtcatggtggtcagggacaggaggctttggaacaagttcaagctgccgtgtctcgtcaagaggaagcactcgtgctacccggaggagcactacttcccgacgctgctggacatgcaggaccccgcaggatgcaccaagttcacgctcaccagggtgaactggaccgactcctttgacggccacccgcacacgtaccagccggaggaggtgtccccggagctcatcagggacctcaggaagtccaatggcacatactcccacatgtttgcgcgcaaattcgcgcctggatgccttgcgccgctcatggagattgccgactctgtcattctccgtgactaggctgcttcttagcatccctccgtttgcattgcacgaccggaagagctgagggttgtgatgtgatgaacaagcgtaagctgaccccatccatcccccctttggaattcttcagcaccgaacctaccttgttcttctgcacctgcagttgctctttggcaaaagatcgatgccacgcctcggagggtacggtggctgtggcagtgtctgtgtctgtgccgacgggccccgcgctgcctcttaaaatcctaaagagcaaaagtgcaatgccag

SEQ ID NO: 34666 - DNA, 1974 bp, Zea Mays
tcatcactccctcgtcccccttccactttccccacctcacccggtcaccccttctctgcctcgtctccactcctccccccgccgccctcgccccagagccccgccgcgcgattgggctctgcaccctcctcggatccgctgccgcacgtcgtcgccaatcgacattccccgtttccctccgccggttcccgttgctgcgcctgcctgctttacccccttaccgtttcctgaccctgtcctggttcgcgggtttcccgaattcgcgcgctcttgcggcggcgagatccggcccgctcgtcgtagggagagggagccgaccgctcctgatccgagccgcgccccgcgggggtttcgtatcccgttctcccttctggtccggccacaggatcgcagtcgcaaggctgaggagcagcagggggagatggcgccgccctacgtgctgtcgctgctgctgctgctggtgctgtccgtcccggccgtcttcctcgtcgcgccgcgcctcatcccgccccgcgcgctcccggccatcccggacgccgacgagacggaggacctcgcgctgttccgccgcgccgtgctcctctccgccgcgccctcctccaaggccggcgctggccccgcctccccctcgcgtttcttcggcgctgcccaccgccgacagaggaagcagaaggtggcctttctcttcctcaccaactccgacctcgtcttcgccccgctctgggagaggttcttcgcgggccaccacggcctcctcaacgtctacgtccacgccgacccggctgcggcgttcgccctcccgcccacgccctccttccgcggccgcgtaatccgggggaaggccacccagcgcgcctccgccacgctcatctccgccgcgcgccgcctcctcgccaccgcgctgctcgacgacccggccaaccacttcttcgcgatgctctcccagtcctgcgtcccgctgcggcccttcccggccctctaccgcacgctcaccgctgacactgccggcccgcgcggccgccaccgcagcttcatcgagatcctcgacgccgagcccactctgcacgaccgctactacgcgcgcggcgacgacgccatgctcccggaggtgccctacgagagcttccgcgtcggctcccagttcttcgtgctcaccaggaggcacgctgtcatggtggtcagggacaggaggctttggaacaagttcaagctgccgtgtctcgtcaagaggaagcactcgtgctacccggaggagcactacttcccgacgctgctggacatgcaggaccccgcaggatgcaccaagttcacgctcaccagggtgaactggaccgactcctttgacggccacccgcacacgtaccagccggaggaggtgtccccggagctcatcagggacctcaggaagtccaatggcacatactcccacatgtttgcgcgcaaattcgcgcctggatgccttgcgccgctcatggagattgccgactctgtcattctccgtgactaggctgcttcttagcatccctccgtttgcattgcacgaccggaagagctgagggttgtgatgtgatgaacaagcgtaagctgaccccatccatcccccctttggaattcttcagcaccgaacctaccttgttcttctgcacctgcagttgctctttggcaaaagatcgatgccacgcctcggagggtacggtggctgtggcagtgtctgtgtctgtgccgacgggccccgcgctgcctcttgtgagtatgttctttttgtgcgtccttgtttcttttcttttttccagtgagagagagagagagctggctaaagatgagggagaagctggcacgtaatagggtcgatagttaagcatgatcatcctgtgtatttgcatggagacaatctgtcggtacatgcagtgatggtttgtagtagtatatgttacatatattgcatgtgtcaatatcacgccttgttgaaataca

SEQ ID NO: 34667 - DNA, 1587 bp, Zea Mays
tcatcactccctcgtcccccttccactttccccacctcacccggtcaccccttctctgcctcgtctccactcctccccccgccgccctcgccccagagccccgccgcgcgattgggctctgcaccctcctcggatccgctgccgcacgtcgtcgccaatcgacattccccgtttccctccgccggttcccgttgctgcgcctgcctgctttacccccttaccgtttcctgaccctgtcctggttcgcgggtttcccgaattcgcgcgctcttgcggcggcgagatccggcccgctcgtcgtagggagagggagccgaccgctcctgatccgagccgcgccccgcgggggtttcgtatcccgttctcccttctggtccggccacaggatcgcagtcgcaaggctgaggagcagcagggggagatggcgccgccctacgtgctgtcgctgctgctgctgctggtgctgtccgtcccggccgtcttcctcgtcgcgccgcgcctcatcccgccccgcgcgctcccggccatcccggacgccgacgagacggaggacctcgcgctgttccgccgcgccgtgctcctctccgccgcgccctcctccaaggccggcgctggccccgcctccccctcgcgtttcttcggcgctgcccaccgccgacagaggaagcagaaggtggcctttctcttcctcaccaactccgacctcgtcttcgccccgctctgggagaggttcttcgcgggccaccacggcctcctcaacgtctacgtccacgccgacccggctgcggcgttcgccctcccgcccacgccctccttccgcggccgcgtaatccgggggaaggccacccagcgcgcctccgccacgctcatctccgccgcgcgccgcctcctcgccaccgcgctgctcgacgacccggccaaccacttcttcgcgatgctctcccagtcctgcgtcccgctgcggcccttcccggccctctaccgcacgctcaccgctgacactgccggcccgcgcggccgccaccgcagcttcatcgagatcctcgacgccgagcccactctgcacgaccgctactacgcgcgcggcgacgacgccatgctcccggaggtgccctacgagagcttccgcgtcggctcccagttcttcgtgctcaccaggaggcacgctgtcatggtggtcagggacaggaggctttggaacaagttcaagctgccgtgtctcgtcaagaggaagcactcgtgctacccggaggagcactacttcccgacgctgctggacatgcaggaccccgcaggatgcaccaagttcacgctcaccagggtgaactggaccgactcctttgacggccacccgcacacgtaccagccggaggaggtgtccccggagctcatcagggacctcaggaagtccaatggcacatactcccacatgtttgcgcgcaaattcgcgcctggatgccttgcgccgctcatggagattgccgactctgtcattctccgtgactaggctgcttcttagcatccctccgtttgcattgcacgaccggaagagctgagcatgcagaagattgcaagaccatatttgcc

SEQ ID NO: 34668 - DNA, 936 bp, Zea Mays
ctccaattttcctcctcagctgtgcgcgccatccctgctcgccatggccaccacgcccaaacttctggcgtcttcctcccctgcgcagcgtctcagcctgcttgccgagcccagctgcccccttgcttctctccctgtcttgccgtggtgctttagcacggccatctgctcctctcgctctgctcggcgccgcggcttccagctcgacggaatggccctctgctcggccatagccgctgtgccgagtttctcctcctgtagctcgcgattcctggcgtcctgtcgtcgatgcccctgtttcccatggcgatttccctaggtattcctttctgttcgacgcccaaccatccctctgttttcctccctagcgcgggccacgaactctttgtttgccgcacgcacgaatttattctgctcgccacagcgtgtcgtcgaactcccgcaccatcatcgcctctgtcacaagctcgttagccacaattaacttgaccgcgtcagcacacgactgtggtcatgttcatcgaattcgtcaacgctttgttgccgattcgactatcgtcgcttcgcgtgttgtcgagcccgtcgttttccctgtcttgtactcgcgtcctgtttcagcgtgccctctcggctcgctcggctttaaaatccctatctcgtcgtcgacctcgtcacgacttaattcgggtgaagacgaagttagcagcgcgatattccccaagcgctcgacaaattgcatgggtcgggaaatcgctaccaatctcgtggattcgtgtcagctgttaaaacggtacgttaattaatcgcgtgttgaggaagacgagccaagtcgaccccaagtgtggactaatccgcaggatgatgctgatgaacaaacctgaagatgatcgccgagtggacgtcatctaacaaacactaacgtagtgtttattccag

SEQ ID NO: 34669 - DNA, 1742 bp, Zea Mays
gttctggacctcgatttcagctcggagtagtttactcccttgagaggggggagatctgagattgtttttgtttcaccaactggtgaggaaattaacaacaagaggcaattacttcagtacctaaaggcacaccctggaggccctgctgtttcatagcttgattgtggaactggtgataccccaaggcgttctgctcgtattagcgagaaagtcaaggtatttgatagcccagagggcgagaagatcccgaagcgcagcaggaactccagtggtaggaagggtaagcaggggaagaaggaaacccctgagaccgaagaagccaaagatgctgaaactggcaaggaggcagaggaggccccaagcgaagatgccgcaaaggagactgatgtggagatgaagcctgctgaagaggtgaagggggcctctgctgaaacagaagatgctgacatggctgatgctcctgcaccagcaccaatggaagaagataagaaacaaactgaagaactggcagaagctattgcagctcctcctgtgccatcggaggagaagaaagatgtcaagccagctgagcctgaagctgcagcaagcaacccaactgaggattcggcccctgctcctgctgaacctgctgatgttgctgctccagctgctgagcccaaatcagacgccaaacctgctgctgttgctgctccagtgcctgagaccaaatcagacgccgagcctgctgctgttgctgctccagcgcctgagaccaaatcagacgctgagcctgctgctgttgctgctccagctcctgagaccaaatcagtagccgagcctgctgctgttgctgctccagcgcctgagaccaaatcagatgccgagcctgctgctgttgctgctccagtgcctgagaccaaatcagatgccgagcctgctgctgttgctgctccagtgcctgaaacgaaatcagatgctgagcctgctgctgatgctgctccagttcctgagatgaaatcagagtccgagcctgctgctgttgctgctccagcgtctgaaaccaaatcagacgccgagcctgctgccgttgctgctccagcgcctgagaccaaatcagatgccgagcctgctgctgctgctgctccagtgcctggaaccaactcagatgctgctgctactgatccagcacctggaaccaaggccactgccgccgatccagcacctggagctccagcagagaactccaccgacaaagacggaagccaggagagccagcccgtgaacaatggacagctgccgcactcgacggtgaagtgcacctgaagccgcaacgccggaaaaacctgaaccccttccggcgccgtgtatctcatttaggaacaaacattcgcattcgcattcacattgttatcagttaaaaagtctatggaacggtaagcatgttaattagtcagtctgacgctgctgggtgacaggttggtaattaggctctgcatttagctgttttgtatggctgctgtcgccgccatacatgtatcatcttcttgtggttgtatggtacctaaccgcgtaaacatgttaaccttaggccatgtattaattactccgctctaatgtttgtatgtgtattgtcaaacttgcagaaccagttgcatgcatgaaaaataataagtgtctgggtatctatgggtgcggggtacccatctccgcaccagcgcacccagccagaaacagcagtttgtttggatctaatcagaacccga

SEQ ID NO: 34670 - DNA, 2351 bp, Zea Mays
cctctctctctctctcccggcgctctccttccccagccgtggagctcccacgcacgattctctactccatctcctaaccgagccccctccagccacctccctcggcttcttcctcccatccgaccgcccctgctcatcttcctacctcccgcagctcccagccgagcggttctctccccctgtgcgcccttcctgcttcccctgctcggatttctactttcctccatggccgaacgtcctcttcatctctggtcgacctcctctcgcgctcggctcttcaccggcgagctccctggtgccgcgcccggctccttgccccaggaccttgccgcgcgagcttgcctctgctcggccgcgctcacgccggctccctgttcggcgatggaagacgcgtcgcgcgcccaagttcctgcgcgtccctctgcccctacgtgtgctcctatgtccatgccgcgctcccagtgtcgagctccagccgcgtccctgtccctgtccatggccgccgagtctctctgcgcgcggctcgcgccctgcacggatcccctccctctgcccagatctcgactttcggcccagctcgctccagctttgttgtcgcgcaggtcaccggcctccgtttgccacgcgcagctggcgtttcttcttgacgcgcgctccgcctgccgtctccctgcgcgccgtggtatcccggcttttcctagctcggagcgcgttcagtccccagctcgccgtgcccggtcgagctctctgcgcacacgccgcgcgcagctatgtccctatgctcgctgtggccggccttgcttgctgtctgtccacgcgtcgtgcgtggagtaataaaacaaaaatccgtgcgcgtcgggctcacgcgccaaatctttttctaactcgccagcgtgccctctcggctcgctcggctttaaaatttctatctcgtcgtcgttccgcaagtcaccaagaaaccccagaatcgggtgaagacgaagccagcagcgtaatattcaccaagtgcgcgacaaaaagctcgagccaggatttatccgcattcgtacgagtattgggtcgcgtttgatgctggtgagccgatttgtattttttgtaagtttatctgatgattggattaactaggattattagtcgtaataatcctcgtgtttagcgcaggcacgttgtggtagtgttaaaaataagtgaagtacgatgggtttagtgatgcgaaaggtagattaatttagggatacctaggcgaggtggcgacgtaaaggatagatttagtatttcatatagctatctgatgaattttgtcattgtcaattgcactaaataaataacataaagaaatgtttgattaactgttgacatgtaaaatatgtgaggagtgaaataaaattaaaatagttctttatgagcgatgcagtataatttataaagcaagtgataagattagtatttaattaattagctggtgagttgtgtaggctaattatatttaatgtgtatagtttgttgtttgtgatgtttgtgataggttcgagaagcgtaattattgcgcttagtcgtaggtcgataaccggtattatcgtataaacttgtacaacgcctcgccgctaagtgtttaaattcgctatcgtgtagcactatttaggtttataatattcccgttcttatgcattcatgtgcattatgcaaatcatttaggtacgcttattaatcgcgcgatgcggaagacaagccaagtcgaccccaagcgcgggctaatccgcaggatgaagctgatggacaatggagcgagtatcggaataaaggctgatcgtcaagcgaacgtcgtctaacaacactaacctagtgttactcaggcaagccccggtgcatgcaacccctttccttttgtttttaaatacttttcgcacacttaagtttagtgaaatgtgcattaggttcataggaattgcttgaaaccctttgatgcattgctttccttgatatccatacctctatagatacttctgtgaagtatcaaaatatgatttacaaaaatgcttagccttgcttagatcttgtggatagaggttgtcctcagtctaacccgggagaggatggcttctacctgcaaggatattttcatttggagcaatagtgggatcttactgtaaagttccctgtgatgctctttcatcctaaggaacagacacaatcctaaggatggaaatacttaaattgagacttgggttaggaacaagtgatgttctacccaggttggttaaggattaatgcgtatgtaggcgtgctgaccgaggaccctttaactggtcacatgcctcgtcatgggtaagccttgcctcgggcagactaag

SEQ ID NO: 34671 - DNA, 663 bp, Zea Mays
cctcccttttcccccttggctggccgcccctctcctcccattgcagccaccctccattgcttcctcctccctagatcttcctctatgcagcaaggatcgagaagaggaggagcacgttgaattgaagaggaagagaggatcaaggagatgttctaccccatctcttcttgcagattttcttggggaaaccctaggtaaggatgggatccttgttcctccctgtaattatgtgcttttggaggctgtggatcatggggattaaaggattagaggttggattagatgtggggttaggttttgatctcgaatttagtttctgcagaatggcagattcgacaatttctgttaatggcggttttccgtggtcttagtagcctcaaaaaaataaaaagtctatctatgagttgtagacaatttgtagatctttccgtgaccatgaagaacacctcaatcggacatcagatcagaaagttattgcagtttgattatagcagtttttcagtctcataattatgtgcagaatctgttctcttaagatttaggcaattttatcaacagaattaaactttaggttggtaaaagaagttgtatatattttcataagctttccagattgttaaagagtgcattcatatgaattattaaactccagttatgtttgtt

SEQ ID NO: 34672 - DNA, 2635 bp, Zea Mays
gatggtggcgcggatgatgcggtggcctcggccgccgccggcgcggaatatccgcgtccgcctggtggtgcggcgggcggagggcctgcccccgcctcctgcgcccctctcgcctgacgggtcccccggccccgaggccgaggcgaaggcgtttgtggaggtgagctggaagggcccgaagatgtcgccgctctcctcgctgcggcgcgcgcagcggcctcccaggaaccagacgcggaaggaggcgctgccggccgtcgccgcggccgctctcgaggatggcgccgccgccgcccctgctctagcggtgtcggcggtggcctgggacgaggagttcgagagggatgcggcgctcacggcgacgtcgcaccgtgagcccgctgcgttccacccctgggacgtcaccttctccgttgtcagcgaatcaaataaaatatcaaagagcaaacttgttttggggaccgcttcactgaacctagcagattatgcatctgctgctgaagaggaaatcgagataatcctaccattgtctgtgcctagtagtgcaacagacctggtcccatcactccatcttactttaagcctggcggaagtaagaacatctcaacaatcacctggcgcttcacaacgttctgttattgccccattgtcaccttcctctggtgactctcttgcttctggaaaagatgaggtttctgtcattaagtgagaagtattatgtccacagcgatggtgcagaattttcttgtgatactgactctcttgacgatgatctggatgatagagagcatgacgatgagtttgggggttcagccgttaggaagtccttcagctacggctcactgcagactatgaatgttggtgccctactttatgcgcctaggattgatggagacgatgagggttgggtacattacagtcaccgcaactctgatgttggttatcatgttgagcaagtgccaccccccacagctgaggagcatgcttccatccctttgcggcggaagaggagcatacttccagctcggtggagaaaggtaaaattaccaaaggctaaaggggagcctctgttgaagccgtatggagaggagggtggtgatgatattgactacgatcggcggctgttgaccccttctgatggatctgtttcagaggtacatattttattgacatctcaaggatcaaatggttctaacagtatggtgtcggtatttggtgatgacgattttgttgtggggaactgggagtcgaaggaagtatttagccgagatggccacttgaagctttctacacaggtgttctttgcatcgatagaccagagaagcgaacgggctgcaggggagagtgcatgcacagcacttgtggctgttgttgcagactggttccaaacaaaccaggacctgatgccaatcaggtcacagtttgacaacctgatccgagaaggatctctggaatggaggagactctgtgagaacgagacctacagagagcgctttcctgataagcactttgatcttgaaactgtccttcatgcaaagatccgtccactcacagttgctcacagtaagtcattcattgggtttttccatcctcaaggcactgaggatgtaactggattcgacttcctcgacggtgcaatgtcattcgataacatctgggacgagataagccgagcagcggagtgctcctccggaaagcctgccctctacattgtcagttggaacgaccacttctttgtcctcaaggttgacgccaatgctatttacatcattgacacgctcggtgagaggctgtctgaaggctgcaaccaggcatacatcttgaagtttgatgacaccaccaccatccacaaaacacctgctgaaaagaaggaaccaagtcctgatcaccgtggacgccgcaaggattcctcagagacctgctcaaccgagcagggcagcggatcggacactgaagagtgcgagcctgtgttgaagggcaaggatgcatgcaaggagtacatcaagagcttcttggccgccatcccgatccgggagctgcaggctgacatcaagaaaggtctcatggcatcaacgcccctgcaccaccgcctccagatcgagttccactacacggaaccccgccccgccgagatcgcggcgccttctccactgcccccattcgaagcccccttcgagttctgctggcccgagccaccgtcaccgccagctgccactgaatccaccgtgacccatccacctgccatggaggccggcataacccaggctgtcgccgttgtatagccggtcctggctgctgctgcggcctagcctagggcaacggttgcttagtttaacatatagagggcggcgcttcttttagcgagcgaattgtgaggtcgagaccagatcgaagatttggctggcttcggccctggtctgctccttttgctgtctaattaagatgaactgactagtatagcttgactgtcttttggtctcagctttcatcatcttgtaaagaaagaaaggatgattgctcctgcacatctttacctgtgaagcgagttcgctggaattgtaatcctttgctacattatctttatgtgaatcatgacctcgtcttttttggtaacatgcgtatggtcatcttgtat

SEQ ID NO: 34673 - DNA, 3093 bp, Zea Mays
tttatttcctctctccctcactctccctcctcgtcgctcgttccgttccgcgcgtgcatttttctcctcgtatattcccgtcccaatctccaactgcttcctcaaatcccgccccgccccgccccgacataaatccgggcccctaatcccgatcccgccgccaaaatccaatcctgcgccgtcctctcctctcaattcgtgtgtcgctgggccggttcgggcgcggggatcgagtctcccgtggtgctcttgcagccgagctgggattctcgggggcaattgggttggagtttggatttccgctcggaggttggtggtggtgtggtcgccgggagcctttgacttttttttttgccggagtacggaggagcagggggcctgtttgacctccggtgcggtgatggtggcgcggatgatgcggtggcctcggccgccgccggcgcggaatatccgcgtccgcctggtggtgcggcgggcggagggcctgcccccgcctcctgcgcccctctcgcctgacgggtcccccggccccgaggccgaggcgaaggcgtttgtggaggtgagctggaagggcccgaagatgtcgccgctctcctcgctgcggcgcgcgcagcggcctcccaggaaccagacgcggaaggaggcgctgccggccgtcgccgcggccgctctcgaggatggcgccgccgccgcccctgctctagcggtgtcggcggtggcctgggacgaggagttcgagagggatgcggcgctcacggcgacgtcgcaccgtgagcccgctgcgttccacccctgggacgtcaccttctccgttgtcagcgaatcaaataaaatatcaaagagcaaacttgttttggggaccgcttcactgaacctagcagattatgcatctgctgctgaagaggaaatcgagataatcctaccattgtctgtgcctagtagtgcaacagacctggtcccatcactccatcttactttaagcctggcggaagtaagaacatctcaacaatcacctggcgcttcacaacgttctgttattgccccattgtcaccttcctctggtgactctcttgcttctggaaaagatgaggtttctgtcattaaggtgggtctgagaaatctgaaaatgctaagagatctagtgtctacacggaggttcaaaaagactaaccaagactttgacggcagtgagaagtattatgtccacagcgatggtgcagaattttcttgtgatactgactctcttgacgatgatctggatgatagagagcatgacgatgagtttgggggttcagccgttaggaagtccttcagctacggctcactgcagactatgaatgttggtgccctactttatgcgcctaggattgatggagacgatgagggttgggtacattacagtcaccgcaactctgatgttggttatcatgttgagcaagtgccaccccccacagctgaggagcatgcttccatccctttgcggcggaagaggagcatacttccagctcggtggagaaaggtaaaattaccaaaggctaaaggggagcctctgttgaagccgtatggagaggagggtggtgatgatattgactacgatcggcggctgttgaccccttctgatggatctgtttcagagggatcaaatggttctaacagtatggtgtcggtatttggtgatgacgattttgttgtggggaactgggagtcgaaggaagtatttagccgagatggccacttgaagctttctacacaggtgttctttgcatcgatagaccagagaagcgaacgggctgcaggggagagtgcatgcacagcacttgtggctgttgttgcagactggttccaaacaaaccaggacctgatgccaatcaggtcacagtttgacaacctgatccgagaaggatctctggaatggaggagactctgtgagaacgagacctacagagagcgctttcctgataagcactttgatcttgaaactgtccttcatgcaaagatccgtccactcacagttgctcacagtaagtcattcattgggtttttccatcctcaaggcactgaggatgtaactggattcgacttcctcgacggtgcaatgtcattcgataacatctgggacgagataagccgagcagcggagtgctcctccggaaagcctgccctctacattgtcagttggaacgaccacttctttgtcctcaaggttgacgccaatgctatttacatcattgacacgctcggtgagaggctgtctgaaggctgcaaccaggcatacatcttgaagtttgatgacaccaccaccatccacaaaacacctgctgaaaagaaggaaccaagtcctgatcaccgtggacgccgcaaggattcctcagagacctgctcaaccgagcagggcagcggatcggacactgaagagtgcgagcctgtgttgaagggcaaggatgcatgcaaggagtacatcaagagcttcttggccgccatcccgatccgggagctgcaggctgacatcaagaaaggtctcatggcatcaacgcccctgcaccaccgcctccagatcgagttccactacacggaaccccgccccgccgagatcgcggcgccttctccactgcccccattcgaagcccccttcgagttctgctggcccgagccaccgtcaccgccagctgccactgaatccaccgtgacccatccacctgccatggaggccggcataacccaggctgtcgccgttgtatagccggtcctggctgctgctgcggcctagcctagggcaacggttgcttagtttaacatatagagggcggcgcttcttttagcgagcgaattgtgaggtcgagaccagatcgaagatttggctggcttcggccctggtctgctccttttgctgtctaattaagatgaactgactagtatagcttgactgtcttttggtctcagctttcatcatcttgtaaagaaagaaaggatgattgctcctgcacatctttacctgtgaagcgagttcgctggaattgtaatcctttgctacattatctttatgtgaatcatgacctcgtcttttttggtaacatgcgtatggtcatcttgtat

SEQ ID NO: 34674 - DNA, 979 bp, Zea Mays
agcggttcgcccctgcctcctctccacgtggcatcccagagaagattgctcctccgcccccattccgtgtgcctcgttgccatccttctctgtatcatgccaaactcgaatctcaaacctatgcctgctcacaatggagatggagtcccaaacgaggcatcggagtccaggacctgccgcatcgccctttcgttgagccatcgcccttcgcctacgtctccgcctctccggttacaagaaccctccaccggcgatgtgcttgcccgagcgagcatgaccccacggagaacgcgagcaccgcgctcgccgccgccatggcgcagtacgcttgctccagcatggcgtcggactgcacccacacggtgcagcggcccacctcgacgcgaacgcggtcgagcaccatgaggtcgtcgatggcgaacgcgctgcggtcctcggtggttatgcatgctgatgatttagacaaccacaatcaactaattaatcctcccgtcgatggtgttgatgcgattctagataatattggaggaccatatcgccagcacaatctgaacagcttaggtgttgatggtagacttctcaccattggtttccaaggagcatagtagctgaagtgaacctgcaagctgtgcttgcacatcgtttcaccatacaagctgctggactgcgcaacagatgcatttctaataaagcagagattgttagtgaggtggaaaagaacgtgtggcctgatgtcgccgttggcaaggtgaagtcggtgatttatacgacgtttctgttatgtgaagctgctgaggctcataggttgatggatgctagcacccatatcggcaagatactgccactcccatgactgcacctatggcccctaaaattatttcgatcacacttggtcatctggatccatattttagttcaatgtaaaaggacctccttgtataatggagtaatatactttgtgggagctgcaacccgagtg

SEQ ID NO: 34675 - DNA, 2268 bp, Zea Mays
aaaaggtagagccatcaactgtctccatagttagctgattgagtcgcaacagcatcagcaaacaggctcttcctttgcgccctacaagggatgaaagcggaaaataaaaatgttatatctaccacaagagcagtgtgccagtggaacagcaatcgaacgaaacgattttgttcagcacgatatatatattcttcgagattccggcaggcatcttgaagaaattggatgcgatccgttccagattcttctggcagggaggtgtcagtaaaagaaagtataggcttgctaaatggaatgttgtttgtcaacccaaagcgataggtggtttaggagtctctaatctggctgttaaaaacatcagcttactcagcaaatggctcttcaaactattcaatgaggatgggatgtggcaacaattacttaaaaataaatacctaagagttaaatctcttactcaaatatctagaagaccgggtgattcccatttctggtcaggtctaatgaatactaaggatcaatttctcagatggggacgcttcgaagcgaggaatggtcaaactatcagattttggaaggataaatggttaaccagtcggcctctttgtgagcaatttccgaatctatttaatatagtgcggaataaatcagcattagtggtagacgttttttcagctacgaatcttaatttatcttttcgtcgaacaattagggggattaaattgatggaatggcacaacatgttaatcttattatctaatgttactttgaatccgtctagcgacaaatttgtttgggatagtcataagaatggaattttctcagtccaatctatgtaccattgtttgatgaataatcccaacgacgaacggaataaaaagctctggaaacttaagctccccttgaaaataaaagtttttttgtggaatttatgtcggggagcgatccttactaaagataacctagccaaaagacgctggaatggcagcttgtcttgtagcttttgcaaccaaaatgagagtattcatcatctcttttttgactgctatatggccagcaacatttggagattaatttactatgccttaaaaatagacaggcccgttagcattaatcacgttattgggtcttggggaagcaatatgagtccaggatacaaaaaattattactctctggaatctcagctttattttggtctatttggcttagtcgaaatgaagttgcttttaatcataaaccaataccatcaattctgcaggtcattttcagaggtacttactggttcagattctggagacttctacagaaggaggaatcacatcaacaaatcctcgatgtctgtcaagcgttggaagtggtggcgatggaagtctttgcaaatcatggatggcgctcaaatgcaagaattgaggatgcctagagttacctacattctagtgattttgcttctttaagttagtttcattatctatgcaacgtttctcggatgtaataattgtcttgtgttggctgtacgcattaccatgctaaagccggaactcttgtttccattatcaaaaaaaaaatatagcaagtgcatgtacccaatcctatctctgcaacacggtcctggttcaaagcaacactcccctgcaacttgtcaccacccaagtatgaatttagtttggatattccctcctgcaactcctgatgcaacagaaaaaggtacaaaaagaaaagtaatacaatcaattgctctgaggcagatgactgtctgagataacataggtatctcatgaatcatgcaccgcaggtccacttatgatcaagaatgcgacgacaaaaaggactatgtgtaattttgcaaccacctgtatcgagcatgcataagtactatgggcagactagttaaagaaattcagacctcccatgatgctagactcttcatataaggagggagttgctcataatcctcctttgatgcccttatcactccttcaaaagaattaccttcatggagtcgacagcgaaaaaaaaaatcagaactaccaaaatttgacatgtcttagaaatatctaatacatgcattctgatcaccttgaccatttctttcatttaggggagtcataatttcagcttcattcatgatcttttcgccatcatcagtactagacagtaaacaaataaattaggtcatatttaagataaagtaaagtaacattacaagtaaacacaaataacagtgggaagccctcagaagagacctttcagcattcttgtaaagcttcttt

SEQ ID NO: 34676 - DNA, 1008 bp, Zea Mays
  misc_feature (1)..(2): n is a, c, g, or t
nngatcttgtaataattcctgctggtgtccctcggaaacctgggatgacaagggatgatttgttcaacataaatgctggaatagtccgtaccctgtgtgaaggaattgcaaaatgctgccctaatgcaattgtgaatgtgatcagtaatcctgtcaactctaccgtcccaattgctgctgaagttttcaagaaagctggaacttatgaccctaagcggcttttaggtgtgaccacacttgacgtagtgagagcaaatacgtttgtgggagaggttcttggacttgaccccagagaggtaaatgttccagtcattggtgggcatgcaggaattacgatactaccactcctttcacaggtgaatccttcctgctcattcacctcggaagaggttaaatacctcacttctcgcatacagaatggtgggacagaagtagtcgaggctaaagctggagcaggatcagcaactctttcaatggttggtaccttgcctatgcagctgccaaatttgcagatgcttgcctgagaggattgcgtggtgatgctgggataatagagtgctcttatgtggcttctcaggtcacagagttgcctttctttgcatccaaagtgcggctagggcgatgtggcattgaggagatcctaccacttggaccattaaatgagttcgagagatctggtctggagaaggcaaagaaagagctggcggagagtatccagaagggcgtctctttcatcaagtgaggccggcgacggccagcccaacatagaaatagatgtggcgtgtttctgcttcttgagaactcatcttgttatctctctgtaagactgagtgcatgacacgaataatccacgtacacggctgtactaaaaagatgatgaatctgtggtggctaaaaaaagggaaatagaaaagtctggtaataaaagttgtttctgaacaaatgggtttctgaagtcatatactggtatgcaacaactgaagaacacgatataatacggttgcatgc

SEQ ID NO: 34677 - DNA, 990 bp, Zea Mays
  misc_feature (1)..(2): n is a, c, g, or t
nngatcttgtaataattcctgctggtgtccctcggaaacctgggatgacaagggatgatttgttcaacataaatgctggaatagtccgtaccctgtgtgaaggaattgcaaaatgctgccctaatgcaattgtgaatgtgatcagtaatcctgtcaactctaccgtcccaattgctgctgaagttttcaagaaagctggaacttatgaccctaagcggcttttaggtgtgaccacacttgacgtagtgagagcaaatacgtttgtgggagaggttcttggacttgaccccagagaggtaaatgttccagtcattggtgggcatgcaggaattacgatactaccactcctttcacaggtgaatccttcctgctcattcacctcggaagaggttaaatacctcacttctcgcatacagaatggtgggacagaagtagtcgaggctaaagctggagcaggatcagcaactctttcaatggcctatgcagctgccaaatttgcagatgcttgcctgagaggattgcgtggtgatgctgggataatagagtgctcttatgtggcttctcagagttgcctttctttgcatccaaagtgcggctagggcgatgtggcattgaggagatcctaccacttggaccattaaatgagttcgagagatctggtctggagaaggcaaagaaagagctggcggagagtatccagaagggcgtctctttcatcaagtgaggccggcgacggccagcccaacatagaaatagatgtggcgtgtttctgcttcttgagaactcatcttgttatctctctgtaagactgagtgcatgacacgaataatccacgtacacggctgtactaaaaagatgatgaatctgtggtggctaaaaaaagggaaatagaaaagtctggtaataaaagttgtttctgaacaaatgggtttctgaagtcatatactggtatgcaacaactgaagaacacgatataatacggttgcatgc

SEQ ID NO: 34678 - DNA, 3053 bp, Zea Mays
ggcggttttgggccgccggacgctcggagcaactgagtcgtggctatcgaggatgatgccgcgtttcagataacagagactgtgagagtgcacgacacacttgacatgcagagatgaagatcagtgcgcttctcacctccgcgggcatcaacattggcctctgtgttctcttcctgtcactctactccgttctcagaaagcagccggccaatgtcagggtctacttcggccgcaggatcgctgaggaacacgatcggctccgaggggcatttatcttggagaggtttgtcccatccactggatggatagtcaaagccctgcagtgtactgaggaagagatcctggctgctgctgggttggatgctgttgttttcaatagaattctagtattcagcatacgcatcttctcccttgccgcagttttgtgtgttttcgggattcttccactcaattattttggacaggatatacaccatgttcgaattccttcagaatcactagatatatttacaattggcaatgtagaagtgaaatcaagatggctctgggtccattgtgtaaccctgtacataatttctgcagtagcttgcattcttctatacattgtaagttcgcttcccatttggattactggaatgcacatctccttgtatccagaatgtttttgacgattcattttacccataatccaggagtacaagcacattgccaggttgaagctccttcatcttacaagcgcaacaccaaaaccaaaccattttacagttcttgttcgtggaataccaaaggcagataaagaatcatgcagtgatgttgttgataatttcttcacaaagtatcactcatctagttatctcttccatcaagtagtttacaaagtcgggaaagttcagaagataatgactggcgcaaagaaggcatataagaagttcaaacatttcacagatgaaactgtcgatcaaggttgcaggacagttacctaccgctgttgtctgtgtggagcttcttcaaattctttcaagttgttgaacactgagtgtgagcagaacaaggggaaagcggacaataaatccatcttggacttagacgatgaggaatgcacaactgcttttgtatttttcaaaactcggtatgcagcacttattgcgtcagaaatacttcaaacatctaaccctatgaaatgggttgctaatcttgctccagaaccagaagacgtgtattggtccaatctttggctaccctataagcaactttgggctcgccgtattgctacactcctaggctctatctttttcatgttcatatttctgataccggtgacatttatacaaggactatctcagctagagcagttgcagcagaggcttcctttcctaagaggaatattgaagaagaaatactacatgactcagctagtaactgggtaccttcccagtgtcatactgcaaatcttcctgtacattgttgctccaattatgatgctgttttctacattggagggccctacatctcacagtgaaaggaagagaagtgcttgctgtaaagtgctgtactttacagtttggaacatattctttgctaatgtattatctggtactgtcattagtcaattgaatgtgttatcaagcccaaaggacatacctgtccagcttgctaaagctgtacctggacaggccactttcttcatcacctatgtcctgacctcaggatgggctagtttgtcatctgaagttatgcaactctttggtctgatatggaactttataatcaaatacgttctgagaatgagagaagatacagaattcgttccctcgtttccttaccacacagaagtaccaaaagttctgttgtttggactattgggcttcacattttctgtgctggctcctctgatcttaccttttctgctggtgtacttttgtcttggttatgttgtataccgcaatcagttgctcaatgtgtatcgaacaaggtatgacacaggtggtttgtattggccaattgcatacaacacagtcatattctcacttgtgctcacccagatcatctgccttggtgtatttggccttaaagaatcgccggtagctgcaggcttcactgtacctcttatcatccttactcttttgtttaaccagtactgcagaaaccggcttcttccattattcaagacttttccagcacaggatttaatcgacatggacagggaagatgaacgatcaggaagaatggatgaaattcaccacggacttcattctgcttattgccagttcgctgacactgtagatgtgcccttggataaaattgaaatcgttggtggggatgaggagcaaggctctagctcgggtcagtccagtgttaaagaaacgtgcgaggatcccaagaagcacctggctcaccctacactaaaaggactccctgttaaccgcctccggcatgccgtgaggtcggttactttcctgatcagattgcagagaagaggtttatcagaacagaaaatcggataattagttagccgccaaccccctttgcttgttggctatataaatgtacagaggcatacatgcatatacgatcgttcccttagaagagagaagggctaatgtagaagtctgtgggagaacatcatcatgagtgttgaggtgcaattttgttttgtcgcatggatgagtttgttggttctgcgggttatctggcagattcagctacccaaaccttagccttgcacgttgatgaaattaatgctcatggttttgttgtaagagattaatgtggccaaagtgatctagatgtataatgtcctcctctccattggtttgtgtttgagcctcgcaactttagcaggtctgttagtcttcatgcgccaatcatattgaggtattgagaattatactaattggtttgtctgacaagctgtaagcatgttagtccatgctgtcgagcagcaggtgtggaggttcttaacatgtagcattgagctggtatctgcatatctgcagctgttgggtatcatattcctttttttaagaacatgaccttggcgacgtcttaccacg

SEQ ID NO: 34679 - DNA, 2933 bp, Zea Mays
cttctgccctgcctatctactacttcagctcggcggttttgggccgccggacgctcggagcaactgagtcgtggctatcgaggatgatgccgcgtttcagataacagagactgtgagagtgcacgacacacttgacatgcagagatgaagatcagtgcgcttctcacctccgcgggcatcaacattggcctctgtgttctcttcctgtcactctactccgttctcagaaagcagccggccaatgtcagggtctacttcggccgcaggatcgctgaggaacacgatcggctccgaggggcatttatcttggagaggtttgtcccatccactggatggatagtcaaagccctgcagtgtactgaggaagagatcctggctgctgctgggttggatgctgttgttttcaatagaattctagtattcagcatacgcatcttctcccttgccgcagttttgtgtgttttcgggattcttccactcaattattttggacaggatatacaccatgttcgaattccttcagaatcactagatatatttacaattggcaatgtagaagtgaaatcaagatggagtacaagcacattgccaggttgaagctccttcatcttacaagcgcaacaccaaaaccaaaccattttacagttcttgttcgtggaataccaaaggcagataaagaatcatgcagtgatgttgttgataatttcttcacaaagtatcactcatctagttatctcttccatcaagtagtttacaaagtcgggaaagttcagaagataatgactggcgcaaagaaggcatataagaagttcaaacatttcacagatgaaactgtcgatcaaggttgcaggacagttacctaccgctgttgtctgtgtggagcttcttcaaattctttcaagttgttgaacactgagtgtgagcagaacaaggggaaagcggacaataaatccatcttggacttagacgatgaggaatgcacaactgcttttgtatttttcaaaactcggtatgcagcacttattgcgtcagaaatacttcaaacatctaaccctatgaaatgggttgctaatcttgctccagaaccagaagacgtgtattggtccaatctttggctaccctataagcaactttgggctcgccgtattgctacactcctaggctctatctttttcatgttcatatttctgataccggtgacatttatacaaggactatctcagctagagcagttgcagcagaggcttcctttcctaagaggaatattgaagaagaaatactacatgactcagctagtaactgggtaccttcccagtgtcatactgcaaatcttcctgtacattgttgctccaattatgatgctgttttctacattggagggccctacatctcacagtgaaaggaagagaagtgcttgctgtaaagtgctgtactttacagtttggaacatattctttgctaatgtattatctggtactgtcattagtcaattgaatgtgttatcaagcccaaaggacatacctgtccagcttgctaaagctgtacctggacaggccactttcttcatcacctatgtcctgacctcaggatgggctagtttgtcatctgaagttatgcaactctttggtctgatatggaactttataatcaaatacgttctgagaatgagagaagatacagaattcgttccctcgtttccttaccacacagaagtaccaaaagttctgttgtttggactattgggcttcacattttctgtgctggctcctctgatcttaccttttctgctggtgtacttttgtcttggttatgttgtataccgcaatcagttgctcaatgtgtatcgaacaaggtatgacacaggtggtttgtattggccaattgcatacaacacagtcatattctcacttgtgctcacccagatcatctgccttggtgtatttggccttaaagaatcgccggtagctgcaggcttcactgtacctcttatcatccttactcttttgtttaaccagtactgcagaaaccggcttcttccattattcaagacttttccagcacaggatttaatcgacatggacagggaagatgaacgatcaggaagaatggatgaaattcaccacggacttcattctgcttattgccagttcgctgacactgtagatgtgcccttggataaaattgaaatcgttggtggggatgaggagcaaggctctagctcgggtcagtccagtgttaaagaaacgtgcgaggatcccaagaagcacctggctcaccctacactaaaaggactccctgttaaccgcctccggcatgccgtgaggtcggttactttcctgatcagattgcagagaagaggtttatcagaacagaaaatcggataattagttagccgccaaccccctttgcttgttggctatataaatgtacagaggcatacatgcatatacgatcgttcccttagaagagagaagggctaatgtagaagtctgtgggagaacatcatcatgagtgttgaggtgcaattttgttttgtcgcatggatgagtttgttggttctgcgggttatctggcagattcagctacccaaaccttagccttgcacgttgatgaaattaatgctcatggttttgttgtaagagattaatgtggccaaagtgatctagatgtataatgtcctcctctccattggtttgtgtttgagcctcgcaactttagcaggtctgttagtcttcatgcgccaatcatattgaggtattgagaattatactaattggtttgtctgacaagctgtaagcatgttagtccatgctgtcgagcagcaggtgtggaggttcttaacatgtagcattgagctggtatctgcatatctgcagctgttgggtatcatattcctttttttaagaacatgaccttggcgacgtcttaccacg

SEQ ID NO: 34680 - DNA, 3000 bp, Zea Mays
ttcctgttctgttcgcaccgcctccgcctccctccctccctctccccttccggactctctgctctcctctgctgctagtccatccattaatctcctctcctcgccatcgccgcactcacgctacgcttccctcctcaagcccgagggcttctccgggaaggaatcgccgcgccgggttcctgcaacgccccgccctttgcgcacccggagcaactgagtcgtggctatcgaggatgatgccgcgtttcagataacagagactgtgagagtgcacgacacacttgacatgcagagatgaagatcagtgcgcttctcacctccgcgggcatcaacattggcctctgtgttctcttcctgtcactctactccgttctcagaaagcagccggccaatgtcagggtctacttcggccgcaggatcgctgaggaacacgatcggctccgaggggcatttatcttggagaggtttgtcccatccactggatggatagtcaaagccctgcagtgtactgaggaagagatcctggctgctgctgggttggatgctgttgttttcaatagaattctagtattcaggctctgggtccattgtgtaaccctgtacataatttctgcagtagcttgcattcttctatacattgagtacaagcacattgccaggttgaagctccttcatcttacaagcgcaacaccaaaaccaaaccattttacagttcttgttcgtggaataccaaaggcagataaagaatcatgcagtgatgttgttgataatttcttcacaaagtatcactcatctagttatctcttccatcaagtagtttacaaagtcgggaaagttcagaagataatgactggcgcaaagaaggcatataagaagttcaaacatttcacagatgaaactgtcgatcaaggttgcaggacagttacctaccgctgttgtctgtgtggagcttcttcaaattctttcaagttgttgaacactgagtgtgagcagaacaaggggaaagcggacaataaatccatcttggacttagacgatgaggaatgcacaactgcttttgtatttttcaaaactcggtatgcagcacttattgcgtcagaaatacttcaaacatctaaccctatgaaatgggttgctaatcttgctccagaaccagaagacgtgtattggtccaatctttggctaccctataagcaactttgggctcgccgtattgctacactcctaggctctatctttttcatgttcatatttctgataccggtgacatttatacaaggactatctcagctagagcagttgcagcagaggcttcctttcctaagaggaatattgaagaagaaatactacatgactcagctagtaactgggtaccttcccagtgtcatactgcaaatcttcctgtacattgttgctccaattatgatgctgttttctacattggagggccctacatctcacagtgaaaggaagagaagtgcttgctgtaaagtgctgtactttacagtttggaacatattctttgctaatgtattatctggtactgtcattagtcaattgaatgtgttatcaagcccaaaggacatacctgtccagcttgctaaagctgtacctggacaggccactttcttcatcacctatgtcctgacctcaggatgggctagtttgtcatctgaagttatgcaactctttggtctgatatggaactttataatcaaatacgttctgagaatgagagaagatacagaattcgttccctcgtttccttaccacacagaagtaccaaaagttctgttgtttggactattgggcttcacattttctgtgctggctcctctgatcttaccttttctgctggtgtacttttgtcttggttatgttgtataccgcaatcagttgctcaatgtgtatcgaacaaggtatgacacaggtggtttgtattggccaattgcatacaacacagtcatattctcacttgtgctcacccagatcatctgccttggtgtatttggccttaaagaatcgccggtagctgcaggcttcactgtacctcttatcatccttactcttttgtttaaccagtactgcagaaaccggcttcttccattattcaagacttttccagcacaggatttaatcgacatggacagggaagatgaacgatcaggaagaatggatgaaattcaccacggacttcattctgcttattgccagttcgctgacactgtagatgtgcccttggataaaattgaaatcgttggtggggatgaggagcaaggctctagctcgggtcagtccagtgttaaagaaacgtgcgaggatcccaagaagcacctggctcaccctacactaaaaggactccctgttaaccgcctccggcatgccgtgaggtcggttactttcctgatcagattgcagagaagaggtttatcagaacagaaaatcggataattagttagccgccaaccccctttgcttgttggctatataaatgtacagaggcatacatgcatatacgatcgttcccttagaagagagaagggctaatgtagaagtctgtgggagaacatcatcatgagtgttgaggtgcaattttgttttgtcgcatggatgagtttgttggttctgcgggttatctggcagattcagctacccaaaccttagccttgcacgttgatgaaattaatgctcatggttttgttgtaagagattaatgtggccaaagtgatctagatgtataatgtcctcctctccattggtttgtgtttgagcctcgcaactttagcaggtctgttagtcttcatgcgccaatcatattgaggtattgagaattatactaattggtttgtctgacaagctgtaagcatgttagtccatgctgtcgagcagcaggtgtggaggttcttaacatgtagcattgagctggtatctgcatatctgcagctgttgggtatcatattcctttttttaagaacatgaccttggcgacgtcttaccacg

SEQ ID NO: 34681 - DNA, 3278 bp, Zea Mays
ttcctgttctgttcgcaccgcctccgcctccctccctccctctccccttccggactctctgctctcctctgctgctagtccatccattaatctcctctcctcgccatcgccgcactcacgctacgcttccctcctcaagcccgagggcttctccgggaaggaatcgccgcgccgggttcctgcaacgccccgccctttgcgcacccggaggtaactgacgccatctccgtttcctcgtctcctcctgctgctactagcctactactactactagtctactccggccgccgtggcattcgcttgccgcgccgaatccacctgcctgctcttcgactagttcgcaactgagtcgtggctatcgaggatgatgccgcgtttcagataacagagactgtgagagtgcacgacacacttgacatgcagagatgaagatcagtgcgcttctcacctccgcgggcatcaacattggcctctgtgttctcttcctgtcactctactccgttctcagaaagcagccggccaatgtcagggtctacttcggccgcaggatcgctgaggaacacgatcggctccgaggggcatttatcttggagaggtttgtcccatccactggatggatagtcaaagccctgcagtgtactgaggaagagatcctggctgctgctgggttggatgctgttgttttcaatagaattctagtattcagcatacgcatcttctcccttgccgcagttttgtgtgttttcgggattcttccactcaattattttggacaggatatacaccatgttcgaattccttcagaatcactagatatatttacaattggcaatgtagaagtgaaatcaagatggctctgggtccattgtgtaaccctgtacataatttctgcagtagcttgcattcttctatacattgagtacaagcacattgccaggttgaagctccttcatcttacaagcgcaacaccaaaaccaaaccattttacagttcttgttcgtggaataccaaaggcagataaagaatcatgcagtgatgttgttgataatttcttcacaaagtatcactcatctagttatctcttccatcaagtagtttacaaagtcgggaaagttcagaagataatgactggcgcaaagaaggcatataagaagttcaaacatttcacagatgaaactgtcgatcaaggttgcaggacagttacctaccgctgttgtctgtgtggagcttcttcaaattctttcaagttgttgaacactgagtgtgagcagaacaaggggaaagcggacaataaatccatcttggacttagacgatgaggaatgcacaactgcttttgtatttttcaaaactcggtatgcagcacttattgcgtcagaaatacttcaaacatctaaccctatgaaatgggttgctaatcttgctccagaaccagaagacgtgtattggtccaatctttggctaccctataagcaactttgggctcgccgtattgctacactcctaggctctatctttttcatgttcatatttctgataccggtgacatttatacaaggactatctcagctagagcagttgcagcagaggcttcctttcctaagaggaatattgaagaagaaatactacatgactcagctagtaactgggtaccttcccagtgtcatactgcaaatcttcctgtacattgttgctccaattatgatgctgttttctacattggagggccctacatctcacagtgaaaggaagagaagtgcttgctgtaaagtgctgtactttacagtttggaacatattctttgctaatgtattatctggtactgtcattagtcaattgaatgtgttatcaagcccaaaggacatacctgtccagcttgctaaagctgtacctggacaggccactttcttcatcacctatgtcctgacctcaggatgggctagtttgtcatctgaagttatgcaactctttggtctgatatggaactttataatcaaatacgttctgagaatgagagaagatacagaattcgttccctcgtttccttaccacacagaagtaccaaaagttctgttgtttggactattgggcttcacattttctgtgctggctcctctgatcttaccttttctgctggtgtacttttgtcttggttatgttgtataccgcaatcagttgctcaatgtgtatcgaacaaggtatgacacaggtggtttgtattggccaattgcatacaacacagtcatattctcacttgtgctcacccagatcatctgccttggtgtatttggccttaaagaatcgccggtagctgcaggcttcactgtacctcttatcatccttactcttttgtttaaccagtactgcagaaaccggcttcttccattattcaagacttttccagcacaggatttaatcgacatggacagggaagatgaacgatcaggaagaatggatgaaattcaccacggacttcattctgcttattgccagttcgctgacactgtagatgtgcccttggataaaattgaaatcgttggtggggatgaggagcaaggctctagctcgggtcagtccagtgttaaagaaacgtgcgaggatcccaagaagcacctggctcaccctacactaaaaggactccctgttaaccgcctccggcatgccgtgaggtcggttactttcctgatcagattgcagagaagaggtttatcagaacagaaaatcggataattagttagccgccaaccccctttgcttgttggctatataaatgtacagaggcatacatgcatatacgatcgttcccttagaagagagaagggctaatgtagaagtctgtgggagaacatcatcatgagtgttgaggtgcaattttgttttgtcgcatggatgagtttgttggttctgcgggttatctggcagattcagctacccaaaccttagccttgcacgttgatgaaattaatgctcatggttttgttgtaagagattaatgtggccaaagtgatctagatgtataatgtcctcctctccattggtttgtgtttgagcctcgcaactttagcaggtctgttagtcttcatgcgccaatcatattgaggtattgagaattatactaattggtttgtctgacaagctgtaagcatgttagtccatgctgtcgagcagcaggtgtggaggttcttaacatgtagcattgagctggtatctgcatatctgcagctgttgggtatcatattcctttttttaagaacatgaccttggcgacgtcttaccacg

SEQ ID NO: 34682 - DNA, 3083 bp, Zea Mays
ttcctgttctgttcgcaccgcctccgcctccctccctccctctccccttccggactctctgctctcctctgctgctagtccatccattaatctcctctcctcgccatcgccgcactcacgctacgcttccctcctcaagcccgagggcttctccgggaaggaatcgccgcgccgggttcctgcaacgccccgccctttgcgcacccggagcaactgagtcgtggctatcgaggatgatgccgcgtttcagataacagagactgtgagagtgcacgacacacttgacatgcagagatgaagatcagtgcgcttctcacctccgcgggcatcaacattggcctctgtgttctcttcctgtcactctactccgttctcagaaagcagccggccaatgtcagggtctacttcggccgcaggatcgctgaggaacacgatcggctccgaggggcatttatcttggagaggtttgtcccatccactggatggatagtcaaagccctgcagtgtactgaggaagagatcctggctgctgctgggttggatgctgttgttttcaatagaattctagtattcagcatacgcatcttctcccttgccgcagttttgtgtgttttcgggattcttccactcaattattttggacaggatatacaccatgttcgaattccttcagaatcactagatatatttacaattggcaatgtagaagtgaaatcaagatggagtacaagcacattgccaggttgaagctccttcatcttacaagcgcaacaccaaaaccaaaccattttacagttcttgttcgtggaataccaaaggcagataaagaatcatgcagtgatgttgttgataatttcttcacaaagtatcactcatctagttatctcttccatcaagtagtttacaaagtcgggaaagttcagaagataatgactggcgcaaagaaggcatataagaagttcaaacatttcacagatgaaactgtcgatcaaggttgcaggacagttacctaccgctgttgtctgtgtggagcttcttcaaattctttcaagttgttgaacactgagtgtgagcagaacaaggggaaagcggacaataaatccatcttggacttagacgatgaggaatgcacaactgcttttgtatttttcaaaactcggtatgcagcacttattgcgtcagaaatacttcaaacatctaaccctatgaaatgggttgctaatcttgctccagaaccagaagacgtgtattggtccaatctttggctaccctataagcaactttgggctcgccgtattgctacactcctaggctctatctttttcatgttcatatttctgataccggtgacatttatacaaggactatctcagctagagcagttgcagcagaggcttcctttcctaagaggaatattgaagaagaaatactacatgactcagctagtaactgggtaccttcccagtgtcatactgcaaatcttcctgtacattgttgctccaattatgatgctgttttctacattggagggccctacatctcacagtgaaaggaagagaagtgcttgctgtaaagtgctgtactttacagtttggaacatattctttgctaatgtattatctggtactgtcattagtcaattgaatgtgttatcaagcccaaaggacatacctgtccagcttgctaaagctgtacctggacaggccactttcttcatcacctatgtcctgacctcaggatgggctagtttgtcatctgaagttatgcaactctttggtctgatatggaactttataatcaaatacgttctgagaatgagagaagatacagaattcgttccctcgtttccttaccacacagaagtaccaaaagttctgttgtttggactattgggcttcacattttctgtgctggctcctctgatcttaccttttctgctggtgtacttttgtcttggttatgttgtataccgcaatcagttgctcaatgtgtatcgaacaaggtatgacacaggtggtttgtattggccaattgcatacaacacagtcatattctcacttgtgctcacccagatcatctgccttggtgtatttggccttaaagaatcgccggtagctgcaggcttcactgtacctcttatcatccttactcttttgtttaaccagtactgcagaaaccggcttcttccattattcaagacttttccagcacaggatttaatcgacatggacagggaagatgaacgatcaggaagaatggatgaaattcaccacggacttcattctgcttattgccagttcgctgacactgtagatgtgcccttggataaaattgaaatcgttggtggggatgaggagcaaggctctagctcgggtcagtccagtgttaaagaaacgtgcgaggatcccaagaagcacctggctcaccctacactaaaaggactccctgttaaccgcctccggcatgccgtgaggtcggttactttcctgatcagattgcagagaagaggtttatcagaacagaaaatcggataattagttagccgccaaccccctttgcttgttggctatataaatgtacagaggcatacatgcatatacgatcgttcccttagaagagagaagggctaatgtagaagtctgtgggagaacatcatcatgagtgttgaggtgcaattttgttttgtcgcatggatgagtttgttggttctgcgggttatctggcagattcagctacccaaaccttagccttgcacgttgatgaaattaatgctcatggttttgttgtaagagattaatgtggccaaagtgatctagatgtataatgtcctcctctccattggtttgtgtttgagcctcgcaactttagcaggtctgttagtcttcatgcgccaatcatattgaggtattgagaattatactaattggtttgtctgacaagctgtaagcatgttagtccatgctgtcgagcagcaggtgtggaggttcttaacatgtagcattgagctggtatctgcatatctgcagctgttgggtatcatattcctttttttaagaacatgaccttggcgacgtcttaccacg

SEQ ID NO: 34683 - DNA, 3153 bp, Zea Mays
tttggattcctgttctgttcgcaccgcctccgcctccctccctccctctccccttccggactctctgctctcctctgctgctagtccatccattaatctcctctcctcgccatcgccgcactcacgctacgcttccctcctcaagcccgagggcttctccgggaaggaatcgccgcgccgggttcctgcaacgccccgccctttgcgcacccggagcaactgagtcgtggctatcgaggatgatgccgcgtttcagataacagagactgtgagagtgcacgacacacttgacatgcagagatgaagatcagtgcgcttctcacctccgcgggcatcaacattggcctctgtgttctcttcctgtcactctactccgttctcagaaagcagccggccaatgtcagggtctacttcggccgcaggatcgctgaggaacacgatcggctccgaggggcatttatcttggagaggtttgtcccatccactggatggatagtcaaagccctgcagtgtactgaggaagagatcctggctgctgctgggttggatgctgttgttttcaatagaattctagtattcagcatacgcatcttctcccttgccgcagttttgtgtgttttcgggattcttccactcaattattttggacaggatatacaccatgttcgaattccttcagaatcactagatatatttacaattggcaatgtagaagtgaaatcaagatggctctgggtccattgtgtaaccctgtacataatttctgcagtagcttgcattcttctatacattgagtacaagcacattgccaggttgaagctccttcatcttacaagcgcaacaccaaaaccaaaccattttacagttcttgttcgtggaataccaaaggcagataaagaatcatgcagtgatgttgttgataatttcttcacaaagtatcactcatctagttatctcttccatcaagtagtttacaaagtcgggaaagttcagaagataatgactggcgcaaagaaggcatataagaagttcaaacatttcacagatgaaactgtcgatcaaggttgcaggacagttacctaccgctgttgtctgtgtggagcttcttcaaattctttcaagttgttgaacactgagtgtgagcagaacaaggggaaagcggacaataaatccatcttggacttagacgatgaggaatgcacaactgcttttgtatttttcaaaactcggtatgcagcacttattgcgtcagaaatacttcaaacatctaaccctatgaaatgggttgctaatcttgctccagaaccagaagacgtgtattggtccaatctttggctaccctataagcaactttgggctcgccgtattgctacactcctaggctctatctttttcatgttcatatttctgataccggtgacatttatacaaggactatctcagctagagcagttgcagcagaggcttcctttcctaagaggaatattgaagaagaaatactacatgactcagctagtaactgggtaccttcccagtgtcatactgcaaatcttcctgtacattgttgctccaattatgatgctgttttctacattggagggccctacatctcacagtgaaaggaagagaagtgcttgctgtaaagtgctgtactttacagtttggaacatattctttgctaatgtattatctggtactgtcattagtcaattgaatgtgttatcaagcccaaaggacatacctgtccagcttgctaaagctgtacctggacaggccactttcttcatcacctatgtcctgacctcaggatgggctagtttgtcatctgaagttatgcaactctttggtctgatatggaactttataatcaaatacgttctgagaatgagagaagatacagaattcgttccctcgtttccttaccacacagaagtaccaaaagttctgttgtttggactattgggcttcacattttctgtgctggctcctctgatcttaccttttctgctggtgtacttttgtcttggttatgttgtataccgcaatcagttgctcaatgtgtatcgaacaaggtatgacacaggtggtttgtattggccaattgcatacaacacagtcatattctcacttgtgctcacccagatcatctgccttggtgtatttggccttaaagaatcgccggtagctgcaggcttcactgtacctcttatcatccttactcttttgtttaaccagtactgcagaaaccggcttcttccattattcaagacttttccagcacaggatttaatcgacatggacagggaagatgaacgatcaggaagaatggatgaaattcaccacggacttcattctgcttattgccagttcgctgacactgtagatgtgcccttggataaaattgaaatcgttggtggggatgaggagcaaggctctagctcgggtcagtccagtgttaaagaaacgtgcgaggatcccaagaagcacctggctcaccctacactaaaaggactccctgttaaccgcctccggcatgccgtgaggtcggttactttcctgatcagattgcagagaagaggtttatcagaacagaaaatcggataattagttagccgccaaccccctttgcttgttggctatataaatgtacagaggcatacatgcatatacgatcgttcccttagaagagagaagggctaatgtagaagtctgtgggagaacatcatcatgagtgttgaggtgcaattttgttttgtcgcatggatgagtttgttggttctgcgggttatctggcagattcagctacccaaaccttagccttgcacgttgatgaaattaatgctcatggttttgttgtaagagattaatgtggccaaagtgatctagatgtataatgtcctcctctccattggtttgtgtttgagcctcgcaactttagcaggtctgttagtcttcatgcgccaatcatattgaggtattgagaattatactaattggtttgtctgacaagctgtaagcatgttagtccatgctgtcgagcagcaggtgtggaggttcttaacatgtagcattgagctggtatctgcatatctgcagctgttgggtatcatattcctttttttaagaacatgaccttggcgacgtcttaccacg

SEQ ID NO: 34684 - DNA, 3017 bp, Zea Mays
attacatgtataaaaaaaaacagactcccttcgctgtctcgtcttccctgggctctctctctccctgcaaaagggccaagcaactgagtcgtggctatcgaggatgatgccgcgtttcagataacagagactgtgagagtgcacgacacacttgacatgcagagatgaagatcagtgcgcttctcacctccgcgggcatcaacattggcctctgtgttctcttcctgtcactctactccgttctcagaaagcagccggccaatgtcagggtctacttcggccgcaggatcgctgaggaacacgatcggctccgaggggcatttatcttggagaggtttgtcccatccactggatggatagtcaaagccctgcagtgtactgaggaagagatcctggctgctgctgggttggatgctgttgttttcaatagaattctagtattcagcatacgcatcttctcccttgccgcagttttgtgtgttttcgggattcttccactcaattattttggacaggatatacaccatgttcgaattccttcagaatcactagatatatttacaattggcaatgtagaagtgaaatcaagatggctctgggtccattgtgtaaccctgtacataatttctgcagtagcttgcattcttctatacattgagtacaagcacattgccaggttgaagctccttcatcttacaagcgcaacaccaaaaccaaaccattttacagttcttgttcgtggaataccaaaggcagataaagaatcatgcagtgatgttgttgataatttcttcacaaagtatcactcatctagttatctcttccatcaagtagtttacaaagtcgggaaagttcagaagataatgactggcgcaaagaaggcatataagaagttcaaacatttcacagatgaaactgtcgatcaaggttgcaggacagttacctaccgctgttgtctgtgtggagcttcttcaaattctttcaagttgttgaacactgagtgtgagcagaacaaggggaaagcggacaataaatccatcttggacttagacgatgaggaatgcacaactgcttttgtatttttcaaaactcggtatgcagcacttattgcgtcagaaatacttcaaacatctaaccctatgaaatgggttgctaatcttgctccagaaccagaagacgtgtattggtccaatctttggctaccctataagcaactttgggctcgccgtattgctacactcctaggctctatctttttcatgttcatatttctgataccggtgacatttatacaaggactatctcagctagagcagttgcagcagaggcttcctttcctaagaggaatattgaagaagaaatactacatgactcagctagtaactgggtaccttcccagtgtcatactgcaaatcttcctgtacattgttgctccaattatgatgctgttttctacattggagggccctacatctcacagtgaaaggaagagaagtgcttgctgtaaagtgctgtactttacagtttggaacatattctttgctaatgtattatctggtactgtcattagtcaattgaatgtgttatcaagcccaaaggacatacctgtccagcttgctaaagctgtacctggacaggccactttcttcatcacctatgtcctgacctcaggatgggctagtttgtcatctgaagttatgcaactctttggtctgatatggaactttataatcaaatacgttctgagaatgagagaagatacagaattcgttccctcgtttccttaccacacagaagtaccaaaagttctgttgtttggactattgggcttcacattttctgtgctggctcctctgatcttaccttttctgctggtgtacttttgtcttggttatgttgtataccgcaatcagttgctcaatgtgtatcgaacaaggtatgacacaggtggtttgtattggccaattgcatacaacacagtcatattctcacttgtgctcacccagatcatctgccttggtgtatttggccttaaagaatcgccggtagctgcaggcttcactgtacctcttatcatccttactcttttgtttaaccagtactgcagaaaccggcttcttccattattcaagacttttccagcacaggatttaatcgacatggacagggaagatgaacgatcaggaagaatggatgaaattcaccacggacttcattctgcttattgccagttcgctgacactgtagatgtgcccttggataaaattgaaatcgttggtggggatgaggagcaaggctctagctcgggtcagtccagtgttaaagaaacgtgcgaggatcccaagaagcacctggctcaccctacactaaaaggactccctgttaaccgcctccggcatgccgtgaggtcggttactttcctgatcagattgcagagaagaggtttatcagaacagaaaatcggataattagttagccgccaaccccctttgcttgttggctatataaatgtacagaggcatacatgcatatacgatcgttcccttagaagagagaagggctaatgtagaagtctgtgggagaacatcatcatgagtgttgaggtgcaattttgttttgtcgcatggatgagtttgttggttctgcgggttatctggcagattcagctacccaaaccttagccttgcacgttgatgaaattaatgctcatggttttgttgtaagagattaatgtggccaaagtgatctagatgtataatgtcctcctctccattggtttgtgtttgagcctcgcaactttagcaggtctgttagtcttcatgcgccaatcatattgaggtattgagaattatactaattggtttgtctgacaagctgtaagcatgttagtccatgctgtcgagcagcaggtgtggaggttcttaacatgtagcattgagctggtatctgcatatctgcagctgttgggtatcatattcctttttttaagaacatgaccttggcgacgtcttaccacg

SEQ ID NO: 34685 - DNA, 2876 bp, Zea Mays
atgaatgttccggcggcagcgtctcagcctccgcaccgcccttcatcccttcgttcagcagctcctcccaaaagtcgtcgtgagctccgccgtctcgaacccgcgctgctgctggctccacgcgcggccaccctgcttctcgcccccgtcctgcttgcgcttgccgagcccctagatgttgagcgccaggttctccagctccgacgtggtccctcgctcgtccagctccgcaaacagcgctcgcgtggcagtggggtcgtcgtcgtcgccctgctgcggctcctcctcctcctgcacgccaccgtgggtcggcgcggcgccgatgggccgcctccgcttccggaaggcggcagagagcagcgccgcgcccgccagcaacactacccctccccccacgtcgtcgcagtagaccgtgagagccggggtggtatcgagtctcccactatcgtggacgtcgtcgcaacgccgctgatgtcggaggaggaggcgctcaagatccacaccgactgtgtccacttccagacttcctcgcctcacctctcacctacaggaagttctaagaaggccaccaaaggaaactcacctgacaagggaagaaacaagttctggaagaacatcaaccttggtttcaagacgtccacgtaagctattgaaactcagagtttcttttcttgtccagctgatgtttttgttagattgtcagcccattcgaagctacgaagaatccacatcacacaaccgattgacgctatctataataattaccttgttgtaattaaaaagaagaaacatgtgctttctattttgtataaaaatatcaaagttgcgtgctgaaatcataaaggagttctatattcactgttgataacatgcatttttcatgttgccatattaatagaataataactacgaataaacaacctgataaagtggtaaataaagtggcaaatgtgatggatccgatcatatcttcttcaaaagtggagtattgtgatttgaaatttgtattttttaatagctcactcatttcattttatagaagcagcataaaactctcactgatatgtaaaaagtttgagcctcttgaatcccctccaaagaggtaagcttttgtacagttaactccctacctgtcagctcatataattacttaccgaaagtatatatacataccatcaatgccaccctgcataaaaatacttccttaattacttaccaaaagtatatacacatactgttaataccaccgtttacaaaaaaactactttcgatgcatatgtataacattacaaacactatttgtttgtacatgtgcttttaaaattatataaattgtatctattgtttcacaggatcaaaaggattctacggaccaaagtaccccatgaatgatagatgcaaccacatgaaacccataaaaatagcccttaccggcagtgtcagcttttgctatcaatcttaccattttgtaaccaaaataccaaatacaatggatgcatagataacccttcagacgttctactaaatgcagctgatgtgctgcaacttatatttatttatttattttagacaatgacctacttaaatatggcatgaagattatgtatgtcatcgtttttatttctagattcgatacatgcatatacaattagctgctagcccttagataatgctacctactaattgaagataactgattaatataatatatatattttttgataacgaatagtatcgaactagtattaatatttatacagtctatatatttttcgataatgaacaatatcgaaccagtattaatatttaaaccttccctttgttggcataaaaagggaatattaatgttacattatacatgtaccttcatgtataacatattttctttatatacacataaaaatttgtatgaccacaaaaaaatatataaaaaataaaaataacgcgcggtgggtgcgcgtcaaacactagtatatatactgcgggtactattttcttgaaagtttgggtctgtttcataaaagttaggacctacatgcaattatctttacacctgaggggatggtgggtttatttcgaaatacttgagggtctattatgcaatatgcacgcggccgaaggggtttgaggaattctaagccatccaatctctcgtgcacggctaggattagattcaccttcacaccgaaccggtatgcaccagtggccgcaagatccaaaagctatggtctcgatttaattatggccagattccaccacacccgctcgatcgaggatccatggccaggagtcgatcgaagcaaaggggtacgtggcttctaacctcggccacacaagtcacgtcaaacggcgacgggttcgtcatcgtcaccctgaggcctgagcatgagcgcgacggcgtcgcctgcctccgcggtggagggatggccgaaatccggctactccacgcaacagatccccaaattctaatctgaggtgtgatatatgtaaggaaggacatggcgaaggcagggggttctcacctacgaggctacgattgtgctgttcagtgctctaaccacggagaatcgtggtccgtggcggactccttcgctccggtgaacgattccctggactccgatgacttatgtgcccaagcgaatgatcacacgtgaccttcgcacgctggcgaaccttcgcgacctctccccaagcaccatacgtcggtggatgcgatcaccgagcgtggcggctccctctcctttctctctcttgctttctgtcaatggtggccctctctattcggtggtctaaatgaatgggtgaggaggtgtggctgaggactatatacccgtgaggcagggttcatgagctggcgaccagatttcatgggggaa

SEQ ID NO: 34686 - DNA, 2538 bp, Zea Mays
ccggtgacagccgccaccgcttcggactccagatcctttatcacgtacagcagctagcccatgaatgttccggcggcagcgtctcagcctccgcaccgcccttcatcccttcgttcagcagctcctcccaaaagtcgtcgtgagctccgccgtctcgaacccgcgctgctgctggctccacgcgcggccaccctgcttctcgcccccgtcctgcttgcgcttgccgagcccctagatgttgagcgccaggttctccagctccgacgtggtccctcgctcgtccagctccgcaaacagcgctcgcgtggcagtggggtcgtcgtcgtcgccctgctgcggctcctcctcctcctgcacgccaccgtgggtcggcgcggcgccgatgggccgcctccgcttccggaaggcggcagagagcagcgccgcgcccgccagcaacactacccctccccccacgtcgtcgcagtagaccgtgagagccggggtggtatcgagtctcccactatcgtggacgtcgtcgcaacgccgctgatgtcggaggaggaggcgctcaagatccacaccgactgtgtccacttccagacttcctcgcctcacctctcacctacaggaagttctaagaaggccaccaaaggaaactcacctgacaagggaagaaacaagttctggaagaacatcaaccttggtttcaagacgtccacaagcagcataaaactctcactgatatgtaaaaagtttgagcctcttgaatcccctccaaagaggtaagcttttgtacagttaactccctacctgtcagctcatataattacttaccgaaagtatatatacataccatcaatgccaccctgcataaaaatacttccttaattacttaccaaaagtatatacacatactgttaataccaccgtttacaaaaaaactactttcgatgcatatgtataacattacaaacactatttgtttgtacatgtgcttttaaaattatataaattgtatctattgtttcacaggatcaaaaggattctacggaccaaagtaccccatgaatgatagatgcaaccacatgaaacccataaaaatagcccttaccggcagtgtcagcttttgctatcaatcttaccattttgtaaccaaaataccaaatacaatggatgcatagataacccttcagacgttctactaaatgcagctgatgtgctgcaacttatatttatttatttattttagacaatgacctacttaaatatggcatgaagattatgtatgtcatcgtttttatttctagattcgatacatgcatatacaattagctgctagcccttagataatgctacctactaattgaagataactgattaatataatatatatattttttgataacgaatagtatcgaactagtattaatatttatacagtctatatatttttcgataatgaacaatatcgaaccagtattaatatttaaaccttccctttgttggcataaaaagggaatattaatgttacattatacatgtaccttcatgtataacatattttctttatatacacataaaaatttgtatgaccacaaaaaaatatataaaaaataaaaataacgcgcggtgggtgcgcgtcaaacactagtatatatactgcgggtactattttcttgaaagtttgggtctgtttcataaaagttaggacctacatgcaattatctttacacctgaggggatggtgggtttatttcgaaatacttgagggtctattatgcaatatgcacgcggccgaaggggtttgaggaattctaagccatccaatctctcgtgcacggctaggattagattcaccttcacaccgaaccggtatgcaccagtggccgcaagatccaaaagctatggtctcgatttaattatggccagattccaccacacccgctcgatcgaggatccatggccaggagtcgatcgaagcaaaggggtacgtggcttctaacctcggccacacaagtcacgtcaaacggcgacgggttcgtcatcgtcaccctgaggcctgagcatgagcgcgacggcgtcgcctgcctccgcggtggagggatggccgaaatccggctactccacgcaacagatccccaaattctaatctgaggtgtgatatatgtaaggaaggacatggcgaaggcagggggttctcacctacgaggctacgattgtgctgttcagtgctctaaccacggagaatcgtggtccgtggcggactccttcgctccggtgaacgattccctggactccgatgacttatgtgcccaagcgaatgatcacacgtgaccttcgcacgctggcgaaccttcgcgacctctccccaagcaccatacgtcggtggatgcgatcaccgagcgtggcggctccctctcctttctctctcttgctttctgtcaatggtggccctctctattcggtggtctaaatgaatgggtgaggaggtgtggctgaggactatatacccgtgaggcagggttcatgagctggcgaccagatttcatgggggaa

SEQ ID NO: 34687 - DNA, 1526 bp, Zea Mays
cgcacccgcactcgcagtcacaccgcctcatggcgaccgacgacggcgagggccagcagccggtggtgctcatcacggggtgcgccaagggcgggatcgggtacgagtactgccaggccttcgcgggcctcggctgccgcgtggtggccaccgacatccccgaccaagtccccggccttgccgccgacctcgcgggcacgccggccgcggaggcgctcccgctcgacgtgacctcggacgccagcgtgggcgccgccgtcagcgacgtgctggcgcggcacggccgcctggacgtgctgctcaacaacgccggcgtcggctgcacgggcccgctcgcggagctggcccccgccgccgtgtcgcgcgcgctcgacgtcaacttcctgggccaggtccgcaccgtgcgcgctgtggcgccccacatggcggcgcgcgggtccggccgcatcgtcaatgtcggcagcgtcgtgggcaacgccgccacgccctgggccgcgccctactgcgcgtccaaggccgccgtgcacgccgccaccgacgcgctccgcctcgagctccgccccttcggggtgcacgtcgtcaaggtcgtgccgggggccgtcaggtcggggctgggacgcgccaacgccgcgcacctcgcctcccaccaggagtggcgcatgtaccgggacttcgcaccggccatcgaggagcgcgcgagggcgtcgcagacggggaaggccacggacgctgccgtcttcgccaggcacgtggcgcgccgggtcatgagcgcgcggccgcccagggagatcgtctacggcaacatgacgctgctgttcgccgcgctcgccgtgtcgcctgcgtgggtgcgcgacgccttctttgccaaccgcttcgggctcaacaagaagcagcgctagttcatcacatcactagcacgtgttcttcttgcgttggccgatccagttctccactccgccgaataaccgacgagtcacccacacccggccaccctgcatcttcatcatcttcttttcttttcatttgatatgaagtaagcaaccaaagcatgaatcttcttttactactagcacctgtctgtcaacgaaaaaacgcttaaaacatcagcattcgttaacaattgtgctgttctttcaatgattttatttctttattcttaactttttttataatattctcccttttaattaagaacacatattactgtcctcaattccgacatttgttcgcataattcataagagcatcttaaaaatctttctaaatgtactttctaaattatcatttggagagacatttatataaaaactattttctatactatatctttctaatttccaataacttttctagttatttttatatcttatttacactgtagagagttattcacgtttttctatctttagcccgtgagaaatccagaatagaaaatgattatatttatataatcatttaaataagctattggaagacattcttttgcaaaaatctttattcatatcaattagaaaaagaatatactc

SEQ ID NO: 34688 - DNA, 715 bp, Zea Mays
ctttttccgtgagcagacgcaccgccgcctgcaacgtccgttcgtggccgccagctcgttcgcctccccgcacctctagcctcgcgttatggcagcgcccgttcacagtttcctcacgccacaaccgtttctttgatgctgtcatcaatagcgttcaacacagtgcttcaatcggcattcaaccatggccatgaatctctccccactcgcgcgtgcagccgccaccggctcttcacctcctcgcccagcattatggccagctcgccccaccctctccatttctccccactaactattggcagtttctcctacccagttctcccaagtgtcgttattggcggtgctggtaaccgcccttctccttccaccccgacgcccgacttccctcgccttggcctataaattggacgcccagccgcgtttcttctcctactcccttacccaactctcgctttcgtccttccccagccaccctcgctcacgcacttcgctcccattgtttgtcgtcgctgctccgccggaggccgcgcctgtagcgtcgccgacaccgtcgtctgcacgcctttattagaagctgattgtgtggtagaggatccgaattcgtgtgaggacgattcgcaggacacttttgagcaaggcaaatggattctccctctgcatattctatttgtatccaatcaatgcatataataatgtttactttttgatatactac

SEQ ID NO: 34689 - DNA, 854 bp, Zea Mays
ccgactatgatgctaggtgagtaggttcttctttcaatagggaaaaaaggagagaaaaaaaacggaagcatcaagtctgaaactgaaaataagggcgaatagcggtttctctccctcccttgccttcgtctccgcctcccgtctttcctcaagaagtcgattcccttccccaagaacccaagcccccaccatgacaagctcctcctctccttcccgaaaggcgctgagcaagatcgcttgcaatcggctgcagaaggaactcgccgagtggcaactcagcccccctgctggattcaagcacaaggtctccgataacctacaaaggtgggtaattgaggtcactggagcggcgggcaccctttacgccggcgagacctaccagttgcaggttgacttccctgagcattatcctatggaggcacctcaggtcatttttctcaatccagcgccaatgcatccacacatctacagcaacgggcacatctgcttagcaacgtccagtggacaatgaccgctatgtcaggaactgccgcaacgggaggtcgccgaaggagaccagatggtggttccatgacgacacggtgtaattgagcgcctgtcagccttccttgctgtggtatatctcgtcaaggggagattggggatgatttaggcctattttgtaaactgcactgttcgtgtagtggagtttgaatattggtatgaggatgggtaagttgctggagatagtcaagtttgagctgcagtggaggaagtgtgcgtaaatgaaattattctagcttattgattacttgtaccaaatagacgaaaaacagtgctgcagtcttatggaaattgaagtcagtcttcaaact

SEQ ID NO: 34690 - DNA, 943 bp, Zea Mays
ccgactatgatgctaggtgagtaggttcttctttcaatagggaaaaaaggagagaaaaaaaacggaagcatcaagtctgaaactgaaaataagggcgaatagcggtttctctccctcccttgccttcgtctccgcctcccgtctttcctcaagaagtcgattcccttccccaagaacccaagcccccaccatgacaagctcctcctctccttcccgaaaggcgctgagcaagatcgcttgcaatcggctgcagaaggaactcgccgagtggcaactcagcccccctgctggattcaagcacaaggtctccgataacctacaaaggtgggtaattgaggtcactggagcggcgggcaccctttacgccggcgagacctaccagttgcaggttgacttccctgagcattatcctatggaggcacctcaggtcatttttctcaatccagcgccaatgcatccacacatctacagcaacgggcacatctgcttagatattttgtatgactcgtggtctccagcgatgaccgtgagctctgtctgtatcagtatcctgtctatgttgtctagttcgccagcaaagcaacgtccagtggacaatgaccgctatgtcaggaactgccgcaacgggaggtcgccgaaggagaccagatggtggttccatgacgacacggtgtaattgagcgcctgtcagccttccttgctgtggtatatctcgtcaaggggagattggggatgatttaggcctattttgtaaactgcactgttcgtgtagtggagtttgaatattggtatgaggatgggtaagttgctggagatagtcaagtttgagctgcagtggaggaagtgtgcgtaaatgaaattattctagcttattgattacttgtaccaaatagacgaaaaacagtgctgcagtcttatggaaattgaagtcagtcttcaaact

SEQ ID NO: 34691 - DNA, 559 bp, Zea Mays
atttaatgttatatgtatattgggaaaaaccccaaccgactatgatgctaggtgagtaggttcttctttcaatagggaaaaaaggagagaaaaaaaacggaagcatcaagtctgaaactgaaaataagggcgaatagcggtttctctccctcccttgccttcgtctccgcctcccgtctttcctcaagaagtcgattcccttccccaagaacccaagcccccaccatgacaagctcctcctctccttcccgaaaggcgctgagcaagatcgcttgcaatcggctgcagaaggaactcgccgagtggcaactcagcccccctgctggattcaagcacaaggtctccgataacctacaaaggtgggtaattgaggtcactggagcggcgggcaccctttacgccggcgagacctaccagttgcaggttgacttccctgagcattatcctatggaggcacctcaggtcatttttctcaatccagcgccaatgcatccacacatctacagcaacgggcacatctgcttagatggttcgtactcttcaaactacccgggtcgac

SEQ ID NO: 34692 - DNA, 2416 bp, Zea Mays
gctcagtcctctgtccttctccttctctcacacactccactccacgtccccctccttcaaatcctaccaacacccaagcacaaggagagagaagccgccgccgccgccatggacaatattgaggtgaggaggaggaagaagaaagggagaagcagcggacgccgccaggggggacgggtacaggcggtcctgcgcgccggcctcgtcgccatggccttcgccctcctctgcctctgctcctccacgccctccgccattgccctcaccccagacgcggctcaccagctggcgtcccagcgaccccaacccctgcggctgggagggcatctcctgctccgtccctgacctcagggtccaatccataaacctcccattcatgcagctcgggggcatcatttcgcccagcatcgggaggctcgacaagctgcagagactagctctgcaccagaacagcttgcacggcccaatccctgcagagatcaagaactgcaccgagctcagggcaatttacctgagagccaactacctgcaaggaggcatcccttcagagattggcgagctcgtgcacctcaccatcttggacctgtcaagcaatctgctgaggggcacaataccggcctcgatcggaagcctcactcacctgcgctttctgaacctgtctactaacttcttctccggagagatcccaaatgctggtgtcctcggaaccttcaaaagcagctcgttcgttggaaatctggagctctgtggcctgtccatccagaaagcttgccgtggaaccctcggctttcctgctgtgttgccacattccgatccgctctcttcggctggtgtttctccaatcaataacaacaagacgtcacactttctcaatggcgtcgtgatcggctcgatgtcaaccttggctcttgccttggtagccgtacttgggttcctatggatctgcttgctgtccaggaagaagagcattggtggaaactatgtaaagatggacaaacagactgttcctgatggtgcaaagcttgtgacataccagtggaaccttccatattcatcaagcgagattattagaaggttggagctgcttgatgaagaggacgtggtcggttgtgggggctttggcacggtgtacaggatggtgatggatgatggcacgtcgtttgccgtcaagaggattgacctcagccgcgaaagtcgcgacaggaccttcgagaaggagcttgagattctgggcagcatcaggcacataaaccttgtcaatctgcgaggctactgccggctccccacagcgaagctactcgtatatgatttcgttgagctgggcagcttggaatgctaccttcatggagatgaacaagaggagcagccattgaactggaacgcgcggatgaaaatcgcgcttggctcggctcgaggcctggcatatctgcaccacgattgctcgcccgggatcgtgcatagggacatcaaagccagtaacatcctgctggatagaagcttggagcctcgtgtctccgattttggcctcgcgaggctgcttgtagacagtgctgcccacgttaccaccgtcgtcgcgggcacctttggatacctagcaccagagtacttgcaaaacgggcatgctactgagaaatcagacgtgtatagctttggagtgcttatgctggagctagtgaccggaaagaggccgaccgattcttgcttcatcaagaagggactgaacattgttggctgggtaagcagtgttcgtttttcttttttccctttaccttttttaccccctttacctcgtcatgttggctgggttttctgcagctgaacaccctaactggggagcaccggctggaggatatcatcgatgagcgatgcggcgatgtggaggtggaagccgtggaagccatccttgacatcgcagccatgtgcaccgacgcagacccggggcagcggccatcgatgagcgctgtcctcaagatgctggaggaggagatcttgtccccctgcatgagcgagctgtgctacgagcagcacctggagctctgagctgaggaggaagatgttgctggctgcgtgcgtgaagcgtcatggatgagactgaagttttgtactgtagatacaacgatgatggatgagtgtaggtgatgttttgtgtgctcttagggccaatgaagaacagtaagcagcagttcgtgagtgaagaaggatcgtccattgggcgtactgccctgatacgataccggttggctgcacatgagcggccggccttgtgcctcgcttgcgaattgcaaccaaaaggctgacgagaaaactccatgtgctaatgttttcaacatccacggaagggcgtatcactgaatattgacgatgtagaaattgttggactaatgtggggttagactaaattaatattcaataatag

SEQ ID NO: 34693 - DNA, 2575 bp, Zea Mays
ctcttggaggacaaaaaaataaaataaaaaacaaactagctcatcgaccgtacatcgtggcccgtgcttcttactgacatctgggcccaagaaggtgcacagcatgtggacccactcgccagtgggccaagtcacgggaagcacgtccatccgggtcagccttttttcccgtcagagctctcagagcagtgtaataataaaggcacactcagctcagtcctctgtccttctccttctctcacacactccactccacgtccccctccttcaaatcctaccaacacccaagcacaaggagagagaagccgccgccgccgccatggacaatattgaggtgaggaggaggaagaagaaagggagaagcagcggacgccgccaggggggacgggtacaggcggtcctgcgcgccggcctcgtcgccatggccttcgccctcctctgcctctgctcctccacgccctccgccattgccctcaccccagacggcgaggcgttgctggagctcaagctggccttcaacgccaccgtgcagcggctcaccagctggcgtcccagcgaccccaacccctgcggctgggagggcatctcctgctccgtccctgacctcagggtccaatccataaacctcccattcatgcagctcgggggcatcatttcgcccagcatcgggaggctcgacaagctgcagagactagctctgcaccagaacagcttgcacggcccaatccctgcagagatcaagaactgcaccgagctcagggcaatttacctgagagccaactacctgcaaggaggcatcccttcagagattggcgagctcgtgcacctcaccatcttggacctgtcaagcaatctgctgaggggcacaataccggcctcgatcggaagcctcactcacctgcgctttctgaacctgtctactaacttcttctccggagagatcccaaatgctggtgtcctcggaaccttcaaaagcagctcctctgtggcctgtccatccagaaagcttgccgtggaaccctcggctttcctgctgtgttgccacattccgatccgctctcttcggctggtgtttctccaatcaataacaacaagacgtcacactttctcaatggcgtcgtgatcggctcgatgtcaaccttggctcttgccttggtagccgtacttgggttcctatggatctgcttgctgtccaggaagaagagcattggtggaaactatgtaaagatggacaaacagactgttcctgatggtgcaaagcttgtgacataccagtggaaccttccatattcatcaagcgagattattagaaggttggagctgcttgatgaagaggacgtggtcggttgtgggggctttggcacggtgtacaggatggtgatggatgatggcacgtcgtttgccgtcaagaggattgacctcagccgcgaaagtcgcgacaggaccttcgagaaggagcttgagattctgggcagcatcaggcacataaaccttgtcaatctgcgaggctactgccggctccccacagcgaagctactcgtatatgatttcgttgagctgggcagcttggaatgctaccttcatggagatgaacaagaggagcagccattgaactggaacgcgcggatgaaaatcgcgcttggctcggctcgaggcctggcatatctgcaccacgattgctcgcccgggatcgtgcatagggacatcaaagccagtaacatcctgctggatagaagcttggagcctcgtgtctccgattttggcctcgcgaggctgcttgtagacagtgctgcccacgttaccaccgtcgtcgcgggcacctttggatacctagcaccagagtacttgcaaaacgggcatgctactgagaaatcagacgtgtatagctttggagtgcttatgctggagctagtgaccggaaagaggccgaccgattcttgcttcatcaagaagggactgaacattgttggctggctgaacaccctaactggggagcaccggctggaggatatcatcgatgagcgatgcggcgatgtggaggtggaagccgtggaagccatccttgacatcgcagccatgtgcaccgacgcagacccggggcagcggccatcgatgagcgctgtcctcaagatgctggaggaggagatcttgtccccctgcatgagcgagctgtgctacgagcagcacctggagctctgagctgaggaggaagatgttgctggctgcgtgcgtgaagcgtcatggatgagactgaagttttgtactgtagatacaacgatgatggatgagtgtaggtgatgttttgtgtgctcttagggccaatgaagaacagtaagcagcagttcgtgagtgaagaaggatcgtccattgggcgtactgccctgatacgataccggttggctgcacatgagcggccggccttgtgcctcgcttgcgaattgcaaccaaaaggctgacgagaaaactccatgtgctaatgttttcaacatccacggaagggcgtatcactgaatattgacgatgtagaaattgttggactaatgtggggttagactaaattaatattcaataatag

SEQ ID NO: 34694 - DNA, 3064 bp, Zea Mays
atttgtaaaaaggcttactattagtggatccctatgccaaaattttacttcacaagttaagtacttttccagaatctatatttgcctaatctagagcattcacttgtcctagtctagctttcttttaccaaattcttattttacttattaactacgatgagtggtcagagggtagagtctccatgactgaggagcaacgacgattcaaatcgattattcctagctggggattcctaaccacacgacatttgtagcacttaacccatgcatatgtcaaccgttcccacagatcctccacaacatgaaccggtccacgctacctgggagcatagtactcctctgtccagcctctagccaggagggtacacgctactcccaccatctcccatgctcagtgcgtggttgtcttttcacatatggaatagccgagttcaggcttaccggagcatgtggctagttgcaaagtctccacaacaacaggcctacatcgatcagtccttaatcaacgcagatgggcgaactttcctgctcaacgtctagtctacattacatattatttcccaaaacttgatacctgagagagacaccctacttgaatgatgaaatcattgcggctacaatgggttcatcatcacaagtccttttatttcacaaactcccatatcccgtgttacacatcatctttaaaaaaccatcctaaattaataagcagggctaagcatcactaaattttcataaaacaggtattagggttgtttaatcaaggatggaaatgcatcaactgtttgatcacacaactcctatcacataatgcatcattcaaggttataaatttttgtaaacatcaaggaaagaggtgaatgcacgggggcttgcctaggataaacactacgttagtgttgttagagacatctggttggcgaacatccaaaatcctggtacggtcaatacattcatcttctgtcgacatagtcactaagatatcgtcggtccatgcccttcatctcgcacgatcattagcgtacctacatgatatgcgagatgcacatgaatggataggagcatagataccacatcaactaaatcaagaaccacaccacttgttctaataaatagggccttattaaacaacataagagttttcccaagatcataatttaaaccctacaaatttaaaatactaaggtggaatgcctactatgtagttttcatatttctttgaagggggcttaagggtaatacatgctttcaactaatttgaataacgatgaatatttattcaagacgattagcttaagcactcaagctctatttatgacttttaatcaatcaacaaatataacacccgacaattactatggcaagacaataatgaaatgataaaacagtacaaataactctaggcgaatatgtttatctaactgacagaattaccaaacttattctatatattcactaaaacacttctagcataataagcacgtcaaacttaaaaccacaagaactatccaaacctagtgacctacacaaaagaagttccaaacaaccattttaatacttgctgattttggacagcaagacagcaactatttgtttagctcataactcacaagatattcattctaaaatagtaaactagaactttctggaaatcttatgaagttctctacaactttggtattaccatcggaacaagattcgacatttagaaatgtcaaacagtgctaaacgtaaattatgtccagattaggacagaattcgactactcacttcaaaaattcataactggagtctcgagcatctaattcaggtgatcctagactttttcgaaagctaatagaattgtctacaattcatttataaatatctcaggttaattcagttcttatcaaggtcaaaagacatgagaaaaggctatgctgtctaaatttggacagattcagagttcacactttaaacagttataacttaacttatagatcatcaaaaagggtgatctaagactttttggaaagattaaaaacagtactacaattcttctataattagtaagggctgattctcagtttaatttagtcaaacaaagcaattttcgaaatcagtacagaatttggacagattcaggtactggaatttgaaaaatcataactcttaaactacttaacctatggtcatttaatttttacacaaacaagataaagaagttggctacaacttttgtatataacatttctacataaaatatggtttacttcattgaactagctgtataactaaaactgtacctgcagccctaaacagtaatacattcagtttaactcctatttggcttctaaaattatctatgttcttgacgcttactaacgcaaggcattaatgatactacacaattgaaatttatacaaataacactaatagttcttatcggctacacaatttaaaatgctagtcctacttctcgcattattaattaaatctcacctagcacataagtctaagaacacatggcgcgactactatatattcacgaaaacaattacaacaccatatgagaggaaacatttctgcaacacattatgagcaacatataacacaaaggaaaagagaaagatatcattcgctgagcatcgccacaatataactaaccaatccaactaatagtaaaaacaaatcagctcaccataatcgaatcgacttgatatatgtaagaacggcgacagttccttggttctatttcgtcgaacacctagagcgcaccgaacggcatggacgacgtcgtggcctgggcgagcacatggggagcaacgtcggcatggggaggcatggccgacggcgcacagccggagttgacgacaacagagctgagaggggcagggccggtgggctaagggagctggcgagcattggcacggttggagaaggagcagggcttagaggcgcttgtgccatagagcttggctaccggcgagctgatgcagggcgctggaagctcgagcatatggagcagcttggctaccggcaaagaccaagcgtagacgagctgaacatatccagggagccatga

SEQ ID NO: 34695 - DNA, 1466 bp, Zea Mays
atttgtaaaaaggcttactattagtggatccctatgccaaaattttacttcacaagttaagtacttttccagaatctatatttgcctaatctagagcattcacttgtcctagtctagctttcttttaccaaattcttattttacttattaactacgatgagtggtcagagggtagagtctccatgactgaggagcaacgacgattcaaatcgattattcctagctggggattcctaaccacacgacatttgtagcacttaacccatgcatatgtcaaccgttcccacagatcctccacaacatgaaccggtccacgctacctgggagcatagtactcctctgtccagcctctagccaggagggtacacgctactcccaccatctcccatgctcagtgcgtggttgtcttttcacatatggaatagccgagttcaggcttaccggagcatgtggctagttgcaaagtctccacaacaacaggcctacatcgatcagtccttaatcaacgcagatgggcgaactttcctgctcaacgtctagtctacattacatattatttcccaaaacttgatacctgagagagacaccctacttgaatgatgaaatcattgcggctacaatgggttcatcatcacaagtccttttatttcacaaactcccatatcccgtgttacacatcatctttaaaaaaccatcctaaattaataagcagggctaagcatcactaaattttcataaaacaggtattagggttgtttaatcaaggatggaaatgcatcaactgtttgatcacacaactcctatcacataatgcatcattcaaggttataaatttttgtaaacatcaaggaaagaggtgaatgcacgggggcttgcctaggataaacactacgttagtgttgttagagacatctggttggcgaacatccaaaatcctggtacggtcaatacattcatcttctgtcgacatagtcactaagatatcgtcggtccatgcccttcatctcgcacgatcattagcgtactggcatggacgacgttgtggcctgggcgagcacatggggagcaacgtcggcatggggaggcatggccgacggcgcacagccggagttgacgacaccggagctgagaggggcagggccggtgggctaacggagctggcgagcattggcacggttggagaaggagcagggcttagaggccttgtgccatagagcttggctaccggcgagctgatgcagggcgctgggagctcgagcacagggagcagctcggctaccggcaaagaccaagcgcagacgagctgaacatctacagggagccgtgacttcagaaacagagaaaaaatggcataagaaaacagatgagctgtgttcctaggaaactagtggataacgcctatgagatgaaagatgtggctggtagaaaatcctaggctttctacgtggaggtggaggagataaagg

SEQ ID NO: 34696 - DNA, 3202 bp, Zea Mays
atttgtaaaaaggcttactattagtggatccctatgccaaaattttacttcacaagttaagtacttttccagaatctatatttgcctaatctagagcattcacttgtcctagtctagctttcttttaccaaattcttattttacttattaactacgatgagtggtcagagggtagagtctccatgactgaggagcaacgacgattcaaatcgattattcctagctggggattcctaaccacacgacatttgtagcacttaacccatgcatatgtcaaccgttcccacagatcctccacaacatgaaccggtccacgctacctgggagcatagtactcctctgtccagcctctagccaggagggtacacgctactcccaccatctcccatgctcagtgcgtggttgtcttttcacatatggaatagccgagttcaggcttaccggagcatgtggctagttgcaaagtctccacaacaacaggcctacatcgatcagtccttaatcaacgcagatgggcgaactttcctgctcaacgtctagtctacattacatattatttcccaaaacttgatacctgagagagacaccctacttgaatgatgaaatcattgcggctacaatgggttcatcatcacaagtccttttatttcacaaactcccatatcccgtgttacacatcatctttaaaaaaccatcctaaattaataagcagggctaagcatcactaaattttcataaaacaggtattagggttgtttaatcaaggatggaaatgcatcaactgtttgatcacacaactcctatcacataatgcatcattcaaggttataaatttttgtaaacatcaaggaaagaggtgaatgcacgggggcttgcctaggataaacactacgttagtgttgttagagacatctggttggcgaacatccaaaatcctggtacggtcaatacattcatcttctgtcgacatagtcactaagatatcgtcggtccatgcccttcatctcgcacgatcattagcgtacctacatgatatgcgagatgcacatgaatggataggagcatagataccacatcaactaaatcaagaaccacaccacttgttctaataaatagggccttattaaacaacataagagttttcccaagatcataatttaaaccctacaaatttaaaatactaaggtggaatgcctactatgtagttttcatatttctttgaagggggcttaagggtaatacatgctttcaactaatttgaataacgatgaatatttattcaagacgattagcttaagcactcaagctctatttatgacttttaatcaatcaacaaatataacacccgacaattactatggcaagacaataatgaaatgataaaacagtacaaataactctaggcgaatatgtttatctaactgacagaattaccaaacttattctatatattcactaaaacacttctagcataataagcacgtcaaacttaaaaccacaagaactatccaaacctagtgacctacacaaaagaagttccaaacaaccattttaatacttgctgattttggacagcaagacagcaactatttgtttagctcataactcacaagatattcattctaaaatagtaaactagaactttctggaaatcttatgaagttctctacaactttggtattaccatcggaacaagattcgacatttagaaatgtcaaacagtgctaaacgtaaattatgtccagattaggacagaattcgactactcacttcaaaaattcataactggagtctcgagcatctaattcaggtgatcctagactttttcgaaagctaatagaattgtctacaattcatttataaatatctcaggttaattcagttcttatcaaggtcaaaagacatgagaaaaggctatgctgtctaaatttggacagattcagagttcacactttaaacagttataacttaacttatagatcatcaaaaagggtgatctaagactttttggaaagattaaaaacagtactacaattcttctataattagtaagggctgattctcagtttaatttagtcaaacaaagcaattttcgaaatcagtacagaatttggacagattcaggtactggaatttgaaaaatcataactcttaaactacttaacctatggtcatttaatttttacacaaacaagataaagaagttggctacaacttttgtatataacatttctacataaaatatggtttacttcattgaactagctgtataactaaaactgtacctgcagccctaaacagtaatacattcagtttaactcctatttggcttctaaaattatctatgttcttgacgcttactaacgcaaggcattaatgatactacacaattgaaatttatacaaataacactaatagttcttatcggctacacaatttaaaatgctagtcctacttctcgcattattaattaaatctcacctagcacataagtctaagaacacatggcgcgactactatatattcacgaaaacaattacaacaccatatgagaggaaacatttctgcaacacattatgagcaacatataacacaaaggaaaagagaaagatatcattcgctgagcatcgccacaatataactaaccaatccaactaatagtaaaaacaaatcagctcaccataatcgaatcgacttgatatatgtaagaacggcgacagttccttggttctatttcgtcgaacacctagagcgcaccgaatggcatggacgacgttgtggcctgggcgagcacatggggagcaacgtcggcatggggaggcatggccgacggcgcacagccggagttgacgacaccggagctgagaggggcagggccggtgggctaacggagctggcgagcattggcacggttggagaaggagcagggcttagaggccttgtgccatagagcttggctaccggcgagctgatgcagggcgctgggagctcgagcacagggagcagctcggctaccggcaaagaccaagcgcagacgagctgaacatctacagggagccgtgacttcagaaacagagaaaaaatggcataagaaaacagatgagctgtgttcctaggaaactagtggataacgcctatgagatgaaagatgtggctggtagaaaatcctaggctttctacgtggaggtggaggagataaagg

SEQ ID NO: 34697 - DNA, 1547 bp, Zea Mays
atttgtaaaaaggcttactattagtggatccctatgccaaaattttacttcacaagttaagtacttttccagaatctatatttgcctaatctagagcattcacttgtcctagtctagctttcttttaccaaattcttattttacttattaactacgatgagtggtcagagggtagagtctccatgactgaggagcaacgacgattcaaatcgattattcctagctggggattcctaaccacacgacatttgtagcacttaacccatgcatatgtcaaccgttcccacagatcctccacaacatgaaccggtccacgctacctgggagcatagtactcctctgtccagcctctagccaggagggtacacgctactcccaccatctcccatgctcagtgcgtggttgtcttttcacatatggaatagccgagttcaggcttaccggagcatgtggctagttgcaaagtctccacaacaacaggcctacatcgatcagtccttaatcaacgcagatgggcgaactttcctgctcaacgtctagtctacattacatattatttcccaaaacttgatacctgagagagacaccctacttgaatgatgaaatcattgcggctacaatgggttcatcatcacaagtccttttatttcacaaactcccatatcccgtgttacacatcatctttaaaaaaccatcctaaattaataagcagggctaagcatcactaaattttcataaaacaggtattagggttgtttaatcaaggatggaaatgcatcaactgtttgatcacacaactcctatcacataatgcatcattcaaggttataaatttttgtaaacatcaaggaaagaggtgaatgcacgggggcttgcctaggataaacactacgttagtgttgttagagacatctggttggcgaacatccaaaatcctggtacggtcaatacattcatcttctgtcgacatagtcactaagatatcgtcggtccatgcccttcatctcgcacgatcattagcgtaccataatcgaatcgacttgatatatgtaagaacggcgacagttccttggttctatttcgtcgaacacctagagcgcaccgaatggcatggacgacgttgtggcctgggcgagcacatggggagcaacgtcggcatggggaggcatggccgacggcgcacagccggagttgacgacaccggagctgagaggggcagggccggtgggctaacggagctggcgagcattggcacggttggagaaggagcagggcttagaggccttgtgccatagagcttggctaccggcgagctgatgcagggcgctgggagctcgagcacagggagcagctcggctaccggcaaagaccaagcgcagacgagctgaacatctacagggagccgtgacttcagaaacagagaaaaaatggcataagaaaacagatgagctgtgttcctaggaaactagtggataacgcctatgagatgaaagatgtggctggtagaaaatcctaggctttctacgtggaggtggaggagataaagg

SEQ ID NO: 34698 - DNA, 435 bp, Zea Mays
ccatgtttttggggccacatgcacctgtcctcgtctcaaagaccttagacgtctatgcatgtgcaccggataaattaacaggatccgtccaagtgtcccaaggaccccagataaaccacttacaaccaggatcacaagattaagtaaacacaaatcacacagcaacatttgcagcagaatttctttattacaaaaagttacaagttacaacaaatttacaatatatttatcggagtgattacaaaagtgattcaaagaaatatactttgaaatgttataaattatttatgattttgaaatatatgctagctcaatgacaatcctcaataagaagtatagaagagctactttaacctataagaaggccgagcccactagcacttagcaccatcaacaacagcacaaatgtattacctgcaacaacaagggttcgaa

SEQ ID NO: 34699 - DNA, 1203 bp, Zea Mays
gtcatttatttctgagttcttgttttccctttttgataaacaacagcggaaaaccataagaaatttagggctagctaatttctccctcaatcccccaaagatttgagtttacaaactagcccttaaggtacactagcccttaaggtacgcgcaagctccggtcagaattgccaaactgaaaattcacctaagtggaaaacaatcatctaggagtatttatattttacaaagaaaaaactgtgctaccactaagaacacatagtaatgtcacatcagaggttgcctctttgcgtacaagctgatagcagccacaggccaatctgagccttgcaattattaacgagggccctttaaatacctgtctgtttgcaaaagttgccgaccgaccgtcctcctatgattcaaaacttggaataataatggagtaacccctgaatatctctctccctatgtattaatgtatagtatgtaggcctaccgctagcacagcatgaaagcgatcccctgacctgcctgagaaaggattgacacattgttatttgcttgttgccgaggtctccaaaaaatctgatgctaataccgtgccagctcgcaaggcaactgccactcatcataatttggagctttggcactcgtgtaaaatgagcaggtaggcacggcgagcaaggtcgcatcggagcaaagaatctggtgctaaaggggaaaacgacaggaagatagaggaggctcttgttctcttgcaaatacgcactccgactcggtacattcatcatatacttgtgtgatgtgatgtggtgaaggaacgaccgccgcagagaaacaaatatcggaggccgttttccgcttggcccctcgtgatgtgccaaattgctttgttttttagctacgcgacgcatggcatcatcaggcaagcaagcaaggaaggcaggtgtgagttggcgagattttaattttaataattattattacgctaaagaaaaaaaatctaaggaaggatcgcgtgcggcgcaagcgaaatcggatgcgtgaattgagtgagccagcaggaaccgaggaagtgtcccgtcctggatcgaagcaatctagagcaggcagttgcacaagagaatttgcaatcgcattctaaaataagctcctctccgtcgtctaaatgaattgaggacgacgagaagtgagacggacggttgcctacctgtgaggtcg

SEQ ID NO: 34700 - DNA, 3778 bp, Zea Mays
ctaacatctaactaatactctaaactatattttaagggtttacacctcgaatatgtaggtcaacagggaccgtgactgtagcaaatgacccagaaaaagcagggacacgtgctatagcccaggccaccagaacacttggcttggcttttccggtggcggtgggaattgacggagcagagtggagtccactgtcctgtccaccacacacctctgctcctaaacccacccccactctccagttcccggcgcaccgcaccaccgatggccacgaccgtccgcctgcagctggtcttccgcccacccgctgctgcttctccttgccgtcgtcgtccctcatcagatcatctgattttgagacggcgtccagatcacccaagatcatcctcgtcccgacggccccagcaaccgcaatcctccagcaccgccatccgcgagagcaggcagcagcaggtgacgctgaagctgacgtacctggagatcaacagctgggtgtgggaggtgcagcagcaaggccaagcccccgtgcgcatcctggtggacccagtccttgtcggcaacctcgacttcggcgcgccctggctgttcgacggcgccaagaagaatcccaaggtgaaggccctcggggtggacgacctgctgctggcgccggaggcgaggccggacgtgctgctcatcacgcagagcctggacgatcactgccacgtccggacgctgacgcagctgtcggccagggcgcctgacctgccggtggtgaccacccccaacgcgcagccagtgctcgaatccctgcccacgcccttccgccgtgtcacctacatcgagcccggccagtccaccgccgtcaaccagcaggtccgggtgctggccaccgcaggccccgtcctggggcccccgtggcagcgccccgagaacggctacatcctcatggccacaggtgaggagagcggccccggcctcctctactacgagccgcactgcgtgtacgacaggtccttcctggaggagaagcagctgcgggcggacatcgtcatcacgccggtggtgaagcagctcctcccggccaacttcaccctcgtctccggccaggaggacgcggtggacctggccaggctgctgcgagccaggtacgtggtacccatgagcaacggcgacgtggacgccggcggactcctggcaaccgtgctcaccaaacaggggacgacgcagtccttccaggccctgctatcggaggcgcttcccgaggcgcaggtcctccaccccacgcccggcgtgccgctccaactgcagctggactggacatcatagattcatagatggtgggcactgggcaatgggggcatccatccccagccacaatcatagcattttcggagtttatataagtgcacacatatatataagaagccacacccagaatagtgattaagctcattgaacgtaactcctgtaacttttattcattgcttaagctctctacaaatgatccacatacatacaaatacatacatgcatacgtgcgtacatacattcgagttgaattgaacaacaaaagatttggagacaacgcaaaaaatagctcaacggggcaaaccaccaaagagcacacagcattcaagagctcccagcgtgctcttctccaacccacaaagagtttccagacttgatgatgcctgtaatggtaaatgagcagacttatcggtgtgtcccgcctctcctcctggaggacgaggatgcaatgcgtgcccgaggaagccccagaatagccaccagcccaccgatgaaagatgcaccggctgccaccgcaaaagcgggtgcatttccaccgccaaacagctgatcccatgggccactgccaagtgacacaataacctacagcaggtgccagttagtgatatatatccccaaaaagctgcatcatcatcatcatcatctatcctaactctagttcaacttactccaatccactgtccttttgtcacgctgcagtttaccaatttacgtcttgagtactctttccttttacacacacaagtttttcagggattgatttgtaccaatgcaggccactgtttctttaatacaaacagtacaaacacacaatctctgtgccttgcaaggctgaccctaattgtgaacctagccttttctgctagcttatattcactatatagccgtcggtttgttcagctactttccatcacaactcagtcttcaattttcttggtggaattgtgtaacaagaaggggagtgaaaacctgatcgcttttctaaaccgaagattggatttcaacatatgctggttcgaatttagagttttagaccttcagttccaccaataggctaagtatgggtgttcactattgactcaggaatatcttggccccatgccatcgtttatgaatcgtttgctttcacttcaattagaagtcagtagcacacattgaggcttcgtttgcattgtgaattgttcaaatacttcaatatctcaaattggtaccagacctgcccattgtttcctcgatttggtttcgtcttaccttttggacaagacaaagatgatctcacgtgtggattattcctgtgaccttggatgcacatggttatttaatgagggcccatcatttttatcaaaggggaatttcactcggtggagattgttaaattatgggccgaaatctagactatccatgaaattttctccaatagggaatccacatgttgagaactgagatacagccattgcaattgcaacaccactgcttctatgccattcgattatatagttttgtttttctcgaacgcttaggagagttgcatatctttatattaaagagacggaaaaaggggtgaagaaccccgcacaatgcaacctacttatcaattatatagtgatttcactgttgtgcgcttcttgttctttgtctaatgtttgtctatgtggccatgtgttacacaatgaactgaaggtcaaatctggtatctggtatatctataatttggcactatataaatggaatatatagagaagagcatgtctagtgcagtggtgagagctgtctcagagtcaccaggtcaacggttcaaagcagcctctccgcatttgcagaagggaaggcttgcctcggcttatcccttccctaaacccactcatgtgggagcctccaacactcataaatagaagatatagacacaacatcatttgcattcattgtacactaagaatataaataatttataaaaacaggttctagaaccaataatcattttgagcaaatgttactaagtaaggattacttggatccattatctactggtcagtgcgagtcaattacactacgactgaactccggatgtgcataggactgaaccaaagcgaagtaaaaaaacttcaaaggtaattacctgtggtatgacaatagctaaattgagaatacccattgctaggcctgcaagcagaaacagagttttaagaagtgcgatcatgatgataatacaaactcaaaatggacataccttggccaagaccgagattttcaacacgactagcagccattgcatatggtatactgtatgtgatctgcaaataaggaaatgaactgaatatactacatggagaatatacgacagacctgaaaatggacagaaatcattatgatgaaaaagaaaaaaacagtcttttactcaccgccaggggtgcccctaaaattgtaaaaaccaccaaagaagcaacgacaatgccagtcggaggtgcaccactggatggataatccatgttct

SEQ ID NO: 34701 - DNA, 3082 bp, Zea Mays
atcaaagtacacataatcgaaacgtagccaacgtaaacaacccaccacaggcagctgactgggggaggtcgctagcctactcctcgaactcatcaatgtcctggaactcctggagatccgcctcgacgccttcttctttacctaagcatagattgcaccaaaggcaaactggtgttttgtgaaagcaagggtgagtacacatcaacgtactcagcaaatgtcccgtttggctgtagtggactagctttatgtggggttaagtcaagcagttgcttttagttggtcaggttattattactaatagaacgccaggttttagcattaacccaagttcttaacccaaagtaccctttccaaacggaaagaataccacttaccattaccatgagcataatcaaaaaccatcatcctcatcacaacctgtaaaccaaccatctttgatcaaagtatctctaatcaatggagctcccttggccgctcataaccgcgagcacggctgatatatcagtttcataacactctgcagaggttgcgcactttacccacaagtcgtgattccctcttgcctcgggccgatcaaacccttaaacactaccaaggtgaataggcagggtttcactatgtagcctttacaaagattccccaaggctgtagccgcccgttaggtttcctaaatgcactgcactcctccccaaggggcgaaccaaacttggcagagcgagccgcatacaccgagccacattaacggcacgacggctaagcgaactacacctcggttcctctaattattcagctaagggcatcccattccaccctcatggttgcactgttttctcgggcggtcatgcaacgaacaggtccttacggagaggcactcgagaaaccgctcgagcccccttgaatgacacaagtataacatcataataaagaagggaaaccgcgtatcattgataaatctcatcatgttcattgattagagttgagcaatagcataaagctaaacaataataacccaaaaggtaatcaacgacaaggtaaatacaaagctagtcaatccttaggttgatcatggtatgcgggttgatgaattataaagtaaatgtgacatataaggtcagaggacacttgccttcaccaaacagatgctcagggtcttcgatcttgtagaactcgaagagttcgatcacttggtcgccatgcttgatcgtcgattcctcgaagctcagaaatgaatcgtgatccaatcgcaacgcgaagcaaagacgaacaggcacaagcaaacaaacatatatatgtgcataagaacattacaccatacaagataaaatgttataaaagtgagcaatataaaatagagagcgcctctacggttacgcaaggaaaagaaccacgatagacgaagctatggtcgaggggttagcgcatttacgctaaacaagtattaactctaacatttagttcgacatgattatattaatctacctttattaaatgtagattagaactactaattagtttcgattaatcttctattctaatagttgtcggattaaaaaagtaattatttaattagcacgaacgattataagcgacacggtttaattacgcgcacggacagtgcgcgacgtgcgacacgcgaaacagcacgaaacaacacacgaacaacgcgacgatgacgagcgccacacatgtgaacaacgcgacatacgagtactgctaaattatgtcgttcttatattagccaaatattaaatataacatttaagtcatcataatcacgctaacaggtatctacaaacgcataatcaaaatctttaattagattcgattgaattgttattttaataatacacaactaaacaagtaatcaattatttaacatgaatgatttagcgaaatgatttttagtaaagcgtgcaaatagcaatttatgcgaacgacgacgcgcgcggacaacatgtgaatttgcacgcgtaaaacacgcgaatgacgcgccaaaacagcacgcgcgacacgtgtgaatgacacgcggagtagcacgccaccatgagcacatcagcgcgaagacatcccgacttagtgcgcagaccacgcgcggctacgcccgcgatcctcacgcgcgacacgcgagaaaagctaaacatacgtcacgtttacattaaacgaatattagttaaaaatatctgagtaggcactaaccacattaatttgcatctataaaatcaccatttaaaactataccttcataatatttagtatgtcattcaaataaacgtcagattatttatctaattaacgaaaacatgtgttgtgaccaaacaatattactaacatgtagtcgaggttattatgaagccgctacgactgaaacgggtcgagacggactcgcaacgcaacgtatatattgaataaccagcgtttcttggatttatgctacgtggtgtgattctattggttgaaagctgaccacacccaagaccacacaaaccgcgccatagccacaaaagatcacaatgggtgggatctaaatgtggctgctccttcaacctccttacgattctctctcgcaggactgcagggaagcaccaactgccatgggaggggcacctgcaaggggcagggagggcggctcgccgaggcaaagaagaacgacgtcgggccagggaggagctcggcgagggtgggatcgtggaagggggatgagcagtcgcgccgttagccgccacagctgacccaggactgttgctgtcgtgcccacgggagaagggagaggggaagaagagggagaggggcgaccggatcttgagggggcgtggcgagagggagctctagccggtgccgctggaggaggtagccaggggcgcgcctgggctaggggtgtgcgtccaccggagtcgcacgggcgggccgtggctatccgcagcgcgagccaggcggggcgcgactgcacgccggaggagctgcggcgcgggcgcgcaggctgcaccacggggccaaggcacagatcgggtgccgacgggggaaggccgcaggggatgtggtggccgcgatccaccacgggccgcgagccaccgcgaccgag

SEQ ID NO: 34702 - DNA, 3609 bp, Zea Mays
gcgcaaacaagttcgcatcgccatctcgctcgcagggaggagaggggagtctctaaccctaaccctacccgcccctgtcgccatagccatggctgccggcggagagctctccccctcccccgtgccccccgcatcccccatcaagcattctcgctcacccgacgatgcccagcccgacgcatccccgaagcgtcgcaagcgccaccatcaccgccgccaccaccaccaccgtcggcaccgtcacgccgattccccggtacccgtggcagccgacgaagaggtagaggagggggagatactcgaagatgccaccgccgcctctgccatggaggtcgatgctgagtccgccgccccagaggctttccttgctccggagcactttggtaatggtgctgatacagactcaaacacagatgcaaccaagatgcaagctcctgctctgcctacccttccatcctcagaagatggaaggaggtcacttcatgatgcccctgagtctgaaagaggagatattctttcaagtgatgttgaggacaacaaaggacatgaacgaaggcaaagacaaaaccgttctaaatctccaaagtctagaagggagaaggaaaggaggcacaaagatgaccatcacacttcatcttcaaaagattatcattccagaaatcactctagaacatctccttactcaaggcatcaaagtgaagctcattcgagagatctgtacttgagatatagagagaaaggtgattacactaatggttctcgtgcaaatcttagggatggttctgatcatgagagcaatgatcggaatgggaagtctggcagacatacgactaggacccacgggagtgaaagagaaaggagcagcagccatggtattcatgatagacatggtgacaggtacagtgacagacgtgccagccaggaaaggcatagagacgataggatatatagagacaaaatcgattcattagaagctgctcctaggcacagagaaagaagcaggagtcatagtagatcggatccaagggaaaatacacgtcttcgtgatcaaagcagggagagggaaagacggagtggtagttcaaggcatagggatcatgacagcaagagggatacaagtaaagatcggcatagagaatctgacagggttaacagtgcacatgaaagggatagagggagagaggctagggacagggaatggcatagggtcaagggaagtgaaactcatagagctaaggaaggacgggacaaagttagcgataatgataggcacagggattcaacacgctcaaaatatagcgtgtctgatggttacaaagagaggacaagatctggggagaaaggtagagatgctgaccataaaaaccggaagtttgaagaaatgaaggaaaattctctcaaggaggaagatgaagaggagtaccaagagaaaatagaacagcagttagcaatgcaggaggaagacgaccctgaaaaaatcaaagaggaagcaaggaggaggaaagaagctatcatggcaaagtacaggcagcagcaatcgcagaaagaggatatggaatctaaaccaagtggcaatgatgaagaagtaagagcaatggatggaaacgaagctatacatcagaaagatgatatcgatagcagctttatgggcaatgtcgaagctgaaaataagcatgattcttcagaggtatttgatggcaagacaggctttaatgtgggaaggtctcctgctcacaattatgcttcaactagcacgggagcattcactgatgagaggacaataggtgtttcaggtcttggagagggttctcccaagagtgagagatcagcagacatgttttgtgatgacattttcggagaatcacccaccggaattagaaaattgggaaaggatgatggtttgcatattgagagaaatgctcttcatgacaactgggatgatgcagatgggtactacacttatcggttcggagaattgctggatggccgttatgaaatcatagcagcacatgggaagggtgtgttctcaacagttgtgcgggcaaaagatcttaaagcgagtaaggatgatcctgaagaagttgccatcaaaattattcgcaacaatgagacaatgtacaaggctggtaagcaagaggtttcaatattggaaaaacttgcaagtgcggaccgtgaggacaaacgccactgcgtgcggtttatttctagtttcatcagcttttcatcgccctgaagcacctgaagaactgcaaagttttgcactgtgatataaaaccagataatatgctggtgaatgaggctaagaatgtgctcaaggtatgtgattttggcaacgctatgcttgctggtatgaatgaagttacgccttatcttgtcagccgtttctatcgggcacctgagatcgttcttgggttagcctatgatcaccctttagacatgtggtcagttggttgctgtctatatgagctttataccgggaaagtcttatttcctggtccatcaaacaatgccatgcttcggcttcatatggaattgaagggtccattccctaagaagatgcttcgaaagggtgcctttactatgcaacacttcgatcaagatctcaattttcatgctaccgaggaggatcctgtgacaaaaacggctgtgagaaggttaattttgaacattaaaccaaaggatgttggttctttgtttccgaactttcctggcgaggatccaaaaatgctatccagttttaaggatcttcttgataaaatatttacattagatccagaaaagaggataactgtatcgcaagcacttagccatccatttatcactggcaagtgacacaagatgacgattcctcttgaccttgaacttagcatcttcactgtaaaatacattttgggttcctcttgtctaatcatcaacgtttctgtcttgtgtcctgggagctctgagaaaaagtacatggatgaagcacggaacttcggaagagatggctatctgcagaccttgttgcatgcacttatcatttggatatattctgttgcttgattctgccagggcctctgctatgtgcacattttatatgcttaagggccaacataagaaggtcctgggatggaggtcgctggaccctctactcacttgccatggtacaacacgaaacgacaatgaagcaaaccttcgtcaagagcagcttgcaaaccggaaaataggagctgtggagctttgagcgtacattgatgcctcgaaggagaatgctgaagttgtccgctttggcgccaaaagggcttcgtgcacaaaagaagaaagtaagagttgttgaagacttgtacaacaagaaagaatgaaaaagacagtattgcccctgtgatgcttgtaaaccatgtgtaattttttttggcatacttgtaaattcatacaaagttgtacctctcccctacaaataggtgaacaatgccatgcatagattcacttttcgagggtccatagcttcacttagatcagcttcgaagtaacctagagctatttctcgtgtgaagacgaaggtgcgcttctaattatatgttatgttgagaaggatgaaatgacagcgatcaaggcataaagatgagttgc

SEQ ID NO: 34703 - DNA, 3606 bp, Zea Mays
gcgcaaacaagttcgcatcgccatctcgctcgcagggaggagaggggagtctctaaccctaaccctacccgcccctgtcgccatagccatggctgccggcggagagctctccccctcccccgtgccccccgcatcccccatcaagcattctcgctcacccgacgatgcccagcccgacgcatccccgaagcgtcgcaagcgccaccatcaccgccgccaccaccaccaccgtcggcaccgtcacgccgattccccggtacccgtggcagccgacgaagaggtagaggagggggagatactcgaagatgccaccgccgcctctgccatggaggtcgatgctgagtccgccgccccagaggctttccttgctccggagcactttggtaatggtgctgatacagactcaaacacagatgcaaccaagatgcaagctcctgctctgcctacccttccatcctcagaagatggaaggaggtcacttcatgatgcccctgagtctgaaagaggagatattctttcaagtgatgttgaggacaacaaaggacatgaacgaaggcaaagacaaaaccgttctaaatctccaaagtctagaagggagaaggaaaggaggcacaaagatgaccatcacacttcatcttcaaaagattatcattccagaaatcactctagaacatctccttactcaaggcatcaaagtgaagctcattcgagagatctgtacttgagatatagagagaaaggtgattacactaatggttctcgtgcaaatcttagggatggttctgatcatgagagcaatgatcggaatgggaagtctggcagacatacgactaggacccacgggagtgaaagagaaaggagcagcagccatggtattcatgatagacatggtgacaggtacagtgacagacgtgccagccaggaaaggcatagagacgataggatatatagagacaaaatcgattcattagaagctgctcctaggcacagagaaagaagcaggagtcatagtagatcggatccaagggaaaatacacgtcttcgtgatcaaagcagggagagggaaagacggagtggtagttcaaggcatagggatcatgacagcaagagggatacaagtaaagatcggcatagagaatctgacagggttaacagtgcacatgaaagggatagagggagagaggctagggacagggaatggcatagggtcaagggaagtgaaactcatagagctaaggaaggacgggacaaagttagcgataatgataggcacagggattcaacacgctcaaaatatagcgtgtctgatggttacaaagagaggacaagatctggggagaaaggtagagatgctgaccataaaaaccggaagtttgaagaaatgaaggaaaattctctcaaggaggaagatgaagaggagtaccaagagaaaatagaacagcagttagcaatgcaggaggaagacgaccctgaaaaaatcaaagaggaagcaaggaggaggaaagaagctatcatggcaaagtacaggcagcagcaatcgcagaaagaggatatggaatctaaaccaagtggcaatgatgaagaagtaagagcaatggatggaaacgaagctatacatcagaaagatgatatcgatagcagctttatgggcaatgtcgaagctgaaaataagcatgattcttcagaggtatttgatggcaagacaggctttaatgtgggaaggtctcctgctcacaattatgcttcaactagcacgggagcattcactgatgagaggacaataggtgtttcaggtcttggagagggttctcccaagagtgagagatcagcagacatgttttgtgatgacattttcggagaatcacccaccggaattagaaaattgggaaaggatgatggtttgcatattgagagaaatgctcttcatgacaactgggatgatgcagatgggtactacacttatcggttcggagaattgctggatggccgttatgaaatcatagcagcacatgggaagggtgtgttctcaacagttgtgcgggcaaaagatcttaaagcgagtaaggatgatcctgaagaagttgccatcaaaattattcgcaacaatgagacaatgtacaaggctggtaagcaagaggtttcaatattggaaaaacttgcaagtgcggaccgtgaggacaaacgccactgcgtgcggtttatttctagtttcatcttttcatcgccctgaagcacctgaagaactgcaaagttttgcactgtgatataaaaccagataatatgctggtgaatgaggctaagaatgtgctcaaggtatgtgattttggcaacgctatgcttgctggtatgaatgaagttacgccttatcttgtcagccgtttctatcgggcacctgagatcgttcttgggttagcctatgatcaccctttagacatgtggtcagttggttgctgtctatatgagctttataccgggaaagtcttatttcctggtccatcaaacaatgccatgcttcggcttcatatggaattgaagggtccattccctaagaagatgcttcgaaagggtgcctttactatgcaacacttcgatcaagatctcaattttcatgctaccgaggaggatcctgtgacaaaaacggctgtgagaaggttaattttgaacattaaaccaaaggatgttggttctttgtttccgaactttcctggcgaggatccaaaaatgctatccagttttaaggatcttcttgataaaatatttacattagatccagaaaagaggataactgtatcgcaagcacttagccatccatttatcactggcaagtgacacaagatgacgattcctcttgaccttgaacttagcatcttcactgtaaaatacattttgggttcctcttgtctaatcatcaacgtttctgtcttgtgtcctgggagctctgagaaaaagtacatggatgaagcacggaacttcggaagagatggctatctgcagaccttgttgcatgcacttatcatttggatatattctgttgcttgattctgccagggcctctgctatgtgcacattttatatgcttaagggccaacataagaaggtcctgggatggaggtcgctggaccctctactcacttgccatggtacaacacgaaacgacaatgaagcaaaccttcgtcaagagcagcttgcaaaccggaaaataggagctgtggagctttgagcgtacattgatgcctcgaaggagaatgctgaagttgtccgctttggcgccaaaagggcttcgtgcacaaaagaagaaagtaagagttgttgaagacttgtacaacaagaaagaatgaaaaagacagtattgcccctgtgatgcttgtaaaccatgtgtaattttttttggcatacttgtaaattcatacaaagttgtacctctcccctacaaataggtgaacaatgccatgcatagattcacttttcgagggtccatagcttcacttagatcagcttcgaagtaacctagagctatttctcgtgtgaagacgaaggtgcgcttctaattatatgttatgttgagaaggatgaaatgacagcgatcaaggcataaagatgagttgc

SEQ ID NO: 34704 - DNA, 3583 bp, Zea Mays
gcgcaaacaagttcgcatcgccatctcgctcgcagggaggagaggggagtctctaaccctaaccctacccgcccctgtcgccatagccatggctgccggcggagagctctccccctcccccgtgccccccgcatcccccatcaagcattctcgctcacccgacgatgcccagcccgacgcatccccgaagcgtcgcaagcgccaccatcaccgccgccaccaccaccaccgtcggcaccgtcacgccgattccccggtacccgtggcagccgacgaagaggtagaggagggggagatactcgaagatgccaccgccgcctctgccatggaggtcgatgctgagtccgccgccccagaggctttccttgctccggagcactttggtaatggtgctgatacagactcaaacacagatgcaaccaagatgcaagctcctgctctgcctacccttccatcctcagaagatggaaggaggtcacttcatgatgcccctgagtctgaaagaggagatattctttcaagtgatgttgaggacaacaaaggacatgaacgaaggcaaagacaaaaccgttctaaatctccaaagtctagaagggagaaggaaaggaggcacaaagatgaccatcacacttcatcttcaaaagattatcattccagaaatcactctagaacatctccttactcaaggcatcaaagtgaagctcattcgagagatctgtacttgagatatagagagaaaggtgattacactaatggttctcgtgcaaatcttagggatggttctgatcatgagagcaatgatcggaatgggaagtctggcagacatacgactaggacccacgggagtgaaagagaaaggagcagcagccatggtattcatgatagacatggtgacaggtacagtgacagacgtgccagccaggaaaggcatagagacgataggatatatagagacaaaatcgattcattagaagctgctcctaggcacagagaaagaagcaggagtcatagtagatcggatccaagggaaaatacacgtcttcgtgatcaaagcagggagagggaaagacggagtggtagttcaaggcatagggatcatgacagcaagagggatacaagtaaagatcggcatagagaatctgacagggttaacagtgcacatgaaagggatagagggagagaggctagggacagggaatggcatagggtcaagggaagtgaaactcatagagctaaggaaggacgggacaaagttagcgataatgataggcacagggattcaacacgctcaaaatatagcgtgtctgatggttacaaagagaggacaagatctggggagaaaggtagagatgctgaccataaaaaccggaagtttgaagaaatgaaggaaaattctctcaaggaggaagatgaagaggagtaccaagagaaaatagaacagcagttagcaatgcaggaggaagacgaccctgaaaaaatcaaagaggaagcaaggaggaggaaagaagctatcatggcaaagtacaggcagcagcaatcgcagaaagaggatatggaatctaaaccaagtggcaatgatgaagaagtaagagcaatggatggaaacgaagctatacatcagaaagatgatatcgatagcagctttatgggcaatgtcgaagctgaaaataagcatgattcttcagaggtatttgatggcaagacaggctttaatgtgggaaggtctcctgctcacaattatgcttcaactagcacgggagcattcactgatgagaggacaataggtgtttcaggtcttggagagggttctcccaagagtgagagatcagcagacatgttttgtgatgacattttcggagaatcacccaccggaattagaaaattgggaaaggatgatggtttgcatattgagagaaatgctcttcatgacaactgggatgatgcagatgggtactacacttatcggttcggagaattgctggatggccgttatgaaatcatagcagcacatgggaagggtgtgttctcaacagttgtgcgggcaaaagatcttaaagcgagtaaggatgatcctgaagaagttgccatcaaaattattcgcaacaatgagacaatgtacaaggctggtaagcaagaggtttcaatattggaaaaacttgcaagtgcggaccgtgaggacaaacgccactgccttttcatcgccctgaagcacctgaagaactgcaaagttttgcactgtgatataaaaccagataatatgctggtgaatgaggctaagaatgtgctcaaggtatgtgattttggcaacgctatgcttgctggtatgaatgaagttacgccttatcttgtcagccgtttctatcgggcacctgagatcgttcttgggttagcctatgatcaccctttagacatgtggtcagttggttgctgtctatatgagctttataccgggaaagtcttatttcctggtccatcaaacaatgccatgcttcggcttcatatggaattgaagggtccattccctaagaagatgcttcgaaagggtgcctttactatgcaacacttcgatcaagatctcaattttcatgctaccgaggaggatcctgtgacaaaaacggctgtgagaaggttaattttgaacattaaaccaaaggatgttggttctttgtttccgaactttcctggcgaggatccaaaaatgctatccagttttaaggatcttcttgataaaatatttacattagatccagaaaagaggataactgtatcgcaagcacttagccatccatttatcactggcaagtgacacaagatgacgattcctcttgaccttgaacttagcatcttcactgtaaaatacattttgggttcctcttgtctaatcatcaacgtttctgtcttgtgtcctgggagctctgagaaaaagtacatggatgaagcacggaacttcggaagagatggctatctgcagaccttgttgcatgcacttatcatttggatatattctgttgcttgattctgccagggcctctgctatgtgcacattttatatgcttaagggccaacataagaaggtcctgggatggaggtcgctggaccctctactcacttgccatggtacaacacgaaacgacaatgaagcaaaccttcgtcaagagcagcttgcaaaccggaaaataggagctgtggagctttgagcgtacattgatgcctcgaaggagaatgctgaagttgtccgctttggcgccaaaagggcttcgtgcacaaaagaagaaagtaagagttgttgaagacttgtacaacaagaaagaatgaaaaagacagtattgcccctgtgatgcttgtaaaccatgtgtaattttttttggcatacttgtaaattcatacaaagttgtacctctcccctacaaataggtgaacaatgccatgcatagattcacttttcgagggtccatagcttcacttagatcagcttcgaagtaacctagagctatttctcgtgtgaagacgaaggtgcgcttctaattatatgttatgttgagaaggatgaaatgacagcgatcaaggcataaagatgagttgc

SEQ ID NO: 34705 - DNA, 3706 bp, Zea Mays
gcgcaaacaagttcgcatcgccatctcgctcgcagggaggagaggggagtctctaaccctaaccctacccgcccctgtcgccatagccatggctgccggcggagagctctccccctcccccgtgccccccgcatcccccatcaagcattctcgctcacccgacgatgcccagcccgacgcatccccgaagcgtcgcaagcgccaccatcaccgccgccaccaccaccaccgtcggcaccgtcacgccgattccccggtacccgtggcagccgacgaagaggtagaggagggggagatactcgaagatgccaccgccgcctctgccatggaggtcgatgctgagtccgccgccccagaggctttccttgctccggagcactttggtaatggtgctgatacagactcaaacacagatgcaaccaagatgcaagctcctgctctgcctacccttccatcctcagaagatggaaggaggtcacttcatgatgcccctgagtctgaaagaggagatattctttcaagtgatgttgaggacaacaaaggacatgaacgaaggcaaagacaaaaccgttctaaatctccaaagtctagaagggagaaggaaaggaggcacaaagatgaccatcacacttcatcttcaaaagattatcattccagaaatcactctagaacatctccttactcaaggcatcaaagtgaagctcattcgagagatctgtacttgagatatagagagaaaggtgattacactaatggttctcgtgcaaatcttagggatggttctgatcatgagagcaatgatcggaatgggaagtctggcagacatacgactaggacccacgggagtgaaagagaaaggagcagcagccatggtattcatgatagacatggtgacaggtacagtgacagacgtgccagccaggaaaggcatagagacgataggatatatagagacaaaatcgattcattagaagctgctcctaggcacagagaaagaagcaggagtcatagtagatcggatccaagggaaaatacacgtcttcgtgatcaaagcagggagagggaaagacggagtggtagttcaaggcatagggatcatgacagcaagagggatacaagtaaagatcggcatagagaatctgacagggttaacagtgcacatgaaagggatagagggagagaggctagggacagggaatggcatagggtcaagggaagtgaaactcatagagctaaggaaggacgggacaaagttagcgataatgataggcacagggattcaacacgctcaaaatatagcgtgtctgatggttacaaagagaggacaagatctggggagaaaggtagagatgctgaccataaaaaccggaagtttgaagaaatgaaggaaaattctctcaaggaggaagatgaagaggagtaccaagagaaaatagaacagcagttagcaatgcaggaggaagacgaccctgaaaaaatcaaagaggaagcaaggaggaggaaagaagctatcatggcaaagtacaggcagcagcaatcgcagaaagaggatatggaatctaaaccaagtggcaatgatgaagaagtaagagcaatggatggaaacgaagctatacatcagaaagatgatatcgatagcagctttatgggcaatgtcgaagctgaaaataagcatgattcttcagaggtatttgatggcaagacaggctttaatgtgggaaggtctcctgctcacaattatgcttcaactagcacgggagcattcactgatgagaggacaataggtgtttcaggtcttggagagggttctcccaagagtgagagatcagcagacatgttttgtgatgacattttcggagaatcacccaccggaattagaaaattgggaaaggatgatggtttgcatattgagagaaatgctcttcatgacaactgggatgatgcagatgggtactacacttatcggttcggagaattgctggatggccgttatgaaatcatagcagcacatgggaagggtgtgttctcaacagttgtgcgggcaaaagatcttaaagcgagtaaggatgatcctgaagaagttgccatcaaaattattcgcaacaatgagacaatgtacaaggctggtaagcaagaggtttcaatattggaaaaacttgcaagtgcggaccgtgaggacaaacgccactgcgtgcggtttatttctagtttcatgtaccggaaccatctttgcttagtttttgaatctctcaatatgaatcttcgtgaggttttaaagaaatttggtcgtaatattgggcttaaactgactgcggtgagggcatattcaaagcagcttttcatcgccctgaagcacctgaagaactgcaaagttttgcactgtgatataaaaccagataatatgctggtgaatgaggctaagaatgtgctcaaggtatgtgattttggcaacgctatgcttgctggtatgaatgaagttacgccttatcttgtcagccgtttctatcgggcacctgagatcgttcttgggttagcctatgatcaccctttagacatgtggtcagttggttgctgtctatatgagctttataccgggaaagtcttatttcctggtccatcaaacaatgccatgcttcggcttcatatggaattgaagggtccattccctaagaagatgcttcgaaagggtgcctttactatgcaacacttcgatcaagatctcaattttcatgctaccgaggaggatcctgtgacaaaaacggctgtgagaaggttaattttgaacattaaaccaaaggatgttggttctttgtttccgaactttcctggcgaggatccaaaaatgctatccagttttaaggatcttcttgataaaatatttacattagatccagaaaagaggataactgtatcgcaagcacttagccatccatttatcactggcaagtgacacaagatgacgattcctcttgaccttgaacttagcatcttcactgtaaaatacattttgggttcctcttgtctaatcatcaacgtttctgtcttgtgtcctgggagctctgagaaaaagtacatggatgaagcacggaacttcggaagagatggctatctgcagaccttgttgcatgcacttatcatttggatatattctgttgcttgattctgccagggcctctgctatgtgcacattttatatgcttaagggccaacataagaaggtcctgggatggaggtcgctggaccctctactcacttgccatggagagatgcgtatcatttcattgagtaaagaggctacagggaaagaaatccaacatagcccgcccctcctccctctaagcacacaagacctgaaaggttctcagcctgttagcaccatggaatgctcttatttgtgattgcctgcagcaccgccatcataacacttgcaatgatgccattaaaaagacatcatactgatgtttccagatctctcaagccaccaagatacaatggagaacctcaagctcaaacatggaaagcaacaaattacaactaagcaacattaacaagcaaaacaattctacactgactaaaaattcacaagcattttctttctcttttcatcgaaccgatcatccatcctatgtatcagacgtgcgtatggtatatttctaatgtatgcgggccaaggcgaaggagtcaacacctcaagaccttagaagct

SEQ ID NO: 34706 - DNA, 3831 bp, Zea Mays
caaacatgttattgaataattatgcaccgtcgcaacgcacggacactatactagttcaatactatgactgatttgatattagatagctctgccaccatcgactcggtcccaagcgcaaacaagttcgcatcgccatctcgctcgcagggaggagaggggagtctctaaccctaaccctacccgcccctgtcgccatagccatggctgccggcggagagctctccccctcccccgtgccccccgcatcccccatcaagcattctcgctcacccgacgatgcccagcccgacgcatccccgaagcgtcgcaagcgccaccatcaccgccgccaccaccaccaccgtcggcaccgtcacgccgattccccggtacccgtggcagccgacgaagaggtagaggagggggagatactcgaagatgccaccgccgcctctgccatggaggtcgatgctgagtccgccgccccagaggctttccttgctccggagcactttggtaatggtgctgatacagactcaaacacagatgcaaccaagatgcaagctcctgctctgcctacccttccatcctcagaagatggaaggaggtcacttcatgatgcccctgagtctgaaagaggagatattctttcaagtgatgttgaggacaacaaaggacatgaacgaaggcaaagacaaaaccgttctaaatctccaaagtctagaagggagaaggaaaggaggcacaaagatgaccatcacacttcatcttcaaaagattatcattccagaaatcactctagaacatctccttactcaaggcatcaaagtgaagctcattcgagagatctgtacttgagatatagagagaaaggtgattacactaatggttctcgtgcaaatcttagggatggttctgatcatgagagcaatgatcggaatgggaagtctggcagacatacgactaggacccacgggagtgaaagagaaaggagcagcagccatggtattcatgatagacatggtgacaggtacagtgacagacgtgccagccaggaaaggcatagagacgataggatatatagagacaaaatcgattcattagaagctgctcctaggcacagagaaagaagcaggagtcatagtagatcggatccaagggaaaatacacgtcttcgtgatcaaagcagggagagggaaagacggagtggtagttcaaggcatagggatcatgacagcaagagggatacaagtaaagatcggcatagagaatctgacagggttaacagtgcacatgaaagggatagagggagagaggctagggacagggaatggcatagggtcaagggaagtgaaactcatagagctaaggaaggacgggacaaagttagcgataatgataggcacagggattcaacacgctcaaaatatagcgtgtctgatggttacaaagagaggacaagatctggggagaaaggtagagatgctgaccataaaaaccggaagtttgaagaaatgaaggaaaattctctcaaggaggaagatgaagaggagtaccaagagaaaatagaacagcagttagcaatgcaggaggaagacgaccctgaaaaaatcaaagaggaagcaaggaggaggaaagaagctatcatggcaaagtacaggcagcagcaatcgcagaaagaggatatggaatctaaaccaagtggcaatgatgaagaagtaagagcaatggatggaaacgaagctatacatcagaaagatgatatcgatagcagctttatgggcaatgtcgaagctgaaaataagcatgattcttcagaggtatttgatggcaagacaggctttaatgtgggaaggtctcctgctcacaattatgcttcaactagcacgggagcattcactgatgagaggacaataggtgtttcaggtcttggagagggttctcccaagagtgagagatcagcagacatgttttgtgatgacattttcggagaatcacccaccggaattagaaaattgggaaaggatgatggtttgcatattgagagaaatgctcttcatgacaactgggatgatgcagatgggtactacacttatcggttcggagaattgctggatggccgttatgaaatcatagcagcacatgggaagggtgtgttctcaacagttgtgcgggcaaaagatcttaaagcgagtaaggatgatcctgaagaagttgccatcaaaattattcgcaacaatgagacaatgtacaaggctggtaagcaagaggtttcaatattggaaaaacttgcaagtgcggaccgtgaggacaaacgccactgcgtgcggtttatttctagtttcatgtaccggaaccatctttgcttagtttttgaatctctcaatatgaatcttcgtgaggttttaaagaaatttggtcgtaatattgggcttaaactgactgcggtgagggcatattcaaagcagcttttcatcgccctgaagcacctgaagaactgcaaagttttgcactgtgatataaaaccagataatatgctggtgaatgaggctaagaatgtgctcaaggtatgtgattttggcaacgctatgcttgctggtatgaatgaagttacgccttatcttgtcagccgtttctatcgggcacctgagatcgttcttgggttagcctatgatcaccctttagacatgtggtcagttggttgctgtctatatgagctttataccgggaaagtcttatttcctggtccatcaaacaatgccatgcttcggcttcatatggaattgaagggtccattccctaagaagatgcttcgaaagggtgcctttactatgcaacacttcgatcaagatctcaattttcatgctaccgaggaggatcctgtgacaaaaacggctgtgagaaggttaattttgaacattaaaccaaaggatgttggttctttgtttccgaactttcctggcgaggatccaaaaatgctatccagttttaaggatcttcttgataaaatatttacattagatccagaaaagaggataactgtatcgcaagcacttagccatccatttatcactggcaagtgacacaagatgacgattcctcttgaccttgaacttagcatcttcactgtaaaatacattttgggttcctcttgtctaatcatcaacgtttctgtcttgtgtcctgggagctctgagaaaaagtacatggatgaagcacggaacttcggaagagatggctatctgcagaccttgttgcatgcacttatcatttggatatattctgttgcttgattctgccagggcctctgctatgtgcacattttatatgcttaagggccaacataagaaggtcctgggatggaggtcgctggaccctctactcacttgccatgtattcaagtgcaggagagatgcgtatcatttcattgagtaaagaggctacagggaaagaaatccaacatagcccgcccctcctccctctaagcacacaagacctgaaaggttctcagcctgttagcaccatggaatgctcttatttgtgattgcctgcagcaccgccatcataacacttgcaatgatgccattaaaaagacatcatactgatgtttccagatctctcaagccaccaagatacaatggagaacctcaagctcaaacatggaaagcaacaaattacaactaagcaacattaacaagcaaaacaattctacactgactaaaaattcacaagcattttctttctcttttcatcgaaccgatcatccatcctatgtatcagacgtgcgtatggtatatttctaatgtatgcgggccaaggcgaaggagtcaacacctcaagaccttagaagct

SEQ ID NO: 34707 - DNA, 3560 bp, Zea Mays
gcgcaaacaagttcgcatcgccatctcgctcgcagggaggagaggggagtctctaaccctaaccctacccgcccctgtcgccatagccatggctgccggcggagagctctccccctcccccgtgccccccgcatcccccatcaagcattctcgctcacccgacgatgcccagcccgacgcatccccgaagcgtcgcaagcgccaccatcaccgccgccaccaccaccaccgtcggcaccgtcacgccgattccccggtacccgtggcagccgacgaagaggtagaggagggggagatactcgaagatgccaccgccgcctctgccatggaggtcgatgctgagtccgccgccccagaggctttccttgctccggagcactttggtaatggtgctgatacagactcaaacacagatgcaaccaagatgcaagctcctgctctgcctacccttccatcctcagaagatggaaggaggtcacttcatgatgcccctgagtctgaaagaggagatattctttcaagtgatgttgaggacaacaaaggacatgaacgaaggcaaagacaaaaccgttctaaatctccaaagtctagaagggagaaggaaaggaggcacaaagatgaccatcacacttcatcttcaaaagattatcattccagaaatcactctagaacatctccttactcaaggcatcaaagtgaagctcattcgagagatctgtacttgagatatagagagaaaggtgattacactaatggttctcgtgcaaatcttagggatggttctgatcatgagagcaatgatcggaatgggaagtctggcagacatacgactaggacccacgggagtgaaagagaaaggagcagcagccatggtattcatgatagacatggtgacaggtacagtgacagacgtgccagccaggaaaggcatagagacgataggatatatagagacaaaatcgattcattagaagctgctcctaggcacagagaaagaagcaggagtcatagtagatcggatccaagggaaaatacacgtcttcgtgatcaaagcagggagagggaaagacggagtggtagttcaaggcatagggatcatgacagcaagagggatacaagtaaagatcggcatagagaatctgacagggttaacagtgcacatgaaagggatagagggagagaggctagggacagggaatggcatagggtcaagggaagtgaaactcatagagctaaggaaggacgggacaaagttagcgataatgataggcacagggattcaacacgctcaaaatatagcgtgtctgatggttacaaagagaggacaagatctggggagaaaggtagagatgctgaccataaaaaccggaagtttgaagaaatgaaggaaaattctctcaaggaggaagatgaagaggagtaccaagagaaaatagaacagcagttagcaatgcaggaggaagacgaccctgaaaaaatcaaagaggaagcaaggaggaggaaagaagctatcatggcaaagtacaggcagcagcaatcgcagaaagaggatatggaatctaaaccaagtggcaatgatgaagaagtaagagcaatggatggaaacgaagctatacatcagaaagatgatatcgatagcagctttatgggcaatgtcgaagctgaaaataagcatgattcttcagaggtatttgatggcaagacaggctttaatgtgggaaggtctcctgctcacaattatgcttcaactagcacgggagcattcactgatgagaggacaataggtgtttcaggtcttggagagggttctcccaagagtgagagatcagcagacatgttttgtgatgacattttcggagaatcacccaccggaattagaaaattgggaaaggatgatggtttgcatattgagagaaatgctcttcatgacaactgggatgatgcagatgggtactacacttatcggttcggagaattgctggatggccgttatgaaatcatagcagcacatgggaagggtgtgttctcaacagttgtgcgggcaaaagatcttaaagcgagtaaggatgatcctgaagaagttgccatcaaaattattcgcaacaatgagacaatgtacaaggctggtaagcaagaggtttcaatattggaaaaacttgcaagtgcggaccgtgaggacaaacgccactgcgtgcggtttatttctagtttcatgtaccggaaccatctttgcttagtttttgaatctctcaatatgaatcttcgtgaggttttaaagaaatttggtcgtaatattgggcttaaactgactgcggtgagggcatattcaaagcagcttttcatcgccctgaagcacctgaagaactgcaaagttttgcactgtgatataaaaccagataatatgctggtgaatgaggctaagaatgtgctcaaggtatgtgattttggcaacgctatgcttgctggtatgaatgaagttacgccttatcttgtcagccgtttctatcgggcacctgagatcgttcttgggttagcctatgatcaccctttagacatgtggtcagttggttgctgtctatatgagctttataccgggaaagtcttatttcctggtccatcaaacaatgccatgcttcggcttcatatggaattgaagggtccattccctaagaagatgcttcgaaagggtgcctttactatgcaacacttcgatcaagatctcaattttcatgctaccgaggaggatcctgtgacaaaaacggctgtgagaaggttaattttgaacattaaaccaaaggatgttggttctttgtttccgaactttcctggcgaggatccaaaaatgctatccagttttaaggatcttcttgataaaatatttacattagatccagaaaagaggataactgtatcgcaagcacttagccatccatttatcactggcaagtgacacaagatgacgattcctcttgaccttgaacttagcatcttcactgtaaaatacattttgggttcctcttgtctaatcatcaacgtttctgtcttgtgtcctgggagctctgagaaaaagtacatggatgaagcacggaacttcggaagagatggctatctgcagaccttgttgcatgcacttatcatttggatatattctgttgcttgattctgccagggcctctgctatgtgcacattttatatgcttaagggccaacataagaaggagagatgcgtatcatttcattgagtaaagaggctacagggaaagaaatccaacatagcccgcccctcctccctctaagcacacaagacctgaaaggttctcagcctgttagcaccatggaatgctcttatttgtgattgcctgcagcaccgccatcataacacttgcaatgatgccattaaaaagacatcatactgatgtttccagatctctcaagccaccaagatacaatggagaacctcaagctcaaacatggaaagcaacaaattacaactaagcaacattaacaagcaaaacaattctacactgactaaaaattcacaagcattttctttctctttt

SEQ ID NO: 34708 - DNA, 4435 bp, Zea Mays
gcgcaaacaagttcgcatcgccatctcgctcgcagggaggagaggggagtctctaaccctaaccctacccgcccctgtcgccatagccatggctgccggcggagagctctccccctcccccgtgccccccgcatcccccatcaagcattctcgctcacccgacgatgcccagcccgacgcatccccgaagcgtcgcaagcgccaccatcaccgccgccaccaccaccaccgtcggcaccgtcacgccgattccccggtacccgtggcagccgacgaagaggtagaggagggggagatactcgaagatgccaccgccgcctctgccatggaggtcgatgctgagtccgccgccccagaggctttccttgctccggagcactttggtaatggtgctgatacagactcaaacacagatgcaaccaagatgcaagctcctgctctgcctacccttccatcctcagaagatggaaggaggtcacttcatgatgcccctgagtctgaaagaggagatattctttcaagtgatgttgaggacaacaaaggacatgaacgaaggcaaagacaaaaccgttctaaatctccaaagtctagaagggagaaggaaaggaggcacaaagatgaccatcacacttcatcttcaaaagattatcattccagaaatcactctagaacatctccttactcaaggcatcaaagtgaagctcattcgagagatctgtacttgagatatagagagaaaggtgattacactaatggttctcgtgcaaatcttagggatggttctgatcatgagagcaatgatcggaatgggaagtctggcagacatacgactaggacccacgggagtgaaagagaaaggagcagcagccatggtattcatgatagacatggtgacaggtacagtgacagacgtgccagccaggaaaggcatagagacgataggatatatagagacaaaatcgattcattagaagctgctcctaggcacagagaaagaagcaggagtcatagtagatcggatccaagggaaaatacacgtcttcgtgatcaaagcagggagagggaaagacggagtggtagttcaaggcatagggatcatgacagcaagagggatacaagtaaagatcggcatagagaatctgacagggttaacagtgcacatgaaagggatagagggagagaggctagggacagggaatggcatagggtcaagggaagtgaaactcatagagctaaggaaggacgggacaaagttagcgataatgataggcacagggattcaacacgctcaaaatatagcgtgtctgatggttacaaagagaggacaagatctggggagaaaggtagagatgctgaccataaaaaccggaagtttgaagaaatgaaggaaaattctctcaaggaggaagatgaagaggagtaccaagagaaaatagaacagcagttagcaatgcaggaggaagacgaccctgaaaaaatcaaagaggaagcaaggaggaggaaagaagctatcatggcaaagtacaggcagcagcaatcgcagaaagaggatatggaatctaaaccaagtggcaatgatgaagaagtaagagcaatggatggaaacgaagctatacatcagaaagatgatatcgatagcagctttatgggcaatgtcgaagctgaaaataagcatgattcttcagaggtatttgatggcaagacaggctttaatgtgggaaggtctcctgctcacaattatgcttcaactagcacgggagcattcactgatgagaggacaataggtgtttcaggtcttggagagggttctcccaagagtgagagatcagcagacatgttttgtgatgacattttcggagaatcacccaccggaattagaaaattgggaaaggatgatggtttgcatattgagagaaatgctcttcatgacaactgggatgatgcagatgggtactacacttatcggttcggagaattgctggatggccgttatgaaatcatagcagcacatgggaagggtgtgttctcaacagttgtgcgggcaaaagatcttaaagcgagtaaggatgatcctgaagaagttgccatcaaaattattcgcaacaatgagacaatgtacaaggctggtaagcaagaggtttcaatattggaaaaacttgcaagtgcggaccgtgaggacaaacgccactgcgtgcggtttatttctagtttcatgtaccggaaccatctttgcttagtttttgaatctctcaatatgaatcttcgtgaggttttaaagaaatttggtcgtaatattgggcttaaactgactgcggtgagggcatattcaaagcagcttttcatcgccctgaagcacctgaagaactgcaaagttttgcactgtgatataaaaccagataatatgctggtgaatgaggctaagaatgtgctcaaggtatgtgattttggcaacgctatgcttgctggtatgaatgaagttacgccttatcttgtcagccgtttctatcgggcacctgagatcgttcttgggttagcctatgatcaccctttagacatgtggtcagttggttgctgtctatatgagctttataccgggaaagtcttatttcctggtccatcaaacaatgccatgcttcggcttcatatggaattgaagggtccattccctaagaagatgcttcgaaagggtgcctttactatgcaacacttcgatcaagatctcaattttcatgctaccgaggaggatcctgtgacaaaaacggctgtgagaaggttaattttgaacattaaaccaaaggatgttggttctttgtttccgaactttcctggcgaggatccaaaaatgctatccagttttaaggatcttcttgataaaatatttacattagatccagaaaagaggataactgtatcgcaagcacttagccatccatttatcactggcaagtgacacaagatgacgattcctcttgaccttgaacttagcatcttcactgtaaaatacattttgggttcctcttgtctaatcatcaacgtttctgtcttgtgtcctgggagctctgagaaaaagtacatggatgaagcacggaacttcggaagagatggctatctgcagaccttgttgcatgcacttatcatttggatatattctgttgcttgattctgccagggcctctgctatgtgcacattttatatgcttaagggccaacataagaaggagagatgcgtatcatttcattgagtaaagaggctacagggaaagaaatccaacatagcccgcccctcctccctctaagcacacaagacctgaaaggttctcagcctgttagcaccatggaatgctcttatttgtgattgcctgcagcaccgccatcataacacttgcaatgatgccattaaaaagacatcatactgatgtttccagatctctcaagccaccaagatagtgagttcaggcctttcttgctatatcatttggcacttgtcagcctagctcaaaccggcttgataacttattgatgataggttgaggcgcaatggaaataatccaagcctgccagattggtaaccattctttagactgccatttagtaagtcaggttgaacctattaccatctataaggacttgttcggttagctctcaatccatgtggattgagtgggattggatgggtttgaatcccaaacaagtcaaacttcttctcaattttttccaatcccatccaatccatatgtattaggaataaccgaacaagccctaagtgggcatgcaaatggcattgtgttggattggaccattgtaaacggtttctcgtgttggatgcaagcattctgtagttgttttgagttgttttttattatctgtagtacttgctgggtaaatctaaagaactggatttgtgtcaggcctggttcaattgatatggaacacttaaactgattagtttggtccctaggggcgaaggcctatgcatttggtgcctgcttttggatcattgtgcaattagagttgccaacatgagtgggaggaaaatattagtaacatccttgctggcatactgccaaagtagaagctacctcttgtagtatgccatttgtttgctcccttcatttattttgtcgaacacggttcacaggtacacaaagaaaaacaaccaaactccacacctgaactgaacaagattcactcagaagtgcagaagccacacactagaaacccgcagacactatgtgtattataagaaaaaaaatcctagtcgaaattgtttatttttgttcatgagctttgcatgcatgtcttgaagtagcctgggacgtttggtttccacaaatctctacgatatagaacatagcaaacgtcttcctggcagctctggttaaccagcgaatttggagtcactacctgctttattgtttattagcatgtcaggcta

SEQ ID NO: 34709 - DNA, 4756 bp, Zea Mays
gcgcaaacaagttcgcatcgccatctcgctcgcagggaggagaggggagtctctaaccctaaccctacccgcccctgtcgccatagccatggctgccggcggagagctctccccctcccccgtgccccccgcatcccccatcaagcattctcgctcacccgacgatgcccagcccgacgcatccccgaagcgtcgcaagcgccaccatcaccgccgccaccaccaccaccgtcggcaccgtcacgccgattccccggtacccgtggcagccgacgaagaggtagaggagggggagatactcgaagatgccaccgccgcctctgccatggaggtcgatgctgagtccgccgccccagaggctttccttgctccggagcactttggtaatggtgctgatacagactcaaacacagatgcaaccaagatgcaagctcctgctctgcctacccttccatcctcagaagatggaaggaggtcacttcatgatgcccctgagtctgaaagaggagatattctttcaagtgatgttgaggacaacaaaggacatgaacgaaggcaaagacaaaaccgttctaaatctccaaagtctagaagggagaaggaaaggaggcacaaagatgaccatcacacttcatcttcaaaagattatcattccagaaatcactctagaacatctccttactcaaggcatcaaagtgaagctcattcgagagatctgtacttgagatatagagagaaaggtgattacactaatggttctcgtgcaaatcttagggatggttctgatcatgagagcaatgatcggaatgggaagtctggcagacatacgactaggacccacgggagtgaaagagaaaggagcagcagccatggtattcatgatagacatggtgacaggtacagtgacagacgtgccagccaggaaaggcatagagacgataggatatatagagacaaaatcgattcattagaagctgctcctaggcacagagaaagaagcaggagtcatagtagatcggatccaagggaaaatacacgtcttcgtgatcaaagcagggagagggaaagacggagtggtagttcaaggcatagggatcatgacagcaagagggatacaagtaaagatcggcatagagaatctgacagggttaacagtgcacatgaaagggatagagggagagaggctagggacagggaatggcatagggtcaagggaagtgaaactcatagagctaaggaaggacgggacaaagttagcgataatgataggcacagggattcaacacgctcaaaatatagcgtgtctgatggttacaaagagaggacaagatctggggagaaaggtagagatgctgaccataaaaaccggaagtttgaagaaatgaaggaaaattctctcaaggaggaagatgaagaggagtaccaagagaaaatagaacagcagttagcaatgcaggaggaagacgaccctgaaaaaatcaaagaggaagcaaggaggaggaaagaagctatcatggcaaagtacaggcagcagcaatcgcagaaagaggatatggaatctaaaccaagtggcaatgatgaagaagtaagagcaatggatggaaacgaagctatacatcagaaagatgatatcgatagcagctttatgggcaatgtcgaagctgaaaataagcatgattcttcagaggtatttgatggcaagacaggctttaatgtgggaaggtctcctgctcacaattatgcttcaactagcacgggagcattcactgatgagaggacaataggtgtttcaggtcttggagagggttctcccaagagtgagagatcagcagacatgttttgtgatgacattttcggagaatcacccaccggaattagaaaattgggaaaggatgatggtttgcatattgagagaaatgctcttcatgacaactgggatgatgcagatgggtactacacttatcggttcggagaattgctggatggccgttatgaaatcatagcagcacatgggaagggtgtgttctcaacagttgtgcgggcaaaagatcttaaagcgagtaaggatgatcctgaagaagttgccatcaaaattattcgcaacaatgagacaatgtacaaggctggtaagcaagaggtttcaatattggaaaaacttgcaagtgcggaccgtgaggacaaacgccactgcgtgcggtttatttctagtttcatcttttcatcgccctgaagcacctgaagaactgcaaagttttgcactgtgatataaaaccagataatatgctggtgaatgaggctaagaatgtgctcaaggtatgtgattttggcaacgctatgcttgctggtatgaatgaagttacgccttatcttgtcagccgtttctatcgggcacctgagatcgttcttgggttagcctatgatcaccctttagacatgtggtcagttggttgctgtctatatgagctttataccgggaaagtcttatttcctggtccatcaaacaatgccatgcttcggcttcatatggaattgaagggtccattccctaagaagatgcttcgaaagggtgcctttactatgcaacacttcgatcaagatctcaattttcatgctaccgaggaggatcctgtgacaaaaacggctgtgagaaggttaattttgaacattaaaccaaaggatgttggttctttgtttccgaactttcctggcgaggatccaaaaatgctatccagttttaaggatcttcttgataaaatatttacattagatccagaaaagaggataactgtatcgcaagcacttagccatccatttatcactggcaagtgacacaagatgacgattcctcttgaccttgaacttagcatcttcactgtaaaatacattttgggttcctcttgtctaatcatcaacgtttctgtcttgtgtcctgggagctctgagaaaaagtacatggatgaagcacggaacttcggaagagatggctatctgcagaccttgttgcatgcacttatcatttggatatattctgttgcttgattctgccagggcctctgctatgtgcacattttatatgcttaagggccaacataagaagagttttcacctaatagttgattatgggttggtacatcaaggctgattcagttcaattttagcaacctttactgtttattaggtgcatttccaatattttgtgttttggttagtaatttcttttgccagtttcatcaaacattgatcttctaaacaatttgtttgttttttgtgtgcctgccaaacttcttcatattaatgggttatgagattcaagtactatatgctttacatgaaagctgtattctctaccattcagcgaaatgtgcgaaacatgagaaacatttttgtcttgtgtaacaatttgagagctgattattacattgactgctagttataaaaccgtgggcttattacttttactttgtatctagatttgctgcatgtagataaacactggtgggaagctgaaattttactgtgtaattagtattcaagtgcaggagagatgcgtatcatttcattgagtaaagaggctacagggaaagaaatccaacatagcccgcccctcctccctctaagcacacaagacctgaaaggttctcagcctgttagcaccatggaatgctcttatttgtgattgcctgcagcaccgccatcataacacttgcaatgatgccattaaaaagacatcatactgatgtttccagatctctcaagccaccaagatagtgagttcaggcctttcttgctatatcatttggcacttgtcagcctagctcaaaccggcttgataacttattgatgataggttgaggcgcaatggaaataatccaagcctgccagattggtaaccattctttagactgccatttagtaagtcaggttgaacctattaccatctataaggacttgttcggttagctctcaatccatgtggattgagtgggattggatgggtttgaatcccaaacaagtcaaacttcttctcaattttttccaatcccatccaatccatatgtattaggaataaccgaacaagccctaagtgggcatgcaaatggcattgtgttggattggaccattgtaaacggtttctcgtgttggatgcaagcattctgtagttgttttgagttgttttttattatctgtagtacttgctgggtaaatctaaagaactggatttgtgtcaggcctggttcaattgatatggaacacttaaactgattagtttggtccctaggggcgaaggcctatgcatttggtgcctgcttttggatcattgtgcaattagagttgccaacatgagtgggaggaaaatattagtaacatccttgctggcatactgccaaagtagaagctacctcttgtagtatgccatttgtttgctcccttcatttattttgtcgaacacggttcacaggtacacaaagaaaaacaaccaaactccacacctgaactgaacaagattcactcagaagtgcagaagccacacactagaaacccgcagacactatgtgtattataagaaaaaaaatcctagtcgaaattgtttatttttgttcatgagctttgcatgcatgtcttgaagtagcctgggacgtttggtttccacaaatctctacgatatagaacatagcaaacgtcttcctggcagctctggttaaccagcgaatttggagtcactacctgctttattgtttattagcatgtcaggcta

SEQ ID NO: 34710 - DNA, 4887 bp, Zea Mays
gcgcaaacaagttcgcatcgccatctcgctcgcagggaggagaggggagtctctaaccctaaccctacccgcccctgtcgccatagccatggctgccggcggagagctctccccctcccccgtgccccccgcatcccccatcaagcattctcgctcacccgacgatgcccagcccgacgcatccccgaagcgtcgcaagcgccaccatcaccgccgccaccaccaccaccgtcggcaccgtcacgccgattccccggtacccgtggcagccgacgaagaggtagaggagggggagatactcgaagatgccaccgccgcctctgccatggaggtcgatgctgagtccgccgccccagaggctttccttgctccggagcactttggtaatggtgctgatacagactcaaacacagatgcaaccaagatgcaagctcctgctctgcctacccttccatcctcagaagatggaaggaggtcacttcatgatgcccctgagtctgaaagaggagatattctttcaagtgatgttgaggacaacaaaggacatgaacgaaggcaaagacaaaaccgttctaaatctccaaagtctagaagggagaaggaaaggaggcacaaagatgaccatcacacttcatcttcaaaagattatcattccagaaatcactctagaacatctccttactcaaggcatcaaagtgaagctcattcgagagatctgtacttgagatatagagagaaaggtgattacactaatggttctcgtgcaaatcttagggatggttctgatcatgagagcaatgatcggaatgggaagtctggcagacatacgactaggacccacgggagtgaaagagaaaggagcagcagccatggtattcatgatagacatggtgacaggtacagtgacagacgtgccagccaggaaaggcatagagacgataggatatatagagacaaaatcgattcattagaagctgctcctaggcacagagaaagaagcaggagtcatagtagatcggatccaagggaaaatacacgtcttcgtgatcaaagcagggagagggaaagacggagtggtagttcaaggcatagggatcatgacagcaagagggatacaagtaaagatcggcatagagaatctgacagggttaacagtgcacatgaaagggatagagggagagaggctagggacagggaatggcatagggtcaagggaagtgaaactcatagagctaaggaaggacgggacaaagttagcgataatgataggcacagggattcaacacgctcaaaatatagcgtgtctgatggttacaaagagaggacaagatctggggagaaaggtagagatgctgaccataaaaaccggaagtttgaagaaatgaaggaaaattctctcaaggaggaagatgaagaggagtaccaagagaaaatagaacagcagttagcaatgcaggaggaagacgaccctgaaaaaatcaaagaggaagcaaggaggaggaaagaagctatcatggcaaagtacaggcagcagcaatcgcagaaagaggatatggaatctaaaccaagtggcaatgatgaagaagtaagagcaatggatggaaacgaagctatacatcagaaagatgatatcgatagcagctttatgggcaatgtcgaagctgaaaataagcatgattcttcagaggtatttgatggcaagacaggctttaatgtgggaaggtctcctgctcacaattatgcttcaactagcacgggagcattcactgatgagaggacaataggtgtttcaggtcttggagagggttctcccaagagtgagagatcagcagacatgttttgtgatgacattttcggagaatcacccaccggaattagaaaattgggaaaggatgatggtttgcatattgagagaaatgctcttcatgacaactgggatgatgcagatgggtactacacttatcggttcggagaattgctggatggccgttatgaaatcatagcagcacatgggaagggtgtgttctcaacagttgtgcgggcaaaagatcttaaagcgagtaaggatgatcctgaagaagttgccatcaaaattattcgcaacaatgagacaatgtacaaggctggtaagcaagaggtttcaatattggaaaaacttgcaagtgcggaccgtgaggacaaacgccactgcgtgcggtttatttctagtttcatgtaccggaaccatctttgcttagtttttgaatctctcaatatgaatcttcgtgaggttttaaagaaatttggtcgtaatattgggcttaaactgactgcggtgagggcatattcaaagcagcttttcatcgccctgaagcacctgaagaactgcaaagttttgcactgtgatataaaaccagataatatgctggtgaatgaggctaagaatgtgctcaaggtatgtgattttggcaacgctatgcttgctggtatgaatgaagttacgccttatcttgtcagccgtttctatcgggcacctgagatcgttcttgggttagcctatgatcaccctttagacatgtggtcagttggttgctgtctatatgagctttataccgggaaagtcttatttcctggtccatcaaacaatgccatgcttcggcttcatatggaattgaagggtccattccctaagaagatgcttcgaaagggtgcctttactatgcaacacttcgatcaagatctcaattttcatgctaccgaggaggatcctgtgacaaaaacggctgtgagaaggttaattttgaacattaaaccaaaggatgttggttctttgtttccgaactttcctggcgaggatccaaaaatgctatccagttttaaggatcttcttgataaaatatttacattagatccagaaaagaggataactgtatcgcaagcacttagccatccatttatcactggcaagtgacacaagatgacgattcctcttgaccttgaacttagcatcttcactgtaaaatacattttgggttcctcttgtctaatcatcaacgtttctgtcttgtgtcctgggagctctgagaaaaagtacatggatgaagcacggaacttcggaagagatggctatctgcagaccttgttgcatgcacttatcatttggatatattctgttgcttgattctgccagggcctctgctatgtgcacattttatatgcttaagggccaacataagaaggtcctgggatggaggtcgctggaccctctactcacttgccatggtaaatcctctcaactctggatgtcttccatttttttcttattaaagagttttcacctaatagttgattatgggttggtacatcaaggctgattcagttcaattttagcaacctttactgtttattaggtgcatttccaatattttgtgttttggttagtaatttcttttgccagtttcatcaaacattgatcttctaaacaatttgtttgttttttgtgtgcctgccaaacttcttcatattaatgggttatgagattcaagtactatatgctttacatgaaagctgtattctctaccattcagcgaaatgtgcgaaacatgagaaacatttttgtcttgtgtaacaatttgagagctgattattacattgactgctagttataaaaccgtgggcttattacttttactttgtatctagatttgctgcatgtagataaacactggtgggaagctgaaattttactgtgtaattagtattcaagtgcaggagagatgcgtatcatttcattgagtaaagaggctacagggaaagaaatccaacatagcccgcccctcctccctctaagcacacaagacctgaaaggttctcagcctgttagcaccatggaatgctcttatttgtgattgcctgcagcaccgccatcataacacttgcaatgatgccattaaaaagacatcatactgatgtttccagatctctcaagccaccaagatagttgaggcgcaatggaaataatccaagcctgccagattggtaaccattctttagactgccatttagtaagtcaggttgaacctattaccatctataaggacttgttcggttagctctcaatccatgtggattgagtgggattggatgggtttgaatcccaaacaagtcaaacttcttctcaattttttccaatcccatccaatccatatgtattaggaataaccgaacaagccctaagtgggcatgcaaatggcattgtgttggattggaccattgtaaacggtttctcgtgttggatgcaagcattctgtagttgttttgagttgttttttattatctgtagtacttgctgggtaaatctaaagaactggatttgtgtcaggcctggttcaattgatatggaacacttaaactgattagtttggtccctaggggcgaaggcctatgcatttggtgcctgcttttggatcattgtgcaattagagttgccaacatgagtgggaggaaaatattagtaacatccttgctggcatactgccaaagtagaagctacctcttgtagtatgccatttgtttgctcccttcatttattttgtcgaacacggttcacaggtacacaaagaaaaacaaccaaactccacacctgaactgaacaagattcactcagaagtgcagaagccacacactagaaacccgcagacactatgtgtattataagaaaaaaaatcctagtcgaaattgtttatttttgttcatgagctttgcatgcatgtcttgaagtagcctgggacgtttggtttccacaaatctctacgatatagaacatagcaaacgtcttcctggcagctctggttaaccagcgaatttggagtcactacctgctttattgtttattagcatgtcaggcta

SEQ ID NO: 34711 - DNA, 4277 bp, Zea Mays
gcgcaaacaagttcgcatcgccatctcgctcgcagggaggagaggggagtctctaaccctaaccctacccgcccctgtcgccatagccatggctgccggcggagagctctccccctcccccgtgccccccgcatcccccatcaagcattctcgctcacccgacgatgcccagcccgacgcatccccgaagcgtcgcaagcgccaccatcaccgccgccaccaccaccaccgtcggcaccgtcacgccgattccccggtacccgtggcagccgacgaagaggtagaggagggggagatactcgaagatgccaccgccgcctctgccatggaggtcgatgctgagtccgccgccccagaggctttccttgctccggagcactttggtaatggtgctgatacagactcaaacacagatgcaaccaagatgcaagctcctgctctgcctacccttccatcctcagaagatggaaggaggtcacttcatgatgcccctgagtctgaaagaggagatattctttcaagtgatgttgaggacaacaaaggacatgaacgaaggcaaagacaaaaccgttctaaatctccaaagtctagaagggagaaggaaaggaggcacaaagatgaccatcacacttcatcttcaaaagattatcattccagaaatcactctagaacatctccttactcaaggcatcaaagtgaagctcattcgagagatctgtacttgagatatagagagaaaggtgattacactaatggttctcgtgcaaatcttagggatggttctgatcatgagagcaatgatcggaatgggaagtctggcagacatacgactaggacccacgggagtgaaagagaaaggagcagcagccatggtattcatgatagacatggtgacaggtacagtgacagacgtgccagccaggaaaggcatagagacgataggatatatagagacaaaatcgattcattagaagctgctcctaggcacagagaaagaagcaggagtcatagtagatcggatccaagggaaaatacacgtcttcgtgatcaaagcagggagagggaaagacggagtggtagttcaaggcatagggatcatgacagcaagagggatacaagtaaagatcggcatagagaatctgacagggttaacagtgcacatgaaagggatagagggagagaggctagggacagggaatggcatagggtcaagggaagtgaaactcatagagctaaggaaggacgggacaaagttagcgataatgataggcacagggattcaacacgctcaaaatatagcgtgtctgatggttacaaagagaggacaagatctggggagaaaggtagagatgctgaccataaaaaccggaagtttgaagaaatgaaggaaaattctctcaaggaggaagatgaagaggagtaccaagagaaaatagaacagcagttagcaatgcaggaggaagacgaccctgaaaaaatcaaagaggaagcaaggaggaggaaagaagctatcatggcaaagtacaggcagcagcaatcgcagaaagaggatatggaatctaaaccaagtggcaatgatgaagaagtaagagcaatggatggaaacgaagctatacatcagaaagatgatatcgatagcagctttatgggcaatgtcgaagctgaaaataagcatgattcttcagaggtatttgatggcaagacaggctttaatgtgggaaggtctcctgctcacaattatgcttcaactagcacgggagcattcactgatgagaggacaataggtgtttcaggtcttggagagggttctcccaagagtgagagatcagcagacatgttttgtgatgacattttcggagaatcacccaccggaattagaaaattgggaaaggatgatggtttgcatattgagagaaatgctcttcatgacaactgggatgatgcagatgggtactacacttatcggttcggagaattgctggatggccgttatgaaatcatagcagcacatgggaagggtgtgttctcaacagttgtgcgggcaaaagatcttaaagcgagtaaggatgatcctgaagaagttgccatcaaaattattcgcaacaatgagacaatgtacaaggctggtaagcaagaggtttcaatattggaaaaacttgcaagtgcggaccgtgaggacaaacgccactgcgtgcggtttatttctagtttcatcttttcatcgccctgaagcacctgaagaactgcaaagttttgcactgtgatataaaaccagataatatgctggtgaatgaggctaagaatgtgctcaaggtatgtgattttggcaacgctatgcttgctggtatgaatgaagttacgccttatcttgtcagccgtttctatcgggcacctgagatcgttcttgggttagcctatgatcaccctttagacatgtggtcagttggttgctgtctatatgagctttataccgggaaagtcttatttcctggtccatcaaacaatgccatgcttcggcttcatatggaattgaagggtccattccctaagaagatgcttcgaaagggtgcctttactatgcaacacttcgatcaagatctcaattttcatgctaccgaggaggatcctgtgacaaaaacggctgtgagaaggttaattttgaacattaaaccaaaggatgttggttctttgtttccgaactttcctggcgaggatccaaaaatgctatccagttttaaggatcttcttgataaaatatttacattagatccagaaaagaggataactgtatcgcaagcacttagccatccatttatcactggcaagtgacacaagatgacgattcctcttgaccttgaacttagcatcttcactgtaaaatacattttgggttcctcttgtctaatcatcaacgtttctgtcttgtgtcctgggagctctgagaaaaagtacatggatgaagcacggaacttcggaagagatggctatctgcagaccttgttgcatgcacttatcatttggatatattctgttgcttgattctgccagggcctctgctatgtgcacattttatatgcttaagggccaacataagaaggtcctgggatggaggtcgctggaccctctactcacttgccatggagagatgcgtatcatttcattgagtaaagaggctacagggaaagaaatccaacatagcccgcccctcctccctctaagcacacaagacctgaaaggttctcagcctgttagcaccatggaatgctcttatttgtgattgcctgcagcaccgccatcataacacttgcaatgatgccattaaaaagacatcatactgatgtttccagatctctcaagccaccaagatagttgaggcgcaatggaaataatccaagcctgccagattggtaaccattctttagactgccatttagtaagtcaggttgaacctattaccatctataaggacttgttcggttagctctcaatccatgtggattgagtgggattggatgggtttgaatcccaaacaagtcaaacttcttctcaattttttccaatcccatccaatccatatgtattaggaataaccgaacaagccctaagtgggcatgcaaatggcattgtgttggattggaccattgtaaacggtttctcgtgttggatgcaagcattctgtagttgttttgagttgttttttattatctgtagtacttgctgggtaaatctaaagaactggatttgtgtcaggcctggttcaattgatatggaacacttaaactgattagtttggtccctaggggcgaaggcctatgcatttggtgcctgcttttggatcattgtgcaattagagttgccaacatgagtgggaggaaaatattagtaacatccttgctggcatactgccaaagtagaagctacctcttgtagtatgccatttgtttgctcccttcatttattttgtcgaacacggttcacaggtacacaaagaaaaacaaccaaactccacacctgaactgaacaagattcactcagaagtgcagaagccacacactagaaacccgcagacactatgtgtattataagaaaaaaaatcctagtcgaaattgtttatttttgttcatgagctttgcatgcatgtcttgaagtagcctgggacgtttggtttccacaaatctctacgatatagaacatagcaaacgtcttcctggcagctctggttaaccagcgaatttggagtcactacctgctttattgtttattagcatgtcaggcta

SEQ ID NO: 34712 - DNA, 4547 bp, Zea Mays
gcgcaaacaagttcgcatcgccatctcgctcgcagggaggagaggggagtctctaaccctaaccctacccgcccctgtcgccatagccatggctgccggcggagagctctccccctcccccgtgccccccgcatcccccatcaagcattctcgctcacccgacgatgcccagcccgacgcatccccgaagcgtcgcaagcgccaccatcaccgccgccaccaccaccaccgtcggcaccgtcacgccgattccccggtacccgtggcagccgacgaagaggtagaggagggggagatactcgaagatgccaccgccgcctctgccatggaggtcgatgctgagtccgccgccccagaggctttccttgctccggagcactttggtaatggtgctgatacagactcaaacacagatgcaaccaagatgcaagctcctgctctgcctacccttccatcctcagaagatggaaggaggtcacttcatgatgcccctgagtctgaaagaggagatattctttcaagtgatgttgaggacaacaaaggacatgaacgaaggcaaagacaaaaccgttctaaatctccaaagtctagaagggagaaggaaaggaggcacaaagatgaccatcacacttcatcttcaaaagattatcattccagaaatcactctagaacatctccttactcaaggcatcaaagtgaagctcattcgagagatctgtacttgagatatagagagaaaggtgattacactaatggttctcgtgcaaatcttagggatggttctgatcatgagagcaatgatcggaatgggaagtctggcagacatacgactaggacccacgggagtgaaagagaaaggagcagcagccatggtattcatgatagacatggtgacaggtacagtgacagacgtgccagccaggaaaggcatagagacgataggatatatagagacaaaatcgattcattagaagctgctcctaggcacagagaaagaagcaggagtcatagtagatcggatccaagggaaaatacacgtcttcgtgatcaaagcagggagagggaaagacggagtggtagttcaaggcatagggatcatgacagcaagagggatacaagtaaagatcggcatagagaatctgacagggttaacagtgcacatgaaagggatagagggagagaggctagggacagggaatggcatagggtcaagggaagtgaaactcatagagctaaggaaggacgggacaaagttagcgataatgataggcacagggattcaacacgctcaaaatatagcgtgtctgatggttacaaagagaggacaagatctggggagaaaggtagagatgctgaccataaaaaccggaagtttgaagaaatgaaggaaaattctctcaaggaggaagatgaagaggagtaccaagagaaaatagaacagcagttagcaatgcaggaggaagacgaccctgaaaaaatcaaagaggaagcaaggaggaggaaagaagctatcatggcaaagtacaggcagcagcaatcgcagaaagaggatatggaatctaaaccaagtggcaatgatgaagaagtaagagcaatggatggaaacgaagctatacatcagaaagatgatatcgatagcagctttatgggcaatgtcgaagctgaaaataagcatgattcttcagaggtatttgatggcaagacaggctttaatgtgggaaggtctcctgctcacaattatgcttcaactagcacgggagcattcactgatgagaggacaataggtgtttcaggtcttggagagggttctcccaagagtgagagatcagcagacatgttttgtgatgacattttcggagaatcacccaccggaattagaaaattgggaaaggatgatggtttgcatattgagagaaatgctcttcatgacaactgggatgatgcagatgggtactacacttatcggttcggagaattgctggatggccgttatgaaatcatagcagcacatgggaagggtgtgttctcaacagttgtgcgggcaaaagatcttaaagcgagtaaggatgatcctgaagaagttgccatcaaaattattcgcaacaatgagacaatgtacaaggctggtaagcaagaggtttcaatattggaaaaacttgcaagtgcggaccgtgaggacaaacgccactgcgtgcggtttatttctagtttcatgtaccggaaccatctttgcttagtttttgaatctctcaatatgaatcttcgtgaggttttaaagaaatttggtcgtaatattgggcttaaactgactgcggtgagggcatattcaaagcagcttttcatcgccctgaagcacctgaagaactgcaaagttttgcactgtgatataaaaccagataatatgctggtgaatgaggctaagaatgtgctcaaggtatgtgattttggcaacgctatgcttgctggtatgaatgaagttacgccttatcttgtcagccgtttctatcgggcacctgagatcgttcttgggttagcctatgatcaccctttagacatgtggtcagttggttgctgtctatatgagctttataccgggaaagtcttatttcctggtccatcaaacaatgccatgcttcggcttcatatggaattgaagggtccattccctaagaagatgcttcgaaagggtgcctttactatgcaacacttcgatcaagatctcaattttcatgctaccgaggaggatcctgtgacaaaaacggctgtgagaaggttaattttgaacattaaaccaaaggatgttggttctttgtttccgaactttcctggcgaggatccaaaaatgctatccagttttaaggatcttcttgataaaatatttacattagatccagaaaagaggataactgtatcgcaagcacttagccatccatttatcactggcaagtgacacaagatgacgattcctcttgaccttgaacttagcatcttcactgtaaaatacattttgggttcctcttgtctaatcatcaacgtttctgtcttgtgtcctgggagctctgagaaaaagtacatggatgaagcacggaacttcggaagagatggctatctgcagaccttgttgcatgcacttatcatttggatatattctgttgcttgattctgccagggcctctgctatgtgcacattttatatgcttaagggccaacataagaaggtcctgggatggaggtcgctggaccctctactcacttgccatgatttgctgcatgtagataaacactggtgggaagctgaaattttactgtgtaattagtattcaagtgcaggagagatgcgtatcatttcattgagtaaagaggctacagggaaagaaatccaacatagcccgcccctcctccctctaagcacacaagacctgaaaggttctcagcctgttagcaccatggaatgctcttatttgtgattgcctgcagcaccgccatcataacacttgcaatgatgccattaaaaagacatcatactgatgtttccagatctctcaagccaccaagatagtgagttcaggcctttcttgctatatcatttggcacttgtcagcctagctcaaaccggcttgataacttattgatgataggttgaggcgcaatggaaataatccaagcctgccagattggtaaccattctttagactgccatttagtaagtcaggttgaacctattaccatctataaggacttgttcggttagctctcaatccatgtggattgagtgggattggatgggtttgaatcccaaacaagtcaaacttcttctcaattttttccaatcccatccaatccatatgtattaggaataaccgaacaagccctaagtgggcatgcaaatggcattgtgttggattggaccattgtaaacggtttctcgtgttggatgcaagcattctgtagttgttttgagttgttttttattatctgtagtacttgctgggtaaatctaaagaactggatttgtgtcaggcctggttcaattgatatggaacacttaaactgattagtttggtccctaggggcgaaggcctatgcatttggtgcctgcttttggatcattgtgcaattagagttgccaacatgagtgggaggaaaatattagtaacatccttgctggcatactgccaaagtagaagctacctcttgtagtatgccatttgtttgctcccttcatttattttgtcgaacacggttcacaggtacacaaagaaaaacaaccaaactccacacctgaactgaacaagattcactcagaagtgcagaagccacacactagaaacccgcagacactatgtgtattataagaaaaaaaatcctagtcgaaattgtttatttttgttcatgagctttgcatgcatgtcttgaagtagcctgggacgtttggtttccacaaatctctacgatatagaacatagcaaacgtcttcctggcagctctggttaaccagcgaatttggagtcactacctgctttattgtttattagcatgtcaggcta

SEQ ID NO: 34713 - DNA, 4349 bp, Zea Mays
gttcaatactatgactgatttgatattagatagctctgccaccatcgactcggtcccaagcgcaaacaagttcgcatcgccatctcgctcgcagggaggagaggggagtctctaaccctaaccctacccgcccctgtcgccatagccatggctgccggcggagagctctccccctcccccgtgccccccgcatcccccatcaagcattctcgctcacccgacgatgcccagcccgacgcatccccgaagcgtcgcaagcgccaccatcaccgccgccaccaccaccaccgtcggcaccgtcacgccgattccccggtacccgtggcagccgacgaagaggtagaggagggggagatactcgaagatgccaccgccgcctctgccatggaggtcgatgctgagtccgccgccccagaggctttccttgctccggagcactttggtaatggtgctgatacagactcaaacacagatgcaaccaagatgcaagctcctgctctgcctacccttccatcctcagaagatggaaggaggtcacttcatgatgcccctgagtctgaaagaggagatattctttcaagtgatgttgaggacaacaaaggacatgaacgaaggcaaagacaaaaccgttctaaatctccaaagtctagaagggagaaggaaaggaggcacaaagatgaccatcacacttcatcttcaaaagattatcattccagaaatcactctagaacatctccttactcaaggcatcaaagtgaagctcattcgagagatctgtacttgagatatagagagaaaggtgattacactaatggttctcgtgcaaatcttagggatggttctgatcatgagagcaatgatcggaatgggaagtctggcagacatacgactaggacccacgggagtgaaagagaaaggagcagcagccatggtattcatgatagacatggtgacaggtacagtgacagacgtgccagccaggaaaggcatagagacgataggatatatagagacaaaatcgattcattagaagctgctcctaggcacagagaaagaagcaggagtcatagtagatcggatccaagggaaaatacacgtcttcgtgatcaaagcagggagagggaaagacggagtggtagttcaaggcatagggatcatgacagcaagagggatacaagtaaagatcggcatagagaatctgacagggttaacagtgcacatgaaagggatagagggagagaggctagggacagggaatggcatagggtcaagggaagtgaaactcatagagctaaggaaggacgggacaaagttagcgataatgataggcacagggattcaacacgctcaaaatatagcgtgtctgatggttacaaagagaggacaagatctggggagaaaggtagagatgctgaccataaaaaccggaagtttgaagaaatgaaggaaaattctctcaaggaggaagatgaagaggagtaccaagagaaaatagaacagcagttagcaatgcaggaggaagacgaccctgaaaaaatcaaagaggaagcaaggaggaggaaagaagctatcatggcaaagtacaggcagcagcaatcgcagaaagaggatatggaatctaaaccaagtggcaatgatgaagaagtaagagcaatggatggaaacgaagctatacatcagaaagatgatatcgatagcagctttatgggcaatgtcgaagctgaaaataagcatgattcttcagaggtatttgatggcaagacaggctttaatgtgggaaggtctcctgctcacaattatgcttcaactagcacgggagcattcactgatgagaggacaataggtgtttcaggtcttggagagggttctcccaagagtgagagatcagcagacatgttttgtgatgacattttcggagaatcacccaccggaattagaaaattgggaaaggatgatggtttgcatattgagagaaatgctcttcatgacaactgggatgatgcagatgggtactacacttatcggttcggagaattgctggatggccgttatgaaatcatagcagcacatgggaagggtgtgttctcaacagttgtgcgggcaaaagatcttaaagcgagtaaggatgatcctgaagaagttgccatcaaaattattcgcaacaatgagacaatgtacaaggctggtaagcaagaggtttcaatattggaaaaacttgcaagtgcggaccgtgaggacaaacgccactgcgtgcggtttatttctagtttcatcttttcatcgccctgaagcacctgaagaactgcaaagttttgcactgtgatataaaaccagataatatgctggtgaatgaggctaagaatgtgctcaaggtatgtgattttggcaacgctatgcttgctggtatgaatgaagttacgccttatcttgtcagccgtttctatcgggcacctgagatcgttcttgggttagcctatgatcaccctttagacatgtggtcagttggttgctgtctatatgagctttataccgggaaagtcttatttcctggtccatcaaacaatgccatgcttcggcttcatatggaattgaagggtccattccctaagaagatgcttcgaaagggtgcctttactatgcaacacttcgatcaagatctcaattttcatgctaccgaggaggatcctgtgacaaaaacggctgtgagaaggttaattttgaacattaaaccaaaggatgttggttctttgtttccgaactttcctggcgaggatccaaaaatgctatccagttttaaggatcttcttgataaaatatttacattagatccagaaaagaggataactgtatcgcaagcacttagccatccatttatcactggcaagtgacacaagatgacgattcctcttgaccttgaacttagcatcttcactgtaaaatacattttgggttcctcttgtctaatcatcaacgtttctgtcttgtgtcctgggagctctgagaaaaagtacatggatgaagcacggaacttcggaagagatggctatctgcagaccttgttgcatgcacttatcatttggatatattctgttgcttgattctgccagggcctctgctatgtgcacattttatatgcttaagggccaacataagaaggtcctgggatggaggtcgctggaccctctactcacttgccatgtattcaagtgcaggagagatgcgtatcatttcattgagtaaagaggctacagggaaagaaatccaacatagcccgcccctcctccctctaagcacacaagacctgaaaggttctcagcctgttagcaccatggaatgctcttatttgtgattgcctgcagcaccgccatcataacacttgcaatgatgccattaaaaagacatcatactgatgtttccagatctctcaagccaccaagatagttgaggcgcaatggaaataatccaagcctgccagattggtaaccattctttagactgccatttagtaagtcaggttgaacctattaccatctataaggacttgttcggttagctctcaatccatgtggattgagtgggattggatgggtttgaatcccaaacaagtcaaacttcttctcaattttttccaatcccatccaatccatatgtattaggaataaccgaacaagccctaagtgggcatgcaaatggcattgtgttggattggaccattgtaaacggtttctcgtgttggatgcaagcattctgtagttgttttgagttgttttttattatctgtagtacttgctgggtaaatctaaagaactggatttgtgtcaggcctggttcaattgatatggaacacttaaactgattagtttggtccctaggggcgaaggcctatgcatttggtgcctgcttttggatcattgtgcaattagagttgccaacatgagtgggaggaaaatattagtaacatccttgctggcatactgccaaagtagaagctacctcttgtagtatgccatttgtttgctcccttcatttattttgtcgaacacggttcacaggtacacaaagaaaaacaaccaaactccacacctgaactgaacaagattcactcagaagtgcagaagccacacactagaaacccgcagacactatgtgtattataagaaaaaaaatcctagtcgaaattgtttatttttgttcatgagctttgcatgcatgtcttgaagtagcctgggacgtttggtttccacaaatctctacgatatagaacatagcaaacgtcttcctggcagctctggttaaccagcgaatttggagtcactacctgctttattgtttattagcatgtcaggcta

SEQ ID NO: 34714 - DNA, 1594 bp, Zea Mays
gcgcaaacaagttcgcatcgccatctcgctcgcagggaggagaggggagtctctaaccctaaccctacccgcccctgtcgccatagccatggctgccggcggagagctctccccctcccccgtgccccccgcatcccccatcaagcattctcgctcacccgacgatgcccagcccgacgcatccccgaagcgtcgcaagcgccaccatcaccgccgccaccaccaccaccgtcggcaccgtcacgccgattccccggtacccgtggcagccgacgaagaggtagaggagggggagatactcgaagatgccaccgccgcctctgccatggaggtcgatgctgagtccgccgccccagaggctttccttgctccggagcactttggtaatggtgctgatacagactcaaacacagatgcaaccaagatgcaagctcctgctctgcctacccttccatcctcagaagatggaaggaggtcacttcatgatgcccctgagtctgaaagaggagatattctttcaagtgatgttgaggacaacaaaggacatgaacgaaggcaaagacaaaaccgttctaaatctccaaagtctagaagggagaaggaaaggaggcacaaagatgaccatcacacttcatcttcaaaagattatcattccagaaatcactctagaacatctccttactcaaggcatcaaagtgaagctcattcgagagatctgtacttgagatatagagagaaaggtgattacactaatggttctcgtgcaaatcttagggatggttctgatcatgagagcaatgatcggaatgggaagtctggcagacatacgactaggacccacgggagtgaaagagaaaggagcagcagccatggtattcatgatagacatggtgacaggtacagtgacagacgtgccagccaggaaaggcatagagacgataggatatatagagacaaaatcgattcattagaagctgctcctaggcacagagaaagaagcaggagtcatagtagatcggatccaagggaaaatacacgtcttcgtgatcaaagcagggagagggaaagacggagtggtagttcaaggcatagggatcatgacagcaagagggatacaagtaaagatcggcatagagaatctgacagggttaacagtgcacatgaaagggatagagggagagaggctagggacagggaatggcatagggtcaagggaagtgaaactcatagagctaaggaaggacgggacaaagttagcgataatgataggcacagggattcaacacgctcaaaatatagcgtgtctgatggttacaaagagaggacaagatctggggagaaaggtagagatgctgaccataaaaaccggaagtttgaagaaatgaaggaaaattctctcaaggaggaagatgaagaggagtaccaagagaaaatagaacagcagttagcaatgcaggaggaagacgaccctgaaaaaatcaaagaggaagcaaggaggaggaaagaagctatcatggcaaagtacaggcagcagcaatcgcagaaagaggatatggaatctaaaccaagtggcaatgatgaagtgttatctttg

SEQ ID NO: 34715 - DNA, 1030 bp, Zea Mays
cctttgcaactacacgcaccttggttgtggtgtctaccaatagtccaaaatcatataaacactatgtgtgggaagttatggctggtggtagctctttatgtcatcaaggaagagattgatcctcagaaaatgcttacacgtggaactcaaattacatttttttctaaatgcgcgcaaagacattatttgaagttttctcttttatttggctgattactatcacagaacagccagatggttgacaaagccatccaggcaaactctagcgataatgatgatgaaaaggtatgcatgttgaatcaagtgataggatgtgtaggctcatattctcgtggcgtgcaacttccatctgacctgatatcaaactgcaccacaacaattctttcaatcaaggtagacatcttatagtcgtagtgaacgagcataagccaagctaggaacaaacaaaaaggagaaaatgttttgtgtagaagatccagtacaagagcatcatgactcaaggcaccaataataggaaagggcagagactggaacaactgatttgaggctaatggctgttggaggtgcggatggcgacagggtagatgaagctattgtggaatcgacaggacgcgtaggtgtgccagatgtgccgcgacatcgtcgccctcagctgcaaccactaggacaccaccgcatcagggacaatctgaatcgaataaccaacagaaatgtcctgtatccagttgatcaacaccaccttgatgatccacatgttaaagccaacttactctttcaggcacatttctccaaagcagaactgccaataagcgactatgtcactaacttgaaattagttcttgatcagagcatacatatcatataggcaatgattgatgtatgcaccaatagtggatggcttatgcgtgcattgacttgtagatgatcatacatgtgaattgcattggatcaacttttctttttttcaactatataaaaatataaaaacgagtctaaatccttcattggagaaggattgcattggttcatc

SEQ ID NO: 34716 - DNA, 2053 bp, Zea Mays
tggactacgacgttcacaagatctggaagatgaacaacctatgggtaacatttctcttcctagcctccgtttcgctctgttgttccattcttatcaagacactgcagttgtcatacctcaatcggtgaaggctccaaggagttccctccccactaggagcttagaagaagagacagggaatggtgatttggatgcagttgctaatgtgaccaagcaaactgcgggtgggagtgtgtgtgcaaaatcaggagaggataaacatgcagaagtgagcggtgaagagaatgttgaggctataaagcctgtggaggcaagttctctagacgttctagctgcaagatggttccaatgagcttgagcaagcacgtttcatcaggattggaattaaatatattgctgcgatgtgtgatagatcatcggcgaggcaagatactcggtggaggacatcgtgaattcatataatcaatccctggcataatgcctcatcattgggtaataatagtacttgttttcttatgtttatctttcatactctggaactgttgagctcaggtatgagtactcctttttaggataggagagaggatactactctacaactttcacatttaggaagcataaaaggaaacaagcagagatcgattatatgtgtatctaatcattatgtagttgataaaaacatgcctttgagtgatgatttgtgatgtaataacctcccatttttagaaatatcaaccaataagtgtttacttcccttccattttttagatttgtgtggtgcaaacatattaataatatatagatatagttgcatacctacaaaaacatcaaatatatacacagtgttggagacccttttgtccagttgagcatacgccattgaagctgcaggccgcagcaggattactaaggatacacaactgaagttacttgcataggcgtggttggtgcaaggtgattcttccctacgacggctgagccaacagcgaactgggaggtgttgcggctcctttgcaactacacgcaccttggttgtggtgtctaccaatagtccaaaatcatataaacactatgtgtgggaagttatggctggtggtagctctttatgtcatcaaggaagagattgatcctcagaaaatgcttacacgtggaactcaaattacatttttttctaaatgcgcgcaaagacattatttgaagttttctcttttatttggctgattactatcacagaacagccagatggttgacaaagccatccaggcaaactctagcgataatgatgatgaaaaggtatgcatgttgaatcaagtgataggatgtgtaggctcatattctcgtggcgtgcaacttccatctgacctgatatcaaactgcaccacaacaattctttcaatcaaggtagacatcttatagtcgtagtgaacgagcataagccaagctaggaacaaacaaaaaggagaaaatgttttgtgtagaagatccagtacaagagcatcatgactcaaggcaccaataataggaaagggcagagactggaacaactgatttgaggctaatggctgttggaggtgcggatggcgacagggtagatgaagctattgtggaatcgacaggacgcgtaggtgtgccagatgtgccgcgacatcgtcgccctcagctgcaaccactaggacaccaccgcatcaggcacgaagacaatgaggacaatctgaatcgaataaccaacagaaatgtcctgtatccagttgatcaacaccaccttgatgatccacatgttaaagccaacttactctttcaggcacatttctccaaagcagaactgccaataagcgactatgtcactaacttgaaattagttcttgatcagagcatacatatcatataggcaatgattgatgtatgcaccaatagtggatggcttatgcgtgcattgacttgtagatgatcatacatgtgaattgcattggatcaacttttctttttttcaactatataaaaatataaaaacgagtctaaatccttcattggagaaggattgcattggttcatc

SEQ ID NO: 34717 - DNA, 1055 bp, Zea Mays
cgcggcaccacgctcagcgccagcagcttctcccgtgcgccgtcttgttttgcttcgcattgccggctttcttgcctccagcagcgaacgcactgccatccttgcttggcctcacatcctccgcaactgggcgtcaccgggacgctatgcacgctgctcccacatctggagctcgcccaccctactcgctcatcgtctgaccatgcgcactcgctgtcggtcgcgctcggctgctcgtcgttgtcctgcctcctcgtccacgccgcggtcgtcattgacccactccaacctcgtctgcgttgcgacctccatcctgcctgctcgcgttttccccctctgctcaaacgtcggcgcccgtgacgaagaacacctagaagaagtggtgtttgaagaagaagcctgctccaagtactgttgatccaatggtggagtcccatctaactgtaaaaaggttttgaatcttctctgcaacaaggcaagccccgatgcatttgccctttccttgtattttaaatgctttttcaccttatctgatgcattaggtgatagaatttgtgtgatgaacaattgatgcattaccattccttggaaactcctttgttggggaccttcggcgtccgaaggtcctcaaaaacaggatttaacagtattcctgcagtacaatgtgtaaacaggtatcctcggactaaagtcggcattgcagtggaccggaataatacgaaggttgactcagagccgaaggtgcgagcaggaaagcttcggcgcgacagcaaagagtggaaccgacttaaagatgaaaaggctattcagacctcaatagactactatagagttattatcaaatgtaaagggcatgaatgtaattttgtaagggctgtgtcccgtgtctataaataggtgaacagtatccccatactgttcacgctgacttggcattcgctttttgcgtcacgcttgtactgtcatttccttccgattgaaggtacacttgtagttcaataatatttttgtttatgttcaataataataaatgattgttcatgttttcttttaca

SEQ ID NO: 34718 - DNA, 1197 bp, Zea Mays
gccctgatcgccgccgcttggagtcctgatctggtcctcgttcgtcgggacttaggaaatccaagtaacggatagttcccaccggcagaccgagccgcgcctccattcttgtacgaaaccatggctcgcaaaaaggcaaccgtggagcagctccggacgctgaacaaggttcgtgaattcaagcgaaggagaaacatgcacaaggcagcaggagcaggaccgggcaacaagggagaaaatgtttgtgcaatttgtgacgatggtggtaatctaacttgctgcgaaggttgttgtcagaggtctttccaccttgataacgaacataattgcatcaagacacttgggctgactatacaagaggcaaagaacataatcgagaaggaagattttatatgcaagaactgccagtacaagcaacatcagtgtttcatttgtggatcgttagggtcttctgatgacactgacacatcgtcacagcaggtattccaatgtgagcatgacgattgtgcacgcttttaccacccaaaatgtgttgctcaaatgctatatccagatagccaagaactgttcgagctccacgtggctgccggagagagcttcacttgtcctatgcatgaatgtattgtgtgcaaggaagtagataataagaaagataagacgttattggattttgttaaccttttttacaggaagcatgagatcgtaagagaactacaaactcctgcaaggaatcatatcgtttttcctgaatccaatgtgctgaaaacgtttcaagctctttatgctcaaagagaggcgcctgaccactcgtcatcgaagcaaacccactcgtcccctccaccggctgcaagagaccagaatcagtgctactgttctagccctttatgctcatttgctccaagttccgtgttcatgcgtccgcatccaggctcctctggttggctcgatgactgactaactaattaactatacggcccatctgtcccctgtagagagaaaccacctgttacaagtccttttgcaaataattggatgtagacaagctagtgttagccaaacgacaaaatcctatttttttttaatataacctgatttttttattgttacagttactagcaaacatgtttctacgaacgagagaaaaaatattaaacattcactataaatgataatggaatggcacatattgattatcca

SEQ ID NO: 34719 - DNA, 1351 bp, Zea Mays
ctttgcgttctccaaaccgtaccagcagcgtgccctgatcgccgccgcttggagtcctgatctggtcctcgttcgtcgggacttaggaaatccaagtaacggatagttcccaccggcagaccgagccgcgcctccattcttgtacgaaaccatggctcgcaaaaaggcaaccgtggagcagctccggacgctgaacaaggttcgtgaattcaagcgaaggagaaacatgcacaaggcagcaggagcaggaccgggcaacaagggagaaaatgtttgtgcaatttgtgacgatggtggtaatctaacttgctgcgaaggttgttgtcagaggtctttccaccttgataacgaacataattgcatcaagacacttgggctgactatacaagaggcaaagaacataatcgagaaggaagattttatatgcaagaactgccagtacaagcaacatcagtgtttcatttgtggatcgttagggtcttctgatgacactgacacatcgtcacagcaggtattccaatgtgagcatgacgattgtgcacgcttttaccacccaaaatgtgttgctcaaatgctatatccagatagccaagaactgttcgagctccacgtggctgccggagagagcttcacttgtcctatgcatgaatgtattgtgtgcaaggaagtagataataagaaagataagagtatgcagtttgcagtatgcagacgctgcccaactgtttaccaccggaagtgcttgccaagagatatcattttcaaaccgaagaaaggtcgcaggggtcccatgcgaagggcgtggaagaacatgcttcccgatcgaattctgatattctgcatgaagcatgagatcgtaagagaactacaaactcctgcaaggaatcatatcgtttttcctgaatccaatgtgctgaaaacgtttcaagctctttatgctcaaagagaggcgcctgaccactcgtcatcgaagcaaacccactcgtcccctccaccggctgcaagagaccagaatcagtgctactgttctagccctttatgctcatttgctccaagttccgtgttcatgcgtccgcatccaggctcctctggttggctcgatgactgactaactaattaactatacggcccatctgtcccctgtagagagaaaccacctgttacaagtccttttgcaaataattggatgtagacaagctagtgttagccaaacgacaaaatcctatttttttttaatataacctgatttttttattgttacagttactagcaaacatgtttctacgaacgagagaaaaaatattaaacattcactataaatgataatggaatggcacatattgattatcca

SEQ ID NO: 34720 - DNA, 1352 bp, Zea Mays
ccctgctttgcgttctccaaaccgtaccagcagcgtgccctgatcgccgccgcttggagtcctgatctggtcctcgttcgtcgggacttaggaaatccaagtaacggatagttcccaccggcagaccgagccgcgcctccattcttgtacgaaaccatggctcgcaaaaaggcaaccgtggagcagctccggacgctgaacaaggttcgtgaattcaagcgaaggagaaacatgcacaaggcagcaggagcaggaccgggcaacaagggagaaaatgtttgtgcaatttgtgacgatggtggtaatctaacttgctgcgaaggttgttgtcagaggtctttccaccttgataacgaacataattgcatcaagacacttgggctgactatacaagaggcaaagaacataatcgagaaggaagattttatatgcaagaactgccagtacaagcaacatcagtgtttcatttgtggatcgttagggtcttctgatgacactgacacatcgtcacagcaggtattccaatgtgagcatgacgattgtgcacgcttttaccacccaaaatgtgttgctcaaatgctatatccagatagccaagaactgttcgagctccacgtggctgccggagagagcttcacttgtcctatgcatgaatgtattgtgtgcaaggaagtagataataagaaagataagagtatgcagtttgcagtatgcagacgctgcccaactgtttaccaccggaagtgcttgccaagagatatcattttcaaaccgaagaaaggtcgcaggggtcccatgcgaagggcgtggaagaacatgcttcccgatcgaattctgatattctgcatcatgagatcgtaagagaactacaaactcctgcaaggaatcatatcgtttttcctgaatccaatgtgctgaaaacgtttcaagctctttatgctcaaagagaggcgcctgaccactcgtcatcgaagcaaacccactcgtcccctccaccggctgcaagagaccagaatcagtgctactgttctagccctttatgctcatttgctccaagttccgtgttcatgcgtccgcatccaggctcctctggttggctcgatgactgactaactaattaactatacggcccatctgtcccctgtagagagaaaccacctgttacaagtccttttgcaaataattggatgtagacaagctagtgttagccaaacgacaaaatcctatttttttttaatataacctgatttttttattgttacagttactagcaaacatgtttctacgaacgagagaaaaaatattaaacattcactataaatgataatggaatggcacatattgattatcca

SEQ ID NO: 34721 - DNA, 562 bp, Zea Mays
ggagcctaacatggagacgaggagcctatctcccttagccaagaatggcttgcctatctccattattttgttcatcgcaggaagcccttccgtgatggatgaaatgtggatgatggcatccattcttggctaagtgagtaattctcttccaccatgctaggctttccctctttttaaattctcagttttccttatgccaaatataaactactactagtagtagttaaatggtgtacgcatgaaggcgaagctaggaagcttcaaccctgtggtctaagcgcgcagcaacaaggaaacgagggagaagtcatggaaggcttgatcagcacgtctgcaaaggcaaagacgacggtgtccctacaggatcatgtaatctatgtgtataggatctggggacatgtttgtaattttacacgatgtggtactgttgctcaccactattgggacggagataaagagacttgaatcgctctatctctgaagttgtatcttcatgttattatctcagctcccgaaggtacacttgtagtcatttgtaacttaaaaagaataataaagggaa

SEQ ID NO: 34722 - DNA, 2011 bp, Zea Mays
ttttctacttctacagaagcatcccattagtattaatcacggggtattgatcatttatgtgtttctgaatagttttacttatatgcatttgtcatatcgatactttttttttgggaaaacgcaggagaactgcgcctcaatatattaagaagaagagataaatccagatcaaagagatctggacaaattacaaggcctcctcatgggggccagaaacacagcaaactgaaaaaatccatcaaactaaacaactccctagtctccaggaattagggcagcaaggtatgaaagacccttagccccagccatctcccaagactgcctctcctccctggctaaattaatggacagatctaaactaggagtacaaccatcaaaaacacaactattaccatcaaagacacaactgttaagtcatatcgatactttatagtccatttcaatgtgaaacatttaaacaccgttcaatccttacaattgttcaggtcgttgcacctgctgtcacttcgtgatattaagatgcagtcaccatttgctcggatgattattcacactcttctcgagtcgtcatgtgatttacacacacttgagatatcagaaaacaatgtgggttgacatgaaaaatatattcttaatttccttttacttattttctatctggtaaattggttgttttttgtagattgctggctggctttcggaattgaacaaatgttctacaaacttattagcgctgaaatcagatatttttatgaactccctgtctgttcttaacctgagggaaaataatttgcaaaaggatgatgttgtagatcttcacaaaattctaataaaaatgcctaacttaagagatttagatataagtggcaatccagtcatggatgaaggtatcagatcattgatccctttcatttcatggtctattcaaaaggaaaatccacttctgagattaacagttgagaactctgcattggccagattcttgggttcacatgtacgggctttaaatgctacagatatcggcttgggaacagtaggcttccaaatacttgaggaaacattgccaacagaagtagctctttcccacatcaacatcagtaagaatcgtggtgggatcagagcagcatattttgtttccagattaatatgtcgagcaccagaccttgtctcagtcaatgcagcagggaaccttttaccacctgaatcattggaagtcatctgtaactccttgaagcaagggacttgtaatttggagcgagtggacctgactggcaacatgcatttatcaagcaatatttttcctgcattccttgaattcaagaagcatggaaagccaattctggtagtaccaccaaacttgagcacttctgctccatatgatgatgacccatgactactatgtaccgtataagccctagtgctgctcaagtcacttcagttggaactaaataaatagtgatagtatttttttggatcattcccaagaatcctaaccactagatcaaaacacaacacaaattgtacatctgtttagattcgacacggctttcgtcggtgaagctttgcgctagggcagcgacggtcgggaaagcgagcttgatgtcgacggtggactttctgttgctgacagacttccctctagatcggttaaggtttgaggtggagatcgaaaatgattgtgaatcttgtacctttaggtgtcggcctccacctctttatttatagggctacgcaacagatgctcaacaaccttgatgctctcgatcagggcgtgaggtcaggggtctagttttcggttgggtcaagttgggtcaactagtggagatcaattctaacattttcccctttaatctcattttataccttcagctttatacctttaatttttttgatattccattatagataagtgcatagagcatgtttcatcgtcacgattaatcaccgatagacttagcaactacagtacatatctctatcctgaaatagattctttaactttgggcctttt

SEQ ID NO: 34723 - DNA, 2489 bp, Zea Mays
gttcgtcaggaaccagagaaaataaaaaacaacgattttaccatctttgccaaaaagaagttaatggtgcatgtttgcttctgagctggcatgcagagacactgctttctcttgaattcatccattgtcagctttatcctaccgtcatggataaaatttgcatgagtgtgtacctgaagggatctcaaagccatggaatccaacaatttagtattaagtcgtcacaaatctgtgaaaccaagcctctgaccatctcttctggtctgttcaaaattttgtcatctggcaagtaagctgcatgcccttcaatattcacaattgaaatattatggattgaaaaacaaatgaaccatacttttagtttattttttctacttctacagaagcatcccattagtattaatcacggggtattgatcatttatgtgtttctgaatagttttacttatatgcatttgtcatatcgatactttttttttgggaaaacgcaggagaactgcgcctcaatatattaagaagaagagataaatccagatcaaagagatctggacaaattacaaggcctcctcatgggggccagaaacacagcaaactgaaaaaatccatcaaactaaacaactccctagtctccaggaattagggcagcaaggtatgaaagacccttagccccagccatctcccaagactgcctctcctccctggctaaattaatggacagatctaaactaggagtacaaccatcaaaaacacaactattaccatcaaagacacaactgttaagtcatatcgatactttatagtccatttcaatgtgaaacatttaaacaccgttcaatccttacaattgttcaggtcgttgcacctgctgtcacttcgtgatattaagatgcagtcaccatttgctcggatgattattcacactcttctcgagtcgtcatgtgatttacacacacttgagatatcagaaaacaatgtgggttgacatgaaaaatatattcttaatttccttttacttattttctatctggtaaattggttgttttttgtagattgctggctggctttcggaattgaacaaatgttctacaaacttattagcgctgaaatcagatatttttatgaactccctgtctgttcttaacctgagggaaaataatttgcaaaaggatgatgttgtagatcttcacaaaattctaataaaaatgcctaacttaagagatttagatataagtggcaatccagtcatggatgaaggtatcagatcattgatccctttcatttcatggtctattcaaaaggaaaatccacttctgagattaacagttgagaactgtgagttgtccagtattggtgtgattatacttctggagtgcctcacaaatgcgaagcaactccttgatgtgctatctattgcagacaatcatctagggagttctgtggcagctgcattggccagattcttgggttcacatgtacgggctttaaatgctacagatatcggcttgggaacagtaggcttccaaatacttgaggaaacattgccaacagaagtagctctttcccacatcaacatcagtaagaatcgtggtgggatcagagcagcatattttgtttccagattaatatgtcgagcaccagaccttgtctcagtcaatgcagcagggaaccttttaccacctgaatcattggaagtcatctgtaactccttgaagcaagggacttgtaatttggagcgagtggacctgactggcaacatgcatttatcaagcaatatttttcctgcattccttgaattcaagaagcatggaaagccaattctggtagtaccaccaaacttgagcacttctgctccatatgatgatgacccatgactactatgtaccgtataagccctagtgctgctcaagtcacttcagttggaactaaataaatagtgatagtatttttttggatcattcccaagaatcctaaccactagatcaaaacacaacacaaattgtacatctgtttagattcgacacggctttcgtcggtgaagctttgcgctagggcagcgacggtcgggaaagcgagcttgatgtcgacggtggactttctgttgctgacagacttccctctagatcggttaaggtttgaggtggagatcgaaaatgattgtgaatcttgtacctttaggtgtcggcctccacctctttatttatagggctacgcaacagatgctcaacaaccttgatgctctcgatcagggcgtgaggtcaggggtctagttttcggttgggtcaagttgggtcaactagtggagatcaattctaacattttcccctttaatctcattttataccttcagctttatacctttaatttttttgatattccattatagataagtgcatagagcatgtttcatcgtcacgattaatcaccgatagacttagcaactacagtacatatctctatcctgaaatagattctttaactttgggcctttt

SEQ ID NO: 34724 - DNA, 1891 bp, Zea Mays
ctgctttctgtcgagccgttgccagagaagcagcctcgctgccatgttcgtcaggaaccagagaaaataaaaaacaacgattttaccatctttgccaaaaagaagttaatggtgcatgtttgcttctgagctggcatgcagagacactgctttctcttgaattcatccattgtcagctttatcctaccgtcatggataaaatttgcatgagtgtgtacctgaagggatctcaaagccatggaatccaacaatttagtattaagtcgtcacaaatctgtgaaaccaagcctctgaccatctcttctggtctgttcaaaattttgtcatctggcaagtcgttgcacctgctgtcacttcgtgatattaagatgcagtcaccatttgctcggatgattattcacactcttctcgagtcgtcatgtgatttacacacacttgagatatcagaaaacaatattgctggctggctttcggaattgaacaaatgttctacaaacttattagcgctgaaatcagatatttttatgaactccctgtctgttcttaacctgagggaaaataatttgcaaaaggatgatgttgtagatcttcacaaaattctaataaaaatgcctaacttaagagatttagatataagtggcaatccagtcatggatgaaggtatcagatcattgatccctttcatttcatggtctattcaaaaggaaaatccacttctgagattaacagttgagaactgtgagttgtccagtattggtgtgattatacttctggagtgcctcacaaatgcgaagcaactccttgatgtgctatctattgcagacaatcatctagggagttctgtggcagctgcattggccagattcttgggttcacatgtacgggctttaaatgctacagatatcggcttgggaacagtaggcttccaaatacttgaggaaacattgccaacagaagtagctctttcccacatcaacatcagaatcgtggtgggatcagagcagcatattttgtttccagattaatatgtcgagcaccagaccttgtctcagtcaatgcagcagggaaccttttaccacctgaatcattggaagtcatctgtaactccttgaagcaagggacttgtaatttggagcgagtggacctgactggcaacatgcatttatcaagcaatatttttcctgcattccttgaattcaagaagcatggaaagccaattctggtagtaccaccaaacttgagcacttctgctccatatgatgatgacccatgactactatgtaccgtataagccctagtgctgctcaagtcacttcagttggaactaaataaatagtgatagtatttttttggatcattcccaagaatcctaaccactagatcaaaacacaacacaaattgtacatctgtttagattcgacacggctttcgtcggtgaagctttgcgctagggcagcgacggtcgggaaagcgagcttgatgtcgacggtggactttctgttgctgacagacttccctctagatcggttaaggtttgaggtggagatcgaaaatgattgtgaatcttgtacctttaggtgtcggcctccacctctttatttatagggctacgcaacagatgctcaacaaccttgatgctctcgatcagggcgtgaggtcaggggtctagttttcggttgggtcaagttgggtcaactagtggagatcaattctaacattttcccctttaatctcattttataccttcagctttatacctttaatttttttgatattccattatagataagtgcatagagcatgtttcatcgtcacgattaatcaccgatagacttagcaactacagtacatatctctatcctgaaatagattctttaactttgggcctttt

SEQ ID NO: 34725 - DNA, 2447 bp, Zea Mays
atgaagggcggcggcggcacgacccgcacacggaagaagaacgacgacagcggactgctgaagaatggcgacacgatgcagacgacgcgccggcggtccgcgacggcggctgcagcaggggagatccgggacgccgtgacggaggatgggggagatgcttggaaacgccatggtgaaacgcttctgttcatcgacgtggaatctcgacctgcacaagtacgagcaaacctcccccaaatgccaaaaggaactaacaagaccgaaatcaggggcaattacctccatccaccaagttgctcaagctgttcagcgtcatcacccgcacaggattccctgctttctgtcgagccgttgccagagaagcagcctcgctgccatgttcgtcaggaaccagagaaaataaaaaacaacgattttaccatctttgccaaaaagaagtaataatttcccagttttatttttgcatgttctgtttaagtttgaatattaaaacaaactgatattgttagtcattaacttgtgtcagtagaaccagtctgcatgagatcgagttgtccatgtgtgctctttttagtgggatgatagttaatggtgcatgtttgcttctgagctggcatgcagagacactgctttctcttgaattcatccattgtcagctttatcctaccgtcatggataaaatttgcatgagtgtgtacctgaagggatctcaaagccatggaatccaacaatttagtattaagtcgtcacaaatctgtgaaaccaagcctctgaccatctcttctggtctgttcaaaattttgtcatctggtcgttgcacctgctgtcacttcgtgatattaagatgcagtcaccatttgctcggatgattattcacactcttctcgagtcgtcatgtgatttacacacacttgagatatcagaaaacaatgtgggttgacatgaaaaatatattcttaatttccttttacttattttctatctggtaaattggttgttttttgtagattgctggctggctttcggaattgaacaaatgttctacaaacttattagcgctgaaatcagatatttttatgaactccctgtctgttcttaacctgagggaaaataatttgcaaaaggatgatgttgtagatcttcacaaaattctaataaaaatgcctaacttaagagatttagatataagtggcaatccagtcatggatgaaggtatcagatcattgatccctttcatttcatggtctattcaaaaggaaaatccacttctgagattaacagttgagaactgtgagttgtccagtattggtgtgattatacttctggagtgcctcacaaatgcgaagcaactccttgatgtgctatctattgcagacaatcatctagggagttctgtggcagctgcattggccagattcttgggttcacatgtacgggctttaaatgctacagatatcggcttgggaacagtaggcttccaaatacttgaggaaacattgccaacagaagtagctctttcccacatcaacatcagtaagaatcgtggtgggatcagagcagcatattttgtttccagattaatatgtcgagcaccagaccttgtctcagtcaatgcagcagggaaccttttaccacctgaatcattggaagtcatctgtaactccttgaagcaagggacttgtaatttggagcgagtggacctgactggcaacatgcatttatcaagcaatatttttcctgcattccttgaattcaagaagcatggaaagccaattctggtagtaccaccaaacttgagcacttctgctccatatgatgatgacccatgactactatgtaccgtataagccctagtgctgctcaagtcacttcagttggaactaaataaatagtgatagtatttttttggatcattcccaagaatcctaaccactagatcaaaacacaacacaaattgtacatctgtttagattcgacacggctttcgtcggtgaagctttgcgctagggcagcgacggtcgggaaagcgagcttgatgtcgacggtggactttctgttgctgacagacttccctctagatcggttaaggtttgaggtggagatcgaaaatgattgtgaatcttgtacctttaggtgtcggcctccacctctttatttatagggctacgcaacagatgctcaacaaccttgatgctctcgatcagggcgtgaggtcaggggtctagttttcggttgggtcaagttgggtcaactagtggagatcaattctaacattttcccctttaatctcattttataccttcagctttatacctttaatttttttgatattccattatagataagtgcatagagcatgtttcatcgtcacgattaatcaccgatagacttagcaactacagtacatatctctatcctgaaatagattctttaactttgggcctttt

SEQ ID NO: 34726 - DNA, 1954 bp, Zea Mays
atgaagggcggcggcggcacgacccgcacacggaagaagaacgacgacagcggactgctgaagaatggcgacacgatgcagacgacgcgccggcggtccgcgacggcggctgcagcaggggagatccgggacgccgtgacggaggatgggggagatgcttggaaacgccatggtgaaacgcttctgttcatcgacgtggaatctcgacctgcacaatcattaacttgtgtcagtagaaccagtctgcatgagatcgagttgtccatgtgtgctctttttagtgggatgatagttaatggtgcatgtttgcttctgagctggcatgcagagacactgctttctcttgaattcatccattgtcagctttatcctaccgtcatggataaaatttgcatgagtgtgtacctgaagggatctcaaagccatggaatccaacaatttagtattaagtcgtcacaaatctgtgaaaccaagcctctgaccatctcttctggtctgttcaaaattttgtcatctggcaaattgctggctggctttcggaattgaacaaatgttctacaaacttattagcgctgaaatcagatatttttatgaactccctgtctgttcttaacctgagggaaaataatttgcaaaaggatgatgttgtagatcttcacaaaattctaataaaaatgcctaacttaagagatttagatataagtggcaatccagtcatggatgaagatcattgatccctttcatttcatggtctattcaaaaggaaaatccacttctgagattaacagttgagaactgtgagttgtccagtattggtgtgattatacttctggagtgcctcacaaatgcgaagcaactccttgatgtgctatctattgcagacaatcatctagggagttctgtggcagctgcattggccagattcttgggttcacatgtacgggctttaaatgctacagatatcggcttgggaacagtaggcttccaaatacttgaggaaacattgccaacagaagtagctctttcccacatcaacatcagtaagaatcgtggtgggatcagagcagcatattttgtttccagattaatatgtcgagcaccagaccttgtctcagtcaatgcagcagggaaccttttaccacctgaatcattggaagtcatctgtaactccttgaagcaagggacttgtaatttggagcgagtggacctgactggcaacatgcatttatcaagcaatatttttcctgcattccttgaattcaagaagcatggaaagccaattctggtagtaccaccaaacttgagcacttctgctccatatgatgatgacccatgactactatgtaccgtataagccctagtgctgctcaagtcacttcagttggaactaaataaatagtgatagtatttttttggatcattcccaagaatcctaaccactagatcaaaacacaacacaaattgtacatctgtttagattcgacacggctttcgtcggtgaagctttgcgctagggcagcgacggtcgggaaagcgagcttgatgtcgacggtggactttctgttgctgacagacttccctctagatcggttaaggtttgaggtggagatcgaaaatgattgtgaatcttgtacctttaggtgtcggcctccacctctttatttatagggctacgcaacagatgctcaacaaccttgatgctctcgatcagggcgtgaggtcaggggtctagttttcggttgggtcaagttgggtcaactagtggagatcaattctaacattttcccctttaatctcattttataccttcagctttatacctttaatttttttgatattccattatagataagtgcatagagcatgtttcatcgtcacgattaatcaccgatagacttagcaactacagtacatatctctatcctgaaatagattctttaactttgggcctttt

SEQ ID NO: 34727 - DNA, 1961 bp, Zea Mays
atgaagggcggcggcggcacgacccgcacacggaagaagaacgacgacagcggactgctgaagaatggcgacacgatgcagacgacgcgccggcggtccgcgacggcggctgcagcaggggagatccgggacgccgtgacggaggatgggggagatgcttggaaacgccatggtgaaacgcttctgttcatcgacgtggaatctcgacctgcacaatcattaacttgtgtcagtagaaccagtctgcatgagatcgagttgtccatgtgtgctctttttagtgggatgatagttaatggtgcatgtttgcttctgagctggcatgcagagacactgctttctcttgaattcatccattgtcagctttatcctaccgtcatggataaaatttgcatgagtgtgtacctgaagggatctcaaagccatggaatccaacaatttagtattaagtcgtcacaaatctgtgaaaccaagcctctgaccatctcttctggtctgttcaaaattttgtcatctggcaaattgctggctggctttcggaattgaacaaatgttctacaaacttattagcgctgaaatcagatatttttatgaactccctgtctgttcttaacctgagggaaaataatttgcaaaaggatgatgttgtagatcttcacaaaattctaataaaaatgcctaacttaagagatttagatataagtggcaatccagtcatggatgaaggtatcagatcattgatccctttcatttcatggtctattcaaaaggaaaatccacttctgagattaacagttgagaactgtgagttgtccagtattggtgtgattatacttctggagtgcctcacaaatgcgaagcaactccttgatgtgctatctattgcagacaatcatctagggagttctgtggcagctgcattggccagattcttgggttcacatgtacgggctttaaatgctacagatatcggcttgggaacagtaggcttccaaatacttgaggaaacattgccaacagaagtagctctttcccacatcaacatcagtaagaatcgtggtgggatcagagcagcatattttgtttccagattaatatgtcgagcaccagaccttgtctcagtcaatgcagcagggaaccttttaccacctgaatcattggaagtcatctgtaactccttgaagcaagggacttgtaatttggagcgagtggacctgactggcaacatgcatttatcaagcaatatttttcctgcattccttgaattcaagaagcatggaaagccaattctggtagtaccaccaaacttgagcacttctgctccatatgatgatgacccatgactactatgtaccgtataagccctagtgctgctcaagtcacttcagttggaactaaataaatagtgatagtatttttttggatcattcccaagaatcctaaccactagatcaaaacacaacacaaattgtacatctgtttagattcgacacggctttcgtcggtgaagctttgcgctagggcagcgacggtcgggaaagcgagcttgatgtcgacggtggactttctgttgctgacagacttccctctagatcggttaaggtttgaggtggagatcgaaaatgattgtgaatcttgtacctttaggtgtcggcctccacctctttatttatagggctacgcaacagatgctcaacaaccttgatgctctcgatcagggcgtgaggtcaggggtctagttttcggttgggtcaagttgggtcaactagtggagatcaattctaacattttcccctttaatctcattttataccttcagctttatacctttaatttttttgatattccattatagataagtgcatagagcatgtttcatcgtcacgattaatcaccgatagacttagcaactacagtacatatctctatcctgaaatagattctttaactttgggcctttt

SEQ ID NO: 34728 - DNA, 2114 bp, Zea Mays
aatgcaataatgcatgattaaaaagaacagcagcatggccatcaacatacgctaaaatcatgaattccatctaccagagcatgggcacatctcaacaacattcaagattagcatatcaatgcagcaaatttggttgctatgtgaggagcttgagactgcaaggtgttctttgcactgcagaaacttatgtcttgttgcaacaatgcaagctggaaagattaatgttcataagaattatatcagacctagaggttaatggtgcatgtttgcttctgagctggcatgcagagacactgctttctcttgaattcatccattgtcagctttatcctaccgtcatggataaaatttgcatgagtgtgtacctgaagggatctcaaagccatggaatccaacaatttagtattaagtcgtcacaaatctgtgaaaccaagcctctgaccatctcttctggtctgttcaaaattttgtcatctggtcgttgcacctgctgtcacttcgtgatattaagatgcagtcaccatttgctcggatgattattcacactcttctcgagtcgtcatgtgatttacacacacttgagatatcagaaaacaatgtgggttgacatgaaaaatatattcttaatttccttttacttattttctatctggtaaattggttgttttttgtagattgctggctggctttcggaattgaacaaatgttctacaaacttattagcgctgaaatcagatatttttatgaactccctgtctgttcttaacctgagggaaaataatttgcaaaaggatgatgttgtagatcttcacaaaattctaataaaaatgcctaacttaagagatttagatataagtggcaatccagtcatggatgaaggtatcagatcattgatccctttcatttcatggtctattcaaaaggaaaatccacttctgagattaacagttgagaactgtgagttgtccagtattggtgtgattatacttctggagtgcctcacaaatgcgaagcaactccttgatgtgctatctattgcagacaatcatctagggagttctgtggcagctgcattggccagattcttgggttcacatgtacgggctttaaatgctacagatatcggcttgggaacagtaggcttccaaatacttgaggaaacattgccaacagaagtagctctttcccacatcaacatcagtaagaatcgtggtgggatcagagcagcatattttgtttccagattaatatgtcgagcaccagaccttgtctcagtcaatgcagcagggaaccttttaccacctgaatcattggaagtcatctgtaactccttgaagcaagggacttgtaatttggagcgagtggacctgactggcaacatgcatttatcaagcaatatttttcctgcattccttgaattcaagaagcatggaaagccaattctggtagtaccaccaaacttgagcacttctgctccatatgatgatgacccatgactactatgtaccgtataagccctagtgctgctcaagtcacttcagttggaactaaataaatagtgatagtatttttttggatcattcccaagaatcctaaccactagatcaaaacacaacacaaattgtacatctgtttagattcgacacggctttcgtcggtgaagctttgcgctagggcagcgacggtcgggaaagcgagcttgatgtcgacggtggactttctgttgctgacagacttccctctagatcggttaaggtttgaggtggagatcgaaaatgattgtgaatcttgtacctttaggtgtcggcctccacctctttatttatagggctacgcaacagatgctcaacaaccttgatgctctcgatcagggcgtgaggtcaggggtctagttttcggttgggtcaagttgggtcaactagtggagatcaattctaacattttcccctttaatctcattttataccttcagctttatacctttaatttttttgatattccattatagataagtgcatagagcatgtttcatcgtcacgattaatcaccgatagacttagcaactacagtacatatctctatcctgaaatagattctttaactttgggcctttt

SEQ ID NO: 34729 - DNA, 2385 bp, Zea Mays
aagctaaatgcaataatgcatgattaaaaagaacagcagcatggccatcaacatacgctaaaatcatgaattccatctaccagagcatgggcacatctcaacaacattcaagattagcatatcaatgcagcaaatttggttgctatgtgaggtgccagcatacaacgattgttgtacatatgcatttcttttttgactaacatttttttttaaaatattttcagcaatacttgccaattatgaatattctgttaattaaaaatacacatgacatgattgaggaccctgtgatatatgttggactttatatgtcctacaattttgatgtaacaatgaatctatgttggacttgcttgtttggttgtttgttattcgcttgtagttcttcactatcaatgttgccccctatgtttcaggagcttgagactgcaaggtgttctttgcactgcagaaacttatgtcttgttgcaacaatgcaagctggaaagattaatgttcataagaattatatcagacctagaggttaatggtgcatgtttgcttctgagctggcatgcagagacactgctttctcttgaattcatccattgtcagctttatcctaccgtcatggataaaatttgcatgagtgtgtacctgaagggatctcaaagccatggaatccaacaatttagtattaagtcgtcacaaatctgtgaaaccaagcctctgaccatctcttctggtctgttcaaaattttgtcatctggtcgttgcacctgctgtcacttcgtgatattaagatgcagtcaccatttgctcggatgattattcacactcttctcgagtcgtcatgtgatttacacacacttgagatatcagaaaacaatgtgggttgacatgaaaaatatattcttaatttccttttacttattttctatctggtaaattggttgttttttgtagattgctggctggctttcggaattgaacaaatgttctacaaacttattagcgctgaaatcagatatttttatgaactccctgtctgttcttaacctgagggaaaataatttgcaaaaggatgatgttgtagatcttcacaaaattctaataaaaatgcctaacttaagagatttagatataagtggcaatccagtcatggatgaaggtatcagatcattgatccctttcatttcatggtctattcaaaaggaaaatccacttctgagattaacagttgagaactgtgagttgtccagtattggtgtgattatacttctggagtgcctcacaaatgcgaagcaactccttgatgtgctatctattgcagacaatcatctagggagttctgtggcagctgcattggccagattcttgggttcacatgtacgggctttaaatgctacagatatcggcttgggaacagtaggcttccaaatacttgaggaaacattgccaacagaagtagctctttcccacatcaacatcagtaagaatcgtggtgggatcagagcagcatattttgtttccagattaatatgtcgagcaccagaccttgtctcagtcaatgcagcagggaaccttttaccacctgaatcattggaagtcatctgtaactccttgaagcaagggacttgtaatttggagcgagtggacctgactggcaacatgcatttatcaagcaatatttttcctgcattccttgaattcaagaagcatggaaagccaattctggtagtaccaccaaacttgagcacttctgctccatatgatgatgacccatgactactatgtaccgtataagccctagtgctgctcaagtcacttcagttggaactaaataaatagtgatagtatttttttggatcattcccaagaatcctaaccactagatcaaaacacaacacaaattgtacatctgtttagattcgacacggctttcgtcggtgaagctttgcgctagggcagcgacggtcgggaaagcgagcttgatgtcgacggtggactttctgttgctgacagacttccctctagatcggttaaggtttgaggtggagatcgaaaatgattgtgaatcttgtacctttaggtgtcggcctccacctctttatttatagggctacgcaacagatgctcaacaaccttgatgctctcgatcagggcgtgaggtcaggggtctagttttcggttgggtcaagttgggtcaactagtggagatcaattctaacattttcccctttaatctcattttataccttcagctttatacctttaatttttttgatattccattatagataagtgcatagagcatgtttcatcgtcacgattaatcaccgatagacttagcaactacagtacatatctctatcctgaaatagattctttaactttgggcctttt

SEQ ID NO: 34730 - DNA, 2352 bp, Zea Mays
gtggcgaccggcacatcaacatcagagagagggtggaacagacagagaaagagggactgtggtgtgcacatggaggagctctccaacaaggctctggcaccaagcttgctttcgctgtgcctggatgcggtagctgatcgtctcatcagcgacaacgccgccgcaggcggcggcgtgggccgaacgggttcgtcaggagggtgcagcggcggcggcggtctcgccggattctcggaagatgatggaggggaggcagacgaggaccgcctgcatccacaggagttggcggaggggcttccctgggagcttctccatcggctggcgtcccggctcccgcctgtcgtacttgagtcactccatcacgctgcacatgcccgatactgttctgctgaaactacttctggacttggagtgcaagatggagaaagacgtggggtgaaacgttcaaggtgtgaagatttcaacagcacttggcagttgttgttcaaacttcgctggcccctgggtggtaatactggacataataatttggtcactgtggattggcagcaaaagtattgggaaaagcatttacaagagtgtttaaatgaagctgcagaacatgcttttcttccttttttttgtgggagtattggtgagctgagtatatcagctaaaatcatgaattccatctaccagagcatgggcacatctcaacaacattcaagattagcatatcaatgcagcaaatttggttgctatgtgaggagcttgagactgcaaggtgttctttgcactgcagaaacttatgtcttgttgcaacaatgcaagctggaaagattaatgttcataagaattatatcagacctagagattgctggctggctttcggaattgaacaaatgttctacaaacttattagcgctgaaatcagatatttttatgaactccctgtctgttcttaacctgagggaaaataatttgcaaaaggatgatgttgtagatcttcacaaaattctaataaaaatgcctaacttaagagatttagatataagtggcaatccagtcatggatgaagatcattgatccctttcatttcatggtctattcaaaaggaaaatccacttctgagattaacagttgagaactgtgagttgtccagtattggtgtgattatacttctggagtgcctcacaaatgcgaagcaactccttgatgtgctatctattgcagacaatcatctagggagttctgtggcagctgcattggccagattcttgggttcacatgtacgggctttaaatgctacagatatcggcttgggaacagtaggcttccaaatacttgaggaaacattgccaacagaagtagctctttcccacatcaacatcaggtagaaccaagcacttccactcagcatagatgtctgtttcctcactgacattatttatattttgtagtaagaatcgtggtgggatcagagcagcatattttgtttccagattaatatgtcgagcaccagaccttgtctcagtcaatgcagcagggaaccttttaccacctgaatcattggaagtcatctgtaactccttgaagcaagggacttgtaatttggagcgagtggacctgactggcaacatgcatttatcaagcaatatttttcctgcattccttgaattcaagaagcatggaaagccaattctggtagtaccaccaaacttgagcacttctgctccatatgatgatgacccatgactactatgtaccgtataagccctagtgctgctcaagtcacttcagttggaactaaataaatagtgatagtatttttttggatcattcccaagaatcctaaccactagatcaaaacacaacacaaattgtacatctgtttagattcgacacggctttcgtcggtgaagctttgcgctagggcagcgacggtcgggaaagcgagcttgatgtcgacggtggactttctgttgctgacagacttccctctagatcggttaaggtttgaggtggagatcgaaaatgattgtgaatcttgtacctttaggtgtcggcctccacctctttatttatagggctacgcaacagatgctcaacaaccttgatgctctcgatcagggcgtgaggtcaggggtctagttttcggttgggtcaagttgggtcaactagtggagatcaattctaacattttcccctttaatctcattttataccttcagctttatacctttaatttttttgatattccattatagataagtgcatagagcatgtttcatcgtcacgattaatcaccgatagacttagcaactacagtacatatctctatcctgaaatagattctttaactttgggcctttt

SEQ ID NO: 34731 - DNA, 3409 bp, Zea Mays
gtggcgaccggcacatcaacatcagagagagggtggaacagacagagaaagagggactgtggtgtgcacatggaggagctctccaacaaggctctggcaccaagcttgctttcgctgtgcctggatgcggtagctgatcgtctcatcagcgacaacgccgccgcaggcggcggcgtgggccgaacgggttcgtcaggagggtgcagcggcggcggcggtctcgccggattctcggaagatgatggaggggaggcagacgaggaccgcctgcatccacaggagttggcggaggggcttccctgggagcttctccatcggctggcgtcccggctcccgcctgtcgtacttgagtcactccatcacgctgcacatgcccgatactgttctgctgaaactacttctggacttggagtgcaagatggagaaagacgtggggtgaaacgttcaaggtgtgaagatttcaacagcacttggcagttgttgttcaaacttcgctggcccctgggtggtaatactggacataataatttggtcactgtggattggcagcaaaagtattgggaaaagcatttacaagagtgtttaaatgaagctgcagaacatgcttttcttccttttttttgtgggagtattggtgagctgagtatatcaggctagtatcctatattccttcatgacatgtttatcgtattgaacattcatttgttaccaacttgacattgcttggttgagttgagtaatttgcttcttagttttagaaagtaacctgaattattaaaaaaaattctttcgctaacaatgtgatacccattgactccctccgttctggtgtagaaggtgtaaccgtttttattcatgcgttccgcaatagagggtctggttcacttactctttttttatggtcatgcaaacacgcaccatttattgctccttctaccatgctgctgcactgcagagggtccgtttgattggccaagtgtgcctggatgagagaccaccaagctaaatgcaataatgcatgattaaaaagaacagcagcatggccatcaacatacggtaaattagttgttagatggtgtaaaagtggttcttggtctttgcttggaaggaattacgccttctatagcaggagagggagtacttttaaatgactactgtttatagttttgtatagtattggagaactgtcattagttactagaaattaccttcaactaaaaaagtgatatcctatttactgctgcaataacctttctgtttttgttcatgattgagcagctaaaatcatgaattccatctaccagagcatgggcacatctcaacaacattcaagattagcatatcaatgcagcaaatttggttgctatgtgaggtgccagcatacaacgattgttgtacatatgcatttcttttttgactaacatttttttttaaaatattttcagcaatacttgccaattatgaatattctgttaattaaaaatacacatgacatgattgaggaccctgtgatatatgttggactttatatgtcctacaattttgatgtaacaatgaatctatgttggacttgcttgtttggttgtttgttattcgcttgtagttcttcactatcaatgttgccccctatgtttcaggagcttgagactgcaaggtgttctttgcactgcagaaacttatgtcttgttgcaacaatgcaagctggaaagattaatgttcataagaattatatcagacctagaggttaatggtgcatgtttgcttctgagctggcatgcagagacactgctttctcttgaattcatccattgtcagctttatcctaccgtcatggataaaatttgcatgagtgtgtacctgaagggatctcaaagccatggaatccaacaatttagtattaagtcgtcacaaatctgtgaaaccaagcctctgaccatctcttctggtctgttcaaaattttgtcatctggcaaattgctggctggctttcggaattgaacaaatgttctacaaacttattagcgctgaaatcagatatttttatgaactccctgtctgttcttaacctgagggaaaataatttgcaaaaggatgatgttgtagatcttcacaaaattctaataaaaatgcctaacttaagagatttagatataagtggcaatccagtcatggatgaaggtatcagatcattgatccctttcatttcatggtctattcaaaaggaaaatccacttctgagattaacagttgagaactgtgagttgtccagtattggtgtgattatacttctggagtgcctcacaaatgcgaagcaactccttgatgtgctatctattgcagacaatcatctagggagttctgtggcagctgcattggccagattcttgggttcacatgtacgggctttaaatgctacagatatcggcttgggaacagtaggcttccaaatacttgaggaaacattgccaacagaagtagctctttcccacatcaacatcagaatcgtggtgggatcagagcagcatattttgtttccagattaatatgtcgagcaccagaccttgtctcagtcaatgcagcagggaaccttttaccacctgaatcattggaagtcatctgtaactccttgaagcaagggacttgtaatttggagcgagtggacctgactggcaacatgcatttatcaagcaatatttttcctgcattccttgaattcaagaagcatggaaagccaattctggtagtaccaccaaacttgagcacttctgctccatatgatgatgacccatgactactatgtaccgtataagccctagtgctgctcaagtcacttcagttggaactaaataaatagtgatagtatttttttggatcattcccaagaatcctaaccactagatcaaaacacaacacaaattgtacatctgtttagattcgacacggctttcgtcggtgaagctttgcgctagggcagcgacggtcgggaaagcgagcttgatgtcgacggtggactttctgttgctgacagacttccctctagatcggttaaggtttgaggtggagatcgaaaatgattgtgaatcttgtacctttaggtgtcggcctccacctctttatttatagggctacgcaacagatgctcaacaaccttgatgctctcgatcagggcgtgaggtcaggggtctagttttcggttgggtcaagttgggtcaactagtggagatcaattctaacattttcccctttaatctcattttataccttcagctttatacctttaatttttttgatattccattatagataagtgcatagagcatgtttcatcgtcacgattaatcaccgatagacttagcaactacagtacatatctctatcctgaaatagattctttaactttgggcctttt

SEQ ID NO: 34732 - DNA, 2413 bp, Zea Mays
gtggcgaccggcacatcaacatcagagagagggtggaacagacagagaaagagggactgtggtgtgcacatggaggagctctccaacaaggctctggcaccaagcttgctttcgctgtgcctggatgcggtagctgatcgtctcatcagcgacaacgccgccgcaggcggcggcgtgggccgaacgggttcgtcaggagggtgcagcggcggcggcggtctcgccggattctcggaagatgatggaggggaggcagacgaggaccgcctgcatccacaggagttggcggaggggcttccctgggagcttctccatcggctggcgtcccggctcccgcctgtcgtacttgagtcactccatcacgctgcacatgcccgatactgttctgctgaaactacttctggacttggagtgcaagatggagaaagacgtggggtgaaacgttcaaggtgtgaagatttcaacagcacttggcagttgttgttcaaacttcgctggcccctgggtggtaatactggacataataatttggtcactgtggattggcagcaaaagtattgggaaaagcatttacaagagtgtttaaatgaagctgcagaacatgcttttcttccttttttttgtgggagtattggtgagctgagtatatcagctaaaatcatgaattccatctaccagagcatgggcacatctcaacaacattcaagattagcatatcaatgcagcaaatttggttgctatgtgaggagcttgagactgcaaggtgttctttgcactgcagaaacttatgtcttgttgcaacaatgcaagctggaaagattaatgttcataagaattatatcagacctagaggtcgttgcacctgctgtcacttcgtgatattaagatgcagtcaccatttgctcggatgattattcacactcttctcgagtcgtcatgtgatttacacacacttgagatatcagaaaacaatattgctggctggctttcggaattgaacaaatgttctacaaacttattagcgctgaaatcagatatttttatgaactccctgtctgttcttaacctgagggaaaataatttgcaaaaggatgatgttgtagatcttcacaaaattctaataaaaatgcctaacttaagagatttagatataagtggcaatccagtcatggatgaaggtatcagatcattgatccctttcatttcatggtctattcaaaaggaaaatccacttctgagattaacagttgagaactgtgagttgtccagtattggtgtgattatacttctggagtgcctcacaaatgcgaagcaactccttgatgtgctatctattgcagacaatcatctagggagttctgtggcagctgcattggccagattcttgggttcacatgtacgggctttaaatgctacagatatcggcttgggaacagtaggcttccaaatacttgaggaaacattgccaacagaagtagctctttcccacatcaacatcagtaagaatcgtggtgggatcagagcagcatattttgtttccagattaatatgtcgagcaccagaccttgtctcagtcaatgcagcagggaaccttttaccacctgaatcattggaagtcatctgtaactccttgaagcaagggacttgtaatttggagcgagtggacctgactggcaacatgcatttatcaagcaatatttttcctgcattccttgaattcaagaagcatggaaagccaattctggtagtaccaccaaacttgagcacttctgctccatatgatgatgacccatgactactatgtaccgtataagccctagtgctgctcaagtcacttcagttggaactaaataaatagtgatagtatttttttggatcattcccaagaatcctaaccactagatcaaaacacaacacaaattgtacatctgtttagattcgacacggctttcgtcggtgaagctttgcgctagggcagcgacggtcgggaaagcgagcttgatgtcgacggtggactttctgttgctgacagacttccctctagatcggttaaggtttgaggtggagatcgaaaatgattgtgaatcttgtacctttaggtgtcggcctccacctctttatttatagggctacgcaacagatgctcaacaaccttgatgctctcgatcagggcgtgaggtcaggggtctagttttcggttgggtcaagttgggtcaactagtggagatcaattctaacattttcccctttaatctcattttataccttcagctttatacctttaatttttttgatattccattatagataagtgcatagagcatgtttcatcgtcacgattaatcaccgatagacttagcaactacagtacatatctctatcctgaaatagattctttaactttgggcctttt

SEQ ID NO: 34733 - DNA, 2904 bp, Zea Mays
gtggcgaccggcacatcaacatcagagagagggtggaacagacagagaaagagggactgtggtgtgcacatggaggagctctccaacaaggctctggcaccaagcttgctttcgctgtgcctggatgcggtagctgatcgtctcatcagcgacaacgccgccgcaggcggcggcgtgggccgaacgggttcgtcaggagggtgcagcggcggcggcggtctcgccggattctcggaagatgatggaggggaggcagacgaggaccgcctgcatccacaggagttggcggaggggcttccctgggagcttctccatcggctggcgtcccggctcccgcctgtcgtacttgagtcactccatcacgctgcacatgcccgatactgttctgctgaaactacttctggacttggagtgcaagatggagaaagacgtggggtgaaacgttcaaggtgtgaagatttcaacagcacttggcagttgttgttcaaacttcgctggcccctgggtggtaatactggacataataatttggtcactgtggattggcagcaaaagtattgggaaaagcatttacaagagtgtttaaatgaagctgcagaacatgcttttcttccttttttttgtgggagtattggtgagctgagtatatcagctaaaatcatgaattccatctaccagagcatgggcacatctcaacaacattcaagattagcatatcaatgcagcaaatttggttgctatgtgaggtgccagcatacaacgattgttgtacatatgcatttcttttttgactaacatttttttttaaaatattttcagcaatacttgccaattatgaatattctgttaattaaaaatacacatgacatgattgaggaccctgtgatatatgttggactttatatgtcctacaattttgatgtaacaatgaatctatgttggacttgcttgtttggttgtttgttattcgcttgtagttcttcactatcaatgttgccccctatgtttcaggagcttgagactgcaaggtgttctttgcactgcagaaacttatgtcttgttgcaacaatgcaagctggaaagattaatgttcataagaattatatcagacctagaggttaatggtgcatgtttgcttctgagctggcatgcagagacactgctttctcttgaattcatccattgtcagctttatcctaccgtcatggataaaatttgcatgagtgtgtacctgaagggatctcaaagccatggaatccaacaatttagtattaagtcgtcacaaatctgtgaaaccaagcctctgaccatctcttctggtctgttcaaaattttgtcatctggtcgttgcacctgctgtcacttcgtgatattaagatgcagtcaccatttgctcggatgattattcacactcttctcgagtcgtcatgtgatttacacacacttgagatatcagaaaacaatattgctggctggctttcggaattgaacaaatgttctacaaacttattagcgctgaaatcagatatttttatgaactccctgtctgttcttaacctgagggaaaataatttgcaaaaggatgatgttgtagatcttcacaaaattctaataaaaatgcctaacttaagagatttagatataagtggcaatccagtcatggatgaaggtatcagatcattgatccctttcatttcatggtctattcaaaaggaaaatccacttctgagattaacagttgagaactgtgagttgtccagtattggtgtgattatacttctggagtgcctcacaaatgcgaagcaactccttgatgtgctatctattgcagacaatcatctagggagttctgtggcagctgcattggccagattcttgggttcacatgtacgggctttaaatgctacagatatcggcttgggaacagtaggcttccaaatacttgaggaaacattgccaacagaagtagctctttcccacatcaacatcagtaagaatcgtggtgggatcagagcagcatattttgtttccagattaatatgtcgagcaccagaccttgtctcagtcaatgcagcagggaaccttttaccacctgaatcattggaagtcatctgtaactccttgaagcaagggacttgtaatttggagcgagtggacctgactggcaacatgcatttatcaagcaatatttttcctgcattccttgaattcaagaagcatggaaagccaattctggtagtaccaccaaacttgagcacttctgctccatatgatgatgacccatgactactatgtaccgtataagccctagtgctgctcaagtcacttcagttggaactaaataaatagtgatagtatttttttggatcattcccaagaatcctaaccactagatcaaaacacaacacaaattgtacatctgtttagattcgacacggctttcgtcggtgaagctttgcgctagggcagcgacggtcgggaaagcgagcttgatgtcgacggtggactttctgttgctgacagacttccctctagatcggttaaggtttgaggtggagatcgaaaatgattgtgaatcttgtacctttaggtgtcggcctccacctctttatttatagggctacgcaacagatgctcaacaaccttgatgctctcgatcagggcgtgaggtcaggggtctagttttcggttgggtcaagttgggtcaactagtggagatcaattctaacattttcccctttaatctcattttataccttcagctttatacctttaatttttttgatattccattatagataagtgcatagagcatgtttcatcgtcacgattaatcaccgatagacttagcaactacagtacatatctctatcctgaaatagattctttaactttgggcctttt

SEQ ID NO: 34734 - DNA, 3530 bp, Zea Mays
gtggcgaccggcacatcaacatcagagagagggtggaacagacagagaaagagggactgtggtgtgcacatggaggagctctccaacaaggctctggcaccaagcttgctttcgctgtgcctggatgcggtagctgatcgtctcatcagcgacaacgccgccgcaggcggcggcgtgggccgaacgggttcgtcaggagggtgcagcggcggcggcggtctcgccggattctcggaagatgatggaggggaggcagacgaggaccgcctgcatccacaggagttggcggaggggcttccctgggagcttctccatcggctggcgtcccggctcccgcctgtcgtacttgagtcactccatcacgctgcacatgcccgatactgttctgctgaaactacttctggacttggagtgcaagatggagaaagacgtggggtgaaacgttcaaggtgtgaagatttcaacagcacttggcagttgttgttcaaacttcgctggcccctgggtggtaatactggacataataatttggtcactgtggattggcagcaaaagtattgggaaaagcatttacaagagtgtttaaatgaagctgcagaacatgcttttcttccttttttttgtgggagtattggtgagctgagtatatcaggctagtatcctatattccttcatgacatgtttatcgtattgaacattcatttgttaccaacttgacattgcttggttgagttgagtaatttgcttcttagttttagaaagtaacctgaattattaaaaaaaattctttcgctaacaatgtgatacccattgactccctccgttctggtgtagaaggtgtaaccgtttttattcatgcgttccgcaatagagggtctggttcacttactctttttttatggtcatgcaaacacgcaccatttattgctccttctaccatgctgctgcactgcagagggtccgtttgattggccaagtgtgcctggatgagagaccaccaagctaaatgcaataatgcatgattaaaaagaacagcagcatggccatcaacatacggtaaattagttgttagatggtgtaaaagtggttcttggtctttgcttggaaggaattacgccttctatagcaggagagggagtacttttaaatgactactgtttatagttttgtatagtattggagaactgtcattagttactagaaattaccttcaactaaaaaagtgatatcctatttactgctgcaataacctttctgtttttgttcatgattgagcagctaaaatcatgaattccatctaccagagcatgggcacatctcaacaacattcaagattagcatatcaatgcagcaaatttggttgctatgtgaggtgccagcatacaacgattgttgtacatatgcatttcttttttgactaacatttttttttaaaatattttcagcaatacttgccaattatgaatattctgttaattaaaaatacacatgacatgattgaggaccctgtgatatatgttggactttatatgtcctacaattttgatgtaacaatgaatctatgttggacttgcttgtttggttgtttgttattcgcttgtagttcttcactatcaatgttgccccctatgtttcaggagcttgagactgcaaggtgttctttgcactgcagaaacttatgtcttgttgcaacaatgcaagctggaaagattaatgttcataagaattatatcagacctagaggttaatggtgcatgtttgcttctgagctggcatgcagagacactgctttctcttgaattcatccattgtcagctttatcctaccgtcatggataaaatttgcatgagtgtgtacctgaagggatctcaaagccatggaatccaacaatttagtattaagtcgtcacaaatctgtgaaaccaagcctctgaccatctcttctggtctgttcaaaattttgtcatctggcaagtcgttgcacctgctgtcacttcgtgatattaagatgcagtcaccatttgctcggatgattattcacactcttctcgagtcgtcatgtgatttacacacacttgagatatcagaaaacaatattgctggctggctttcggaattgaacaaatgttctacaaacttattagcgctgaaatcagatatttttatgaactccctgtctgttcttaacctgagggaaaataatttgcaaaaggatgatgttgtagatcttcacaaaattctaataaaaatgcctaacttaagagatttagatataagtggcaatccagtcatggatgaaggtatcagatcattgatccctttcatttcatggtctattcaaaaggaaaatccacttctgagattaacagttgagaactgtgagttgtccagtattggtgtgattatacttctggagtgcctcacaaatgcgaagcaactccttgatgtgctatctattgcagacaatcatctagggagttctgtggcagctgcattggccagattcttgggttcacatgtacgggctttaaatgctacagatatcggcttgggaacagtaggcttccaaatacttgaggaaacattgccaacagaagtagctctttcccacatcaacatcagaatcgtggtgggatcagagcagcatattttgtttccagattaatatgtcgagcaccagaccttgtctcagtcaatgcagcagggaaccttttaccacctgaatcattggaagtcatctgtaactccttgaagcaagggacttgtaatttggagcgagtggacctgactggcaacatgcatttatcaagcaatatttttcctgcattccttgaattcaagaagcatggaaagccaattctggtagtaccaccaaacttgagcacttctgctccatatgatgatgacccatgactactatgtaccgtataagccctagtgctgctcaagtcacttcagttggaactaaataaatagtgatagtatttttttggatcattcccaagaatcctaaccactagatcaaaacacaacacaaattgtacatctgtttagattcgacacggctttcgtcggtgaagctttgcgctagggcagcgacggtcgggaaagcgagcttgatgtcgacggtggactttctgttgctgacagacttccctctagatcggttaaggtttgaggtggagatcgaaaatgattgtgaatcttgtacctttaggtgtcggcctccacctctttatttatagggctacgcaacagatgctcaacaaccttgatgctctcgatcagggcgtgaggtcaggggtctagttttcggttgggtcaagttgggtcaactagtggagatcaattctaacattttcccctttaatctcattttataccttcagctttatacctttaatttttttgatattccattatagataagtgcatagagcatgtttcatcgtcacgattaatcaccgatagacttagcaactacagtacatatctctatcctgaaatagattctttaactttgggcctttt

SEQ ID NO: 34735 - DNA, 2643 bp, Zea Mays
gtggcgaccggcacatcaacatcagagagagggtggaacagacagagaaagagggactgtggtgtgcacatggaggagctctccaacaaggctctggcaccaagcttgctttcgctgtgcctggatgcggtagctgatcgtctcatcagcgacaacgccgccgcaggcggcggcgtgggccgaacgggttcgtcaggagggtgcagcggcggcggcggtctcgccggattctcggaagatgatggaggggaggcagacgaggaccgcctgcatccacaggagttggcggaggggcttccctgggagcttctccatcggctggcgtcccggctcccgcctgtcgtacttgagtcactccatcacgctgcacatgcccgatactgttctgctgaaactacttctggacttggagtgcaagatggagaaagacgtggggtgaaacgttcaaggtgtgaagatttcaacagcacttggcagttgttgttcaaacttcgctggcccctgggtggtaatactggacataataatttggtcactgtggattggcagcaaaagtattgggaaaagcatttacaagagtgtttaaatgaagctgcagaacatgcttttcttccttttttttgtgggagtattggtgagctgagtatatcagctaaaatcatgaattccatctaccagagcatgggcacatctcaacaacattcaagattagcatatcaatgcagcaaatttggttgctatgtgaggagcttgagactgcaaggtgttctttgcactgcagaaacttatgtcttgttgcaacaatgcaagctggaaagattaatgttcataagaattatatcagacctagaggttaatggtgcatgtttgcttctgagctggcatgcagagacactgctttctcttgaattcatccattgtcagctttatcctaccgtcatggataaaatttgcatgagtgtgtacctgaagggatctcaaagccatggaatccaacaatttagtattaagtcgtcacaaatctgtgaaaccaagcctctgaccatctcttctggtctgttcaaaattttgtcatctggcaagtcgttgcacctgctgtcacttcgtgatattaagatgcagtcaccatttgctcggatgattattcacactcttctcgagtcgtcatgtgatttacacacacttgagatatcagaaaacaatattgctggctggctttcggaattgaacaaatgttctacaaacttattagcgctgaaatcagatatttttatgaactccctgtctgttcttaacctgagggaaaataatttgcaaaaggatgatgttgtagatcttcacaaaattctaataaaaatgcctaacttaagagatttagatataagtggcaatccagtcatggatgaaggtatcagatcattgatccctttcatttcatggtctattcaaaaggaaaatccacttctgagattaacagttgagaactgtgagttgtccagtattggtgtgattatacttctggagtgcctcacaaatgcgaagcaactccttgatgtgctatctattgcagacaatcatctagggagttctgtggcagctgcattggccagattcttgggttcacatgtacgggctttaaatgctacagatatcggcttgggaacagtaggcttccaaatacttgaggaaacattgccaacagaagtagctctttcccacatcaacatcagtaagaatcgtggtgggatcagagcagcatattttgtttccagattaatatgtcgagcaccagaccttgtctcagtcaatgcagcagggaaccttttaccacctgaatcattggaagtcatctgtaactccttgaagcaagggacttgtaatttggagcgagtggacctgactggcaacatgcatttatcaagcaatatttttcctgcattccttgaattcaagaagcatggaaagccaattctggtagtaccaccaaacttgagcacttctgctccatatgatgatgacccatgactactatgtaccgtataagccctagtgctgctcaagtcacttcagttggaactaaataaatagtgatagtatttttttggatcattcccaagaatcctaaccactagatcaaaacacaacacaaattgtacatctgtttagattcgacacggctttcgtcggtgaagctttgcgctagggcagcgacggtcgggaaagcgagcttgatgtcgacggtggactttctgttgctgacagacttccctctagatcggttaaggtttgaggtggagatcgaaaatgattgtgaatcttgtacctttaggtgtcggcctccacctctttatttatagggctacgcaacagatgctcaacaaccttgatgctctcgatcagggcgtgaggtcaggggtctagttttcggttgggtcaagttgggtcaactagtggagatcaattctaacattttcccctttaatctcattttataccttcagctttatacctttaatttttttgatattccattatagataagtgcatagagcatgtttcatcgtcacgattaatcaccgatagacttagcaactacagtacatatctctatcctgaaatagattctttaactttgggcctttt

SEQ ID NO: 34736 - DNA, 2296 bp, Zea Mays
gtggcgaccggcacatcaacatcagagagagggtggaacagacagagaaagagggactgtggtgtgcacatggaggagctctccaacaaggctctggcaccaagcttgctttcgctgtgcctggatgcggtagctgatcgtctcatcagcgacaacgccgccgcaggcggcggcgtgggccgaacgggttcgtcaggagggtgcagcggcggcggcggtctcgccggattctcggaagatgatggaggggaggcagacgaggaccgcctgcatccacaggagttggcggaggggcttccctgggagcttctccatcggctggcgtcccggctcccgcctgtcgtacttgagtcactccatcacgctgcacatgcccgatactgttctgctgaaactacttctggacttggagtgcaagatggagaaagacgtggggtgaaacgttcaaggtgtgaagatttcaacagcacttggcagttgttgttcaaacttcgctggcccctgggtggtaatactggacataataatttggtcactgtggattggcagcaaaagtattgggaaaagcatttacaagagtgtttaaatgaagctgcagaacatgcttttcttccttttttttgtgggagtattggtgagctgagtatatcagctaaaatcatgaattccatctaccagagcatgggcacatctcaacaacattcaagattagcatatcaatgcagcaaatttggttgctatgtgaggagcttgagactgcaaggtgttctttgcactgcagaaacttatattgctggctggctttcggaattgaacaaatgttctacaaacttattagcgctgaaatcagatatttttatgaactccctgtctgttcttaacctgagggaaaataatttgcaaaaggatgatgttgtagatcttcacaaaattctaataaaaatgcctaacttaagagatttagatataagtggcaatccagtcatggatgaaggtatcagatcattgatccctttcatttcatggtctattcaaaaggaaaatccacttctgagattaacagttgagaactgtgagttgtccagtattggtgtgattatacttctggagtgcctcacaaatgcgaagcaactccttgatgtgctatctattgcagacaatcatctagggagttctgtggcagctgcattggccagattcttgggttcacatgtacgggctttaaatgctacagatatcggcttgggaacagtaggcttccaaatacttgaggaaacattgccaacagaagtagctctttcccacatcaacatcaggtagaaccaagcacttccactcagcatagatgtctgtttcctcactgacattatttatattttgtagtaagaatcgtggtgggatcagagcagcatattttgtttccagattaatatgtcgagcaccagaccttgtctcagtcaatgcagcagggaaccttttaccacctgaatcattggaagtcatctgtaactccttgaagcaagggacttgtaatttggagcgagtggacctgactggcaacatgcatttatcaagcaatatttttcctgcattccttgaattcaagaagcatggaaagccaattctggtagtaccaccaaacttgagcacttctgctccatatgatgatgacccatgactactatgtaccgtataagccctagtgctgctcaagtcacttcagttggaactaaataaatagtgatagtatttttttggatcattcccaagaatcctaaccactagatcaaaacacaacacaaattgtacatctgtttagattcgacacggctttcgtcggtgaagctttgcgctagggcagcgacggtcgggaaagcgagcttgatgtcgacggtggactttctgttgctgacagacttccctctagatcggttaaggtttgaggtggagatcgaaaatgattgtgaatcttgtacctttaggtgtcggcctccacctctttatttatagggctacgcaacagatgctcaacaaccttgatgctctcgatcagggcgtgaggtcaggggtctagttttcggttgggtcaagttgggtcaactagtggagatcaattctaacattttcccctttaatctcattttataccttcagctttatacctttaatttttttgatattccattatagataagtgcatagagcatgtttcatcgtcacgattaatcaccgatagacttagcaactacagtacatatctctatcctgaaatagattctttaactttgggcctttt

SEQ ID NO: 34737 - DNA, 2625 bp, Zea Mays
gtggcgaccggcacatcaacatcagagagagggtggaacagacagagaaagagggactgtggtgtgcacatggaggagctctccaacaaggctctggcaccaagcttgctttcgctgtgcctggatgcggtagctgatcgtctcatcagcgacaacgccgccgcaggcggcggcgtgggccgaacgggttcgtcaggagggtgcagcggcggcggcggtctcgccggattctcggaagatgatggaggggaggcagacgaggaccgcctgcatccacaggagttggcggaggggcttccctgggagcttctccatcggctggcgtcccggctcccgcctgtcgtacttgagtcactccatcacgctgcacatgcccgatactgttctgctgaaactacttctggacttggagtgcaagatggagaaagacgtggggtgaaacgttcaaggtgtgaagatttcaacagcacttggcagttgttgttcaaacttcgctggcccctgggtggtaatactggacataataatttggtcactgtggattggcagcaaaagtattgggaaaagcatttacaagagtgtttaaatgaagctgcagaacatgcttttcttccttttttttgtgggagtattgctaaaatcatgaattccatctaccagagcatgggcacatctcaacaacattcaagattagcatatcaatgcagcaaatttggttgctatgtgaggagcttgagactgcaaggtgttctttgcactgcagaaacttatgtcttgttgcaacaatgcaagctggaaagattaatgttcataagaattatatcagacctagaggttaatggtgcatgtttgcttctgagctggcatgcagagacactgctttctcttgaattcatccattgtcagctttatcctaccgtcatggataaaatttgcatgagtgtgtacctgaagggatctcaaagccatggaatccaacaatttagtattaagtcgtcacaaatctgtgaaaccaagcctctgaccatctcttctggtctgttcaaaattttgtcatctggcaagtcgttgcacctgctgtcacttcgtgatattaagatgcagtcaccatttgctcggatgattattcacactcttctcgagtcgtcatgtgatttacacacacttgagatatcagaaaacaatattgctggctggctttcggaattgaacaaatgttctacaaacttattagcgctgaaatcagatatttttatgaactccctgtctgttcttaacctgagggaaaataatttgcaaaaggatgatgttgtagatcttcacaaaattctaataaaaatgcctaacttaagagatttagatataagtggcaatccagtcatggatgaaggtatcagatcattgatccctttcatttcatggtctattcaaaaggaaaatccacttctgagattaacagttgagaactgtgagttgtccagtattggtgtgattatacttctggagtgcctcacaaatgcgaagcaactccttgatgtgctatctattgcagacaatcatctagggagttctgtggcagctgcattggccagattcttgggttcacatgtacgggctttaaatgctacagatatcggcttgggaacagtaggcttccaaatacttgaggaaacattgccaacagaagtagctctttcccacatcaacatcagtaagaatcgtggtgggatcagagcagcatattttgtttccagattaatatgtcgagcaccagaccttgtctcagtcaatgcagcagggaaccttttaccacctgaatcattggaagtcatctgtaactccttgaagcaagggacttgtaatttggagcgagtggacctgactggcaacatgcatttatcaagcaatatttttcctgcattccttgaattcaagaagcatggaaagccaattctggtagtaccaccaaacttgagcacttctgctccatatgatgatgacccatgactactatgtaccgtataagccctagtgctgctcaagtcacttcagttggaactaaataaatagtgatagtatttttttggatcattcccaagaatcctaaccactagatcaaaacacaacacaaattgtacatctgtttagattcgacacggctttcgtcggtgaagctttgcgctagggcagcgacggtcgggaaagcgagcttgatgtcgacggtggactttctgttgctgacagacttccctctagatcggttaaggtttgaggtggagatcgaaaatgattgtgaatcttgtacctttaggtgtcggcctccacctctttatttatagggctacgcaacagatgctcaacaaccttgatgctctcgatcagggcgtgaggtcaggggtctagttttcggttgggtcaagttgggtcaactagtggagatcaattctaacattttcccctttaatctcattttataccttcagctttatacctttaatttttttgatattccattatagataagtgcatagagcatgtttcatcgtcacgattaatcaccgatagacttagcaactacagtacatatctctatcctgaaatagattctttaactttgggcctttt

SEQ ID NO: 34738 - DNA, 2522 bp, Zea Mays
gtggcgaccggcacatcaacatcagagagagggtggaacagacagagaaagagggactgtggtgtgcacatggaggagctctccaacaaggctctggcaccaagcttgctttcgctgtgcctggatgcggtagctgatcgtctcatcagcgacaacgccgccgcaggcggcggcgtgggccgaacgggttcgtcaggagggtgcagcggcggcggcggtctcgccggattctcggaagatgatggaggggaggcagacgaggaccgcctgcatccacaggagttggcggaggggcttccctgggagcttctccatcggctggcgtcccggctcccgcctgtcgtacttgagtcactccatcacgctgcacatgcccgatactgttctgctgaaactacttctggacttggagtgcaagatggagaaagacgtggggtgaaacgttcaaggtgtgaagatttcaacagcacttggcagttgttgttcaaacttcgctggcccctgggtggtaatactggacataataatttggtcactgtggattggcagcaaaagtattgggaaaagcatttacaagagtgtttaaatgaagctgcagaacatgcttttcttccttttttttgtgggagtattggtgagctgagtatatcagctaaaatcatgaattccatctaccagagcatgggcacatctcaacaacattcaagattagcatatcaatgcagcaaatttggttgctatgtgaggagcttgagactgcaaggtgttctttgcactgcagaaacttatgtcttgttgcaacaatgcaagctggaaagattaatgttcataagaattatatcagacctagaggttaatggtgcatgtttgcttctgagctggcatgcagagacactgctttctcttgaattcatccattgtcagctttatcctaccgtcatggataaaatttgcatgagtgtgtacctgaagggatctcaaagccatggaatccaacaatttagtattaagtcgtcacaaatctgtgaaaccaagcctctgaccatctcttctggtctgttcaaaattttgtcatctggcaaattgctggctggctttcggaattgaacaaatgttctacaaacttattagcgctgaaatcagatatttttatgaactccctgtctgttcttaacctgagggaaaataatttgcaaaaggatgatgttgtagatcttcacaaaattctaataaaaatgcctaacttaagagatttagatataagtggcaatccagtcatggatgaaggtatcagatcattgatccctttcatttcatggtctattcaaaaggaaaatccacttctgagattaacagttgagaactgtgagttgtccagtattggtgtgattatacttctggagtgcctcacaaatgcgaagcaactccttgatgtgctatctattgcagacaatcatctagggagttctgtggcagctgcattggccagattcttgggttcacatgtacgggctttaaatgctacagatatcggcttgggaacagtaggcttccaaatacttgaggaaacattgccaacagaagtagctctttcccacatcaacatcagtaagaatcgtggtgggatcagagcagcatattttgtttccagattaatatgtcgagcaccagaccttgtctcagtcaatgcagcagggaaccttttaccacctgaatcattggaagtcatctgtaactccttgaagcaagggacttgtaatttggagcgagtggacctgactggcaacatgcatttatcaagcaatatttttcctgcattccttgaattcaagaagcatggaaagccaattctggtagtaccaccaaacttgagcacttctgctccatatgatgatgacccatgactactatgtaccgtataagccctagtgctgctcaagtcacttcagttggaactaaataaatagtgatagtatttttttggatcattcccaagaatcctaaccactagatcaaaacacaacacaaattgtacatctgtttagattcgacacggctttcgtcggtgaagctttgcgctagggcagcgacggtcgggaaagcgagcttgatgtcgacggtggactttctgttgctgacagacttccctctagatcggttaaggtttgaggtggagatcgaaaatgattgtgaatcttgtacctttaggtgtcggcctccacctctttatttatagggctacgcaacagatgctcaacaaccttgatgctctcgatcagggcgtgaggtcaggggtctagttttcggttgggtcaagttgggtcaactagtggagatcaattctaacattttcccctttaatctcattttataccttcagctttatacctttaatttttttgatattccattatagataagtgcatagagcatgtttcatcgtcacgattaatcaccgatagacttagcaactacagtacatatctctatcctgaaatagattctttaactttgggcctttt

SEQ ID NO: 34739 - DNA, 2504 bp, Zea Mays
gtggcgaccggcacatcaacatcagagagagggtggaacagacagagaaagagggactgtggtgtgcacatggaggagctctccaacaaggctctggcaccaagcttgctttcgctgtgcctggatgcggtagctgatcgtctcatcagcgacaacgccgccgcaggcggcggcgtgggccgaacgggttcgtcaggagggtgcagcggcggcggcggtctcgccggattctcggaagatgatggaggggaggcagacgaggaccgcctgcatccacaggagttggcggaggggcttccctgggagcttctccatcggctggcgtcccggctcccgcctgtcgtacttgagtcactccatcacgctgcacatgcccgatactgttctgctgaaactacttctggacttggagtgcaagatggagaaagacgtggggtgaaacgttcaaggtgtgaagatttcaacagcacttggcagttgttgttcaaacttcgctggcccctgggtggtaatactggacataataatttggtcactgtggattggcagcaaaagtattgggaaaagcatttacaagagtgtttaaatgaagctgcagaacatgcttttcttccttttttttgtgggagtattgctaaaatcatgaattccatctaccagagcatgggcacatctcaacaacattcaagattagcatatcaatgcagcaaatttggttgctatgtgaggagcttgagactgcaaggtgttctttgcactgcagaaacttatgtcttgttgcaacaatgcaagctggaaagattaatgttcataagaattatatcagacctagaggttaatggtgcatgtttgcttctgagctggcatgcagagacactgctttctcttgaattcatccattgtcagctttatcctaccgtcatggataaaatttgcatgagtgtgtacctgaagggatctcaaagccatggaatccaacaatttagtattaagtcgtcacaaatctgtgaaaccaagcctctgaccatctcttctggtctgttcaaaattttgtcatctggcaaattgctggctggctttcggaattgaacaaatgttctacaaacttattagcgctgaaatcagatatttttatgaactccctgtctgttcttaacctgagggaaaataatttgcaaaaggatgatgttgtagatcttcacaaaattctaataaaaatgcctaacttaagagatttagatataagtggcaatccagtcatggatgaaggtatcagatcattgatccctttcatttcatggtctattcaaaaggaaaatccacttctgagattaacagttgagaactgtgagttgtccagtattggtgtgattatacttctggagtgcctcacaaatgcgaagcaactccttgatgtgctatctattgcagacaatcatctagggagttctgtggcagctgcattggccagattcttgggttcacatgtacgggctttaaatgctacagatatcggcttgggaacagtaggcttccaaatacttgaggaaacattgccaacagaagtagctctttcccacatcaacatcagtaagaatcgtggtgggatcagagcagcatattttgtttccagattaatatgtcgagcaccagaccttgtctcagtcaatgcagcagggaaccttttaccacctgaatcattggaagtcatctgtaactccttgaagcaagggacttgtaatttggagcgagtggacctgactggcaacatgcatttatcaagcaatatttttcctgcattccttgaattcaagaagcatggaaagccaattctggtagtaccaccaaacttgagcacttctgctccatatgatgatgacccatgactactatgtaccgtataagccctagtgctgctcaagtcacttcagttggaactaaataaatagtgatagtatttttttggatcattcccaagaatcctaaccactagatcaaaacacaacacaaattgtacatctgtttagattcgacacggctttcgtcggtgaagctttgcgctagggcagcgacggtcgggaaagcgagcttgatgtcgacggtggactttctgttgctgacagacttccctctagatcggttaaggtttgaggtggagatcgaaaatgattgtgaatcttgtacctttaggtgtcggcctccacctctttatttatagggctacgcaacagatgctcaacaaccttgatgctctcgatcagggcgtgaggtcaggggtctagttttcggttgggtcaagttgggtcaactagtggagatcaattctaacattttcccctttaatctcattttataccttcagctttatacctttaatttttttgatattccattatagataagtgcatagagcatgtttcatcgtcacgattaatcaccgatagacttagcaactacagtacatatctctatcctgaaatagattctttaactttgggcctttt

SEQ ID NO: 34740 - DNA, 2615 bp, Zea Mays
gtggcgaccggcacatcaacatcagagagagggtggaacagacagagaaagagggactgtggtgtgcacatggaggagctctccaacaaggctctggcaccaagcttgctttcgctgtgcctggatgcggtagctgatcgtctcatcagcgacaacgccgccgcaggcggcggcgtgggccgaacgggttcgtcaggagggtgcagcggcggcggcggtctcgccggattctcggaagatgatggaggggaggcagacgaggaccgcctgcatccacaggagttggcggaggggcttccctgggagcttctccatcggctggcgtcccggctcccgcctgtcgtacttgagtcactccatcacgctgcacatgcccgatactgttctgctgaaactacttctggacttggagtgcaagatggagaaagacgtggggtgaaacgttcaaggtgtgaagatttcaacagcacttggcagttgttgttcaaacttcgctggcccctgggtggtaatactggacataataatttggtcactgtggattggcagcaaaagtattgggaaaagcatttacaagagtgtttaaatgaagctgcagaacatgcttttcttccttttttttgtgggagtattggtgagctgagtatatcagctaaaatcatgaattccatctaccagagcatgggcacatctcaacaacattcaagattagcatatcaatgcagcaaatttggttgctatgtgaggagcttgagactgcaaggtgttctttgcactgcagaaacttatgtcttgttgcaacaatgcaagctggaaagattaatgttcataagaattatatcagacctagaggttaatggtgcatgtttgcttctgagctggcatgcagagacactgctttctcttgaattcatccattgtcagctttatcctaccgtcatggataaaatttgcatgagtgtgtacctgaagggatctcaaagccatggaatccaacaatttagtattaagtcgtcacaaatctgtgaaaccaagcctctgaccatctcttctggtcgttgcacctgctgtcacttcgtgatattaagatgcagtcaccatttgctcggatgattattcacactcttctcgagtcgtcatgtgatttacacacacttgagatatcagaaaacaatattgctggctggctttcggaattgaacaaatgttctacaaacttattagcgctgaaatcagatatttttatgaactccctgtctgttcttaacctgagggaaaataatttgcaaaaggatgatgttgtagatcttcacaaaattctaataaaaatgcctaacttaagagatttagatataagtggcaatccagtcatggatgaaggtatcagatcattgatccctttcatttcatggtctattcaaaaggaaaatccacttctgagattaacagttgagaactgtgagttgtccagtattggtgtgattatacttctggagtgcctcacaaatgcgaagcaactccttgatgtgctatctattgcagacaatcatctagggagttctgtggcagctgcattggccagattcttgggttcacatgtacgggctttaaatgctacagatatcggcttgggaacagtaggcttccaaatacttgaggaaacattgccaacagaagtagctctttcccacatcaacatcagtaagaatcgtggtgggatcagagcagcatattttgtttccagattaatatgtcgagcaccagaccttgtctcagtcaatgcagcagggaaccttttaccacctgaatcattggaagtcatctgtaactccttgaagcaagggacttgtaatttggagcgagtggacctgactggcaacatgcatttatcaagcaatatttttcctgcattccttgaattcaagaagcatggaaagccaattctggtagtaccaccaaacttgagcacttctgctccatatgatgatgacccatgactactatgtaccgtataagccctagtgctgctcaagtcacttcagttggaactaaataaatagtgatagtatttttttggatcattcccaagaatcctaaccactagatcaaaacacaacacaaattgtacatctgtttagattcgacacggctttcgtcggtgaagctttgcgctagggcagcgacggtcgggaaagcgagcttgatgtcgacggtggactttctgttgctgacagacttccctctagatcggttaaggtttgaggtggagatcgaaaatgattgtgaatcttgtacctttaggtgtcggcctccacctctttatttatagggctacgcaacagatgctcaacaaccttgatgctctcgatcagggcgtgaggtcaggggtctagttttcggttgggtcaagttgggtcaactagtggagatcaattctaacattttcccctttaatctcattttataccttcagctttatacctttaatttttttgatattccattatagataagtgcatagagcatgtttcatcgtcacgattaatcaccgatagacttagcaactacagtacatatctctatcctgaaatagattctttaactttgggcctttt

SEQ ID NO: 34741 - DNA, 2652 bp, Zea Mays
gtggcgaccggcacatcaacatcagagagagggtggaacagacagagaaagagggactgtggtgtgcacatggaggagctctccaacaaggctctggcaccaagcttgctttcgctgtgcctggatgcggtagctgatcgtctcatcagcgacaacgccgccgcaggcggcggcgtgggccgaacgggttcgtcaggagggtgcagcggcggcggcggtctcgccggattctcggaagatgatggaggggaggcagacgaggaccgcctgcatccacaggagttggcggaggggcttccctgggagcttctccatcggctggcgtcccggctcccgcctgtcgtacttgagtcactccatcacgctgcacatgcccgatactgttctgctgaaactacttctggacttggagtgcaagatggagaaagacgtggggtgaaacgttcaaggtgtgaagatttcaacagcacttggcagttgttgttcaaacttcgctggcccctgggtggtaatactggacataataatttggtcactgtggattggcagcaaaagtattgggaaaagcatttacaagagtgtttaaatgaagctgcagaacatgcttttcttccttttttttgtgggagtattggtgagctgagtatatcagctaaaatcatgaattccatctaccagagcatgggcacatctcaacaacattcaagattagcatatcaatgcagcaaatttggttgctatgtgaggagcttgagactgcaaggtgttctttgcactgcagaaacttatgttaatggtgcatgtttgcttctgagctggcatgcagagacactgctttctcttgaattcatccattgtcagctttatcctaccgtcatggataaaatttgcatgagtgtgtacctgaagggatctcaaagccatggaatccaacaatttagtattaagtcgtcacaaatctgtgaaaccaagcctctgaccatctcttctggtctgttcaaaattttgtcatctggtcgttgcacctgctgtcacttcgtgatattaagatgcagtcaccatttgctcggatgattattcacactcttctcgagtcgtcatgtgatttacacacacttgagatatcagaaaacaatgtgggttgacatgaaaaatatattcttaatttccttttacttattttctatctggtaaattggttgttttttgtagattgctggctggctttcggaattgaacaaatgttctacaaacttattagcgctgaaatcagatatttttatgaactccctgtctgttcttaacctgagggaaaataatttgcaaaaggatgatgttgtagatcttcacaaaattctaataaaaatgcctaacttaagagatttagatataagtggcaatccagtcatggatgaaggtatcagatcattgatccctttcatttcatggtctattcaaaaggaaaatccacttctgagattaacagttgagaactgtgagttgtccagtattggtgtgattatacttctggagtgcctcacaaatgcgaagcaactccttgatgtgctatctattgcagacaatcatctagggagttctgtggcagctgcattggccagattcttgggttcacatgtacgggctttaaatgctacagatatcggcttgggaacagtaggcttccaaatacttgaggaaacattgccaacagaagtagctctttcccacatcaacatcagtaagaatcgtggtgggatcagagcagcatattttgtttccagattaatatgtcgagcaccagaccttgtctcagtcaatgcagcagggaaccttttaccacctgaatcattggaagtcatctgtaactccttgaagcaagggacttgtaatttggagcgagtggacctgactggcaacatgcatttatcaagcaatatttttcctgcattccttgaattcaagaagcatggaaagccaattctggtagtaccaccaaacttgagcacttctgctccatatgatgatgacccatgactactatgtaccgtataagccctagtgctgctcaagtcacttcagttggaactaaataaatagtgatagtatttttttggatcattcccaagaatcctaaccactagatcaaaacacaacacaaattgtacatctgtttagattcgacacggctttcgtcggtgaagctttgcgctagggcagcgacggtcgggaaagcgagcttgatgtcgacggtggactttctgttgctgacagacttccctctagatcggttaaggtttgaggtggagatcgaaaatgattgtgaatcttgtacctttaggtgtcggcctccacctctttatttatagggctacgcaacagatgctcaacaaccttgatgctctcgatcagggcgtgaggtcaggggtctagttttcggttgggtcaagttgggtcaactagtggagatcaattctaacattttcccctttaatctcattttataccttcagctttatacctttaatttttttgatattccattatagataagtgcatagagcatgtttcatcgtcacgattaatcaccgatagacttagcaactacagtacatatctctatcctgaaatagattctttaactttgggcctttt

SEQ ID NO: 34742 - DNA, 3206 bp, Zea Mays
gtggcgaccggcacatcaacatcagagagagggtggaacagacagagaaagagggactgtggtgtgcacatggaggagctctccaacaaggctctggcaccaagcttgctttcgctgtgcctggatgcggtagctgatcgtctcatcagcgacaacgccgccgcaggcggcggcgtgggccgaacgggttcgtcaggagggtgcagcggcggcggcggtctcgccggattctcggaagatgatggaggggaggcagacgaggaccgcctgcatccacaggagttggcggaggggcttccctgggagcttctccatcggctggcgtcccggctcccgcctgtcgtacttgagtcactccatcacgctgcacatgcccgatactgttctgctgaaactacttctggacttggagtgcaagatggagaaagacgtggggtgaaacgttcaaggtgtgaagatttcaacagcacttggcagttgttgttcaaacttcgctggcccctgggtggtaatactggacataataatttggtcactgtggattggcagcaaaagtattgggaaaagcatttacaagagtgtttaaatgaagctgcagaacatgcttttcttccttttttttgtgggagtattggtgagctgagtatatcagctaaaatcatgaattccatctaccagagcatgggcacatctcaacaacattcaagattagcatatcaatgcagcaaatttggttgctatgtgaggagcttgagactgcaaggtgttctttgcactgcagaaacttatgtcttgttgcaacaatgcaagctggaaagattaatgttcataagaattatatcagacctagaggttaatggtgcatgtttgcttctgagctggcatgcagagacactgctttctcttgaattcatccattgtcagctttatcctaccgtcatggataaaatttgcatgagtgtgtacctgaagggatctcaaagccatggaatccaacaatttagtattaagtcgtcacaaatctgtgaaaccaagcctctgaccatctcttctggtctgttcaaaattttgtcatctggcaagtaagctgcatgcccttcaatattcacaattgaaatattatggattgaaaaacaaatgaaccatacttttagtttattttttctacttctacagaagcatcccattagtattaatcacggggtattgatcatttatgtgtttctgaatagttttacttatatgcatttgtcatatcgatactttttttttgggaaaacgcaggagaactgcgcctcaatatattaagaagaagagataaatccagatcaaagagatctggacaaattacaaggcctcctcatgggggccagaaacacagcaaactgaaaaaatccatcaaactaaacaactccctagtctccaggaattagggcagcaaggtatgaaagacccttagccccagccatctcccaagactgcctctcctccctggctaaattaatggacagatctaaactaggagtacaaccatcaaaaacacaactattaccatcaaagacacaactgttaagtcatatcgatactttatagtccatttcaatgtgaaacatttaaacaccgttcaatccttacaattgttcaggtcgttgcacctgctgtcacttcgtgatattaagatgcagtcaccatttgctcggatgattattcacactcttctcgagtcgtcatgtgatttacacacacttgagatatcagaaaacaatattgctggctggctttcggaattgaacaaatgttctacaaacttattagcgctgaaatcagatatttttatgaactccctgtctgttcttaacctgagggaaaataatttgcaaaaggatgatgttgtagatcttcacaaaattctaataaaaatgcctaacttaagagatttagatataagtggcaatccagtcatggatgaaggtatcagatcattgatccctttcatttcatggtctattcaaaaggaaaatccacttctgagattaacagttgagaactgtgagttgtccagtattggtgtgattatacttctggagtgcctcacaaatgcgaagcaactccttgatgtgctatctattgcagacaatcatctagggagttctgtggcagctgcattggccagattcttgggttcacatgtacgggctttaaatgctacagatatcggcttgggaacagtaggcttccaaatacttgaggaaacattgccaacagaagtagctctttcccacatcaacatcagtaagaatcgtggtgggatcagagcagcatattttgtttccagattaatatgtcgagcaccagaccttgtctcagtcaatgcagcagggaaccttttaccacctgaatcattggaagtcatctgtaactccttgaagcaagggacttgtaatttggagcgagtggacctgactggcaacatgcatttatcaagcaatatttttcctgcattccttgaattcaagaagcatggaaagccaattctggtagtaccaccaaacttgagcacttctgctccatatgatgatgacccatgactactatgtaccgtataagccctagtgctgctcaagtcacttcagttggaactaaataaatagtgatagtatttttttggatcattcccaagaatcctaaccactagatcaaaacacaacacaaattgtacatctgtttagattcgacacggctttcgtcggtgaagctttgcgctagggcagcgacggtcgggaaagcgagcttgatgtcgacggtggactttctgttgctgacagacttccctctagatcggttaaggtttgaggtggagatcgaaaatgattgtgaatcttgtacctttaggtgtcggcctccacctctttatttatagggctacgcaacagatgctcaacaaccttgatgctctcgatcagggcgtgaggtcaggggtctagttttcggttgggtcaagttgggtcaactagtggagatcaattctaacattttcccctttaatctcattttataccttcagctttatacctttaatttttttgatattccattatagataagtgcatagagcatgtttcatcgtcacgattaatcaccgatagacttagcaactacagtacatatctctatcctgaaatagattctttaactttgggcctttt

SEQ ID NO: 34743 - DNA, 2518 bp, Zea Mays
gtggcgaccggcacatcaacatcagagagagggtggaacagacagagaaagagggactgtggtgtgcacatggaggagctctccaacaaggctctggcaccaagcttgctttcgctgtgcctggatgcggtagctgatcgtctcatcagcgacaacgccgccgcaggcggcggcgtgggccgaacgggttcgtcaggagggtgcagcggcggcggcggtctcgccggattctcggaagatgatggaggggaggcagacgaggaccgcctgcatccacaggagttggcggaggggcttccctgggagcttctccatcggctggcgtcccggctcccgcctgtcgtacttgagtcactccatcacgctgcacatgcccgatactgttctgctgaaactacttctggacttggagtgcaagatggagaaagacgtggggtgaaacgttcaaggtgtgaagatttcaacagcacttggcagttgttgttcaaacttcgctggcccctgggtggtaatactggacataataatttggtcactgtggattggcagcaaaagtattgggaaaagcatttacaagagtgtttaaatgaagctgcagaacatgcttttcttccttttttttgtgggagtattggtgagctgagtatatcagctaaaatcatgaattccatctaccagagcatgggcacatctcaacaacattcaagattagcatatcaatgcagcaaatttggttgctatgtgaggagcttgagactgcaaggtgttctttgcactgcagaaacttatgtcttgttgcaacaatgcaagctggaaagattaatgttcataagaattatatcagacctagaggttaatggtgcatgtttgcttctgagctggcatgcagagacactgctttctcttgaattcatccattgtcagctttatcctaccgtcatggataaaatttgcatgagtgtgtacctgaagggatctcaaagccatggaatccaacaatttagtattaagtcgtcacaaatctgtgaaaccaagcctctgaccatctcttctggtctgttcaaaattttgtcatctgattgctggctggctttcggaattgaacaaatgttctacaaacttattagcgctgaaatcagatatttttatgaactccctgtctgttcttaacctgagggaaaataatttgcaaaaggatgatgttgtagatcttcacaaaattctaataaaaatgcctaacttaagagatttagatataagtggcaatccagtcatggatgaaggtatcagatcattgatccctttcatttcatggtctattcaaaaggaaaatccacttctgagattaacagttgagaactgtgagttgtccagtattggtgtgattatacttctggagtgcctcacaaatgcgaagcaactccttgatgtgctatctattgcagacaatcatctagggagttctgtggcagctgcattggccagattcttgggttcacatgtacgggctttaaatgctacagatatcggcttgggaacagtaggcttccaaatacttgaggaaacattgccaacagaagtagctctttcccacatcaacatcagtaagaatcgtggtgggatcagagcagcatattttgtttccagattaatatgtcgagcaccagaccttgtctcagtcaatgcagcagggaaccttttaccacctgaatcattggaagtcatctgtaactccttgaagcaagggacttgtaatttggagcgagtggacctgactggcaacatgcatttatcaagcaatatttttcctgcattccttgaattcaagaagcatggaaagccaattctggtagtaccaccaaacttgagcacttctgctccatatgatgatgacccatgactactatgtaccgtataagccctagtgctgctcaagtcacttcagttggaactaaataaatagtgatagtatttttttggatcattcccaagaatcctaaccactagatcaaaacacaacacaaattgtacatctgtttagattcgacacggctttcgtcggtgaagctttgcgctagggcagcgacggtcgggaaagcgagcttgatgtcgacggtggactttctgttgctgacagacttccctctagatcggttaaggtttgaggtggagatcgaaaatgattgtgaatcttgtacctttaggtgtcggcctccacctctttatttatagggctacgcaacagatgctcaacaaccttgatgctctcgatcagggcgtgaggtcaggggtctagttttcggttgggtcaagttgggtcaactagtggagatcaattctaacattttcccctttaatctcattttataccttcagctttatacctttaatttttttgatattccattatagataagtgcatagagcatgtttcatcgtcacgattaatcaccgatagacttagcaactacagtacatatctctatcctgaaatagattctttaactttgggcctttt

SEQ ID NO: 34744 - DNA, 2652 bp, Zea Mays
cgccgggcggccggtggcgaccggcacatcaacatcagagagagggtggaacagacagagaaagagggactgtggtgtgcacatggaggagctctccaacaaggctctggcaccaagcttgctttcgctgtgcctggatgcggtagctgatcgtctcatcagcgacaacgccgccgcaggcggcggcgtgggccgaacgggttcgtcaggagggtgcagcggcggcggcggtctcgccggattctcggaagatgatggaggggaggcagacgaggaccgcctgcatccacaggagttggcggaggggcttccctgggagcttctccatcggctggcgtcccggctcccgcctgtcgtacttgagtcactccatcacgctgcacatgcccgatactgttctgctgaaactacttctggacttggagtgcaagatggagaaagacgtggggtgaaacgttcaaggtgtgaagatttcaacagcacttggcagttgttgttcaaacttcgctggcccctgggtggtaatactggacataataatttggtcactgtggattggcagcaaaagtattgggaaaagcatttacaagagtgtttaaatgaagctgcagaacatgcttttcttccttttttttgtgggagtattggtgagctgagtatatcagctaaaatcatgaattccatctaccagagcatgggcacatctcaacaacattcaagattagcatatcaatgcagcaaatttggttgctatgtgaggagcttgagactgcaaggtgttctttgcactgcagaaacttatgtcttgttgcaacaatgcaagctggaaagattaatgttcataagaattatatcagacctagaggttaatggtgcatgtttgcttctgagctggcatgcagagacactgctttctcttgaattcatccattgtcagctttatcctaccgtcatggataaaatttgcatgagtgtgtacctgaagggatctcaaagccatggaatccaacaatttagtattaagtcgtcacaaatctgtgaaaccaagcctctgaccatctcttctggtctgttcaaaattttgtcatctggtcgttgcacctgctgtcacttcgtgatattaagatgcagtcaccatttgctcggatgattattcacactcttctcgagtcgtcatgtgatttacacacacttgagatatcagaaaacaatattgctggctggctttcggaattgaacaaatgttctacaaacttattagcgctgaaatcagatatttttatgaactccctgtctgttcttaacctgagggaaaataatttgcaaaaggatgatgttgtagatcttcacaaaattctaataaaaatgcctaacttaagagatttagatataagtggcaatccagtcatggatgaaggtatcagatcattgatccctttcatttcatggtctattcaaaaggaaaatccacttctgagattaacagttgagaactgtgagttgtccagtattggtgtgattatacttctggagtgcctcacaaatgcgaagcaactccttgatgtgctatctattgcagacaatcatctagggagttctgtggcagctgcattggccagattcttgggttcacatgtacgggctttaaatgctacagatatcggcttgggaacagtaggcttccaaatacttgaggaaacattgccaacagaagtagctctttcccacatcaacatcagtaagaatcgtggtgggatcagagcagcatattttgtttccagattaatatgtcgagcaccagaccttgtctcagtcaatgcagcagggaaccttttaccacctgaatcattggaagtcatctgtaactccttgaagcaagggacttgtaatttggagcgagtggacctgactggcaacatgcatttatcaagcaatatttttcctgcattccttgaattcaagaagcatggaaagccaattctggtagtaccaccaaacttgagcacttctgctccatatgatgatgacccatgactactatgtaccgtataagccctagtgctgctcaagtcacttcagttggaactaaataaatagtgatagtatttttttggatcattcccaagaatcctaaccactagatcaaaacacaacacaaattgtacatctgtttagattcgacacggctttcgtcggtgaagctttgcgctagggcagcgacggtcgggaaagcgagcttgatgtcgacggtggactttctgttgctgacagacttccctctagatcggttaaggtttgaggtggagatcgaaaatgattgtgaatcttgtacctttaggtgtcggcctccacctctttatttatagggctacgcaacagatgctcaacaaccttgatgctctcgatcagggcgtgaggtcaggggtctagttttcggttgggtcaagttgggtcaactagtggagatcaattctaacattttcccctttaatctcattttataccttcagctttatacctttaatttttttgatattccattatagataagtgcatagagcatgtttcatcgtcacgattaatcaccgatagacttagcaactacagtacatatctctatcctgaaatagattctttaactttgggcctttt

SEQ ID NO: 34745 - DNA, 2277 bp, Zea Mays
aaggactgtagattcgccgggcggccggtggcgaccggcacatcaacatcagagagagggtggaacagacagagaaagagggactgtggtgtgcacatggaggagctctccaacaaggctctggcaccaagcttgctttcgctgtgcctggatgcggtagctgatcgtctcatcagcgacaacgccgccgcaggcggcggcgtgggccgaacgggttcgtcaggagggtgcagcggcggcggcggtctcgccggattctcggaagatgatggaggggaggcagacgaggaccgcctgcatccacaggagttggcggaggggcttccctgggagcttctccatcggctggcgtcccggctcccgcctgtcgtacttgagtcactccatcacgctgcacatgcccgatactgttctgctgaaactacttctggacttggagtgcaagatggagaaagacgtggggtgaaacgttcaaggtgtgaagatttcaacagcacttggcagttgttgttcaaacttcgctggcccctgggtggtaatactggacataataatttggtcactgtggattggcagcaaaagtattgggaaaagcatttacaagagtgtttaaatgaagctgcagaacatgcttttcttccttttttttgtgggagtattggtgagctgagtatatcagctaaaatcatgaattccatctaccagagcatgggcacatctcaacaacattcaagattagcatatcaatgcagcaaatttggttgctatgtgaggagcttgagactgcaaggtgttctttgcactgcagaaacttatgtcttgttgcaacaatgcaagctggaaagattaatgttcataagaattatatcagacctagagattgctggctggctttcggaattgaacaaatgttctacaaacttattagcgctgaaatcagatatttttatgaactccctgtctgttcttaacctgagggaaaataatttgcaaaaggatgatgttgtagatcttcacaaaattctaataaaaatgcctaacttaagagatttagatataagtggcaatccagtcatggatgaaggtatcagatcattgatccctttcatttcatggtctattcaaaaggaaaatccacttctgagattaacagttgagaactgtgagttgtccagtattggtgtgattatacttctggagtgcctcacaaatgcgaagcaactccttgatgtgctatctattgcagacaatcatctagggagttctgtggcagctgcattggccagattcttgggttcacatgtacgggctttaaatgctacagatatcggcttgggaacagtaggcttccaaatacttgaggaaacattgccaacagaagtagctctttcccacatcaacatcagattaatatgtcgagcaccagaccttgtctcagtcaatgcagcagggaaccttttaccacctgaatcattggaagtcatctgtaactccttgaagcaagggacttgtaatttggagcgagtggacctgactggcaacatgcatttatcaagcaatatttttcctgcattccttgaattcaagaagcatggaaagccaattctggtagtaccaccaaacttgagcacttctgctccatatgatgatgacccatgactactatgtaccgtataagccctagtgctgctcaagtcacttcagttggaactaaataaatagtgatagtatttttttggatcattcccaagaatcctaaccactagatcaaaacacaacacaaattgtacatctgtttagattcgacacggctttcgtcggtgaagctttgcgctagggcagcgacggtcgggaaagcgagcttgatgtcgacggtggactttctgttgctgacagacttccctctagatcggttaaggtttgaggtggagatcgaaaatgattgtgaatcttgtacctttaggtgtcggcctccacctctttatttatagggctacgcaacagatgctcaacaaccttgatgctctcgatcagggcgtgaggtcaggggtctagttttcggttgggtcaagttgggtcaactagtggagatcaattctaacattttcccctttaatctcattttataccttcagctttatacctttaatttttttgatattccattatagataagtgcatagagcatgtttcatcgtcacgattaatcaccgatagacttagcaactacagtacatatctctatcctgaaatagattctttaactttgggcctttt

SEQ ID NO: 34746 - DNA, 680 bp, Zea Mays
gctcccctcatttccccctccccttcctctctatgacgggcgggccccaccccggccttccctttcctccagccgcacgggcacgcgcccagcgcgccgccgccacaggcagccgaaccggccgcgcctctcacctcctcgtcctttccccttccctcggaagtggagcactagcatcgttctctctcccttcctcttccccacttcctctccccattcactccgagggaaacggccggcgccactaatggcagccgccgacctctcccttcccggatttctctctccctctcctttctctctataaatatcgacgccgagcccccatggatccgttccccggccacccaagctcgccccacgccatctcctctctcgccgctctcgccgacgccctgctcaccaacgaccggagccgctggagcgccatcgccatcgaggaccactaaagcgccgccgtcgaggaccgcccggagcacgccaactgcctccctttcttctagccgtgcccctgctccctggctggccccctgctcttcgatttcgtccctctgcaaggactagtggaacaagaagctgattttgtggtggaggacccaaatacgtttgaggacgacactcaagacacttctgaacaaagaaaatggattctccctctgcatttcttattgtacccaaat

SEQ ID NO: 34747 - DNA, 963 bp, Zea Mays
gctcccctcatttccccctccccttcctctctatgacgggcgggccccaccccggccttccctttcctccagccgcacgggcacgcgcccagcgcgccgccgccacaggcagccgaaccggccgcgcctctcacctcctcgtcctttccccttccctcggaagtggagcactagcatcgttctctctcccttcctcttccccacttcctctccccattcactccgagggaaacggccggcgccactaatggcagccgccgacctctcccttcccggatttctctctccctctcctttctctctataaatatcgacgccgagcccccatggatccgttccccggccacccaagctcgccccacgccatctcctctctcgccgctctcgccgacgccctgctcaccaacgaccggagccgctggagcgccatcgccatcgaggaccactaaagcgccgccgtcgaggaccgcccggagcacgccaactgcctccctttcttctagccgtgcccctgctccctggctggccccctgctcttcgatttcgtccctctgcaaggactagtggaacaaggttgaagatgacacaatttttgttctattttataaactatgtttaatttagtttagatctcctgcagcgatttgttgtttaaatttgtatatatatcttgaaattgaaatcatgagaatattgaatgcttaatatcgagtgtatgtgatgaactactgtttctattatttatcgcatatgcatgttaatttgtttatgaccattaaaattattttggagttagttgtttagaatacgaataaaaggattgatgttttagtagccttataatgatgcgctgatcatgatagaatgtttatttggagctcatgttctcataaattgtttatagatgttctaaacaagtatttagaagaaaagtagactacacttttcttaattaaaatttag

SEQ ID NO: 34748 - DNA, 936 bp, Zea Mays
attgaagcctcctccctcccctgcatgaactctcagcatgagcatcacccctcccgtcaatcaaaactacagtgctgtgctactacccctctagtccagcaattccacgaccggccatgaccaccgagttcctcagggtgaagaagttccaccaggacgaggccgcccggagccggagactgatagagctgcagccggagctgtcgctcggcccagtgtggccgggcttggcaaccggtggtggcctggcagccaagagctcctcgatcgagtctcatggaagcccccggaagaagaggaagaactatacggcggccagctgggactgggaggtgcatcagcagccgcccgcgagcctggatctccagctcaaccaccccctgcctctcgactgggaacagtgcctcgacctccaatctgggaggatgtattacctgaacaggaagacgctgaagaagagctgggttcgaccccgggagcagagcctgaataacgtggacctcaacatctccacagctcccgacgaggatgagccagggaaacccgctggcaccttgttctctggaggcaacatggtggccgtgccgtgcgccaactgtcacctcctagtcatgctctgcatgtcctccccgtcctgccccaactgcaagttcgtgcagccgctgccaccttctgttgtgccgcctgcctatccgaggctcggtgccgccgtcaagccgctggagaccctcagccttctccattaggcgcatgcacgcgcgctccactggcagaagcttgtagaaaggaggaaaccatagttgagttgtgtggtgcatgggttagtattactattacctgggtaatgggtgtatgaatgtgaaatcatgcatgcatataaaaaggggtacggtcggttgcacgaatcaaacaaatcaatcaaatctactttatttc

SEQ ID NO: 34749 - DNA, 1543 bp, Zea Mays
acagcactccacctcactgctccagtcgcgagccgcagctgcgcgtcgcgtcgcatcgcacgcatctctcctgccctccagctccaaagcttcgtcgtctgcgtcgccccgcgccccgtcttgctcgctccaagctagacaccataccacccagatcccgaggcccctctccctcgatcgccgcctcccggtagcggatccggcgccggctcgcgccccccgacaggttttgttttatgcttgttcatttgtctatggacaatggactagttgctgcactgcttttgtgagtcaccatgggaagcagtggagcagatacatcgtctaagccaaacaaggcatccgccccacaggagcagcaacaacctgctacctcaggtgctgcaacaccggctgtttatccagactggtccagcttccaggcatatcctccaatcccaccacatgggttcttcccctcacctgtggcatcaagtccacagggtcatccttacatgtggggagctcagcctatgattccaccatatggagcaccgccatatgtcatgtaccctcctggagtgtatgcacacccatctatggcctcgggtgcacatccatttactccttatgccattacttctccaaatggcaatgctgatgctactggaactactgctgtagcttgtgatactgatggcaagccctctgaaggcaaagataaaagtccaactaagagacccaaaggaactttgggcagcttgaacatgcttactggaaagaaccccagtgaacatggtaagacctcaggtgcatcagctaatggagccacttctcaaagtggcgaaagtggcagtgacagttcaagcgaagggagtgaaggaaattctcataatgattcatacaagcatagtggacaggaacaagatggagacgtacgaagttcccagaatggtgcatcacgttctccatctgagggaaaatttaaccaagctatggcaatcatgcccatgccatcaagtggcccagtaactggtccaactacaaacctgaatattgggatggactattgggccaacacagcaagctctgctcctgtaattcatggcaaagtgaccccaacaacagttccaggggctgtggtcccagcagagcaatggatacaggatgaacgtgaactcaaaaggcaaaaaagaaaacagtctaatagggagtctgcacgcagatctaggttgcgtaaacaggctgaatgtgaggagttggctcaacgtgctgatgttttaaagcaggaaaatgcttcacttagagatgaagtaaaccgtatcagaaaagagtatgaggaacttctatcaaagaataattcactaaaggaaaaacttgaaggcaaacaacacaaaactgatgaggcaggacttaacaacaagctgcaacattctggcaatgacatccagaaaaaaggaaactaatcgagctatcatgcaatgcttgcatagcatggccctaactagattattgggaggcgcaattgtagaaagtggttctggactggagtatgtcctacatg

SEQ ID NO: 34750 - DNA, 2964 bp, Zea Mays
acagcactccacctcactgctccagtcgcgagccgcagctgcgcgtcgcgtcgcatcgcacgcatctctcctgccctccagctccaaagcttcgtcgtctgcgtcgccccgcgccccgtcttgctcgctccaagctagacaccataccacccaggttttgttttatgcttgttcatttgtctatggacaatggactagttgctgcactgcttttgtgagtcaccatgggaagcagtggagcagatacatcgtctaagccaaacaaggcatccgccccacaggagcagcaacaacctgctacctcaggtgctgcaacaccggctgtttatccagactggtccagcttccaggcatatcctccaatcccaccacatgggttcttcccctcacctgtggcatcaagtccacagggtcatccttacatgtggggagctcagcctatgattccaccatatggagcaccgccatatgtcatgtaccctcctggagtgtatgcacacccatctatggcctcgggtgcacatccatttactccttatgccattacttctccaaatggcaatgctgatgctactggaactactgctgtagcttgtgatactgatggcaagccctctgaaggcaaagataaaagtccaactaagagacccaaaggaactttgggcagcttgaacatgcttactggaaagaaccccagtgaacatggtaagacctcaggtgcatcagctaatggagccacttctcaaagtggcgaaagtggcagtgacagttcaagcgaagggagtgaaggaaattctcataatgtaagtattgctgaattgttcattcatttttgttgtatattcgttatgtatgcaaaataatttggtctgtgtatccaatgaaagaattttaaaaatactccctccagtaaaaaatgatatttttgtctttttagtctttgaagtataactttggcctcattttttgtactgaaatctagttacaatgtctaataaattatgtgatatcaaattttttactgccgaaaactctacccttctgtatatccaaactgaatattttgagagctctcattggttaaagtttcaaaagtttgaccagattttagtcaaaggatcatagaaatgttttttccaatatcctgtctcctgacatgattgatgtactttgttagtttatttgatgtccaaatatttcggaccacactatcatgccttttgagttgctgtgcattcttgtcacagttgtgtttacaatttaattgcatatggtcaatatttctggcattcattatgcgttgattttatcttgggagctcttttaatgcatgtgcatcgttgagtaatttttacaggattcatacaagcatagtggacaggaacaagatggagacgtacgaagttcccagaatggtgcatcacgttctccatctgagggaaaatttaaccaagctatggcaatcatgcccatgccatcaagtggcccagtaactggtccaactacaaacctgaatattgggatggactattgggccaacacagcaagctctgctcctgtaattcatggcaaagtgaccccaacaacagttccaggggctgtggtcccagcagagcaatggatacaggatgaacgtgaactcaaaaggcaaaaaagaaaacagtctaatagggagtctgcacgcagatctaggttgcgtaaacaggctgaatgtgaggagttggctcaacgtgctgatgttttaaagcaggaaaatgcttcacttagagatgaagtaaaccgtatcagaaaagagtatgaggaacttctatcaaagaataattcactaaaggaaaaacttgaaggcaaacaacacaaaactgatgaggcaggacttaacaacaagctgcaacattctggcaatgacatccagaaaaaaggaaactaatcgagctatcatgcaatgcttgcatagcatggccctaactagattattgggaggcgcaattgtagtatgcgtgttaactccttactttattgcagttaattgttaccaggttgtgataatgttgatgccaaccttgtgtgtgggtgtttcctgtttcagatctatcttggcttatcttttagaagtcaagatgtgactgaagatgtaggctgtgacccagttcactgtatctgaaatagtggataaactcaaatttacaatttgtattgctgactaatattgttatgtatacctggcaaaaggttttctttgaattcagtctctggttgaacattttgctggtctaccactgctgcatagcttatttatactgtttatatcagttgtttctagttattctctatagataattaacaaatagatgaggaagaacgtctcaacctctgcaacaatgaatgtgtgtgtgcgtgcgtgtgtagtatgcaagtccctctttttgcgtcgtctattttcgggtgtaggggtgtgcgtgtagtatgcaagtccctcttttttgcgtcatctattttatactccctcctgtcccaaaatataattcgttttagatcaaacacatattgattaattgatctatggatgtagtttgtatgtctgtctattcattatcacttatttgaatgtgaataaaaaaaaagagggctagaaagaactatattatgggacggagggagtatttcacattgatctatggatgtagtttgtatgtctgtctattcattatcacttatttgaatgtgaacaaaaaaaagagggctagaaagaactatattatgggacggagggagtatttcacatcgaagtttccaggtttgtttcaaccctgttcaaattgtgagccttggctgtatttgattttaagtttgaataatccacctgctgtaggtagtttggttaaaagacattgctatttttctgcttagtgatactgatatcagttattcatttctcgtccatctatttttgaagtgtcagtagtg

SEQ ID NO: 34751 - DNA, 1212 bp, Zea Mays
gcagcctactactgttgcagctaacgtgagatccatatttgcatgcttgcttgatcaagtgagccaatacttaactgaagggcttgaccgtgctagagagagtttaaatgaggccgcagctttgcgggatagatatgtcatcgggacaagtgttagtaggagagtggcagctgctgctgcttctgcacaagaggtggcagcttcagctggtgagagcagctttagatcctttatgattgctgtgcagcgttgtaccagtagcgtagctattcttcagcagtacttctcaaataccatatctcggctcttgctacctgttgatggtgctcatccgtctgcttgtgaagatatggggtcagcagtatcagtagttgaggctgctgctcacaaaggactgctacaatgtattgatactgttatgtctgaggttgaaagattgttgtcttcggaacagaaggctacagattatcgaacaccagatgatggagctgcaccagatcatcggccaactaatgcttgtataagaattgtagcctatctctctcgtgttcttgaggttgcattcagtgcccttgaaggcctcaacaaacagtcctttttgactgagctgggaaatcgcttgcataaggggctgcttaatcattggcagaagttcacatttagtcccagtggtggcctacggttgaaacgtgacataactgaatatggggatttcgttcgtagcttcaatgccccctccatagatgagaagttcgaactgttgggaattgtggcgaacgtcttcattgttgctccagaaagtttagcatccctgtttgaaggaacccccagcatccgaaaggatgccttgagctccgggatgattataagacagcgaaaatcgcttcgatgctcaactatatcatgtccgagtaatgagtgaagtggaaccgttagaccgttacactttgctgctctcgtggactattgatgccgtttgtataaatgaccttcgaaattatgtttattcttggttccaatttatttgttttcctatcctttttctttttgggctttgctcaatttgagctgtacatgtggttcaggtcctttagacctctacttgtataaatgatgagaaatttctgtggctgtttacgtgcgaaaatttacgcaaacgctgtctgatcttttgaaatggaaaatctggagaaacgggaatacactaataaa

SEQ ID NO: 34752 - DNA, 978 bp, Zea Mays
tgcagcctactactgttgcagctaacgtgagatccatatttgcatgcttgcttgatcaagtgagccaatacttaactgaagggcttgaccgtgctagagagagtttaaatgaggccgcagctttgcgggatagatatgtcatcgggacaagtgttagtaggagagtggcagctgctgctgcttctgcacaagaggtggcagcttcagctggtgagagcagctttagatcctttatgattgctgtgcagcgttgtaccagtagcgtagctattcttcagcagaattgtagcctatctctctcgtgttcttgaggttgcattcagtgcccttgaaggcctcaacaaacagtcctttttgactgagctgggaaatcgcttgcataaggggctgcttaatcattggcagaagttcacatttagtcccagtggtggcctacggttgaaacgtgacataactgaatatggggatttcgttcgtagcttcaatgccccctccatagatgagaagttcgaactgttgggaattgtggcgaacgtcttcattgttgctccagaaagtttagcatccctgtttgaaggaacccccagcatccgaaaggatgccttgaggttcattcagctccgggatgattataagacagcgaaaatcgcttcgatgctcaactatatcatgtccgagtaatgagtgaagtggaaccgttagaccgttacactttgctgctctcgtggactattgatgccgtttgtataaatgaccttcgaaattatgtttattcttggttccaatttatttgttttcctatcctttttctttttgggctttgctcaatttgagctgtacatgtggttcaggtcctttagacctctacttgtataaatgatgagaaatttctgtggctgtttacgtgcgaaaatttacgcaaacgctgtctgatcttttgaaatggaaaatctggagaaacgggaatacactaataaa

SEQ ID NO: 34753 - DNA, 1138 bp, Zea Mays
tgcagcctactactgttgcagctaacgtgagatccatatttgcatgcttgcttgatcaagtgagccaatacttaactgaagggcttgaccgtgctagagagagtttaaatgaggccgcagctttgcgggatagatatgtcatcgggacaagtgttagtaggagagtggcagctgctgctgcttctgcacaagaggtggcagcttcagctggtgagagcagctttagatcctttatgattgctgtgcagcgttgtaccagtagcgtagctattcttcagcagtacttctcaaataccatatctcggctcttgctacctgttgatggtgctcatccgtctgcttgtgaagatatggggtcagcagtatcagtagttgaggctgctgctcacaaaggactgctacaatgtattgatactgttatgtctgaggttgaaagattgttgtcttcggaacagaaggctacagattatcgaacaccagatgatggagctgcaccagatcatcggccaactaatgcttgtataagggaaatcgcttgcataaggggctgcttaatcattggcagaagttcacatttagtcccagtggtggcctacggttgaaacgtgacataactgaatatggggatttcgttcgtagcttcaatgccccctccatagatgagaagttcgaactgttgggaattgtggcgaacgtcttcattgttgctccagaaagtttagcatccctgtttgaaggaacccccagcatccgaaaggatgccttgaggttcattcagctccgggatgattataagacagcgaaaatcgcttcgatgctcaactatatcatgtccgagtaatgagtgaagtggaaccgttagaccgttacactttgctgctctcgtggactattgatgccgtttgtataaatgaccttcgaaattatgtttattcttggttccaatttatttgttttcctatcctttttctttttgggctttgctcaatttgagctgtacatgtggttcaggtcctttagacctctacttgtataaatgatgagaaatttctgtggctgtttacgtgcgaaaatttacgcaaacgctgtctgatcttttgaaatggaaaatctggagaaacgggaatacactaataaa

SEQ ID NO: 34754 - DNA, 303 bp, Zea Mays
cctcgtccagtccgcccccgatacggcggccacacccccacacccccacacttctccgacaagggaagggaaccccagatctccgccgccccgccagccgctatgccgactgccgccaaccccgccgccgcgctgcccctcaccctcgacctcgaggacttcaagattgataagcggctccagaatcttaagaaggaggtggcggtgcaggatgccaagcatcgcaagacgctaggggaggttagttataatgctcgcaggattttatatttgtcaccgattactgcagagatattgttgtag

SEQ ID NO: 34755 - DNA, 3417 bp, Zea Mays
atggtgacctactggctacttttgttggtactgctttggatgggtagaaaaaagttattaactcctcctgaaactccactttttcgatctttggatgacgaagaaaaccaatccatcactcaggtttctaggggcagagctcagagcaagcctatacaaatttcaagatcatccatggtagataataatcaaagagctagtagaagcagtgcaagctcaagtaggcttagcccatcgccatgctctatgggaaggacaagatcatctagttcagcttctcgctctagtccaccacttgctgaaacacaaacaccatcacgaagattgtcaacccctccgattgctaagacattaacacctcctcgaaggtctccaagtcctgtctcaagaaggatgagtactggttcaagtggcccaactttgaatggaacaagaggagcttcaccagtgaaatctaatcacaggtcttcttcaccaaagctgcatggatggcaatcaaatgttcctggtttctctttcgatgcgcctttgaaccttcgcacatctctaactgatcgtccagtatgccggtcaaggggtggatcgccttcatcttttagtggactagaaaagggttcaagaggtagaagactgtcaatgtctcccactccacctagaagagccagttcatctcacagcattgaacgggaccgaatgagctcttatagcaaagcttctgcaacatcatctggtgaggatgatctggagtctatgcagtctgtaccaattagctactccagtagcccagttgtgaaaaagagcttggttgtgatgaaaaccagaaccattgcatcatcaaagaatctgtccaaaaaattgacacctagttctgtcccaaagcggtcatttgactctgcactttggttaatggatcatcgcaaagctccacaagataggtttcggccacttctatcagcactgcaagctcttaccatggtgccacttttggctcttatatgcatggcagccaagaacaacatgattttgctggtgaatgggaagcagatgatatttctcagggtcatgaggatatatttatgtttgataaattggatgagctaaatgaagacattcattacaagagcatggaatctacggataattcactggtaatagtaaaacatctagtaagtggcagacaggacttggaaggaagcagaagacctaatcagtccttatgccattctactgatatttctcatgttagctttaaggctacttgctctagatgtgggaagtttttcgatgcgatggatgttgatgaagagggtgtctattgtgatgcatgtgctacaaaggatgggaatatcctcaccagtcctattgtacaaactataggagaagaaaaccaacaatatggtaaaactgcaaatttgaaaccttgcatcgcatctgattctcctgtacccacagattgtgaaatctatagcaaagaagtatctcttgatcatcaactagtgaacaatgaatcttacgctgattgcctggaccaggcccctccaattcactcaatggggcacacacctcaggaaatgctactggggcaggaggaaaacattgacgctgagcatagaaataaacatgttggggattcgttaggaaatacaaacgataattcctttcatcgatctagtgtggatgaatgtgaacaaacagaaccaacatctgtagggcaggacctttttatcatagaccaaatgaataaccataatcgtggactatcccaatgtaatgaaaatgtctctgaatctgtgacctgtgacaattctcatcaactgggatcaactacatatcagaaccctaagcttgaaactaccgaggatactgggatatcagtattgttagtccctaagcccaacagtaataaatggccaaatatgctctgttcagaaccctattatgcaagagatggtgtcagtatgatgaagcgtagctttggactgggcagctcttcagctgcttcttccagtgatcttgggtcttcaagacagtcaatcatatgttttgagcgccttaggagtggtaagaagggtgactttgagaagtcccagataagcagtactattagttgtcaaagcattgcttctgtgtcagatatgtcaatttgtagctcttcagcttcactttgccctcagagtgatgcagtaggagattcctgtttcccaattgacactttggaaagcggcacttcaggaactctgatctcttctcaagaaaatgatgatgctttttgtaaggatactttgccaagtgctatggaatgtccgtcttcttcacagtttattgctgatgatgacagtcccggtgacatgaaaatccagagctacttaagtgaggtaggatatacaacagttgagaaccatagtgcttgcagaatgactgacatggattgtaccagtacaaatatgtattctttagatactgaaatgccaagtgataccctagaatcatcaggcccagtggaaagtagcatgcctgaaactgaagaggatgcttacactatcagtcagtgtaataaaggtagtgctccagaacattcaagtgatgagaataactttgataatattcaaatgcagtctgaaatagttcagggttcagcggaggaaaacagattggatgattgttgcatgtctgctatctcggaggaggacgtattgatttctggacaagaagatgacataaggaatcttcccaatgatgaagaattatgtgcggaggtagaaggaccaaggaaacaaatccagagatgttttacattggaagaagctgctgatacaattctcttctgtagttccattgtccacgaccttgcatacaaggctgcgactattgcgttggaaaacaagaaggaaccaaagtttgtggactctattcgtccaactgttgcaattgttagaggatcttttgctaaggaagagagtttaccaaagctgcctcacagacgaaccccaaaccgtaaggtcaaaaggaaaagattggaaggcgaaacaactacaacggaaactacagagaaagacgttgtcgcgaatgactccccccctgtatgttctgcatcgggtattacaaggaattccgataatatgaagccgccaaagctggagtccaagtgcaactgtataattatgtaactcggtcacatccaagattgaaattcctacatgcttggttaaccccgtcatcagcagcgatggagttcagcacaatggatcttccgctagattattttgcaaaggtgcatttgctgtgttttaggtgacagaatgcactgccagctgctattcttttgtaaagtcttttcttctcttttctgcttgtaatgaggtccttgcggtttgtccaaagttgtgctgatagcctatttacttgcaacgcacgtgg

SEQ ID NO: 34756 - DNA, 4101 bp, Zea Mays
aatcggtttttccacttctttaactccaaataaaccaacggaaattgaaaaacaaaagccacttcttcgccagtcctccgcctcccctcctctgctcctccagcgaagcgcacgcacggcgcgcaggctgagcaaggcaaccgaagcgagcgaggtcctttgcttctacccgcggcaacgccccaggcgcgcgcgacgcgtcgagctccggaggccgagggcgagcaccagtgcgggagtggaggagaggaggtctccgctggacgactgcacccccacccactcggggtcagggtccaaagccggatctgccttggggctcgcgcccgcggctggtggaacggactgctggctgacgagggctccgataatcgacggcggcggtggaatgccggtggaacacctgtttttcatttttgatgaggccatgatatatgttccatctgttctggatggaatttgactgcattctactgtctctaaaagaagggtaccaggcttaagaaaccagaaaaaatgccaccgtcaccctcaccgaggacatcaaggtctcctgcacaggagacttatcaaaagaggacaaacagtttcagaaatgtgcttcctgcaaaatcaaaggatgatgaactcgctttgttctctgatatgcagaaagttgagacggacaacttcttactggaaccgtcagtggattttgatgattcaatgaaaaaattgagatatttcccggaagtaaaacttggtgtcaacattcctgcccatggagaaagccatgaattgcttaacacagacggcgataaaaatgattatgagtggttattaactcctcctgaaactccactttttcgatctttggatgacgaagaaaaccaatccatcactcaggtttctaggggcagagctcagagcaagcctatacaaatttcaagatcatccatggtagataataatcaaagagctagtagaagcagtgcaagctcaagtaggcttagcccatcgccatgctctatgggaaggacaagatcatctagttcagcttctcgctctagtccaccacttgctgaaacacaaacaccatcacgaagattgtcaacccctccgattgctaagacattaacacctcctcgaaggtctccaagtcctgtctcaagaaggatgagtactggttcaagtggcccaactttgaatggaacaagaggagcttcaccagtgaaatctaatcacaggtcttcttcaccaaagctgcatggatggcaatcaaatgttcctggtttctctttcgatgcgcctttgaaccttcgcacatctctaactgatcgtccagtatgccggtcaaggggtggatcgccttcatcttttagtggactagaaaagggttcaagaggtagaagactgtcaatgtctcccactccacctagaagagccagttcatctcacagcattgaacgggaccgaatgagctcttatagcaaagcttctgcaacatcatctggtgaggatgatctggagtctatgcagtctgtaccaattagctactccagtagcccagttgtgaaaaagagcttggttgtgatgaaaaccagaaccattgcatcatcaaagaatctgtccaaaaaattgacacctagttctgtcccaaagcggtcatttgactctgcactttggttaatggatcatcgcaaagctccacaagataggtttcggccacttctatcagcactgcaagctcttaccatggtgccacttttggctcttatatgcatggcagccaagaacaacatgattttgctggtgaatgggaagcagatgatatttctcagggtcatgaggatatatttatgtttgataaattggatgagctaaatgaagacattcattacaagagcatggaatctacggataattcactggtaatagtaaaacatctagtaagtggcagacaggacttggaaggaagcagaagacctaatcagtccttatgccattctactgatatttctcatgttagctttaaggctacttgctctagatgtgggaagtttttcgatgcgatggatgttgatgaagagggtgtctattgtgatgcatgtgctacaaaggatgggaatatcctcaccagtcctattgtacaaactataggagaagaaaaccaacaatatggtaaaactgcaaatttgaaaccttgcatcgcatctgattctcctgtacccacagattgtgaaatctatagcaaagaagtatctcttgatcatcaactagtgaacaatgaatcttacgctgattgcctggaccaggcccctccaattcactcaatggggcacacacctcaggaaatgctactggggcaggaggaaaacattgacgctgagcatagaaataaacatgttggggattcgttaggaaatacaaacgataattcctttcatcgatctagtgtggatgaatgtgaacaaacagaaccaacatctgtagggcaggacctttttatcatagaccaaatgaataaccataatcgtggactatcccaatgtaatgaaaatgtctctgaatctgtgacctgtgacaattctcatcaactgggatcaactacatatcagaaccctaagcttgaaactaccgaggatactgggatatcagtattgttagtccctaagcccaacagtaataaatggccaaatatgctctgttcagaaccctattatgcaagagatggtgtcagtatgatgaagcgtagctttggactgggcagctcttcagctgcttcttccagtgatcttgggtcttcaagacagtcaatcatatgttttgagcgccttaggagtggtaagaagggtgactttgagaagtcccagataagcagtactattagttgtcaaagcattgcttctgtgtcagatatgtcaatttgtagctcttcagcttcactttgccctcagagtgatgcagtaggagattcctgtttcccaattgacactttggaaagcggcacttcaggaactctgatctcttctcaagaaaatgatgatgctttttgtaaggatactttgccaagtgctatggaatgtccgtcttcttcacagtttattgctgatgatgacagtcccggtgacatgaaaatccagagctacttaagtgaggtaggatatacaacagttgagaaccatagtgcttgcagaatgactgacatggattgtaccagtacaaatatgtattctttagatactgaaatgccaagtgataccctagaatcatcaggcccagtggaaagtagcatgcctgaaactgaagaggatgcttacactatcagtcagtgtaataaagcggaggaaaacagattggatgattgttgcatgtctgctatctcggaggaggacgtattgatttctggacaagaagatgacataaggaatcttcccaatgatgaagaattatgtgcggaggtagaaggaccaaggaaacaaatccagagatgttttacattggaagaagctgctgatacaattctcttctgtagttccattgtccacgaccttgcatacaaggctgcgactattgcgttggaaaacaagaaggaaccaaagtttgtggactctattcgtccaactgttgcaattgttagaggatcttttgctaaggaagagagtttaccaaagctgcctcacagacgaaccccaaaccgtaaggtcaaaaggaaaagattggaaggcgaaacaactacaacggaaactacagagaaagacgttgtcgcgaatgactccccccctgtatgttctgcatcgggtattacaaggaattccgataatatgaagccgccaaagctggagtccaagtgcaactgtataattatgtaactcggtcacatccaagattgaaattcctacatgcttggttaaccccgtcatcagcagcgatggagttcagcacaatggatcttccgctagattattttgcaaaggtgcatttgctgtgttttaggtgacagaatgcactgccagctgctattcttttgtaaagtcttttcttctcttttctgcttgtaatgaggtccttgcggtttgtccaaagttgtgctgatagcctatttacttgcaacgcacgtgg

SEQ ID NO: 34757 - DNA, 4211 bp, Zea Mays
aatcggtttttccacttctttaactccaaataaaccaacggaaattgaaaaacaaaagccacttcttcgccagtcctccgcctcccctcctctgctcctccagcgaagcgcacgcacggcgcgcaggctgagcaaggcaaccgaagcgagcgaggtcctttgcttctacccgcggcaacgccccaggcgcgcgcgacgcgtcgagctccggaggccgagggcgagcaccagtgcgggagtggaggagaggaggtctccgctggacgactgcacccccacccactcggggtcagggtccaaagccggatctgccttggggctcgcgcccgcggctggtggaacggactgctggctgacgagggctccgataatcgacggcggcggtggaatgccggtggaacacctgtttttcatttttgatgaggtggaatgcggcttcccaagctccattctgttttccatttcaatgaggccatgatatatgttccatctgttctggatggaatttgactgcattctactgtctctaaaagaagggtaccaggcttaagaaaccagaaaaaatgccaccgtcaccctcaccgaggacatcaagaaagttgagacggacaacttcttactggaaccgtcagtggattttgatgattcaatgaaaaaattgagatatttcccggaagtaaaacttggtgtcaacattcctgcccatggagaaagccatgaattgcttaacacagacggcgataaaaatgattatgagtggttattaactcctcctgaaactccactttttcgatctttggatgacgaagaaaaccaatccatcactcaggtttctaggggcagagctcagagcaagcctatacaaatttcaagatcatccatggtagataataatcaaagagctagtagaagcagtgcaagctcaagtaggcttagcccatcgccatgctctatgggaaggacaagatcatctagttcagcttctcgctctagtccaccacttgctgaaacacaaacaccatcacgaagattgtcaacccctccgattgctaagacattaacacctcctcgaaggtctccaagtcctgtctcaagaaggatgagtactggttcaagtggcccaactttgaatggaacaagaggagcttcaccagtgaaatctaatcacaggtcttcttcaccaaagctgcatggatggcaatcaaatgttcctggtttctctttcgatgcgcctttgaaccttcgcacatctctaactgatcgtccagtatgccggtcaaggggtggatcgccttcatcttttagtggactagaaaagggttcaagaggtagaagactgtcaatgtctcccactccacctagaagagccagttcatctcacagcattgaacgggaccgaatgagctcttatagcaaagcttctgcaacatcatctggtgaggatgatctggagtctatgcagtctgtaccaattagctactccagtagcccagttgtgaaaaagagcttggttgtgatgaaaaccagaaccattgcatcatcaaagaatctgtccaaaaaattgacacctagttctgtcccaaagcggtcatttgactctgcactttggttaatggatcatcgcaaagctccacaagataggtttcggccacttctatcaggtgcccctgccaacacatttggtgctgggaatggaaatgatgtgcacaaacctatgttctcacacaattcttctttgacaactagcagcactgcaagctcttaccatggtgccacttttggctcttatatgcatggcagccaagaacaacatgattttgctggtgaatgggaagcagatgatatttctcagggtcatgaggatatatttatgtttgataaattggatgagctaaatgaagacattcattacaagagcatggaatctacggataattcactggtaatagtaaaacatctagtaagtggcagacaggacttggaaggaagcagaagacctaatcagtccttatgccattctactgatatttctcatgttagctttaaggctacttgctctagatgtgggaagtttttcgatgcgatggatgttgatgaagagggtgtctattgtgatgcatgtgctacaaaggatgggaatatcctcaccagtcctattgtacaaactataggagaagaaaaccaacaatatggtaaaactgcaaatttgaaaccttgcatcgcatctgattctcctgtacccacagattgtgaaatctatagcaaagaagtatctcttgatcatcaactagtgaacaatgaatcttacgctgattgcctggaccaggcccctccaattcactcaatggggcacacacctcaggaaatgctactggggcaggaggaaaacattgacgctgagcatagaaataaacatgttggggattcgttaggaaatacaaacgataattcctttcatcgatctagtgtggatgaatgtgaacaaacagaaccaacatctgtagggcaggacctttttatcatagaccaaatgaataaccataatcgtggactatcccaatgtaatgaaaatgtctctgaatctgtgacctgtgacaattctcatcaactgggatcaactacatatcagaaccctaagcttgaaactaccgaggatactgggatatcagtattgttagtccctaagcccaacagtaataaatggccaaatatgctctgttcagaaccctattatgcaagagatggtgtcagtatgatgaagcgtagctttggactgggcagctcttcagctgcttcttccagtgatcttgggtcttcaagacagtcaatcatatgttttgagcgccttaggagtggtaagaagggtgactttgagaagtcccagataagcagtactattagttgtcaaagcattgcttctgtgtcagatatgtcaatttgtagctcttcagcttcactttgccctcagagtgatgcagtaggagattcctgtttcccaattgacactttggaaagcggcacttcaggaactctgatctcttctcaagaaaatgatgatgctttttgtaaggatactttgccaagtgctatggaatgtccgtcttcttcacagtttattgctgatgatgacagtcccggtgacatgaaaatccagagctacttaagtgaggtaggatatacaacagttgagaaccatagtgcttgcagaatgactgacatggattgtaccagtacaaatatgtattctttagatactgaaatgccaagtgataccctagaatcatcaggcccagtggaaagtagcatgcctgaaactgaagaggatgcttacactatcagtcagtgtaataaaggtagtgctccagaacattcaagtgatgagaataactttgataatattcaaatgcagtctgaaatagttcagggttcagcggaggaaaacagattggatgattgttgcatgtctgctatctcggaggaggacgtattgatttctggacaagaagatgacataaggaatcttcccaatgatgaagaattatgtgcggaggtagaaggaccaaggaaacaaatccagagatgttttacattggaagaagctgctgatacaattctcttctgtagttccattgtccacgaccttgcatacaaggctgcgactattgcgttggaaaacaagaaggaaccaaagtttgtggactctattcgtccaactgttgcaattgttagaggatcttttgctaaggaagagagtttaccaaagctgcctcacagacgaaccccaaaccgtaaggtcaaaaggaaaagattggaaggcgaaacaactacaacggaaactacagagaaagacgttgtcgcgaatgactccccccctgtatgttctgcatcgggtattacaaggaattccgataatatgaagccgccaaagctggagtccaagtgcaactgtataattatgtaactcggtcacatccaagattgaaattcctacatgcttggttaaccccgtcatcagcagcgatggagttcagcacaatggatcttccgctagattattttgcaaaggtgcatttgctgtgttttaggtgacagaatgcactgccagctgctattcttttgtaaagtcttttcttctcttttctgcttgtaatgaggtccttgcggtttgtccaaagttgtgctgatagcctatttacttgcaacgcacgtgg

SEQ ID NO: 34758 - DNA, 4323 bp, Zea Mays
aatcggtttttccacttctttaactccaaataaaccaacggaaattgaaaaacaaaagccacttcttcgccagtcctccgcctcccctcctctgctcctccagcgaagcgcacgcacggcgcgcaggctgagcaaggcaaccgaagcgagcgaggtcctttgcttctacccgcggcaacgccccaggcgcgcgcgacgcgtcgagctccggaggccgagggcgagcaccagtgcgggagtggaggagaggaggtctccgctggacgactgcacccccacccactcggggtcagggtccaaagccggatctgccttggggctcgcgcccgcggctggtggaacggactgctggctgacgagggctccgataatcgacggcggcggtggaatgccggtggaacacctgtttttcatttttgatgaggtggaatgcggcttcccaagctccattctgttttccatttcaatgaggccatgatatatgttccatctgttctggatggaatttgactgcattctactgtctctaaaagaagggtaccaggcttaagaaaccagaaaaaatgccaccgtcaccctcaccgaggacatcaaggtctcctgcacaggagacttatcaaaagaggacaaacagtttcagaaatgtgcttcctgcaaaatcaaaggatgatgaactcgctttgttctctgatatgcagaaagttgagacggacaacttcttactggaaccgtcagtggattttgatgattcaatgagtaatgcttaaaaattgagatatttcccggaagtaaaacttggtgtcaacattcctgcccatggagaaagccatgaattgcttaacacagacggcgataaaaatgattatgagtggttattaactcctcctgaaactccactttttcgatctttggatgacgaagaaaaccaatccatcactcaggtttctaggggcagagctcagagcaagcctatacaaatttcaagatcatccatggtagataataatcaaagagctagtagaagcagtgcaagctcaagtaggcttagcccatcgccatgctctatgggaaggacaagatcatctagttcagcttctcgctctagtccaccacttgctgaaacacaaacaccatcacgaagattgtcaacccctccgattgctaagacattaacacctcctcgaaggtctccaagtcctgtctcaagaaggatgagtactggttcaagtggcccaactttgaatggaacaagaggagcttcaccagtgaaatctaatcacaggtcttcttcaccaaagctgcatggatggcaatcaaatgttcctggtttctctttcgatgcgcctttgaaccttcgcacatctctaactgatcgtccagtatgccggtcaaggggtggatcgccttcatcttttagtggactagaaaagggttcaagaggtagaagactgtcaatgtctcccactccacctagaagagccagttcatctcacagcattgaacgggaccgaatgagctcttatagcaaagcttctgcaacatcatctggtgaggatgatctggagtctatgcagtctgtaccaattagctactccagtagcccagttgtgaaaaagagcttggttgtgatgaaaaccagaaccattgcatcatcaaagaatctgtccaaaaaattgacacctagttctgtcccaaagcggtcatttgactctgcactttggttaatggatcatcgcaaagctccacaagataggtttcggccacttctatcaggtgcccctgccaacacatttggtgctgggaatggaaatgatgtgcacaaacctatgttctcacacaattcttctttgacaactagcagcactgcaagctcttaccatggtgccacttttggctcttatatgcatggcagccaagaacaacatgattttgctggtgaatgggaagcagatgatatttctcagggtcatgaggatatatttatgtttgataaattggatgagctaaatgaagacattcattacaagagcatggaatctacggataattcactggtaatagtaaaacatctagtaagtggcagacaggacttggaaggaagcagaagacctaatcagtccttatgccattctactgatatttctcatgttagctttaaggctacttgctctagatgtgggaagtttttcgatgcgatggatgttgatgaagagggtgtctattgtgatgcatgtgctacaaaggatgggaatatcctcaccagtcctattgtacaaactataggagaagaaaaccaacaatatggtaaaactgcaaatttgaaaccttgcatcgcatctgattctcctgtacccacagattgtgaaatctatagcaaagaagtatctcttgatcatcaactagtgaacaatgaatcttacgctgattgcctggaccaggcccctccaattcactcaatggggcacacacctcaggaaatgctactggggcaggaggaaaacattgacgctgagcatagaaataaacatgttggggattcgttaggaaatacaaacgataattcctttcatcgatctagtgtggatgaatgtgaacaaacagaaccaacatctgtagggcaggacctttttatcatagaccaaatgaataaccataatcgtggactatcccaatgtaatgaaaatgtctctgaatctgtgacctgtgacaattctcatcaactgggatcaactacatatcagaaccctaagcttgaaactaccgaggatactgggatatcagtattgttagtccctaagcccaacagtaataaatggccaaatatgctctgttcagaaccctattatgcaagagatggtgtcagtatgatgaagcgtagctttggactgggcagctcttcagctgcttcttccagtgatcttgggtcttcaagacagtcaatcatatgttttgagcgccttaggagtggtaagaagggtgactttgagaagtcccagataagcagtactattagttgtcaaagcattgcttctgtgtcagatatgtcaatttgtagctcttcagcttcactttgccctcagagtgatgcagtaggagattcctgtttcccaattgacactttggaaagcggcacttcaggaactctgatctcttctcaagaaaatgatgatgctttttgtaaggatactttgccaagtgctatggaatgtccgtcttcttcacagtttattgctgatgatgacagtcccggtgacatgaaaatccagagctacttaagtgaggtaggatatacaacagttgagaaccatagtgcttgcagaatgactgacatggattgtaccagtacaaatatgtattctttagatactgaaatgccaagtgataccctagaatcatcaggcccagtggaaagtagcatgcctgaaactgaagaggatgcttacactatcagtcagtgtaataaaggtagtgctccagaacattcaagtgatgagaataactttgataatattcaaatgcagtctgaaatagttcagggttcagcggaggaaaacagattggatgattgttgcatgtctgctatctcggaggaggacgtattgatttctggacaagaagatgacataaggaatcttcccaatgatgaagaattatgtgcggaggtagaaggaccaaggaaacaaatccagagatgttttacattggaagaagctgctgatacaattctcttctgtagttccattgtccacgaccttgcatacaaggctgcgactattgcgttggaaaacaagaaggaaccaaagtttgtggactctattcgtccaactgttgcaattgttagaggatcttttgctaaggaagagagtttaccaaagctgcctcacagacgaaccccaaaccgtaaggtcaaaaggaaaagattggaaggcgaaacaactacaacggaaactacagagaaagacgttgtcgcgaatgactccccccctgtatgttctgcatcgggtattacaaggaattccgataatatgaagccgccaaagctggagtccaagtgcaactgtataattatgtaactcggtcacatccaagattgaaattcctacatgcttggttaaccccgtcatcagcagcgatggagttcagcacaatggatcttccgctagattattttgcaaaggtgcatttgctgtgttttaggtgacagaatgcactgccagctgctattcttttgtaaagtcttttcttctcttttctgcttgtaatgaggtccttgcggtttgtccaaagttgtgctgatagcctatttacttgcaacgcacgtgg

SEQ ID NO: 34759 - DNA, 4276 bp, Zea Mays
aatcggtttttccacttctttaactccaaataaaccaacggaaattgaaaaacaaaagccacttcttcgccagtcctccgcctcccctcctctgctcctccagcgaagcgcacgcacggcgcgcaggctgagcaaggcaaccgaagcgagcgaggtcctttgcttctacccgcggcaacgccccaggcgcgcgcgacgcgtcgagctccggaggccgagggcgagcaccagtgcgggagtggaggagaggaggtctccgctggacgactgcacccccacccactcggggtcagggtccaaagccggatctgccttggggctcgcgcccgcggctggtggaacggactgctggctgacgagggctccgataatcgacggcggcggtggaatgccggtggaacacctgtttttcatttttgatgaggccatgatatatgttccatctgttctggatggaatttgactgcattctactgtctctaaaagaagggtaccaggcttaagaaaccagaaaaaatgccaccgtcaccctcaccgaggacatcaaggtctcctgcacaggagacttatcaaaagaggacaaacagtttcagaaatgtgcttcctgcaaaatcaaaggatgatgaactcgctttgttctctgatatgcagaaagttgagacggacaacttcttactggaaccgtcagtggattttgatgattcaatgagtaatgcttaaaaattgagatatttcccggaagtaaaacttggtgtcaacattcctgcccatggagaaagccatgaattgcttaacacagacggcgataaaaatgattatgagtggttattaactcctcctgaaactccactttttcgatctttggatgacgaagaaaaccaatccatcactcaggtttctaggggcagagctcagagcaagcctatacaaatttcaagatcatccatggtagataataatcaaagagctagtagaagcagtgcaagctcaagtaggcttagcccatcgccatgctctatgggaaggacaagatcatctagttcagcttctcgctctagtccaccacttgctgaaacacaaacaccatcacgaagattgtcaacccctccgattgctaagacattaacacctcctcgaaggtctccaagtcctgtctcaagaaggatgagtactggttcaagtggcccaactttgaatggaacaagaggagcttcaccagtgaaatctaatcacaggtcttcttcaccaaagctgcatggatggcaatcaaatgttcctggtttctctttcgatgcgcctttgaaccttcgcacatctctaactgatcgtccagtatgccggtcaaggggtggatcgccttcatcttttagtggactagaaaagggttcaagaggtagaagactgtcaatgtctcccactccacctagaagagccagttcatctcacagcattgaacgggaccgaatgagctcttatagcaaagcttctgcaacatcatctggtgaggatgatctggagtctatgcagtctgtaccaattagctactccagtagcccagttgtgaaaaagagcttggttgtgatgaaaaccagaaccattgcatcatcaaagaatctgtccaaaaaattgacacctagttctgtcccaaagcggtcatttgactctgcactttggttaatggatcatcgcaaagctccacaagataggtttcggccacttctatcaggtgcccctgccaacacatttggtgctgggaatggaaatgatgtgcacaaacctatgttctcacacaattcttctttgacaactagcagcactgcaagctcttaccatggtgccacttttggctcttatatgcatggcagccaagaacaacatgattttgctggtgaatgggaagcagatgatatttctcagggtcatgaggatatatttatgtttgataaattggatgagctaaatgaagacattcattacaagagcatggaatctacggataattcactggtaatagtaaaacatctagtaagtggcagacaggacttggaaggaagcagaagacctaatcagtccttatgccattctactgatatttctcatgttagctttaaggctacttgctctagatgtgggaagtttttcgatgcgatggatgttgatgaagagggtgtctattgtgatgcatgtgctacaaaggatgggaatatcctcaccagtcctattgtacaaactataggagaagaaaaccaacaatatggtaaaactgcaaatttgaaaccttgcatcgcatctgattctcctgtacccacagattgtgaaatctatagcaaagaagtatctcttgatcatcaactagtgaacaatgaatcttacgctgattgcctggaccaggcccctccaattcactcaatggggcacacacctcaggaaatgctactggggcaggaggaaaacattgacgctgagcatagaaataaacatgttggggattcgttaggaaatacaaacgataattcctttcatcgatctagtgtggatgaatgtgaacaaacagaaccaacatctgtagggcaggacctttttatcatagaccaaatgaataaccataatcgtggactatcccaatgtaatgaaaatgtctctgaatctgtgacctgtgacaattctcatcaactgggatcaactacatatcagaaccctaagcttgaaactaccgaggatactgggatatcagtattgttagtccctaagcccaacagtaataaatggccaaatatgctctgttcagaaccctattatgcaagagatggtgtcagtatgatgaagcgtagctttggactgggcagctcttcagctgcttcttccagtgatcttgggtcttcaagacagtcaatcatatgttttgagcgccttaggagtggtaagaagggtgactttgagaagtcccagataagcagtactattagttgtcaaagcattgcttctgtgtcagatatgtcaatttgtagctcttcagcttcactttgccctcagagtgatgcagtaggagattcctgtttcccaattgacactttggaaagcggcacttcaggaactctgatctcttctcaagaaaatgatgatgctttttgtaaggatactttgccaagtgctatggaatgtccgtcttcttcacagtttattgctgatgatgacagtcccggtgacatgaaaatccagagctacttaagtgaggtaggatatacaacagttgagaaccatagtgcttgcagaatgactgacatggattgtaccagtacaaatatgtattctttagatactgaaatgccaagtgataccctagaatcatcaggcccagtggaaagtagcatgcctgaaactgaagaggatgcttacactatcagtcagtgtaataaaggtagtgctccagaacattcaagtgatgagaataactttgataatattcaaatgcagtctgaaatagttcagggttcagcggaggaaaacagattggatgattgttgcatgtctgctatctcggaggaggacgtattgatttctggacaagaagatgacataaggaatcttcccaatgatgaagaattatgtgcggaggtagaaggaccaaggaaacaaatccagagatgttttacattggaagaagctgctgatacaattctcttctgtagttccattgtccacgaccttgcatacaaggctgcgactattgcgttggaaaacaagaaggaaccaaagtttgtggactctattcgtccaactgttgcaattgttagaggatcttttgctaaggaagagagtttaccaaagctgcctcacagacgaaccccaaaccgtaaggtcaaaaggaaaagattggaaggcgaaacaactacaacggaaactacagagaaagacgttgtcgcgaatgactccccccctgtatgttctgcatcgggtattacaaggaattccgataatatgaagccgccaaagctggagtccaagtgcaactgtataattatgtaactcggtcacatccaagattgaaattcctacatgcttggttaaccccgtcatcagcagcgatggagttcagcacaatggatcttccgctagattattttgcaaaggtgcatttgctgtgttttaggtgacagaatgcactgccagctgctattcttttgtaaagtcttttcttctcttttctgcttgtaatgaggtccttgcggtttgtccaaagttgtgctgatagcctatttacttgcaacgcacgtgg

SEQ ID NO: 34760 - DNA, 4241 bp, Zea Mays
aatcggtttttccacttctttaactccaaataaaccaacggaaattgaaaaacaaaagccacttcttcgccagtcctccgcctcccctcctctgctcctccagcgaagcgcacgcacggcgcgcaggctgagcaaggcaaccgaagcgagcgaggtcctttgcttctacccgcggcaacgccccaggcgcgcgcgacgcgtcgagctccggaggccgagggcgagcaccagtgcgggagtggaggagaggaggtctccgctggacgactgcacccccacccactcggggtcagggtccaaagccggatctgccttggggctcgcgcccgcggctggtggaacggactgctggctgacgagggctccgataatcgacggcggcggtggaatgccggtggaacacctgtttttcatttttgatgaggccatgatatatgttccatctgttctggatggaatttgactgcattctactgtctctaaaagaagggtaccaggcttaagaaaccagaaaaaatgccaccgtcaccctcaccgaggacatcaaggtctcctgcacaggagacttatcaaaagaggacaaacagtttcagaaatgtgcttcctgcaaaatcaaaggatgatgaactcgctttgttctctgatatgcagaaagttgagacggacaacttcttactggaaccaaaaattgagatatttcccggaagtaaaacttggtgtcaacattcctgcccatggagaaagccatgaattgcttaacacagacggcgataaaaatgattatgagtggttattaactcctcctgaaactccactttttcgatctttggatgacgaagaaaaccaatccatcactcaggtttctaggggcagagctcagagcaagcctatacaaatttcaagatcatccatggtagataataatcaaagagctagtagaagcagtgcaagctcaagtaggcttagcccatcgccatgctctatgggaaggacaagatcatctagttcagcttctcgctctagtccaccacttgctgaaacacaaacaccatcacgaagattgtcaacccctccgattgctaagacattaacacctcctcgaaggtctccaagtcctgtctcaagaaggatgagtactggttcaagtggcccaactttgaatggaacaagaggagcttcaccagtgaaatctaatcacaggtcttcttcaccaaagctgcatggatggcaatcaaatgttcctggtttctctttcgatgcgcctttgaaccttcgcacatctctaactgatcgtccagtatgccggtcaaggggtggatcgccttcatcttttagtggactagaaaagggttcaagaggtagaagactgtcaatgtctcccactccacctagaagagccagttcatctcacagcattgaacgggaccgaatgagctcttatagcaaagcttctgcaacatcatctggtgaggatgatctggagtctatgcagtctgtaccaattagctactccagtagcccagttgtgaaaaagagcttggttgtgatgaaaaccagaaccattgcatcatcaaagaatctgtccaaaaaattgacacctagttctgtcccaaagcggtcatttgactctgcactttggttaatggatcatcgcaaagctccacaagataggtttcggccacttctatcaggtgcccctgccaacacatttggtgctgggaatggaaatgatgtgcacaaacctatgttctcacacaattcttctttgacaactagcagcactgcaagctcttaccatggtgccacttttggctcttatatgcatggcagccaagaacaacatgattttgctggtgaatgggaagcagatgatatttctcagggtcatgaggatatatttatgtttgataaattggatgagctaaatgaagacattcattacaagagcatggaatctacggataattcactggtaatagtaaaacatctagtaagtggcagacaggacttggaaggaagcagaagacctaatcagtccttatgccattctactgatatttctcatgttagctttaaggctacttgctctagatgtgggaagtttttcgatgcgatggatgttgatgaagagggtgtctattgtgatgcatgtgctacaaaggatgggaatatcctcaccagtcctattgtacaaactataggagaagaaaaccaacaatatggtaaaactgcaaatttgaaaccttgcatcgcatctgattctcctgtacccacagattgtgaaatctatagcaaagaagtatctcttgatcatcaactagtgaacaatgaatcttacgctgattgcctggaccaggcccctccaattcactcaatggggcacacacctcaggaaatgctactggggcaggaggaaaacattgacgctgagcatagaaataaacatgttggggattcgttaggaaatacaaacgataattcctttcatcgatctagtgtggatgaatgtgaacaaacagaaccaacatctgtagggcaggacctttttatcatagaccaaatgaataaccataatcgtggactatcccaatgtaatgaaaatgtctctgaatctgtgacctgtgacaattctcatcaactgggatcaactacatatcagaaccctaagcttgaaactaccgaggatactgggatatcagtattgttagtccctaagcccaacagtaataaatggccaaatatgctctgttcagaaccctattatgcaagagatggtgtcagtatgatgaagcgtagctttggactgggcagctcttcagctgcttcttccagtgatcttgggtcttcaagacagtcaatcatatgttttgagcgccttaggagtggtaagaagggtgactttgagaagtcccagataagcagtactattagttgtcaaagcattgcttctgtgtcagatatgtcaatttgtagctcttcagcttcactttgccctcagagtgatgcagtaggagattcctgtttcccaattgacactttggaaagcggcacttcaggaactctgatctcttctcaagaaaatgatgatgctttttgtaaggatactttgccaagtgctatggaatgtccgtcttcttcacagtttattgctgatgatgacagtcccggtgacatgaaaatccagagctacttaagtgaggtaggatatacaacagttgagaaccatagtgcttgcagaatgactgacatggattgtaccagtacaaatatgtattctttagatactgaaatgccaagtgataccctagaatcatcaggcccagtggaaagtagcatgcctgaaactgaagaggatgcttacactatcagtcagtgtaataaaggtagtgctccagaacattcaagtgatgagaataactttgataatattcaaatgcagtctgaaatagttcagggttcagcggaggaaaacagattggatgattgttgcatgtctgctatctcggaggaggacgtattgatttctggacaagaagatgacataaggaatcttcccaatgatgaagaattatgtgcggaggtagaaggaccaaggaaacaaatccagagatgttttacattggaagaagctgctgatacaattctcttctgtagttccattgtccacgaccttgcatacaaggctgcgactattgcgttggaaaacaagaaggaaccaaagtttgtggactctattcgtccaactgttgcaattgttagaggatcttttgctaaggaagagagtttaccaaagctgcctcacagacgaaccccaaaccgtaaggtcaaaaggaaaagattggaaggcgaaacaactacaacggaaactacagagaaagacgttgtcgcgaatgactccccccctgtatgttctgcatcgggtattacaaggaattccgataatatgaagccgccaaagctggagtccaagtgcaactgtataattatgtaactcggtcacatccaagattgaaattcctacatgcttggttaaccccgtcatcagcagcgatggagttcagcacaatggatcttccgctagattattttgcaaaggtgcatttgctgtgttttaggtgacagaatgcactgccagctgctattcttttgtaaagtcttttcttctcttttctgcttgtaatgaggtccttgcggtttgtccaaagttgtgctgatagcctatttacttgcaacgcacgtgg

SEQ ID NO: 34761 - DNA, 12879 bp, Zea Mays
ccaaagccaagctgaccacaaattaaacgatctagcaggctgagtttttttttttttttctggattcagaaacagtcggcaggtataataacaaatgaattgttgtgcttggaaattgccacctcatataggaatataggattgaccctctcaatcccctcaagttcattttctccctcaatcctctcctcaaatccccagtttccaaagtagcaccaaatgttgatggcaccgattctgcaaacatcaatcgacaggctgccaaaagcgagggctggtacagtactacctctactggtactcaaactatgccaaccatcgatatcgaacttcgatgagctccctctagtggaacacgggcagtcgacatcggaccaagttactagtactgaaggaacacaatcagatatccattgcctgagagattgacgatgtgcccttcttcctcctgcttttcttgtccttggaaaccttcccctgcttccccgctgcgtcgtccttctttgcagctgcaggcggctgcgttgccagcaggtgctgatggatcgcagcgaatgggtcaagctggaactgcgggttgtccagtacagccttaagatgagcagactcctgcaccctggacaagaaatttgggtttagagacagttgaagagcatgaccacctgaagcaaggaacaagggaggattacactaatgtctgtcttgacttgcagttcagctttgcttcagtcttctgctctggtgcagctggttctgggaggaactcagaaagtgccgacagatcgtatgctttaagcttcttctggcgccgactctgtttatttttctgctttacgggaaaaaaaaattgtaaaacaccaggatcataatagaaaatgaaaagcatattacgtacgatggcaagtgtacgtgaatttagatattggatccatagcaaatgcgtgtggtgaacattgtgatagcaacacaagagaaaataaataagccaggctgcaggggtctctactttcgaatggagcagacattctccgaaaatatccacaaacatataaatagctagcgtcaaaaggattttgagttaattttaagttctcatcaattgacagatcatgactgtaaatatcagtttatggcgacatggctatttgcttttatggtcaacggatatacatgaacatgcaaatgacataagaattttgctcttccgtagcatctgttcacagcatcagggatacacatacaagaaactgaggcgatgcgcccatgccatcagattgaccaaacacatgccacaataaggacttaaggcccatttggtgcggctcctgcaccggcttcaccaccagctctgcggctctgctgcaccaaacgccctcgtgtggagtgcttctggacagcaaaaggaaagaacagagccagtgccattttcatgtacgctatggagcgagcgtggaggaaccacaccaaacaagcccttattacaatagagccaatacacctgtcacaacagagccaaataggggtgaaaacggggtgggtaccaaggtcgggtaccggatacgggtagtgaaataacccgaaattttggacaccgatacgggtatttttgttggcgggacgaatacagtcatacgggtactatccgtataatatacatactattttttaaactagccctaagttataatctacgtgtggagaaccccgacatactatgttttttcacttttcgaccataaaagtacatactatttttttaaaaaaatatagaagaattgtatacttcatattagcaacatatgctgtaagccaaaagtatatgttgtagcaaaagataatgtctcgcattgagcccttagatggtttatatagagtacatggcgtaggagataaggtaacccacaaatacatacgacagtctataaaacactatctaagctaccaaatatactttatcatatatatggcatgtctactagacacaatatctagactaccaaatatgttatacctctcgcagtcgaaactgtagccactgcaaatattgacactggacgtgaactcattgaacaccgataaggggaggcccttcgtgaagatgtatgcgaactaggatgtcatacgtggtgtcactggtgcaggagccaggggtgccagagttatgggcaagtgcgagcgacgagtgtaggcaatcagcgaagatggccacactcggggcaccgaagccgcgtgtagcgtggcaagaggcacaggtgctacttacgacgcgtcaggggtgtcggtgtcactcacgatccaactagcaggggagttgcgcatagcataacgaagttggcgctgccgcatagggcagaaatgctagagggaccgtaaggtggaaaccgaggaaccagactcacagagaaaatcaaagttatttagatgggatgagggcatggcagcgagcgggaagctgtcctcatcaaaaaccacatggcaagagatgaagagatgagcatgtggttagaagatagatcaagacaatgatagcctttgtgatcgtcggagtagccgagaaagacactaggtggatcaaggagcgagcttgtgcgaagcagtagaggcagtgttagggtaacatgcgcaacccaaaactcaggtggtcatgcgaaggtgcagaaccagacaaagcgacacgaggacaaccaacatcgatcatctttgtggggagaagttcagtaggtaagtggaagtgtggagcccctcaaccaagtaccgtccacaaagggatgcctggatcagtaacgagagaatgacattgttaatggtacgaataatacgcttggctttactgttttgaggggacgtgtaaacgcaggacatccacaactgagtgcctttggagagctgaaaaaactgggtagaagaactattaaattcatgcccattgtcgcattggatcgccttgatagtgcagctaaactaagtggcaacataagcaaaaaaaagttggacggggtggtgaaggtgtcagatttaagttttaacggaaaagtctagagataatgagtaaaatcatccaagaggattaaatagtacttatagctagcgtagggtggacgtatgttgaccacgagggcgtaaaatcatccagagataaggagtaaaatcatccgaggtacatagcaatgtgccccatgccatgggtggacgtatgttgaccacgagggcgtcaccttgccgtcggtgctcccagctcccacagaaagtgtggcagatgtgctagagaagccaccacaatcattgttgaggctgtgtgtgacgccgccaatgccgctattgcggtagttgttgcccttgtttcggttgtcgtcgaaattggtgttgccaatgctagtgtcgtttctgatgccagagtcgggcgaacgagacaatgttgaggatggcaactttgaagcaaatagtgtgcttttggagtagaccactgtcgaagtcgtcgctagaccggagatgtccagatggatctccagcaaaagatcatcacgaacctttagaaatatcaggaacgacaaatagcgacggatgatgatgccgaggtgctcgaaacgctggttgatccctcgcaggatgttgaggacaaggaccatgtcatcgatgggagatcccagatgagttagggcatcgaccatgcgttttgttagacaacctatttgcttccatgtttaggaggtttccttccctattaggtgttggctgattgcccctaattaggtgatacccttccctatcaggcgttggatgatatcccctgattaggtgctaatgggtgattctttcctatatggttgtttcctacttagtgtgagatctccctgatcattgtttctacaaatcaggtggagcacaatctggtagaggtctatatattgtaatcctgttaatcaatgcaatacaacacacaatattccacgctatcatggtatcacgagacagtcacagtcctgtgacctatcgctttcgctaaactcttccctacctacactgcctgccactgcctgtgttgcgccaccatggcctctgcagagcctccgcccgtcgttgatgctgcgcaggagacagctcgctaggtcctggtcgccgccgcccaggacgccctcgccagggaacgctaggctgcctccaaccttgagcgcgttgcgatcgtcgcccacaacgccgctttcccaccaccccagggcggtgtcccgaacaacaacgtcgatgttgttgaagacctcgactacgaggccaccctcattgccaaccttcacgcgcaggcgacgagtatccagaacctatgtgcccttgtgcccgtggttttggatcccctttctccccactacaatcgctaacacgatctcgttttgctcgccctcgagcgatacgccctcaccgaccatgtcctctcggacgcttgccccgccatgccatcctggcggcgcatgaatgtcgttgtgttgtcctgggtgttgggcacactctcccccgagctgatggagtctgctcgcacctctgatggcactgcgcgccgcgcctggctgtccatcgaggagcagttcctcggcaatcgcgaagctcgcgcatttcgcctcgacgccgagtttcatgttttcatgtagggcgatctctccgtcggcgactattgtcgcaagatgaaggggatggctgaggcccttggtgatcttggagaggtcatccacgaccgtaccatcgtcctgaacatgttgcgtggcctgaatgagaagttcacccacatgaagctccacttagggcgctcgaagccgttcccctccttcaccgacgtccacaatgatctcatcctcgaggagatcgactcccgcgcgcctcacctccgcctccgtccaccgctctcgtcgccagtaccactgcttcctccatcgcccctccccctggaggtgtcacggcgcccgctggtgcaacacccatggcgaggctcctctgctagtggttgtcgacggcgttgccccaacagtggaggaggcaaggctcggttgccctggccttcactatacaatccatggaccaggcaaatcgcgatgtggcccgaccccacagacagcagcatggcggacgtccgcctgcacaccagggcgcaccacagcaggcgctcttcgctactccgacccagtacacccctctactgtgtcactttacccaccctgtcgggctggttcagcatcaactcggtccgccactgcatcagctcaggactccgtagcagccccctgcagttcctacctccccgactgcgccatggactccatggactagatcctgggatcaccagtctctcgccaacaacttcagcaccatgaccctcagtcctcctggcatcacagattgggtcatggattctggtgcttctagtcacatgactcccgacagtggtaacatctctatttcgtcctccgcgctccacttccatcatggttggaaacggatccactttacctatcacaacttctggccactccattatactgggtcccttttatcttaataacattcttgttgccctcgatattgtttaaaacctcatttcagttcgtcagctgtcaaatttgaccctcttggcctttctgtgaaggatcttcattccaggagcgtgatcgccaggtacaatagctccgggcccttgttgctccaacatgttccccgatatcccgtgcccttgttgccagtgtctcctccactacttggcatcgccgccttggccatcctggacatgaggctctgtccaaactcactagtacttctgccatcggttgtaataaaattactagtgattccatatgtcatgcttgtcaagttgggtgtcacactcgcgagctctcaagaattttgatttaatccattgtgatctgtggacctctcccatttccagtgtgtccggttacaaatattatcttattattcttgatgattgctcacattttctttggacgtttcctcttcgccttgaatccgaaacattcactaccttggctaattttttctcttatgtgaagacacggttcggctgcaccatctgaagcattcaatgtgacaacggtcgtgagttcgacaactcttccactcgcaccttctttctcactcaaggtgttttgctccggatgtcatgcccctacacgtcctcccaaaacggtaaagccgagcatatgattcgttccattaacaacatcattcgttcccttttatgtcaggcctccctcgccccatcctattgggtcgaaggtcttcacaccgctacatacctccttaatcggctacccatacaaacccttatttatggcaccccgtattttgccctcttcggctctcaccctacctatgaccacctccgcgttttcggttgtgcgtgttaccccaacatgtccgccaccgctcctcacaagcttgccccccgctctagccattgtgtctttcttggctattccagcaatcacaaaggctatcgttgtttggacctttccaccaaaaaattctcacctcgcgccatgtggtttttaatgaggcctcgtttccccttgccgactctcgagcctcgatcactaaccttgactttttgtctgagcttgaggagtcgatcttgccgatcgagccctccactgcaggtactcgcctcacctcgcctgtcgcggttgctgccctagtgcgcctgctgctgaacagggctccgtgttgttgccactgccatcagtcgcaactgcactacgtccggctcccgctcggcactagacattcgtgtcttcgcccgcaccacgcgcaacctcgccgcctatgccagctgcagccccaacggccctgtcggctgcacccttgaaggtgtaccatcgacaaccacgcgttgtcttggagacgcccgtggctcctacgccgactggactacccacttgtgttgttcccatcacaccgatggtcaaccatcacaggatggccacccgcggcaaggctagttttcgagtgcctgttgcgttcaatgccacgacgccctcgctcgtcctaaagacctatcgcagcgcccttgccaatcccaattggcgccacgtgatgcaagaagagtacgacgctctgctctccaacaacacctgggatctcgttccccgaccacctggcaccaacatcgtcaccgacaagtggattttccgtcataaattcaatgttgatggttctcttgacagatacaaggctcgttgggtcctctgtggttttactcagcgtctcgacatggattatgatgagaccttcagcccagtggtcaagtcggtcacagtccgcactgttttgtccttggcattctctcagcactggccagttcatcaacttgatgtcaagaatgcattcttacatggcactctcactgggacggtctactgctctcaacccactggccagttcatcaacttgatgtcaagaatgcattcttacatggcactctcactgggacggtctactgctctcaacccacaggttttgttgatcccactcagccttatgttgtctgtcggctcaataagtctatggtctgaagcaggcgcctcgtgcttggtatagctgctttgctactcactcactctggggtttgtcgaagccaagtcagatacttcgctgtttatatatcatcgtcggactgatatggcttacttgctgctttatgtggacaacattgttctcactgcttccagccaagaccttctgcgtcgcattatcactgctctttagaagccattctccatgaaggatctcggtactctccatcatttcttaggtgtggctattcaacaacattcagagggccccttcctttcacagcagcagtatgctctctatattcttgagcgtgctgatatgtccgattgcaagccgtgcagtactcctgtcaacactcatgctaaggtctttgccatgaccggtaccactgtcagcgacctcactcagtattgcagcctggttggtgctctgcagtacttgactttcacccggaatgacatctcctatgttgttcagcaagtgtgtcttaatatgcatgatcctcgggatgttcacctattggtactcaagtgtatcctgcgctacctacgtgggacacttagtcatggtctcctacttcgcccatgcatgatctctgctctgctcgtctacacagatgttgattgggccggatgcccgaacactcgcagatctacttcagggtacgatgttttccttgaagacaaccttgtctcctgatcctccaagcggcagcctacggtgcctcgctctagtgcagaggtcgaatacagggcaattgctaacggtgtcgccaaagcttcctggttgcgtcagttactacaggagcttcacagtcccttgaccaagagctccttagtttattgtgacaatgtcagtgttgtctacttgtccactaaccaggttcagcatcagcacacgaagcatatcgagattgatctccacttcgtccgcgagtgcgttgccattggtgatgttcgtgttcatgtcccaacgacgtctcattttgcggacacttctccgagtttcgctccagtcttaacgtctgcgccatcgacgtttcgactgcgagagggtgttagcttatttccttccatgtttaggaggtttccttccctattaggtgttggttgattgcccctaattaggtgatacccttccctatcaggcgttggctgattgcccctgattaggtgctaatgggtgactctttcctatatggttgtttcctatttagtgtgagatctccctgattgattgactccctgatcattgtttctataaatcaggtggagcacaatctggttgaggtctatatattgtaatcctgctactcattgcaatacaacacacaatattccacactatcactttttaacttgcggcagtacatgatcacagagaggtcaccatgtactatgttgtggaaggcggcatgcaggtcaatagtacgggtctcgcgattacctacaaacttgttctcaaggccaagccataggtgacgcgcggtgtggccacattctcgaacgacatcctaaagattaggggagatcgtgttggtgagccaacagaggacgacagcctccatgcggttctagccagggttgttggagaaggcgtcgtcggactcaacgtggtcaaagagggcatatcgcgtcaagaccagcaacatgagatcatgccaacgagcgtagttgaacgatgaggtgttcataatgatattcaccagttggcgaatgttcgggacaactaggcctggatgtggaggccgtcgatggtgaacgcctcgtcgtaggaggcgtctagcgaggcatccaaggtcgaggaagatggcagcggttgtttgacaacgactgtttggcagtggtgaccttccgttccaggtcggcagcgatggcctgctcctattcaaagagctggagggtggtctacacacgtttgcgtgcgtcggcggccttctcctttgcaatgtcggtggcaacgattaggtcgttgagccactgcttgagggcagcaacgtcaggtacggtgacatgacgaggaggggtggtggctgcccgcaatggagcggcgaccctgagggttgtggccagggggcggcaaaggatctaggctcggattgccatgttagacaaaggaaggtatatgttgtagcaaaagatgatgtcttgcattgaacccttcagcgacttatatagagtatatgacataggagataggcaacccatggatacacatgacagtattgaaacacaatatctagacaaccaaatatactctaacatatatgacagtctactagacacaatatctagactaccaaatacaatctaacagatgcatttaacatcaggttcttaaaatagtaaagtgattcacctatacagtcatcacatctatgttgaagatggagaatctaccaatacgagaattgcatagcaacctagaaacaatcaatcagagctcattctagaattcatgatagaacatttagcatcctgatattgattatgcttgttcgactcagctatgagtagctaatactatccctaacttcttttcaaatttctaggaaaagacagagttcgaagttctaaacatcttgtttttcttcagcacaattcacaaaaattaggcctggttgtgctcaattcctatgcaggttgaatatgaggttcaaaagccttgaggacatgaatatttaggagcaggcctatgtttaactgatataaacactgaaacactatattaaattatttagtaaacaagcgaatgcacatgctgacatcaaccatggtcagggcatctgaccctgtaactgacgtgtggtatccttcagaatagctacactacagattaaccaatactaaaatattgaatgtggtcgtaagttaatttgtggcatacacaacttctatgataaggaggtgattagaactatagaagcttacagaataacttttatcagatgtttacattaaacaaaatgaatcctcgcaattggcagggcagtaaacaatatgattttctttatgtgggcagaaaactgatgtttaaactaatgttcataactgcagagttaacagatatggaaaatccaggaagaaatcaattatatatggtaatgatggagaggagtttgaagtaccttactgacagtcttcttagcatttaaggaagtaactgcatcttttacttctgaaataacaaaacaactctttcaagagttcgagcccaaatcatggtatgtaagtagagggactctaactctcatcaagaggatgacactatgagttggggcaattttctgtttatttcctcaaacactacacaatgccatacccttagaggggttggggacacatatttatagccctaggggctgcactacactgcactacacactacactacacgctgcagcacacaggtgctgtcctttagatactaaagtgcagtcaaaactgttgtgctgctactgctgtcctctgctgtgctgctactgctgtcctgcgcagtcaaaagactgcagctgcatgctgtcctgctgcaactgctgctgtcctgcagcagtcaaaaggttgctgctgctgcgcagtcaaaaaactgctgctactgctgtcctgcgcagtcaaaagactgctgcatgttgtcgctgcaactgctgctgtcctgcagcagtcaaaactgcaactgctgctgaccacatgacttattccatcattctccccctaagtcttgtgcgtcgtcttgtgggaaagttggaccatcccggacctggagcaaagctcaacaaacttgatcttcccaaggggcttggtgagcaggtctgcaagctgatccttggtgttgatgtagcgcgccttgatgctcccttctgccaagcagtctcggatgaagtggtatcttagccggatgtgcttgctccgttcatggaacacggggttcttggccaatgccagagcggactggttgtccaccctgagttccaccgctccagtgtctctcccgaggagatcaccgagcagtcgagccagccagagcgcctgagtcgaagcagtggacgccgctatgtactcggcctcgcagctggacatggccaccacctgctgcttgaccgactgccagctaatgaggcacttgccgaggaagaagaggatcccgcttgtgctcttgctagtgtcgatgtcaccggcgtggtcgttgtcgctgtacccgacaaggtgtgcctccccagggcacctcgggtagtagagaccgtggtcgagagtccccgcaacatagcggatgatcctcttcacagcctgctcatgctccgtcgtcggtcgctgcaagaaccgactaacgtagccgacggagtatgccaagtcaggccgtgtgtggacgaggtagcgaaggctccccacaagacgccggtactgtgtagcatccacctcctccgtcgtgctgtcgcgactcagcttcagcctctcctccatcggagtgagagctgggttgcagtcggtgagcccagccagctcaacaatgcgcttggcataggcggtctggcgaagtgtgatcccggagtctccctggtgcacctcaatccccaggtagaaggagagatgccccaggtcactcatttggaaggtggccttcatctcgtccttgaacgctgccacctctgcgtccttggcgccggtgatcaccaagtcgtcgacgtagacacccaccagcagggcacttcctccattgccccgccgatagatggccgcctcgtgcgggcttggcgtgaaacccattcctttgagcgtggaatccagcttggcattccacgccctcggtgcctgtcgcaggccatagagagccttgcgcaggcgcaacaccttgccctccttgccagggatcgcaaaacctggcggctggtgtacgtagacctcctcctttaagtcgccgttaagaaacgccgacttgacatccatgtgatgaacatgccagccctccagggctgccagcgcgaggaggagtcgcacggattccatccgtgctacaggggcgaaggcatcgtcaaagtcgatcccctcctgctgcaagaaaccgcgtgccaccaagcgagccttatgcttgacgatggcgccggcttcatccctcttcagtttgaacacccacttaagggtgatcgcgcgatgaccatgagggagatcaacgagctcccaagtgcggttcgtctcaaccgcgtccatctccgactgcatcgcggcacgccaagccgcatgtttctcggcctccgcgaaagaccgaggctcaccatcgtcgcatgcaagatgcaactctcctgccagaatgcgagatg

SEQ ID NO: 34762 - DNA, 1114 bp, Zea Mays
ctcatccggatgtgtgaggagatgaaggagaaatacttggctcacttcaagatggaccgacaccagaagatcgtcgagaagggaggcatcgagatggcatctaccacaactgtcctaccttcgccttagatcccccttgtaaacctgggttgatgacattcatcccgttgccatgggaagcccgaataaagatcatgaaaggagttgccaaggggatgtctgtcctgcatgaattcagccccaaaaagtatgtccatggtgacttgaggccaaacaatgtcctccttgggacaaatatggagccgttcatttcagatttcggccttgggcgacttgcaaacattgctggcgcatcaccatttttgcaatcagaccaagttgaattagaaaaggagcagattcagcaaatagatgcctcagtgagccctctcatgagcaaagggtcatgctaccaagctccggaagcgctgaagacactgaagccctcccagaaatgggacgtttactcctatggcgtggtgttgcttgaaatgatcactggccggtcgccctctgttctcttggaaaccatgcagatggatcttgttcaatgggtccaattctgcatcgaagacaagaaaccttctgccgatgtgctggacccttttcttgcccaggattctgaacaggaaggtgagatgatcgcagtgctgaaagtcgcccttgcatgcgttcaggcgaatccagagcggaggccgtcgatgaggcatgttgcggagaccttggagcgcctcaatggttgacgctaatgaagtgttcccctgataaagttgtgcgattttcggtggaatgggttctagaactcagttgttggacagaagcctaggaggagagggcatgatgctgccttagtgtactccatgtaaaattatcatttccctagtggccactgactgtactggactactgggttgttaacgtgtgaggtagtagctagttaaggtaattagtttgctgttgagacttggaaggtggtagtatcgcgtgcttacttaatattgtgggtatatgaataatgaattagtttaaccatttgtgtgctctctgttatactaattgtgtatcatcttgggca

SEQ ID NO: 34763 - DNA, 1284 bp, Zea Mays
gagctgccatgaggcccgaacagttgaagctactagcgtgtagctagggaagagaagcgcgcgagtagctagcagacgtacgtaggcagaagcctagctgggtttgaagggccccgatcgatgatcccctacgcgactgcggcggaggcggagggagcactggggcgcaccatgacgtgggctgagacagcatggtacgagtactcggcggtgatgccagattcctggctgcactgccacaccacatttatcctgttcgtcatctacagcatcgccccgctgcccctgctactcctagagcagttcgctccgtccgtcgtgctgccgtacaagctgcagccccgggtacggctgcccccggcagcctccctcagctgctacatggacgcggcctgcatctttccgctcgccgttggccttcagttcgtctcctatcctgcggtcgccaagatactaaggacccgaatgggactgccgttgccgtcggtgagggagaccatcgcgcagctagtcgtatactctctagtggaggattacctcagctactggatgcaccgtctgctgcacacccagtggtgctacgagaagatccaccgcgtccaccacgagttcacggctcctacaggcttcgccatgtcgtacagccactgggccgagaacgtcgtcctttctatcccggccttggccggcccagtgctcgtgccatgccatgtcaccacgcagtggctatggttctccatccgcctaattgagggcattaacacgcacagcggcccttgcaggctgattccattctacggaggggctgcataccatgactaccatcactatgcaggaggccgtagccaaagcaactttgcacccctgttcacctactgtgattatttatataggacagacaaaggctacagataccacaagctaaagcaagagaagctgaagagtctagcagaaaatagtgcggataaaggaggcaactactcattcgacgaagggaaaaagaacagatatttttgtgcctgagcgtacgaagaataatcaaggctattacttcgtcctgttcgaagggaagatttgcaaataaataattcgaatttactgcagaagctcttgattggtcgacgaacaaatatattgttgcaatccgtttcgtgtattctatatatctaatatgaaacttttttgtcggaatatatggatcatcccgatacattactttataagtaatgaataccacataagtttttgttggaagatggtctatttaagcttatttgtggctgg

SEQ ID NO: 34764 - DNA, 1321 bp, Zea Mays
gagctgccatgaggcccgaacagttgaagctactagcgtgtagctagggaagagaagcgcgcgagtagctagcagacgtacgtaggcagaagcctagctgggtttgaagggccccgatcgatgatcccctacgcgactgcggcggaggcggagggagcactggggcgcaccatgacgtgggctgagacagcatggtacgagtactcggcggtgatgccagattcctggctgcactgccacaccacatttatcctgttcgtcatctacagcatcgccccgctgcccctgctactcctagagcagttcgctccgtccgtcgtgctgccgtacaagctgcagccccgggtacggctgcccccggcagcctccctcagctgctacatggacgcggcctgcatctttccgctcgccgttggccttcagttcgtctcctatcctgcggtcgccaagatactaaggacccgaatgggactgccgttgccgtcggtgagggagaccatcgcgcagctagtcgtatactctctagtggaggattacctcagctactggatgcaccgtctgctgcacacccagtggtgctacgagaagatccaccgcgtccaccacgagttcacggctcctacaggcttcgccatgtcgtacagccactgggccgagaacgtcgtcctttctatcccggccttggccggcccagtgctcgtgccatgccatgtcaccacgcagtggctatggttctccatccgcctaattgagggcattaacacgcacagcgggtgatcatcattacatgctctgcacagttccaacgaccccttgcaggctgattccattctacggaggggctgcataccatgactaccatcactatgcaggaggccgtagccaaagcaactttgcacccctgttcacctactgtgattatttatataggacagacaaaggctacagataccacaagctaaagcaagagaagctgaagagtctagcagaaaatagtgcggataaaggaggcaactactcattcgacgaagggaaaaagaacagatatttttgtgcctgagcgtacgaagaataatcaaggctattacttcgtcctgttcgaagggaagatttgcaaataaataattcgaatttactgcagaagctcttgattggtcgacgaacaaatatattgttgcaatccgtttcgtgtattctatatatctaatatgaaacttttttgtcggaatatatggatcatcccgatacattactttataagtaatgaataccacataagtttttgttggaagatggtctatttaagcttatttgtggctgg

SEQ ID NO: 34765 - DNA, 1301 bp, Zea Mays
gagctgccatgaggcccgaacagttgaagctactagcgtgtagctagggaagagaagcgcgcgagtagctagcagacgtacgtaggcagaagcctagctgggtttgaagggccccgatcgatgatcccctacgcgactgcggcggaggcggagggagcactggggcgcaccatgacgtgggctgagacagcatggtacgagtactcggcggtgatgccagattcctggctgcactgccacaccacatttatcctgttcgtcatctacagcatcgccccgctgcccctgctactcctagagcagttcgctccgtccgtcgtgctgccgtacaagctgcagccccgggtacggctgcccccggcagcctccctcagctgctacatggacgcggcctgcatctttccgctcgccgttggccttcagttcgtctcctatcctgcggtcgccaagatactaaggacccgaatgggactgccgttgccgtcggtgagggagaccatcgcgcagctagtcgtatactctctagtggaggattacctcagctactggatgcaccgtctgctgcacacccagtggtgctacgagaagatccaccgcgtccaccacgagttcacggctcctacaggcttcgccatgtcgtacagccactgggccgagaacgtcgtcctttctatcccggccttggccggcccagtgctcgtgccatgccatgtcaccacgcagtggctatggttctccatccgcctaattgagggcattaacacgcacagcggttaccatttcccgttcagcccttgcaggctgattccattctacggaggggctgcataccatgactaccatcactatgcaggaggccgtagccaaagcaactttgcacccctgttcacctactgtgattatttatataggacagacaaggctacagataccacaagctaaagcaagagaagctgaagagtctagcagaaaatagtgcggataaaggaggcaactactcattcgacgaagggaaaaagaacagatatttttgtgcctgagcgtacgaagaataatcaaggctattacttcgtcctgttcgaagggaagatttgcaaataaataattcgaatttactgcagaagctcttgattggtcgacgaacaaatatattgttgcaatccgtttcgtgtattctatatatctaatatgaaacttttttgtcggaatatatggatcatcccgatacattactttataagtaatgaataccacataagtttttgttggaagatggtctatttaagcttatttgtggctgg

SEQ ID NO: 34766 - DNA, 1031 bp, Zea Mays
tcaccttcaccatgtcttgttctttgtgcgtgtgcatgtagctgtttcttgaactgccctttcgaatgccaccacccatattactgaacatccatgttggtctgtacggtcctattttctcagaaaattgtgcctaaggtcacttgttcaatgaaaatgtttaatccggtcgccttattatgctataaatttaaaacataatctatctgaaaacaacaaggtaaacatttactttggaatgatggacgacatggttttccattgtctttgtacaggacaacaattagcttaaatcaatctggtttcttcttttgctttgagaagaaatagttcttctatcagaattgttttccttgcatgtgatgtcacaattttgaaatttcaggcacaccataacatggccatcacagaattcttcttggatggttttcctgattcaaatagactacttaaaattcttggtgattttaaggaggtaaaaactggtcctggattggagtctacttggatgcatgcaatgcggtatctccttatacaattactgctacaagttcttctccatccagatgagtattgggaggctacatttgatgtggccatatgttgcaagaaatcctttcctgtcattgctcaaggcgataactcatgtgcacaagaattcgttgaacacggtatacatggcttgcatcaaggacattcaaaacactgaaagacatatatggcttgcatcaattaagcatgtatgtatgttttattgcaaaatgttgtgtgagctgtgtgaaatctaaacgcgtagattttaaaagatctcaaggtagttgtatcaattgatgtaattgttttgaaattcgtaaaagcttccttcacaaaaaaacaaggacatgctgactttctagatttcaaggaaagacagataaaatggttttttatgttggacaagtacataggtccagtatcctacaacaaatgaactaatcatatttgttgcagtacactagattgtgttatgtctagcaaaaaatacacttgtt

SEQ ID NO: 34767 - DNA, 706 bp, Zea Mays
gtcgcgtctgcgggcaggctcgccatggactcctcgacctccgtctcgcccaaccagcaggcacaccataacatggccatcacagaattcttcttggatggttttcctgattcaaatagactacttaaaattcttggtgattttaaggaggtaaaaactggtcctggattggagtctacttggatgcatgcaatgcggtatctccttatacaattactgctacaagttcttctccatccagatgagtattgggaggctacatttgatgtggccatatgttgcaagaaatcctttcctgtcattgctcaaggcgataactcatgtgcacaagaattcgttgaacacggtatacatggcttgcatcaaggacattcaaaacactgaaagacatatatggcttgcatcaattaagcatgtatgtatgttttattgcaaaatgttgtgtgagctgtgtgaaatctaaacgcgtagattttaaaagatctcaaggtagttgtatcaattgatgtaattgttttgaaattcgtaaaagcttccttcacaaaaaaacaaggacatgctgactttctagatttcaaggaaagacagataaaatggttttttatgttggacaagtacataggtccagtatcctacaacaaatgaactaatcatatttgttgcagtacactagattgtgttatgtctagcaaaaaatacacttgtt

SEQ ID NO: 34768 - DNA, 959 bp, Zea Mays
cccagccctaaactacgcccgctctctccgcgcgtgatgctctcccttcctcatcgcctctgcaccgacgcccccttcatttttcctctcacataaacccgcgctcattcctttttctttcacctaattcccgtccttgtgtgtttgcgttgctcgcttgggtttggatccaatcgagggctcggcccggcggatgctgtagaggaatggcggaggctgtcgcgtctgcgggcaggctcgccatggactcctcgacctccgtctcgcccaaccaggagggaggtgttccctgatggaatattgtttgcttctcgcacaccataacatggccatcacagaattcttcttggatggttttcctgattcaaatagactacttaaaattcttggtgattttaaggaggtaaaaactggtcctggattggagtctacttggatgcatgcaatgcggtatctccttatacaattactgctacaagttcttctccatccagatgagtattgggaggctacatttgatgtggccatatgttgcaagaaatcctttcctgtcattgctcaaggcgataactcatgtgcacaagaattcgttgaacacggtatacatggcttgcatcaaggacattcaaaacactgaaagacatatatggcttgcatcaattaagcatgtatgtatgttttattgcaaaatgttgtgtgagctgtgtgaaatctaaacgcgtagattttaaaagatctcaaggtagttgtatcaattgatgtaattgttttgaaattcgtaaaagcttccttcacaaaaaaacaaggacatgctgactttctagatttcaaggaaagacagataaaatggttttttatgttggacaagtacataggtccagtatcctacaacaaatgaactaatcatatttgttgcagtacactagattgtgttatgtctagcaaaaaatacacttgtt

SEQ ID NO: 34769 - DNA, 1080 bp, Zea Mays
tgacttgtgggccacggggtaacgtaatccactgttgtgttggctatggtctagctctcgcgaataagacccatttgaaatctctactactctataaggatccaacgagagcgtccacaatatttcaccgtgcctccgcctgcctccgtcccgtaacaccccagccctaaactacgcccgctctctccgcgcgtgatgctctcccttcctcatcgcctctgcaccgacgcccccttcatttttcctctcacataaacccgcgctcattcctttttctttcacctaattcccgtccttgtgtgtttgcgttgctcgcttgggtttggatccaatcgagggctcggcccggcggatgctgtagaggaatggcggaggctgtcgcgtctgcgggcaggctcgccatggactcctcgacctccgtctcgcccaaccaggcacaccataacatggccatcacagaattcttcttggatggttttcctgattcaaatagactacttaaaattcttggtgattttaaggaggtaaaaactggtcctggattggagtctacttggatgcatgcaatgcggtatctccttatacaattactgctacaagttcttctccatccagatgagtattgggaggctacatttgatgtggccatatgttgcaagaaatcctttcctgtcattgctcaaggcgataactcatgtgcacaagaattcgttgaacacggtatacatggcttgcatcaaggacattcaaaacactgaaagacatatatggcttgcatcaattaagcatgtatgtatgttttattgcaaaatgttgtgtgagctgtgtgaaatctaaacgcgtagattttaaaagatctcaaggtagttgtatcaattgatgtaattgttttgaaattcgtaaaagcttccttcacaaaaaaacaaggacatgctgactttctagatttcaaggaaagacagataaaatggttttttatgttggacaagtacataggtccagtatcctacaacaaatgaactaatcatatttgttgcagtacactagattgtgttatgtctagcaaaaaatacacttgtt

SEQ ID NO: 34770 - DNA, 4221 bp, Zea Mays
ctatactttcttcagcgaaaaaagataaatgactggataaaaagagagaggccactgaccgaccaaccccaaccacatgcaacacacacttcgcatttgcatccatccctcgctcggttatgaaattttttaaaccccttccgatcctaaataaaacggaaatcaaccccacaaaacccctgcgtaaagagacccaattgctatctcctccagcatccacccaacggatccgcggcaaccgaccacccatgggatcgctccggggcgcggcagcctcctccgcggcgccgcgcgcgggcgacctggtgaccacgcaggttagccttggtggatttgatgccaccgtcaaggcgctcgatctcgccgacttcctcgagttgaatgcgggctcggtctggcgctgccgcctcaagacctcctggactccgccggacgcctatcccgacttccttctccccaccgtcacctccgccgccgcgccgccgccacagtacgatcgcgtgcctccgcacgccttcgtccactttgcgcgcccggagggcgcgcgcgccgccgccgacgcagcgggccgatccgagctcatcctctccggcaaacccctgcgcgccgcctccgcacaggacagctcccttcgggcatcccgccgccgtagtgtctcgccattccgcttccctggctcgcgcctcgaggtcggggatctcccggcctcggacgccttcatcgccgcctggcgcggcccggcctctgggctcgagttctccgtcgacccgttcgacgggtcttgccacttcatcttcgcccgcgacaccgctttcaaagtccgggagttccgcgagtctgtggtgatgcgctgcgacgtcaagctccagttccccgtccgcgatgttgcggaagtcagggtgttccggctcgactgctcgctgctgatccggctatcggccgcaccgctggtctgttaccgcacggcggatgacgacatccacgtgtccgtgccgttcgacctgctcgacgacgatgacccgtggatacggaccacggacatcactccaagtggtgcgattgggcggtgcggtgcgtatagaatcacattctcgccgcggttctggccaaagatggaacgcgcgctgacgtacatgagggataggagggtggcgatccttgattgcgttggagggtggggggccaggagggggctcaccgtgcgtgatgagcctgagtttggggagcggatgcaggacctgttcttctgcgtgcagcacgccgagggtctcaagtttccggtgttgttcctcgtgaatgctctggtgcacaagggagtaataagtcaacaccacctcacgcctgaattcttcggtttgctccagaggaaggaggatgatgtgaatgtggctgccttgagggaattttggggggacaaatttccagtttttgatgcatgtgggaggctgaagaatctgcaggatagggttgccaggtacctgaaacatcttcgcaacaagattggggatgtcaattctgaggtgaggaggctggtaatcacgcccaccaaggcttattgcatgccaccagaagtggagcgctctaatcgcgtcatccggcattatagtgaagtctcagaccggtttctgagggttacttttatggatgagagaatgcagatgctcaacagtaatgtgctgaatttctctgctgcacaaatcgtcaaagatttgatgtcaaactcgttcctgcataagacaacagtgtacaagcgtgttaaaacgtttttgacagagggattccacatgtgtggcaggaagtactcgtttcttgcattctcatctaaccagctgagggacaggtcagcatggttcttcgcagaggacagaacgacaacagtggaaaccattaggaaatggatggggcggttcacaagtaagaatgtagcaaagcatgccgctcggatggggcagtgcttctcctctacatatgctacggtggtgctgcagccgcatgaggtaaatgagtgtcttgatgaagttgaacataacgggtacattttctctgatggaattggcaagattacgtgcgaccttgcactcgaagttgctcagaagctgcaattgacagataatcccccatctgcttaccagattaggtatgcaggcttcaagggtgttatatctgtctgggaaggaaaaaatgatgggatacgactttccctgaggccgagcatgcacaagtttgagtctaaccatactgtgttagaggtggtctcgtggacaaagtttcagccaggattcttaaatcgtcagattattacattactgtcctccttgaatgtcccggatgctatctttgctcaaatgcaggaagccatgttatctaatctcaacaatattttgtcagactctgatgttgcttttgacattgtaaccgcctcttgtgctgagcaaggaaccactgcagcactgatgttgagtgctggcatttcacctggaactgagccacacctgaaagcaatgctgttagctataaggtcctcacagctgctaggtcttttggagaagacaaggatttttgtgcccaagggaaggtggttgatgggctgccttgatgaacttgggatccttgagcaagggcagtgctttatccgggcatcatctccatcactcaataattgtctggtgaagtatggatcaagattgtctgcagcaaacacaaatgcagagaccattctgggtactatcgtaatggcaaagaatccatgccttcatccaggggatgtccgaatccttgaagctgttgatgtgcctgaactgcatcaccttgttgattgcttggtcttccccaagaaaggtgagaggccgcacgcgaatgaagcatctgggagtgatcttgatggggatctatacttcgtaacatgggatgaaaaccttataccacctggtaaaaagagttggaaccctatggactactccccagctgaagcaaaacaactgccacgcgcagtatcccaacatgatattgttggtttcttcttgaagaacatggtaaatgagaaactgggtccaataagcaatgctcatgttgttcacgctgatatgagcgagtatggagcaatggatgagaagtgtattcagttggcagaactagcagcaactgctgtggacttccccaagacaggcaaaattgtgtcaatgccagcatcccttcgaccaaaattatatcctgacttcatgggaaaggaggatgctatctcctatagatcagagaagatccttggaaggctttatcggtcaatccaagaagcctccagcgatgatttggttccagaagaaacttgcacatctaacaatctgccttatgatgcagatatggaagttgctggtgcagctgattttctctcgagtgcttggcagtgcaagtgctcatatgaaacacaactgaacgcactgctcaaccaatatggcgtgcgcactgaagcagagcttgtgacagagcatatatggtcgcttcccaagtacagcagcagaaggcagggggacataaaggagaggttgaagaatgcatactatgctcttcacaaggagtttaggagcattttcgaaagcattgtgacagatcaaacagagatctctgatgatgagaaaagtcggttttacgagatgaaggcctccgcttggtaccaggtaacctaccatcctgaatgggtccagaagtcaagggaaatgttcaagtctgactgtgaggacatgccagcaaggcttagctttgcatggatcgcggttgagcacctggcacggattaagataaggtgccgtggagaagtgaaagtggacagcccaaggcctgttgagaggctcgcagcctacatatctgggagcatgtgagttgacgtgaagctccaagcaattgtgaagcaagaccactctgccctctttgccatgccatctgaactctgatgcatggctctgtctagtcacttctttttacgaattattacatagttgagacacagccactctataagcggctaaagcgtacgcacatttctacgaacgataatgcttttaagtctgaactgttcaatctctattactaccagaatgtttgtggacataaatattagttcgtggtgtctcaattccaaaacggttttcttggttgtgaagggtgttggtcacttatttttttattgctgtgaataaaaaacaacgcaacacaattgtttagtataag

SEQ ID NO: 34771 - DNA, 2916 bp, Zea Mays
tcaaccccacaaaacccctgcgtaaagagacccaattgctatctcctccagcatccacccaacggatccgcggcaaccgaccacccatgggatcgctccggggcgcggcagcctcctccgcggcgccgcgcgcgggcgacctggtgaccacgcaggttagccttggtggatttgatgccaccgtcaaggcgctcgatctcgccgacttcctcgagttgaatgcgggctcggtctggcgctgccgcctcaagacctcctggactccgccggacgcctatcccgacttccttctccccaccgtcacctccgccgccgcgccgccgccacagtacgatcgcgtgcctccgcacgccttcgtccactttgcgcgcccggagggcgcgcgcgccgccgccgacgcagcgggccgatccgagctcatcctctccggcaaacccctgcgcgccgcctccgcacaggacagctcccttcgggcatcccgccgccgtagtgtctcgccattccgcttccctggctcgcgcctcgaggtcggggatctcccggcctcggacgccttcatcgccgcctggcgcggcccggcctctgggctcgagttctccgtcgacccgttcgacgggtcttgccacttcatcttcgcccgcgacaccgctttcaaagtccgggagttccgcgagtctgtggtgatgcgctgcgacgtcaagctccagttccccgtccgcgatgttgcggaagtcagggtgttccggctcgactgctcgctgctgatccggctatcggccgcaccgctggtctgttaccgcacggcggatgacgacatccacgtgtccgtgccgttcgacctgctcgacgacgatgacccgtggatacggaccacggacatcactccaagtggtgcgattgggcggtgcggtgcgtatagaatcacattctcgccgcggttctggccaaagatggaacgcgcgctgacgtacatgagggataggagggtggcgatccttgattgcgttggagggtggggggccaggagggggctcaccgtgcgtgatgagcctgagtttggggagcggatgcaggacctgttcttctgcgtgcagcacgccgagggtctcaagtttccggtgttgttcctcgtgaatgctctggtgcacaagggagtaataagtcaacaccacctcacgcctgaattcttcggtttgctccagaggaaggaggatgatgtgaatgtggctgccttgagggaattttggggggacaaatttccagtttttgatgcatgtgggaggctgaagaatctgcaggatagggttgccaggtacctgaaacatcttcgcaacaagattggggatgtcaattctgaggtgaggaggctggtaatcacgcccaccaaggcttattgcatgccaccagaagtggagcgctctaatcgcgtcatccggcattatagtgaagtctcagaccggtttctgagggttacttttatggatgagagaatgcagatgctcaacagtaatgtgctgaatttctctgctgcacaaatcgtcaaagatttgatgtcaaactcgttcctgcataagacaacagtgtacaagcgtgttaaaacgtttttgacagagggattccacatgtgtggcaggaagtactcgtttcttgcattctcatctaaccagctgagggacaggtcagcatggttcttcgcagaggacagaacgacaacagtggaaaccattaggaaatggatggggcggttcacaagtaagaatgtagcaaagcatgccgctcggatggggcagtgcttctcctctacatatgctacggtggtgctgcagccgcatgaggtaaatgagtgtcttgatgaagttgaacataacgggtacattttctctgatggaattggcaagattacgtgcgaccttgcactcgaagttgctcagaagctgcaattgacagataatcccccatctgcttaccagattaggtatgcaggcttcaagggtgttatatctgtctgggaaggaaaaaatgatgggatacgactttccctgaggccgagcatgcacaagtttgagtctaaccatactgtgttagaggtggtctcgtggacaaagtttcagccaggattcttaaatcgtcagattattacattactgtcctccttgaatgtcccggatgctatctttgctcaaatgcaggaagccatgttatctaatctcaacaatattttgtcagactctgatgttgcttttgacattgtaaccgcctcttgtgctgagcaaggaaccactgcagcactgatgttgagtgctggcatttcacctggaactgagccacacctgaaagcaatgctgttagctataaggtcctcacagctgctaggtcttttggagaagacaaggatttttgtgcccaagggaaggtggttgatgggctgccttgatgaacttgggatccttgagcaagggcagtgctttatccgggcatcatctccatcactcaataattgtctggtgaagtatggatcaagattgtctgcagcaaacacaaatgcagagaccattctgggtactatcgtaatggcaaagaatccatgccttcatccaggggatgtccgaatccttgaagctgttgatgtgcctgaactgcatcaccttgttgattgcttggtcttccccaagaaaggtgagaggccgcacgcgaatgaagcatctgggagtgatcttgatggggatctatacttcgtaacatgggatgaaaaccttataccacctggtaaaaagagttggaaccctatggactactccccagctgaagcaaaacaactgccacgcgcagtatcccaacatgagcttcgacattgagtaccttcagaacaagataaggataaagatgttagcttcgtcacaacaacatatggaaacg

SEQ ID NO: 34772 - DNA, 1379 bp, Zea Mays
ctaaaaaggagcctttgcttctcgtagctccctttaccccttccttttcttttccgctgacagaagccgtaagcatcttgctgctgcgcgactgcgcgagtgctcgtctctccttgtcctcctactacagtcgtcgtcgtctctctccagggacacacatccgccatcacctttgcttcttcgattcgcaaggagcacgagtactcatggagcagcagggacaggggtggaggaggcggcagatcccggcgttcgggaggtggaaccagcataccgacgaggcggggtacttggagtcggcggtgcaggctggcctcgtcaggcccggccactgctaccacgacgacggcggcaacgaggttgtgctgttcaggtcctccgcctcgccgcctccgcacaagccagccaagaaggtgcgaagcacgatggagggtcacggtcaccaccatcaggttcaggttgaggcggggagcaggaagcagcggccgttcgtggcgggcgacgggtcccgctcccgcgcggccaagccgaggccgagggtcgttagggcggcggtggacgaggacctgtacattgtcccttccgatatgtcgcgcaagaagaaaggggtaccgttaattttcagctgctgtatttatttaacacacatatatataaggccggtctgatcaggtcagcactagctagctccactttgaatctggggatatctactcgttattgaatgcagattgcacgttgatccagaaacagtatgccactttgaattaatctggctagtgcacacttccagcaaagtgtactgagataatagtttgccatttctacgtttggttagctacaacaaatatcagaaaactaaatattttgtccttctattcgagctgatgatgtatctactgtgtatatatattagctagtcatccagtttcctgacccagcaagttgactttaaagctttctgtacttttcttgtttgtttctttttcagaggaaacacgtgaggagcatgtggatggggtgcgtgggcctcaactgcgtcgcctgaccagacatgaccggaccttccgagcctttcttccagctttttcgggtcgcatggaaaaaagagagtccacgagacagacaacccagactatctgtttcatcccatccaatggatgatcgtcaatcaccacgtcggacacgggctcgatgcctgccgtccatccggatgtcgcatatgtatattgcctggtgctgtcattgtgcatgggtatatcaccaggcggcgtgagttgtctgtggtccatgtctacgtctacattgcatgcacttttttttacgataataataatggatagatatttggcttcaatatcttaaagagaggatctttt

SEQ ID NO: 34773 - DNA, 1037 bp, Zea Mays
ccgcgattaagcatgaagacgcaggcaccaggcagacggacctaaaaaggagcctttgcttctcgtagctccctttaccccttccttttcttttccgctgacagaagccgtaagcatcttgctgctgcgcgactgcgcgagtgctcgtctctccttgtcctcctactacagtcgtcgtcgtctctctccagggacacacatccgccatcacctttgcttcttcgattcgcaaggagcacgagtactcatggagcagcagggacaggggtggaggaggcggcagatcccggcgttcgggaggtggaaccagcataccgacgaggcggggtacttggagtcggcggtgcaggctggcctcgtcaggcccggccactgctaccacgacgacggcggcaacgaggttgtgctgttcaggtcctccgcctcgccgcctccgcacaagccagccaagaaggtgcgaagcacgatggagggtcacggtcaccaccatcaggttcaggttgaggcggggagcaggaagcagcggccgttcgtggcgggcgacgggtcccgctcccgcgcggccaagccgaggccgagggtcgttagggcggcggtggacgaggacctgtacattgtcccttccgatatgtcgcgcaagaagaaagggaggaaacacgtgaggagcatgtggatggggtgcgtgggcctcaactgcgtcgcctgaccagacatgaccggaccttccgagcctttcttccagctttttcgggtcgcatggaaaaaagagagtccacgagacagacaacccagactatctgtttcatcccatccaatggatgatcgtcaatcaccacgtcggacacgggctcgatgcctgccgtccatccggatgtcgcatatgtatattgcctggtgctgtcattgtgcatgggtatatcaccaggcggcgtgagttgtctgtggtccatgtctacgtctacattgcatgcacttttttttacgataataataatggatagatatttggcttcaatatcttaaagagaggatctttt

SEQ ID NO: 34774 - DNA, 1049 bp, Zea Mays
cccgtctctcggtctccgcgattaagcatgaagacgcaggcaccaggcagacggacctaaaaaggagcctttgcttctcgtagctccctttaccccttccttttcttttccgctgacagaagccgtaagcatcttgctgctgcgcgactgcgcgagtgctcgtctctccttgtcctcctactacagtcgtcgtcgtctctctccagggacacacatccgccatcacctttgcttcttcgattcgcaaggagcacgagtactcatggagcagggacaggggtggaggaggcggcagatcccggcgttcgggaggtggaaccagcataccgacgaggcggggtacttggagtcggcggtgcaggctggcctcgtcaggcccggccactgctaccacgacgacggcggcaacgaggttgtgctgttcaggtcctccgcctcgccgcctccgcacaagccagccaagaaggtgcgaagcacgatggagggtcacggtcaccaccatcaggttcaggttgaggcggggagcaggaagcagcggccgttcgtggcgggcgacgggtcccgctcccgcgcggccaagccgaggccgagggtcgttagggcggcggtggacgaggacctgtacattgtcccttccgatatgtcgcgcaagaagaaagggaggaaacacgtgaggagcatgtggatggggtgcgtgggcctcaactgcgtcgcctgaccagacatgaccggaccttccgagcctttcttccagctttttcgggtcgcatggaaaaaagagagtccacgagacagacaacccagactatctgtttcatcccatccaatggatgatcgtcaatcaccacgtcggacacgggctcgatgcctgccgtccatccggatgtcgcatatgtatattgcctggtgctgtcattgtgcatgggtatatcaccaggcggcgtgagttgtctgtggtccatgtctacgtctacattgcatgcacttttttttacgataataataatggatagatatttggcttcaatatcttaaagagaggatctttt

SEQ ID NO: 34775 - DNA, 2587 bp, Zea Mays
caccgctctcgtcttctctttcacagactgcaaatatgagttcgccggccatggagacgacctcgcaggacgaatcagaaagtgacgagcaagatcagccgttggaggcgaagccgctgcggtcactagcaccgatgctgccgctgcctatgaaatatgacgtggcaactcaatcaaccgacccgatgctagttttcgtcacgccattcaggccctgcacgtcgccagaaccgtctgcagctcgtcagcccttaccaaagtcaccagctcctctcagggctactccagtttcagctgcatttcccatgccacgacccggcgccggaggtgatcctctcgaggcgactccagtctcagcagcggcgccggcgtttcgcatgccacggcgcgaagatgaatcatcggaagaagaatacaatcccttcttttgtggtcggaaaaaaccaacccggctgaagacagcaggcaagaggactcatcagcaggctgagtgctccaatgcacgtgacatgaagcgcaggccaacacagacaagcctcagtctcaacaaggagctcgccacctttaccccatcctcgtcaagcgacccaactgaatctgtccaagagacactgacgatgtttgactcgctccggcgccgcatactccaactggacgaaaacagagaggacgcagcaggcaagcgtgcggacttgaaggccggaagtctcatgatgcagaacggcctgaggatcaacaacctcaagaccgtaggacccgtacccggcgtcgaggtcggagacatcttcttcttcaggatggagatgtgcgttgtcggtctacacgcgcccgccatggccggaatcgactacgtctccgctaggcgtggcggaagcggaaccgacgaggttgtggcggtcagcgtcgtctcgtccggcggctacgagaacgacgacaccgactcggacgtcctggtgtacacgggccagggaggcagtagccggcggcgcaaggacaagcacgaccagaggcttgaacgcggcaaccttgctctcatgaacagcatggagaggaggagcgtggtcagggtcgtgcgcggcgcgcaggacccgttctgccgctcgagcaagatctacgtctacgacgggctgtaccgggtggaagggtcctggacggagagggcgagggatgggttcagcgtcttcaagtacaagctgagaagggagccggggcagcgggacgggatctcggtctggaagatggctgagaggtggagagcagatcctgtgacgagaagccatgtcgtaagcgcagacatgtcgtcgagcgccgagaagctccccgtgtgccttgtcaatgacgcagacgacgacgacgagcagagagtgccagggcgcttcaattacgtcaccggggtggagtatgagtatccaaggccgctcggcaagacgaagccatgcaagtgccccagcgtgtgcctgcccagcgacgaccctgactgctcgtgcgcacggctgaacagcgggcaccttccgtacacggcctgcgggctgctcgtgaagcgcgttccggtgctctacgagtgcggccccgagtgccggtgctcaggaaactgccgaaacagggtcgcgcagaaaggcgttcgtctcaggttcgaggtcttctggaccggggacgcctgcgggtggggcgtccggtcctgggaccccatccgcgccggcgcattcgtctgcgagtacgctgggcaagccgtcgatgtgagcacgggtggcgaggaggatgagtatgccttctgcgccagcggcgagggttggaggtggtggaacctgggagcggggttggttgaggaagcaagcgacggtgacgcagcagagaacctggaggagaggctgcctgttatgataagcgcgagaaggtcaggcaacgtggctcgctttctgaaccatagctgctcgccgaacctgctttggcagcccgtgcggtacggcgatgggggatacccgcatgtcatgttcttcgcgatgaggcatgttcctcccatggctcaactgacctatgattatggtactacgagaggagctgctcctcctggttttcaggggaaatttccgaacgcttgcagactcaagccatgcttctgtggctccaccagttgccgaggttctttctgacgaaaggaaccatggtgtagtaaagcaggttctggtgttccctttgtatatataaaagcatgccatggcgggtgtggtaaggggaatcaccagtctgttctgggacgatcgttgctggcaacgagggaggggaggaaggtagtagaatgaagtctttgtaagcatggcgtggacctctagtagttcacgaacaaccagactatgtaatgcaatgccagtgtgcaatgtgacattttgctcggagatgagatggtgattaggctgcactttttggctggctgagagaattctcaataagctacacaaggtttgaagattgttttatcacatttgtgcaactgtttgcaaaacattaaacattgtcatcttcgagagagatgtagctttgctgcgccgaaatatgtatatctttattattataaagcacctgtttttcg

SEQ ID NO: 34776 - DNA, 2669 bp, Zea Mays
gacaagtgtcccgtatcaagcgacctgaacgaggaggctagtagcactacggtgcattcctttgacccccttcagttttcctcaggctcggctctgcttgctccgacgacaccctcaaggagttcgccggccatggagacgacctcgcaggacgaatcagaaagtgacgagcaagatcagccgttggaggcgaagccgctgcggtcactagcaccgatgctgccgctgcctatgaaatatgacgtggcaactcaatcaaccgacccgatgctagttttcgtcacgccattcaggccctgcacgtcgccagaaccgtctgcagctcgtcagcccttaccaaagtcaccagctcctctcagggctactccagtttcagctgcatttcccatgccacgacccggcgccggaggtgatcctctcgaggcgactccagtctcagcagcggcgccggcgtttcgcatgccacggcgcgaagatgaatcatcggaagaagaatacaatcccttcttttgtggtcggaaaaaaccaacccggctgaagacagcaggcaagaggactcatcagcaggctgagtgctccaatgcacgtgacatgaagcgcaggccaacacagacaagcctcagtctcaacaaggagctcgccacctttaccccatcctcgtcaagcgacccaactgaatctgtccaagagacactgacgatgtttgactcgctccggcgccgcatactccaactggacgaaaacagagaggacgcagcaggcaagcgtgcggacttgaaggccggaagtctcatgatgcagaacggcctgaggatcaacaacctcaagaccgtaggacccgtacccggcgtcgaggtcggagacatcttcttcttcaggatggagatgtgcgttgtcggtctacacgcgcccgccatggccggaatcgactacgtctccgctaggcgtggcggaagcggaaccgacgaggttgtggcggtcagcgtcgtctcgtccggcggctacgagaacgacgacaccgactcggacgtcctggtgtacacgggccagggaggcagtagccggcggcgcaaggacaagcacgaccagaggcttgaacgcggcaaccttgctctcatgaacagcatggagaggaggagcgtggtcagggtcgtgcgcggcgcgcaggacccgttctgccgctcgagcaagatctacgtctacgacgggctgtaccgggtggaagggtcctggacggagagggcgagggatgggttcagcgtcttcaagtacaagctgagaagggagccggggcagcgggacgggatctcggtctggaagatggctgagaggtggagagcagatcctgtgacgagaagccatgtcgtaagcgcagacatgtcgtcgagcgccgagaagctccccgtgtgccttgtcaatgacgcagacgacgacgacgagcagagagtgccagggcgcttcaattacgtcaccggggtggagtatgagtatccaaggccgctcggcaagacgaagccatgcaagtgccccagcgtgtgcctgcccagcgacgaccctgactgctcgtgcgcacggctgaacagcgggcaccttccgtacacggcctgcgggctgctcgtgaagcgcgttccggtgctctacgagtgcggccccgagtgccggtgctcaggaaactgccgaaacagggtcgcgcagaaaggcgttcgtctcaggttcgaggtcttctggaccggggacgcctgcgggtggggcgtccggtcctgggaccccatccgcgccggcgcattcgtctgcgagtacgctgggcaagccgtcgatgtgagcacgggtggcgaggaggatgagtatgccttctgcgccagcggcgagggttggaggtggtggaacctgggagcggggttggttgaggaagcaagcgacggtgacgcagcagagaacctggaggagaggctgcctgttatgataagcgcgagaaggtcaggcaacgtggctcgctttctgaaccatagctgctcgccgaacctgctttggcagcccgtgcggtacggcgatgggggatacccgcatgtcatgttcttcgcgatgaggcatgttcctcccatggctcaactgacctatgattatggtactacgagaggagctgctcctcctggttttcaggggaaatttccgaacgcttgcagactcaagccatgcttctgtggctccaccagttgccgaggttctttctgacgaaaggaaccatggtgtagtaaagcaggttctggtgttccctttgtatatataaaagcatgccatggcgggtgtggtaaggggaatcaccagtctgttctgggacgatcgttgctggcaacgagggaggggaggaaggtagtagaatgaagtctttgtaagcatggcgtggacctctagtagttcacgaacaaccagactatgtaatgcaatgccagtgtgcaatgtgacattttgctcggagatgagatggtgattaggctgcactttttggctggctgagagaattctcaataagctacacaaggtttgaagattgttttatcacatttgtgcaactgtttgcaaaacattaaacattgtcatcttcgagagagatgtagctttgctgcgccgaaatatgtatatctttattattataaagcacctgtttttcg

SEQ ID NO: 34777 - DNA, 1035 bp, Zea Mays
taggtgttgataaatattatatgcactctcaggatgaggaacaatttcaatataaccttcatttttcatgatagaaagcacaatctccatgtcacttatattcatttggcaaccatacgtcttgtgatagatgcgtcccttggttgaagttgaagttgttgaaccagacactaaactagacaaagcaaaaacattagattgttatattccacacaagtagcaatcaccacaagctcacactaaactagacagttgaatatgatacatgggaacaacgaatgttttcagctcggaactgctactataagaaatagaaccaccaatgatcggagagagtggtttagcttggaattggtgcatagttactgccaactaccaattagtctattttgcaaccttcataaacaccaaaggcaattcaaaactggtgcatagttactgccaactaccaattagtctagtttgcaaccttcataaacaccaaatgtaattcaaaactgcttgacgcaataccatcccgaagaatcatactacatatattatatatttcgcactggtcagtggatggataatctaacaaaatggtatttaacatatgtatttatagctttacaaatggtctgataaataagtttccactaattatcatctttcatatatcctcttaatgtaccatgaaatttaatcttggcaaagaaaaagatggtgtcagacctctagaacgcatccatagtccttacttcttaagtcatcaacaaccaaaataaattcaaaaccaaagttactgaatgtgatcatgctacaagcaatttccatgccccatagcaagcctacaactagataggcaccagatccacacatcactagtaaattctcctcaaaatctagtgataattttccctagaaattcacaatacccactaatacacaattaaagcaattattacaagagaacctacacttacaataccatgactgagcagaaccatctaagtggccagggcactggacaggagcgtggggcgtagctcggac

SEQ ID NO: 34778 - DNA, 270 bp, Zea Mays
atggaatgtaagcagtttaagacaaacaaggttaatcgaaacaaaatagataaaacaagaatgccatgtacaatctctacttcaaaaaagataaatttactgctcccagatcgagaactcaatggatgtgtaaagtttccaaagtttcagccggacaccatcgacaacgagactatgaatgctgcatcacctgaacattgttgcagagttcaaatagtggaacaacaagcagttttaaattccttagaacaacaaaatactctcggatag

SEQ ID NO: 34779 - DNA, 1013 bp, Zea Mays
gtcaaacacaaggcaatcaaatggagatgcaagcctaggattgacaacagaagatgtgatcgaggaatggaagctatttttctttgcaggcatggagacaacatcagtcctacttacttcacttgttgtgctaagcatgcacccagaatggcaagagggagcaagcgaagaagttttgagccactttggaagaaccagaccagattttgatagcttgagccgtaagtgcaaaaccaaggtcaggctttatttcaagattccaaaattgtgaattattaaagggatgtgtagtatccatttttatcgaattaatggagactaagtaaaaaataaataactaaatagaaatgatttgtttttattcaattcaataatagctaattaacataaatctcataatgtgattctggtgcacaactgtgggtttaaatctaaaaggtagtcgtggttaaatctcagtgatacattatatatatgccacatgttatcgctttctgagtctgaatatgctaaaaggatgatatggatagaaatgccgctaagtgttaaacaggaacattacttgaggaagagtaaataatccagtgttttccataccatataattgaagcaacaatttggtcatctgttatatatttgcaggtaaccatgattctccatgaggcccttaggttgtacccaccggcaacctttctaaccagaagaacttataagaaaatggagctcattggaattaaatatcttgcaggagtggacctctttctgcctgtcatcttcattcacagtgatcccaacatttgggggaagatccagaaagaaaagtcaagaatgtcttaacagcttagaaaaggagaaaatattgatgtttgtcattttgtatcatagttttatactaatttttaactcccgtagcaacatatggacatatttgtacataagttatcgtattattatatattcccgttacaatgcacgggcacttacctagttattttctgtgaatgcataaccat

SEQ ID NO: 34780 - DNA, 1055 bp, Zea Mays
cttattatcatggtttacacttttgggtattacaaggttcttgtccaccaaaaacaacagacagatgagagcaacctttctagaggttcgcaaaattctccctgaaataattgggaagagagaagaatacaaaaaacagataaacaaataacgatgactttctaggcttattactagagtcaaacacaaggcaatcaaatggagatgcaagcctaggattgacaacagaagatgtgatcgaggaatggaagctatttttctttgcaggcatggagacaacatcagtcctacttacttcacttgttgtgctaagcatgcacccagaatggcaagagggagcaagcgaagaagttttgagccactttggaagaaccagaccagattttgatagcttgagccgtaagtgcaaaaccaaggtaaccatgattctccatgaggcccttaggttgtacccaccggcaacctttctaaccagaagaacttataagaaaatggagctcattggaattaaatatcttgcaggagtggacctctttctgcctgtcatcttcattcacagtgatcccaacatttgggggaagatccagaaaggtttgacaatggcatctccaacgcaaccaggcatcagactgctttctttccgttcggagggggggcccaagatctgcatggccagagctttgcgttgctggaagccaagatgacagtatgcaccatgctctgtgcttctcctttgagctctcccattttacacccacgcgtcatagaccgtgataacactaggctgaaaaagcattgaccgagatgctccttctatgctgctgctgaatactacttttgttactgatcgtatatgtagaaaagtcaagaatgtcttaacagcttagaaaaggagaaaatattgatgtttgtcattttgtatcatagttttatactaatttttaactcccgtagcaacatatggacatatttgtacataagttatcgtattattatatattcccgttacaatgcacgggcacttacctagttattttctgtgaatgcataaccat

SEQ ID NO: 34781 - DNA, 854 bp, Zea Mays
gctaaatttaaacttcattcactaatttaccatacgtcacatacttaacatctcaaacctaacaatagtactcaatgcaactactctaaaatcatgaaaataatcacatcgcattcatcgaactaattcaataattaagctaacggaaataggaatcggcttaccatactaaatcaaacttgcaaccacgaaatcgacgacgcctttcagctctagcatttcactgaacacatggtgagtgctgcatcgactcgcacttcttctccatccacatcgagaatcctccggccgtgtactgatttatttctttcttcgcctaatcttctcgaatttttggcgtagacgaggatgacgattgatgacttgttcgagctttttgtcgagcactttgtgaacatcacgctgccagcttcgtcttcacccgacgctttgtatttcttgatgatgcacagaacgtcgacgagattgataacgcacacgcgtgatgaggcagggtctgtggagatgtgcgcacgggaaggtgagcttgtggtgccgagagtcgacgacgagcaggacacggatcagggagtttgcttgggagtcgagtaagggatgacgggttcgacgactcgacggcaaacgcgaacacgccgaaaccgatggatgaggagcgagcgcacgcggggcgagcaacacggatttgaagcgtggagaaattgcccacagcgaaatgaatagagcaaggagcgctcgtgaactctatggcggaatcggcggtagccgatgccagagcgcacggcgagggagcttcgcagttcgatgaggccgtggccgggcaaattctatggcgcgaactgcttcgtggctaagac

SEQ ID NO: 34782 - DNA, 1828 bp, Zea Mays
atccgtccgagtgtcccaaggaccccggataaaccacttacaaccaggatcgcaaaattaagtaaacacaaatcacacaccaacatttttgcagcggaatttctttattacaaaagttacaatatacaacaaatttacattatatttatcggagtgtttacaaaagtgattcaaaggaatacactttgaattgttataaattatttataagtttgaaatatatgctagcttaggtgaccatccgcaataagaagtatagaagagttacttagacttataagaaggtcgtgcccgccatcgcttaacaccaatcacaatcaaagtgactcgtaacctgcaacaacaatgggaataaaaccctaagtacacaagtactcagcaagacttacctgactaaagaaaagactctcaagggtatgctggttttaaaaagaaaagactctcaagggtatgctggttttaaaaggattcaaggtaaggcttatcaaggatcaaggactctatttgtagaaaagcttactatgagtggatccttaaaaaattatttttacttgtcaggttaagtaaagttacctgcatctagagttctttctaccctagttcaagcacttggcctatactagccgtcttttatcatcccatcagttcagtgcattgctacatgtaagtcggtgaccaagtcttcatatccgagaagtaacggcgttccgaatcgattaatacccagctggggatctccaatcacatgacatatgtagcacttaacccctgcatatgtcaagtcgccaccgggtttcttaagaccagaccgggttcacgccaaccgagagcacagatacaccaccgtccagcctcttgccatagagggtacacgctactctcggcatctctccactcccattgcgtgttggcctttctggtattagtttgtccgagtcaaagcttacccatgatgaggcatgtgaccagttaaaaggtcctcgatcaacaggcctacatcggcacggtccttaatcgactcagatggagacactacaccgagactcccttctcgtgcaagtcacccgcccggtctcagctttattatttaaaacccaaagtttggtacctggcagaggtacatcttttcagatgttgaacccatcaaggccttgatggatccaccatcacaagttcttctttgtaaaaattcacatccactgtgaagcatcacctttggttttaaaagaaaacattttgtttttctaaagcaaggctaagcatcataaaatccttttcataaaagggtatcaaggaagggtaatcaattttccaaggaaggaaatgcatcaactgtttagcacacaactcctatcacctaatgcatcatataaggtgataaaaatttaaaacagcaaggaggtggcaaatgcacggggcttgcctggataacactatgttagtgtttgttagatgtcgaccacttggcgattagcttttgttctgatacttgctttgtctgtccatcttcaggttcatccgacagcatcaccttgtggagaagctcacgcgcagcaacatcttgtggtcgactcagctttggttctccgcatcatgtggttaataaacgtacctaaatgatttgcataatgcacatgaatgcatataaactggaatatcacaaacctaaataatgctacaccacagcgaattgaacacctagcggcgaggcattgtaccatttcatacggaaacaataggtatcgacatacgactaagcgcaataattacaaaataataaactatacatactaactacaacactcgagtttctcctgtttaatcatat

SEQ ID NO: 34783 - DNA, 830 bp, Zea Mays
tttggatatattttatcctttaaggctaaatctttggactgatgaatattcagattggtgaggcatcaaggaggacttggcttggcgaggaagctgatccacagtactcagatcgactgttgagagcatacaagagacctgtggaggttgacgcggaccaatcaaggtggtttatatccaaggatgcaattgtatctggccttggtcttctaggtatcaagcagggtggacctgaggcaacattttctaagtctcgtcgaaagagagtcatccgcaaaaaggtcacttcaggttgagtttagtggatttggatagcaatgctggaacaattttgcttctgttccactatgccagagggaggtctacccaaattatggtaaatgagaaaaaggtatcaagtcaaccagcacgtggtctgtcggcgaagggatcaaagggtttgttactgggaagggttagttaaaaggtgccaattactattttataatttaattgcagttatttaaggtaagaaaatatgttgttttcttgtattgctgtgaggcaaatagacacgtttagtggtagttttgtaagattgttaatgtactgactttacatgagaaatggattctgcatttttatatagatcaagtagctgccacatgcttgtatctatcttttgaggtcaattaggtcagggtcctgctttgttgctggttaggactacgcttttataaaaacttattttaagtacgaaggccgatctctgtggaagtttcatcgtgctatttccaagactactacattttctaaagaggaatgaacctcaatggaatgttttatttcac

SEQ ID NO: 34784 - DNA, 2175 bp, Zea Mays
ctcctctttcgatagctggcgaaggcgcggcgcgcagggccagtagcaaccctcccatggcctacgctgcgcctcccatggcgtcgtccctcaccgcctcccacccccctctttccccgtcccacctcataacccatccgcatcgctgccctgcgcgccccaaccccaccaccggcctcctccgcctcaccccgtctcgccgccgcggtcgtccccccgtggccgtccgcctcgcaatatctgcctcgtccacctcagccccgcccccgtcggcggatcggtcggaggccgcgtcgtcgctggagagatacctctcggcgacggtgacgggagcggtgatgggaacgggggcggccccaccagcttcggccccgccgcgcgccccgccggcgatgaaggggggacggaagcagtatagcgcgttgggggctgtcacgctcgagaaggccaagctcgatctctcccagcgccgcaagaatatcatgcccgagctggcgacaggtggtggtggtggagatattggaaaaaggatcggtcatggtgggggtgatggtggtgatgatgatggtgacgatgatgactactttgatgattttgatgagggagaggaagaaggtgggcttttcaggaggcgaattgttgtacaagagctattcaatagggagttcgtagaagctgtgttgcaagaatggtacaagacgatgagtgatttgcctaccggtcttcgccaagcttgtgagatgggtttggtgagttctgcacagatggtacgttacttgtcaatatttgcaagacctacaaacgctaggtccttctcaagagctcttccaggctggctttccagaggtcttgttggaaggacacttgcagatccatcattcccacataaaatgtctttggagtttatagctaccattgcgtcatctatttggtgtgaaatgaatattcgcaaagagagcttgttgcaacttgatggttcttggacttttagcaccatgccgttcatatgcgagtacatctcgatttgacttccaaaatgcaattgagaaacttccgaacaacatatttgagaagagctatcctttgagagagtttgatctagcaaaacgaatcagtgcattcttttataaagctgctgagcttagtctggtcgggtttgtagctggctctgtgcaagggggtatgtcaatagtcttgtccgcaagaaaagaaaggaggttatcggtgactattccctctatcagcaccaatgctcttggttatggagctttcctaggactctatgctaacttgcgttatcaattgctatgtggagtagaccaatatatggtcaagcgcttcgatgttttgggtgtggcaatcttcttcagcacagcagcaagactgatgaatattcagattggtgaggcatcaaggaggacttggcttggcgaggaagctgatccacagtactcagatcgactgttgagagcatacaagagacctgtggaggttgacgcggaccaatcaaggtggtttatatccaaggatgcaattgtatctggccttggtcttctaggtatcaagcagggtggacctgaggcaacattttctaagtctcgtcgaaagagagtcatccgcaaaaaggtcacttcaggttgagtttagtggatttggatagcaatgctggaacaattttgcttctgttccactatgccagagggaggtctacccaaattatggtaaatgagaaaaaggtatcaagtcaaccagcacgtggtctgtcggcgaagggatcaaagggtttgttactgggaagggttagttaaaaggtgccaattactattttataatttaattgcagttatttaaggtaagaaaatatgttgttttcttgtattgctgtgaggcaaatagacacgtttagtggtagttttgtaagattgttaatgtactgactttacatgagaaatggattctgcatttttatatagatcaagtagctgccacatgcttgtatctatcttttgaggtcaattaggtcagggtcctgctttgttgctggttaggactacgcttttataaaaacttattttaagtacgaaggccgatctctgtggaagtttcatcgtgctatttccaagactactacattttctaaagaggaatgaacctcaatggaatgttttatttcac

SEQ ID NO: 34785 - DNA, 2221 bp, Zea Mays
aagagatagcctcctctttcgatagctggcgaaggcgcggcgcgcagggccagtagcaaccctcccatggcctacgctgcgcctcccatggcgtcgtccctcaccgcctcccacccccctctttccccgtcccacctcataacccatccgcatcgctgccctgcgcgccccaaccccaccaccggcctcctccgcctcaccccgtctcgccgccgcggtcgtccccccgtggccgtccgcctcgcaatatctgcctcgtccacctcagccccgcccccgtcggcggatcggtcggaggccgcgtcgtcgctggagagatacctctcggcgacggtgacgggagcggtgatgggaacgggggcggccccaccagcttcggccccgccgcgcgccccgccggcgatgaaggggggacggaagcagtatagcgcgttgggggctgtcacgctcgagaaggccaagctcgatctctcccagcgccgcaagaatatcatgcccgagctggcgacaggtggtggtggtggagatattggaaaaaggatcggtcatggtgggggtgatggtggtgatgatgatggtgacgatgatgactactttgatgattttgatgagggagaggaagaaggtgggcttttcaggaggcgaattgttgtacaagagggagttcgtagaagctgtgttgcaagaatggtacaagacgatgagtgatttgcctaccggtcttcgccaagcttgtgagatgggtttggtgagttctgcacagatggtacgttacttgtcaatatttgcaagacctacaaacgctaggtccttctcaagagctcttccaggctggctttccagaggtcttgttggaaggacacttgcagatccatcattcccacataaaatgtctttggagtttatagctaccattgcgtcatctatttggtgtgaaatgaatattcgcaaagagaggtttaaacaagaatgggatttggtgattgttaatgctttgactgcagcttgttgcaacttgatggttcttggacttttagcaccatgccgttcatatgcgagtacatctcgatttgacttccaaaatgcaattgagaaacttccgaacaacatatttgagaagagctatcctttgagagagtttgatctagcaaaacgaatcagtgcattcttttataaagctgctgagcttagtctggtcgggtttgtagctggctctgtgcaagggggtatgtcaatagtcttgtccgcaagaaaagaaaggaggttatcggtgactattccctctatcagcaccaatgctcttggttatggagctttcctaggactctatgctaacttgcgttatcaattgctatgtggagtagaccaatatatggtcaagcgcttcgatgttttgggtgtggcaatcttcttcagcacagcagcaagactgatgaatattcagattggtgaggcatcaaggaggacttggcttggcgaggaagctgatccacagtactcagatcgactgttgagagcatacaagagacctgtggaggttgacgcggaccaatcaaggtggtttatatccaaggatgcaattgtatctggccttggtcttctaggtatcaagcagggtggacctgaggcaacattttctaagtctcgtcgaaagagagtcatccgcaaaaaggtcacttcaggttgagtttagtggatttggatagcaatgctggaacaattttgcttctgttccactatgccagagggaggtctacccaaattatggtaaatgagaaaaaggtatcaagtcaaccagcacgtggtctgtcggcgaagggatcaaagggtttgttactgggaagggttagttaaaaggtgccaattactattttataatttaattgcagttatttaaggtaagaaaatatgttgttttcttgtattgctgtgaggcaaatagacacgtttagtggtagttttgtaagattgttaatgtactgactttacatgagaaatggattctgcatttttatatagatcaagtagctgccacatgcttgtatctatcttttgaggtcaattaggtcagggtcctgctttgttgctggttaggactacgcttttataaaaacttattttaagtacgaaggccgatctctgtggaagtttcatcgtgctatttccaagactactacattttctaaagaggaatgaacctcaatggaatgttttatttcac

SEQ ID NO: 34786 - DNA, 2297 bp, Zea Mays
tccccctcacgactcctattcttcacgcatgccggcgctcctcctctctagttgttgccatctccctcctcggccacctctactggcaccctctcttccctggctcccgagcttcaaccatggagcacgacccctccttgcctctccgtagcgccaggacctcctccgagctcgacatggatgtgctgtgtcttccccagtaccgaccatgtcaagctccggtgacccccttcccacggcacagcagaccggcgccagacgttagcgccgtctcagatctttgcctcctcacactgctcttctccaccatgcagcttgtgccctctctgcttgccgacgacttgcgtcttctctagccaagccacagccaagctccactccatggtcgcacccccctccatggcttcttccagctggagctcgtcgccgtcctctggtgaacgcccgaacctccaacctcgccatggacgctgtcctgcacgcaccagcggtgcttcctccctcgccggagctcgccggccaacctcgcctcaccttccatggccgcgtgcgagctccgctaccgggcgtcgttcccttgtgccacagtggccccgcaatctccgcgtctcttgcgacgtcccgatctacgcagccctgccccgtgccattgatctgtgcagccttgacgtgccatcgtcgttaacagtttgcctctcctacgctgcgccatccttattccctctggtcgcgacaaaatcctgttccaccaggtcgtcgggcgctgctctcagctcgctatggggcttgctgggctcgccatgttttaaaatgtcgtcgaatttgcctgcaaccgcggtctcgtcgagtccgtcgctcttcaacttcggcgaccactatcatcttcattagcgcgccatcgtctagtccctgctctctggtgagcttggccctgcagcttgaaccaggaagtcatcgctgttcatgtgctcgccatcaaccgccgctggtgctcgacgaatggcttgaacccagagttcattgtcgtttctcatctgcgatctcgtcagcctctactcgataagtgtttggtgaagggcctgagccaagtgttgttgctgcttccacagatttctaatcaatttggtaatagtactctggctcgctaatcctactaattaattcggtgaatagattagatggatattaatcgcgacgttcgaatcagatacttgtgatgtgttgtagtaattatccgtatctcattacatatgtttgttgttaggttatttctctacggggtaggatattgtgtttcgcttatttaatctcgtctggtacgtagacctattaggtgtttgagaaaacgtctgaattaggaattgtcgctgttaccccgggtgtcgagtcaaatatggtcgcggggagctgtgtcatttttgctactattagaattgatgaatggttcgattatatatattatcgttatgattctcttatttatagcacagatgcgtggtggtgattatctcctaatcctttactattttttgggtgatactccatagcgatattcagaatagaagctatttcttcttttctcttttatgttgttcatttacgataatagtcgtgaatgagtgtgcgtcgtttctaattaaattggaagcgaatagcgttagcaggcccatttcagttgaaataccggaaacctcatagtagaagaggtataagtactttaaatatctagattatcgagaatgtcgtctttggaaacgctattttttaatataatactttatcagatggatcaaatactgtagtgctttattgagttgatatcatttacaggataattttgtatagtaattctgaagatatatgaaatgctactattcgttattttaaatcttcgatgttctataatagtaagtctgagtttagatgttatgctctagtcaagagagatacggtgcttataaatggttcactatggcttgctgttagaattggatccggttaagttcgaataccatagctatagttcttaatgtgatatagacatctagtgttttcgtattagagttgtgatgtcttgctataagtgtttaatattcttccagtagctttatctatattgtgatattcatacatgcactcatacatgtgcatcatgcatgccatgaggtacgctagttgatgacgtgatgtgtgaaggacaagaactggattaatctcaaggtgatgcggatgatgaacctgaagatggataatttgaacgagtaccaagacaaaggatggtcatcaagagatcgtcg

SEQ ID NO: 34787 - DNA, 988 bp, Zea Mays
aatctgtcctccctcatcatcggctcatcctcctctctcgcttcgtccgcaagaggagcgcaccaatgcatccttctctccggtcgggtgtcaactaacccccgcgcacccgtcaccaaatttctcgctcagtccgtccatctccctcctcgcccttctcttccgcttcctcagcaagaggagcgcacccatgcatccttctctccgatcagaacgagtggacacagcagcatgtcacgatccagcggggcccgtcggtgcacacggagaagctcatgccgccgcctctagccgtcgggtcctacacgcgtggttctaacctgcggtcggcgtcgtccttctcgttccgcgcctcggcctccatcgctgtcatcggcagccaccccaccaccacaatatcatgtcgagataagatgaaagatggcttgatgagcactatctctgccctcgacaaatttgaacagagagttaaagactatatgggtgtttatacctttttttgcaaggccagatcacatttttcaaggctttttaaaatgacttattatttttattttcctcctatgtttgaggtaaagtttcatttgcctttgttcattggggacatctgttgtacatatattttgtttatttcatatgatatatgatatttatggtataagaatgcttgtctgtaaacaaaaactagagttaaattattaccagaagttataattgtgtattgccatgaccaacaatggtgtggagaagaaaaacaagagcgacagcatgcgatgcgctatgcacgcacgcatgcattactgctctcttgtgcgtaggaggtggaggcaaacaatctgaatgaagcaggtgagcttctcaaggaagtcaaggagcattccaaaaggtggcacttgccttctccacaatgaccatcatgcactcaatggtgggcaaaattaagctaggcttgctctgcttgctagaaagtagagaaggcggcttgccg

SEQ ID NO: 34788 - DNA, 3308 bp, Zea Mays
cgctgcgagaggggtaaagaacttagaagggcaggcaggagaagcgacacaggaaactgacgtcgccttcggcggcctgctacttaaataaatcccctcgcctcgcctccggctgcctcttccctttttccttccgcgcaaatcactcaggtgccagttgcgcggcggagatcgcgacgaattccggacggcagggaggtggtcgggggaactgggaagtgcatgtgagatccgatggcggcggctgcctgcgccggtgcggaagcaggacgcggatgcggagggaaggacgcgctgttcgtcgagctgtggaaggcctgcgcggggccgctgtcctgcgtgccgccgcttggggagaaggtctactacctcccgcagggccacatcgagcaggtggaggcatcgacgaaccagcttgccgagcagcagggcacgcccctctacaacctgccatggaagattccctgcaagctcatgaacatcgaactgaaggttgagccggatactgatgaggtgtacgcccagctcaccctgctccctgataagaagcaagatgagaatacatctacaacagtggaggaagaggaggtggtggtgcctcctgcgctaccagccacaaatgagggtcctcacatccattccttctgcaagacattgactgcctcagacacaagcacacatggtggtttctcagtgttgcgccggcatgcagatgagtgcctcccaccattggatatgagtcaacatcccccaaatcaagaattggtggccaaggacctgcatggggccgagtggcggttccgtcacatctttcgaggtcagccacggagacatctcctgcaaagtggttggagtgtttttgtgagcgccaagcgtcttgtcgcgggggatgccttcatatttctcaggactagtccagctgaatttgtggtttcgcgagataggtactatgaatcactgaaacgaaattattcaatagggatgagatttaagatgagatttgaaggtgaagaggcagcagagcaaagattcactggcacaatagttggaataggtgcttctgatccatctggttgggctgactcaaaatggcgttcccttaaggtgagatgggatgaaccttcttctatttctcgtcctgaaagagtttctccttggcaaatagaaccttctgttagcccatgtcatgtgaaccctcttccagttagattcaagaggtctcgatcaagcgttaatgctttgccatctgacgtgtctactgtaaccagagaagtcacttctaaagtcatggcagactcgcagcaaaatagtctcacaagagccttgcacaatcaaggaaggacacaattgacagttcgataccatgataacagtgatgtgaagactactcaggatcttaccgtgtggtcttcaggaactgagcaacagagaaacaatattgctgcccagacaaagctatgtctggagggttggacgccaactagaagtcctgaaggctacaatcagatattctcggcatttaaaccactgaaagatatacataacccacttggtccttttcctagtcaaatatctgggactcactcaaatagctgggacacagctgatgctcgttatccagtccaacaagctaattacagcatgttacctggcacatggtctttgaggcctcataacagtggttttaggatgaatcaacaaaattatctagtgatgcctgaaggtgcaaattttacggggaaatcagctttcacttcacttcaggaccatggcactgataaatgctccacaggctgctttggtcatattgagtcaagttcccacacagaccatgcatcctcaagtttgatcaggccccagcctttggtccttggaaatggtgttcagaaaagcaaaggcacttcatttaaattatttgggattccccttggcagcccagaaaaatctgaacctctggtatccccaccaagtgtcgcatatgacgggaaacttcaaacttctccatcagaaaaagggaatcagctagacgtagttgaagtggataattgttctcatccttctaagactgtgaagccacttgatggtcctcagtcagattctattacagagaataatcagccttctccagaagctacccttaatatccagaacaaagtgcaaagtagttccaccagaagctgcaagaaggcctgacacaatataccgagtaaaggccttgggttcgacgcagcttttctgcaaaaatgtagggatatggcgtgcctcggttattacttcatcggactccactcaagtgttcataagcaaggtagtgccctcggcaggtcgattgatctaacaaagttcgcttgctatgatgagctgattgctgaactggatcagatgtttgacttcgatggtgagctgaagagtccatgcaaaagttggttagttgtctacactgacaatgaaggcgatataatgctggttggtgatgacccctggaatgaattctgcgatatggtccacaagatcttcatctacacgagagaggaagtcgaaaggatgaacccaggtgccctgaactcaaggtctgaagatagtctatctgactcgctgggaagaggggtagcttccagagatccccgaggaggcgggtctacttcggctctcgattccgagaactgctagtttgttcagtcagtgaggtagctccagctggaatatgttgcccttgttgtacggaagaattgtttgttcatcatgaggtaatcccgtgtttgctttgcttctcgcaggcctttggaagtgaagcagacaaaaggcgtgaatcttgcggtgtagagtgtagttggtacattgtgtgtatgcctccgggtaagccctgcggtacccagtttgtgtcctggcgccagtttaccatttaagctaagtttttgggtgtgccctgtgctggggtctgggctctagttattgtagcagagcaggcaatgcatgcaagaaactgatgatgcgcctgtttggccctctttcccttcccaagccatgtaaatagccttggctctgaagcgtagtattgtattgtcgacagccgtacttgagatagtactccaagaggcgcgcttgctcctgtcagttgggtgtgcgtatgtagatgtgcgtgtgaagccatgcaagcaagggtttgtggggttgatggcttttcatggtagcggatctgctttcatggtactgacgtgcaggtggcaggctggtgttggctgctatgttttgctgcacgatattggcagaaaacagtagtactaaggggtgtttggtttctagggact

SEQ ID NO: 34789 - DNA, 3281 bp, Zea Mays
cgctgcgagaggggtaaagaacttagaagggcaggcaggagaagcgacacaggaaactgacgtcgccttcggcggcctgctacttaaataaatcccctcgcctcgcctccggctgcctcttccctttttccttccgcgcaaatcactcaggtgccagttgcgcggcggagatcgcgacgaattccggacggcagggaggtggtcgggggaactgggaagtgcatgtgagatccgatggcggcggctgcctgcgccggtgggtgtgcggaagcaggacgcggatgcggagggaaggacgcgctgttcgtcgagctgtggaaggcctgcgcggggccgctgtcctgcgtgccgccgcttggggagaaggtctactacctcccgcagggccacatcgagcaggtggaggcatcgacgaaccagcttgccgagcagcagggcacgcccctctacaacctgccatggaagattccctgcaagctcatgaacatcgaactgaaggttgagccggatactgatgaggtgtacgcccagctcaccctgctccctgataagaagcaagatgagaatacatctacaacagtggaggaagaggaggtggtggtgcctcctgcgctaccagccacaaatgagggtcctcacatccattccttctgcaagacattgactgcctcagacacaagcacacatggtggtttctcagtgttgcgccggcatgcagatgagtgcctcccaccattggatatgagtcaacatcccccaaatcaagaattggtggccaaggacctgcatggggccgagtggcggttccgtcacatctttcgaggtcagccacggagacatctcctgcaaagtggttggagtgtttttgtgagcgccaagcgtcttgtcgcgggggatgccttcatatttctcagaggtgagaatggggagctccgtgttggagttcggcgtgcactgaggcaccaaaccactatcccatcttcagtcatatcaagccacaatatgcatcttggtgttcttgcaacagcatggcatgcagtgaacactgatagtatgttcactgtctactacaagccaaggactagtccagctgaatttgtggtttcgcgagataggtactatgaatcactgaaacgaaattattcaatagggatgagatttaagatgagatttgaaggtgaagaggcagcagagcaaagattcactggcacaatagttggaataggtgcttctgatccatctggttgggctgactcaaaatggcgttcccttaaggtgagatgggatgaaccttcttctatttctcgtcctgaaagagtttctccttggcaaatagaaccttctgttagcccatgtcatgtgaaccctcttccagttagattcaagaggtctcgatcaagcgttaatgctttgccatctgacgtgtctactgtaaccagagaagtcacttctaaagtcatggcagactcgcagcaaaatagtctcacaagagccttgcacaatcaaggaaggacacaattgacagttcgataccatgataacagtgatgtgaagactactcaggatcttaccgtgtggtcttcaggaactgagcaacagagaaacaatattgctgcccagacaaagctatgtctggagggttggacgccaactagaagtcctgaaggctacaatcagatattctcggcatttaaaccactgaaagatatacataacccacttggtccttttcctagtcaaatatctgggactcactcaaatagctgggacacagctgatgctcgttatccagtccaacaagctaattacagcatgttacctggcacatggtctttgaggcctcataacagtggttttaggatgaatcaacaaaattatctagtgatgcctgaaggtgcaaattttacggggaaatcagctttcacttcacttcaggaccatggcactgataaatgctccacaggctgctttggtcatattgagtcaagttcccacacagaccatgcatcctcaagtttgatcaggccccagcctttggtccttggaaatggtgttcagaaaagcaaaggcacttcatttaaattatttgggattccccttggcagcccagaaaaatctgaacctctggtatccccaccaagtgtcgcatatgacgggaaacttcaaacttctccatcagaaaaagggaatcagctagacgtagttgaagtggataattgttctcatccttctaagactgtgaagccacttgatggtcctcagtcagattctattacagagaataatcagccttctccagaagctacccttaatatccagaacaaagtgcaaagtagttccaccagaagctgcaagaaggttcataagcaaggtagtgccctcggcaggtcgattgatctaacaaagttcgcttgctatgatgagctgattgctgaactggatcagatgtttgacttcgatggtgagctgaagagtccatgcaaaagttggttagttgtctacactgacaatgaaggcgatataatgctggttggtgatgacccctggaatgaattctgcgatatggtccacaagatcttcatctacacgagagaggaagtcgaaaggatgaacccaggtgccctgaactcaaggtctgaagatagtctatctgactcgctgggaagaggggtagcttccagagatccccgaggaggcgggtctacttcggctctcgattccgagaactgctagtttgttcagtcagtgaggcctttggaagtgaagcagacaaaaggcgtgaatcttgcggtgtagagtgtagttggtacattgtgtgtatgcctccgggtaagccctgcggtacccagtttgtgtcctggcgccagtttaccatttaagctaagtttttgggtgtgccctgtgctggggtctgggctctagttattgtagcagagcaggcaatgcatgcaagaaactgatgatgcgcctgtttggccctctttcccttcccaagccatgtaaatagccttggctctgaagcgtagtattgtattgtcgacagccgtacttgagatagtactccaagaggcgcgcttgctcctgtcagttgggtgtgcgtatgtagatgtgcgtgtgaagccatgcaagcaagggtttgtggggttgatggcttttcatggtagcggatctgctttcatggtactgacgtgcaggtggcaggctggtgttggctgctatgttttgctgcacgatattggcagaaaacagtagtactaaggggtgtttggtttctagggact

SEQ ID NO: 34790 - DNA, 3267 bp, Zea Mays
cgctgcgagaggggtaaagaacttagaagggcaggcaggagaagcgacacaggaaactgacgtcgccttcggcggcctgctacttaaataaatcccctcgcctcgcctccggctgcctcttccctttttccttccgcgcaaatcactcaggtgccagttgcgcggcggagatcgcgacgaattccggacggcagggaggtggtcgggggaactgggaagtgcatgtgagatccgatggcggcggctgcctgcgccggtgggtgcggaagcaggacgcggatgcggagggaaggacgcgctgttcgtcgagctgtggaaggcctgcgcggggccgctgtcctgcgtgccgccgcttggggagaaggtctactacctcccgcagggccacatcgagcaggtggaggcatcgacgaaccagcttgccgagcagcagggcacgcccctctacaacctgccatggaagattccctgcaagctcatgaacatcgaactgaaggttgagccggatactgatgaggtgtacgcccagctcaccctgctccctgataagaagcaagatgagaatacatctacaacagtggaggaagaggaggtggtggtgcctcctgcgctaccagccacaaatgagggtcctcacatccattccttctgcaagacattgactgcctcagacacaagcacacatggtggtttctcagtgttgcgccggcatgcagatgagtgcctcccaccattggatatgagtcaacatcccccaaatcaagaattggtggccaaggacctgcatggggccgagtggcggttccgtcacatctttcgaggtcagccacggagacatctcctgcaaagtggttggagtgtttttgtgagcgccaagcgtcttgtcgcgggggatgccttcatatttctcagaggtgagaatggggagctccgtgttggagttcggcgtgcactgaggcaccaaaccactatcccatcttcagtcatatcaagccacaatatgcatcttggtgttcttgcaacagcatggcatgcagtgaacactgatagtatgttcactgtctactacaagccaaggactagtccagctgaatttgtggtttcgcgagataggtactatgaatcactgaaacgaaattattcaatagggatgagatttaagatgagatttgaaggtgaagaggcagcagagcaaagattcactggcacaatagttggaataggtgcttctgatccatctggttgggctgactcaaaatggcgttcccttaaggtgagatgggatgaaccttcttctatttctcgtcctgaaagagtttctccttggcaaatagaaccttctgttagcccatgtcatgtgaaccctcttccagttagattcaagaggtctcgatcaagcgttaatgctttgccatctgacgtgtctactgtaaccagagaagtcatggcagactcgcagcaaaatagtctcacaagagccttgcacaatcaaggaaggacacaattgacagttcgataccatgataacagtgatgtgaagactactcaggatcttaccgtgtggtcttcaggaactgagcaacagagaaacaatattgctgcccagacaaagctatgtctggagggttggacgccaactagaagtcctgaaggctacaatcagatattctcggcatttaaaccactgaaagatatacataacccacttggtccttttcctagtcaaatatctgggactcactcaaatagctgggacacagctgatgctcgttatccagtccaacaagctaattacagcatgttacctggcacatggtctttgaggcctcataacagtggttttaggatgaatcaacaaaattatctagtgatgcctgaaggtgcaaattttacggggaaatcagctttcacttcacttcaggaccatggcactgataaatgctccacaggctgctttggtcatattgagtcaagttcccacacagaccatgcatcctcaagtttgatcaggccccagcctttggtccttggaaatggtgttcagaaaagcaaaggcacttcatttaaattatttgggattccccttggcagcccagaaaaatctgaacctctggtatccccaccaagtgtcgcatatgacgggaaacttcaaacttctccatcagaaaaagggaatcagctagacgtagttgaagtggataattgttctcatccttctaagactgtgaagccacttgatggtcctcagtcagattctattacagagaataatcagccttctccagaagctacccttaatatccagaacaaagtgcaaagtagttccaccagaagctgcaagaaggttcataagcaaggtagtgccctcggcaggtcgattgatctaacaaagttcgcttgctatgatgagctgattgctgaactggatcagatgtttgacttcgatggtgagctgaagagtccatgcaaaagttggttagttgtctacactgacaatgaaggcgatataatgctggttggtgatgacccctggaatgaattctgcgatatggtccacaagatcttcatctacacgagagaggaagtcgaaaggatgaacccaggtgccctgaactcaaggtctgaagatagtctatctgactcgctgggaagaggggtagcttccagagatccccgaggaggcgggtctacttcggctctcgattccgagaactgctagtttgttcagtcagtgaggcctttggaagtgaagcagacaaaaggcgtgaatcttgcggtgtagagtgtagttggtacattgtgtgtatgcctccgggtaagccctgcggtacccagtttgtgtcctggcgccagtttaccatttaagctaagtttttgggtgtgccctgtgctggggtctgggctctagttattgtagcagagcaggcaatgcatgcaagaaactgatgatgcgcctgtttggccctctttcccttcccaagccatgtaaatagccttggctctgaagcgtagtattgtattgtcgacagccgtacttgagatagtactccaagaggcgcgcttgctcctgtcagttgggtgtgcgtatgtagatgtgcgtgtgaagccatgcaagcaagggtttgtggggttgatggcttttcatggtagcggatctgctttcatggtactgacgtgcaggtggcaggctggtgttggctgctatgttttgctgcacgatattggcagaaaacagtagtactaaggggtgtttggtttctagggact

SEQ ID NO: 34791 - DNA, 3114 bp, Zea Mays
cgctgcgagaggggtaaagaacttagaagggcaggcaggagaagcgacacaggaaactgacgtcgccttcggcggcctgctacttaaataaatcccctcgcctcgcctccggctgcctcttccctttttccttccgcgcaaatcactcaggtgccagttgcgcggcggagatcgcgacgaattccggacggcagggaggtggtcgggggaactgggaagtgcatgtgagatccgatggcggcggctgcctgcgccggtgggtgcggaagcaggacgcggatgcggagggaaggacgcgctgttcgtcgagctgtggaaggcctgcgcggggccgctgtcctgcgtgccgccgcttggggagaaggtctactacctcccgcagggccacatcgagcaggtggaggcatcgacgaaccagcttgccgagcagcagggcacgcccctctacaacctgccatggaagattccctgcaagctcatgaacatcgaactgaaggttgagccggatactgatgaggtgtacgcccagctcaccctgctccctgataagaagcaagatgagaatacatctacaacagtggaggaagaggaggtggtggtgcctcctgcgctaccagccacaaatgagggtcctcacatccattccttctgcaagacattgactgcctcagacacaagcacacatggtggtttctcagtgttgcgccggcatgcagatgagtgcctcccaccattggatatgagtcaacatcccccaaatcaagaattggtggccaaggacctgcatggggccgagtggcggttccgtcacatctttcgaggtcagccacggagacatctcctgcaaagtggttggagtgtttttgtgagcgccaagcgtcttgtcgcgggggatgccttcatatttctcaggactagtccagctgaatttgtggtttcgcgagataggtactatgaatcactgaaacgaaattattcaatagggatgagatttaagatgagatttgaaggtgaagaggcagcagagcaaagattcactggcacaatagttggaataggtgcttctgatccatctggttgggctgactcaaaatggcgttcccttaaggtgagatgggatgaaccttcttctatttctcgtcctgaaagagtttctccttggcaaatagaaccttctgttagcccatgtcatgtgaaccctcttccagttagattcaagaggtctcgatcaagcgttaatgctttgccatctgacgtgtctactgtaaccagagaagtcacttctaaagtcatggcagactcgcagcaaaatagtctcacaagagccttgcacaatcaaggaaggacacaattgacagttcgataccatgataacagtgatgtgaagactactcaggatcttaccgtgtggtcttcaggaactgagcaacagagaaacaatattgctgcccagacaaagctatgtctggagggttggacgccaactagaagtcctgaaggctacaatcagatattctcggcatttaaaccactgaaagatatacataacccacttggtccttttcctagtcaaatatctgggactcactcaaatagctgggacacagctgatgctcgttatccagtccaacaagctaattacagcatgttacctggcacatggtctttgaggcctcataacagtggttttaggatgaatcaacaaaattatctagtgatgcctgaaggtgcaaattttacggggaaatcagctttcacttcacttcaggaccatggcactgataaatgctccacaggctgctttggtcatattgagtcaagttcccacacagaccatgcatcctcaagtttgatcaggccccagcctttggtccttggaaatggtgttcagaaaagcaaaggcacttcatttaaattatttgggattccccttggcagcccagaaaaatctgaacctctggtatccccaccaagtgtcgcatatgacgggaaacttcaaacttctccatcagaaaaagggaatcagctagacgtagttgaagtggataattgttctcatccttctaagactgtgaagccacttgatggtcctcagtcagattctattacagagaataatcagccttctccagaagctacccttaatatccagaacaaagtgcaaagtagttccaccagaagctgcaagaaggttcataagcaaggtagtgccctcggcaggtcgattgatctaacaaagttcgcttgctatgatgagctgattgctgaactggatcagatgtttgacttcgatggtgagctgaagagtccatgcaaaagttggttagttgtctacactgacaatgaaggcgatataatgctggttggtgatgacccctggaatgaattctgcgatatggtccacaagatcttcatctacacgagagaggaagtcgaaaggatgaacccaggtgccctgaactcaaggtctgaagatagtctatctgactcgctgggaagaggggtagcttccagagatccccgaggaggcgggtctacttcggctctcgattccgagaactgctagtttgttcagtcagtgaggcctttggaagtgaagcagacaaaaggcgtgaatcttgcggtgtagagtgtagttggtacattgtgtgtatgcctccgggtaagccctgcggtacccagtttgtgtcctggcgccagtttaccatttaagctaagtttttgggtgtgccctgtgctggggtctgggctctagttattgtagcagagcaggcaatgcatgcaagaaactgatgatgcgcctgtttggccctctttcccttcccaagccatgtaaatagccttggctctgaagcgtagtattgtattgtcgacagccgtacttgagatagtactccaagaggcgcgcttgctcctgtcagttgggtgtgcgtatgtagatgtgcgtgtgaagccatgcaagcaagggtttgtggggttgatggcttttcatggtagcggatctgctttcatggtactgacgtgcaggtggcaggctggtgttggctgctatgttttgctgcacgatattggcagaaaacagtagtactaaggggtgtttggtttctagggact

SEQ ID NO: 34792 - DNA, 3098 bp, Zea Mays
cgctgcgagaggggtaaagaacttagaagggcaggcaggagaagcgacacaggaaactgacgtcgccttcggcggcctgctacttaaataaatcccctcgcctcgcctccggctgcctcttccctttttccttccgcgcaaatcactcaggtgccagttgcgcggcggagatcgcgacgaattccggacggcagggaggtggtcgggggaactgggaagtgcatgtgagatccgatggcggcggctgcctgcgccggtgcggaagcaggacgcggatgcggagggaaggacgcgctgttcgtcgagctgtggaaggcctgcgcggggccgctgtcctgcgtgccgccgcttggggagaaggtctactacctcccgcagggccacatcgagcaggtggaggcatcgacgaaccagcttgccgagcagcagggcacgcccctctacaacctgccatggaagattccctgcaagctcatgaacatcgaactgaaggttgagccggatactgatgaggtgtacgcccagctcaccctgctccctgataagaagcaagatgagaatacatctacaacagtggaggaagaggaggtggtggtgcctcctgcgctaccagccacaaatgagggtcctcacatccattccttctgcaagacattgactgcctcagacacaagcacacatggtggtttctcagtgttgcgccggcatgcagatgagtgcctcccaccattggatatgagtcaacatcccccaaatcaagaattggtggccaaggacctgcatggggccgagtggcggttccgtcacatctttcgaggtcagccacggagacatctcctgcaaagtggttggagtgtttttgtgagcgccaagcgtcttgtcgcgggggatgccttcatatttctcaggactagtccagctgaatttgtggtttcgcgagataggtactatgaatcactgaaacgaaattattcaatagggatgagatttaagatgagatttgaaggtgaagaggcagcagagcaaagattcactggcacaatagttggaataggtgcttctgatccatctggttgggctgactcaaaatggcgttcccttaaggtgagatgggatgaaccttcttctatttctcgtcctgaaagagtttctccttggcaaatagaaccttctgttagcccatgtcatgtgaaccctcttccagttagattcaagaggtctcgatcaagcgttaatgctttgccatctgacgtgtctactgtaaccagagaagtcatggcagactcgcagcaaaatagtctcacaagagccttgcacaatcaaggaaggacacaattgacagttcgataccatgataacagtgatgtgaagactactcaggatcttaccgtgtggtcttcaggaactgagcaacagagaaacaatattgctgcccagacaaagctatgtctggagggttggacgccaactagaagtcctgaaggctacaatcagatattctcggcatttaaaccactgaaagatatacataacccacttggtccttttcctagtcaaatatctgggactcactcaaatagctgggacacagctgatgctcgttatccagtccaacaagctaattacagcatgttacctggcacatggtctttgaggcctcataacagtggttttaggatgaatcaacaaaattatctagtgatgcctgaaggtgcaaattttacggggaaatcagctttcacttcacttcaggaccatggcactgataaatgctccacaggctgctttggtcatattgagtcaagttcccacacagaccatgcatcctcaagtttgatcaggccccagcctttggtccttggaaatggtgttcagaaaagcaaaggcacttcatttaaattatttgggattccccttggcagcccagaaaaatctgaacctctggtatccccaccaagtgtcgcatatgacgggaaacttcaaacttctccatcagaaaaagggaatcagctagacgtagttgaagtggataattgttctcatccttctaagactgtgaagccacttgatggtcctcagtcagattctattacagagaataatcagccttctccagaagctacccttaatatccagaacaaagtgcaaagtagttccaccagaagctgcaagaaggttcataagcaaggtagtgccctcggcaggtcgattgatctaacaaagttcgcttgctatgatgagctgattgctgaactggatcagatgtttgacttcgatggtgagctgaagagtccatgcaaaagttggttagttgtctacactgacaatgaaggcgatataatgctggttggtgatgacccctggaatgaattctgcgatatggtccacaagatcttcatctacacgagagaggaagtcgaaaggatgaacccaggtgccctgaactcaaggtctgaagatagtctatctgactcgctgggaagaggggtagcttccagagatccccgaggaggcgggtctacttcggctctcgattccgagaactgctagtttgttcagtcagtgaggcctttggaagtgaagcagacaaaaggcgtgaatcttgcggtgtagagtgtagttggtacattgtgtgtatgcctccgggtaagccctgcggtacccagtttgtgtcctggcgccagtttaccatttaagctaagtttttgggtgtgccctgtgctggggtctgggctctagttattgtagcagagcaggcaatgcatgcaagaaactgatgatgcgcctgtttggccctctttcccttcccaagccatgtaaatagccttggctctgaagcgtagtattgtattgtcgacagccgtacttgagatagtactccaagaggcgcgcttgctcctgtcagttgggtgtgcgtatgtagatgtgcgtgtgaagccatgcaagcaagggtttgtggggttgatggcttttcatggtagcggatctgctttcatggtactgacgtgcaggtggcaggctggtgttggctgctatgttttgctgcacgatattggcagaaaacagtagtactaaggggtgtttggtttctagggact

SEQ ID NO: 34793 - DNA, 3279 bp, Zea Mays
cgctgcgagaggggtaaagaacttagaagggcaggcaggagaagcgacacaggaaactgacgtcgccttcggcggcctgctacttaaataaatcccctcgcctcgcctccggctgcctcttccctttttccttccgcgcaaatcactcaggtgccagttgcgcggcggagatcgcgacgaattccggacggcagggaggtggtcgggggaactgggaagtgcatgtgagatccgatggcggcggctgcctgcgccggtgggtgcggaagcaggacgcggatgcggagggaaggacgcgctgttcgtcgagctgtggaaggcctgcgcggggccgctgtcctgcgtgccgccgcttggggagaaggtctactacctcccgcagggccacatcgagcaggtggaggcatcgacgaaccagcttgccgagcagcagggcacgcccctctacaacctgccatggaagattccctgcaagctcatgaacatcgaactgaaggttgagccggatactgatgaggtgtacgcccagctcaccctgctccctgataagaagcaagatgagaatacatctacaacagtggaggaagaggaggtggtggtgcctcctgcgctaccagccacaaatgagggtcctcacatccattccttctgcaagacattgactgcctcagacacaagcacacatggtggtttctcagtgttgcgccggcatgcagatgagtgcctcccaccattggatatgagtcaacatcccccaaatcaagaattggtggccaaggacctgcatggggccgagtggcggttccgtcacatctttcgaggtcagccacggagacatctcctgcaaagtggttggagtgtttttgtgagcgccaagcgtcttgtcgcgggggatgccttcatatttctcagaggtgagaatggggagctccgtgttggagttcggcgtgcactgaggcaccaaaccactatcccatcttcagtcatatcaagccacaatatgcatcttggtgttcttgcaacagcatggcatgcagtgaacactgatagtatgttcactgtctactacaagccaaggactagtccagctgaatttgtggtttcgcgagataggtactatgaatcactgaaacgaaattattcaatagggatgagatttaagatgagatttgaaggtgaagaggcagcagagcaaagattcactggcacaatagttggaataggtgcttctgatccatctggttgggctgactcaaaatggcgttcccttaaggtgagatgggatgaaccttcttctatttctcgtcctgaaagagtttctccttggcaaatagaaccttctgttagcccatgtcatgtgaaccctcttccagttagattcaagaggtctcgatcaagcgttaatgctttgccatctgacgtgtctactgtaaccagagaagtcacttctaaagtcatggcagactcgcagcaaaatagtctcacaagagccttgcacaatcaaggaaggacacaattgacagttcgataccatgataacagtgatgtgaagactactcaggatcttaccgtgtggtcttcaggaactgagcaacagagaaacaatattgctgcccagacaaagctatgtctggagggttggacgccaactagaagtcctgaaggctacaatcagatattctcggcatttaaaccactgaaagatatacataacccacttggtccttttcctagtcaaatatctgggactcactcaaatagctgggacacagctgatgctcgttatccagtccaacaagctaattacagcatgttacctggcacatggtctttgaggcctcataacagtggttttaggatgaatcaacaaaattatctagtgatgcctgaaggtgcaaattttacggggaaatcagctttcacttcacttcaggaccatggcactgataaatgctccacaggctgctttggtcatattgagtcaagttcccacacagaccatgcatcctcaagtttgatcaggccccagcctttggtccttggaaatggtgttcagaaaagcaaaggcacttcatttaaattatttgggattccccttggcagcccagaaaaatctgaacctctggtatccccaccaagtgtcgcatatgacgggaaacttcaaacttctccatcagaaaaagggaatcagctagacgtagttgaagtggataattgttctcatccttctaagactgtgaagccacttgatggtcctcagtcagattctattacagagaataatcagccttctccagaagctacccttaatatccagaacaaagtgcaaagtagttccaccagaagctgcaagaaggttcataagcaaggtagtgccctcggcaggtcgattgatctaacaaagttcgcttgctatgatgagctgattgctgaactggatcagatgtttgacttcgatggtgagctgaagagtccatgcaaaagttggttagttgtctacactgacaatgaaggcgatataatgctggttggtgatgacccctggaatgaattctgcgatatggtccacaagatcttcatctacacgagagaggaagtcgaaaggatgaacccaggtgccctgaactcaaggtctgaagatagtctatctgactcgctgggaagaggggtagcttccagagatccccgaggaggcgggtctacttcggctctcgattccgagaactgctagtttgttcagtcagtgaggcctttggaagtgaagcagacaaaaggcgtgaatcttgcggtgtagagtgtagttggtacattgtgtgtatgcctccgggtaagccctgcggtacccagtttgtgtcctggcgccagtttaccatttaagctaagtttttgggtgtgccctgtgctggggtctgggctctagttattgtagcagagcaggcaatgcatgcaagaaactgatgatgcgcctgtttggccctctttcccttcccaagccatgtaaatagccttggctctgaagcgtagtattgtattgtcgacagccgtacttgagatagtactccaagaggcgcgcttgctcctgtcagttgggtgtgcgtatgtagatgtgcgtgtgaagccatgcaagcaagggtttgtggggttgatggcttttcatggtagcggatctgctttcatggtactgacgtgcaggtggcaggctggtgttggctgctatgttttgctgcacgatattggcagaaaacagtagtactaaggggtgtttggtttctagggact

SEQ ID NO: 34794 - DNA, 3115 bp, Zea Mays
cgacacgctgcgagaggggtaaagaacttagaagggcaggcaggagaagcgacacaggaaactgacgtcgccttcggcggcctgctacttaaataaatcccctcgcctcgcctccggctgcctcttccctttttccttccgcgcaaatcactcaggtgccagttgcgcggcggagatcgcgacgaattccggacggcagggaggtggtcgggggaactgggaagtgcatgtgagatccgatggcggcggctgcctgcgccggtgcggaagcaggacgcggatgcggagggaaggacgcgctgttcgtcgagctgtggaaggcctgcgcggggccgctgtcctgcgtgccgccgcttggggagaaggtctactacctcccgcagggccacatcgagcaggtggaggcatcgacgaaccagcttgccgagcagcagggcacgcccctctacaacctgccatggaagattccctgcaagctcatgaacatcgaactgaaggttgagccggatactgatgaggtgtacgcccagctcaccctgctccctgataagaagcaagatgagaatacatctacaacagtggaggaagaggaggtggtggtgcctcctgcgctaccagccacaaatgagggtcctcacatccattccttctgcaagacattgactgcctcagacacaagcacacatggtggtttctcagtgttgcgccggcatgcagatgagtgcctcccaccattggatatgagtcaacatcccccaaatcaagaattggtggccaaggacctgcatggggccgagtggcggttccgtcacatctttcgaggtcagccacggagacatctcctgcaaagtggttggagtgtttttgtgagcgccaagcgtcttgtcgcgggggatgccttcatatttctcaggactagtccagctgaatttgtggtttcgcgagataggtactatgaatcactgaaacgaaattattcaatagggatgagatttaagatgagatttgaaggtgaagaggcagcagagcaaagattcactggcacaatagttggaataggtgcttctgatccatctggttgggctgactcaaaatggcgttcccttaaggtgagatgggatgaaccttcttctatttctcgtcctgaaagagtttctccttggcaaatagaaccttctgttagcccatgtcatgtgaaccctcttccagttagattcaagaggtctcgatcaagcgttaatgctttgccatctgacgtgtctactgtaaccagagaagtcacttctaaagtcatggcagactcgcagcaaaatagtctcacaagagccttgcacaatcaaggaaggacacaattgacagttcgataccatgataacagtgatgtgaagactactcaggatcttaccgtgtggtcttcaggaactgagcaacagagaaacaatattgctgcccagacaaagctatgtctggagggttggacgccaactagaagtcctgaaggctacaatcagatattctcggcatttaaaccactgaaagatatacataacccacttggtccttttcctagtcaaatatctgggactcactcaaatagctgggacacagctgatgctcgttatccagtccaacaagctaattacagcatgttacctggcacatggtctttgaggcctcataacagtggttttaggatgaatcaacaaaattatctagtgatgcctgaaggtgcaaattttacggggaaatcagctttcacttcacttcaggaccatggcactgataaatgctccacaggctgctttggtcatattgagtcaagttcccacacagaccatgcatcctcaagtttgatcaggccccagcctttggtccttggaaatggtgttcagaaaagcaaaggcacttcatttaaattatttgggattccccttggcagcccagaaaaatctgaacctctggtatccccaccaagtgtcgcatatgacgggaaacttcaaacttctccatcagaaaaagggaatcagctagacgtagttgaagtggataattgttctcatccttctaagactgtgaagccacttgatggtcctcagtcagattctattacagagaataatcagccttctccagaagctacccttaatatccagaacaaagtgcaaagtagttccaccagaagctgcaagaaggttcataagcaaggtagtgccctcggcaggtcgattgatctaacaaagttcgcttgctatgatgagctgattgctgaactggatcagatgtttgacttcgatggtgagctgaagagtccatgcaaaagttggttagttgtctacactgacaatgaaggcgatataatgctggttggtgatgacccctggaatgaattctgcgatatggtccacaagatcttcatctacacgagagaggaagtcgaaaggatgaacccaggtgccctgaactcaaggtctgaagatagtctatctgactcgctgggaagaggggtagcttccagagatccccgaggaggcgggtctacttcggctctcgattccgagaactgctagtttgttcagtcagtgaggcctttggaagtgaagcagacaaaaggcgtgaatcttgcggtgtagagtgtagttggtacattgtgtgtatgcctccgggtaagccctgcggtacccagtttgtgtcctggcgccagtttaccatttaagctaagtttttgggtgtgccctgtgctggggtctgggctctagttattgtagcagagcaggcaatgcatgcaagaaactgatgatgcgcctgtttggccctctttcccttcccaagccatgtaaatagccttggctctgaagcgtagtattgtattgtcgacagccgtacttgagatagtactccaagaggcgcgcttgctcctgtcagttgggtgtgcgtatgtagatgtgcgtgtgaagccatgcaagcaagggtttgtggggttgatggcttttcatggtagcggatctgctttcatggtactgacgtgcaggtggcaggctggtgttggctgctatgttttgctgcacgatattggcagaaaacagtagtactaaggggtgtttggtttctagggact

SEQ ID NO: 34795 - DNA, 4029 bp, Zea Mays
ctccctcttcctcccctcgctctcttgcagtcttgctcacacagcacatagcacacacacgacacgctgcgagaggggtaaagaacttagaagggcaggcaggagaagcgacacaggaaactgacgtcgccttcggcggcctgctacttaaataaatcccctcgcctcgcctccggctgcctcttccctttttccttccgcgcaaatcactcaggtgccagttgcgcggcggagatcgcgacgaattccggacggcagggaggtggtcgggggaactgggaagtgcatgtgagatccgatggcggcggctgcctgcgccggtgcggaagcaggacgcggatgcggagggaaggacgcgctgttcgtcgagctgtggaaggcctgcgcggggccgctgtcctgcgtgccgccgcttggggagaaggtctactacctcccgcagggccacatcgagcaggtggaggcatcgacgaaccagcttgccgagcagcagggcacgcccctctacaacctgccatggaagattccctgcaagctcatgaacatcgaactgaaggttgagccggatactgatgaggtgtacgcccagctcaccctgctccctgataagaagcaagatgagaatacatctacaacagtggaggaagaggaggtggtggtgcctcctgcgctaccagccacaaatgagggtcctcacatccattccttctgcaagacattgactgcctcagacacaagcacacatggtggtttctcagtgttgcgccggcatgcagatgagtgcctcccaccattggatatgagtcaacatcccccaaatcaagaattggtggccaaggacctgcatggggccgagtggcggttccgtcacatctttcgaggtcagccacggagacatctcctgcaaagtggttggagtgtttttgtgagcgccaagcgtcttgtcgcgggggatgccttcatatttctcagaggtgagaatggggagctccgtgttggagttcggcgtgcactgaggcaccaaaccactatcccatcttcagtcatatcaagccacaatatgcatcttggtgttcttgcaacagcatggcatgcagtgaacactgatagtatgttcactgtctactacaagccaaggactagtccagctgaatttgtggtttcgcgagataggtactatgaatcactgaaacgaaattattcaatagggatgagatttaagatgagatttgaaggtgaagaggcagcagagcaaagattcactggcacaatagttggaataggtgcttctgatccatctggttgggctgactcaaaatggcgttcccttaaggtgagatgggatgaaccttcttctatttctcgtcctgaaagagtttctccttggcaaatagaaccttctgttagcccatgtcatgtgaaccctcttccagttagattcaagaggtctcgatcaagcgttaatgctttgccatctgacgtgtctactgtaaccagagaagtcacttctaaagtcatggcagactcgcagcaaaatagtctcacaagagccttgcacaatcaaggaaggacacaattgacagttcgataccatgataacagtgatgtgaagactactcaggatcttaccgtgtggtcttcaggaactgagcaacagagaaacaatattgctgcccagacaaagctatgtctggagggttggacgccaactagaagtcctgaaggctacaatcagatattctcggcatttaaaccactgaaagatatacataacccacttggtccttttcctagtcaaatatctgggactcactcaaatagctgggacacagctgatgctcgttatccagtccaacaagctaattacagcatgttacctggcacatggtctttgaggcctcataacagtggttttaggatgaatcaacaaaattatctagtgatgcctgaaggtgcaaattttacggggaaatcagctttcacttcacttcaggaccatggcactgataaatgctccacaggctgctttggtcatattgagtcaagttcccacacagaccatgcatcctcaagtttgatcaggccccagcctttggtccttggaaatggtgttcagaaaagcaaaggcacttcatttaaattatttgggattccccttggcagcccagaaaaatctgaacctctggtatccccaccaagtgtcgcatatgacgggaaacttcaaacttctccatcagaaaaagggaatcagctagacgtagttgaagtggataattgttctcatccttctaagactgtgaagccacttgatggtcctcagtcagattctattacagagaataatcagccttctccagaagctacccttaatatccagaacaaagtgcaaagtagttccaccagaagctgcaagaaggttcatcatatgttgcacctttttccttgctagtagtcattccttgatacataaatgcttactaggcccaaaccttcaattgaatacttctcaaagtatgctccaaagaagtttatgtactcttgatcccttttggcaacttgttttatgtatctagaagcaccggtccaataaaacctgctagttgtgtaacctactaacctttcatgctaataaattacttgagtttttcttgccccttcaagtgtcgtatttggatctgtttggcatcatcaaaagagctatttatccttaagtttggctgtcaagaaagaaaaaaaaagctgtgggaatcctgtgatgagactttttaatctttaagcagtatgccttttggatatatagtctagcattatgcaaatggttattaaatacaatgtggatgacaaatgtcacgttgtcattagattggtgacatgggctttgagaaatgttagctttctaatgataacggtcaaatgttctatctaattgcatccatttttctccggttgctttttattttattttatttatttgaggggaaggataggcctgacacaatataccgagtaaaggccttgggttcgacgcagcttttctgcaaaaatgtagggatatggcgtgcctcggttattacttcatcggactccactcaagtgtgagccgcctgttcataagcaaggtagtgccctcggcaggtcgattgatctaacaaagttcgcttgctatgatgagctgattgctgaactggatcagatgtttgacttcgatggtgagctgaagagtccatgcaaaagttggttagttgtctacactgacaatgaaggcgatataatgctggttggtgatgacccctggaatgaattctgcgatatggtccacaagatcttcatctacacgagagaggaagtcgaaaggatgaacccaggtgccctgaactcaaggtctgaagatagtctatctgactcgctgggaagaggggtagcttccagagatccccgaggaggcgggtctacttcggctctcgattccgagaactgctagtttgttcagtcagtgaggcctttggaagtgaagcagacaaaaggcgtgaatcttgcggtgtagagtgtagttggtacattgtgtgtatgcctccgggtaagccctgcggtacccagtttgtgtcctggcgccagtttaccatttaagctaagtttttgggtgtgccctgtgctggggtctgggctctagttattgtagcagagcaggcaatgcatgcaagaaactgatgatgcgcctgtttggccctctttcccttcccaagccatgtaaatagccttggctctgaagcgtagtattgtattgtcgacagccgtacttgagatagtactccaagaggcgcgcttgctcctgtcagttgggtgtgcgtatgtagatgtgcgtgtgaagccatgcaagcaagggtttgtggggttgatggcttttcatggtagcggatctgctttcatggtactgacgtgcaggtggcaggctggtgttggctgctatgttttgctgcacgatattggcagaaaacagtagtactaaggggtgtttggtttctagggact

SEQ ID NO: 34796 - DNA, 3874 bp, Zea Mays
gacacactctctccctcttcctcccctcgctctcttgcagtcttgctcacacagcacatagcacacacacgacacgctgcgagaggggtaaagaacttagaagggcaggcaggagaagcgacacaggaaactgacgtcgccttcggcggcctgctacttaaataaatcccctcgcctcgcctccggctgcctcttccctttttccttccgcgcaaatcactcaggtgccagttgcgcggcggagatcgcgacgaattccggacggcagggaggtggtcgggggaactgggaagtgcatgtgagatccgatggcggcggctgcctgcgccggtgcggaagcaggacgcggatgcggagggaaggacgcgctgttcgtcgagctgtggaaggcctgcgcggggccgctgtcctgcgtgccgccgcttggggagaaggtctactacctcccgcagggccacatcgagcaggtggaggcatcgacgaaccagcttgccgagcagcagggcacgcccctctacaacctgccatggaagattccctgcaagctcatgaacatcgaactgaaggttgagccggatactgatgaggtgtacgcccagctcaccctgctccctgataagaagcaagatgagaatacatctacaacagtggaggaagaggaggtggtggtgcctcctgcgctaccagccacaaatgagggtcctcacatccattccttctgcaagacattgactgcctcagacacaagcacacatggtggtttctcagtgttgcgccggcatgcagatgagtgcctcccaccattggatatgagtcaacatcccccaaatcaagaattggtggccaaggacctgcatggggccgagtggcggttccgtcacatctttcgaggtcagccacggagacatctcctgcaaagtggttggagtgtttttgtgagcgccaagcgtcttgtcgcgggggatgccttcatatttctcaggactagtccagctgaatttgtggtttcgcgagataggtactatgaatcactgaaacgaaattattcaatagggatgagatttaagatgagatttgaaggtgaagaggcagcagagcaaagattcactggcacaatagttggaataggtgcttctgatccatctggttgggctgactcaaaatggcgttcccttaaggtgagatgggatgaaccttcttctatttctcgtcctgaaagagtttctccttggcaaatagaaccttctgttagcccatgtcatgtgaaccctcttccagttagattcaagaggtctcgatcaagcgttaatgctttgccatctgacgtgtctactgtaaccagagaagtcacttctaaagtcatggcagactcgcagcaaaatagtctcacaagagccttgcacaatcaaggaaggacacaattgacagttcgataccatgataacagtgatgtgaagactactcaggatcttaccgtgtggtcttcaggaactgagcaacagagaaacaatattgctgcccagacaaagctatgtctggagggttggacgccaactagaagtcctgaaggctacaatcagatattctcggcatttaaaccactgaaagatatacataacccacttggtccttttcctagtcaaatatctgggactcactcaaatagctgggacacagctgatgctcgttatccagtccaacaagctaattacagcatgttacctggcacatggtctttgaggcctcataacagtggttttaggatgaatcaacaaaattatctagtgatgcctgaaggtgcaaattttacggggaaatcagctttcacttcacttcaggaccatggcactgataaatgctccacaggctgctttggtcatattgagtcaagttcccacacagaccatgcatcctcaagtttgatcaggccccagcctttggtccttggaaatggtgttcagaaaagcaaaggcacttcatttaaattatttgggattccccttggcagcccagaaaaatctgaacctctggtatccccaccaagtgtcgcatatgacgggaaacttcaaacttctccatcagaaaaagggaatcagctagacgtagttgaagtggataattgttctcatccttctaagactgtgaagccacttgatggtcctcagtcagattctattacagagaataatcagccttctccagaagctacccttaatatccagaacaaagtgcaaagtagttccaccagaagctgcaagaaggttcatcatatgttgcacctttttccttgctagtagtcattccttgatacataaatgcttactaggcccaaaccttcaattgaatacttctcaaagtatgctccaaagaagtttatgtactcttgatcccttttggcaacttgttttatgtatctagaagcaccggtccaataaaacctgctagttgtgtaacctactaacctttcatgctaataaattacttgagtttttcttgccccttcaagtgtcgtatttggatctgtttggcatcatcaaaagagctatttatccttaagtttggctgtcaagaaagaaaaaaaaagctgtgggaatcctgtgatgagactttttaatctttaagcagtatgccttttggatatatagtctagcattatgcaaatggttattaaatacaatgtggatgacaaatgtcacgttgtcattagattggtgacatgggctttgagaaatgttagctttctaatgataacggtcaaatgttctatctaattgcatccatttttctccggttgctttttattttattttatttatttgaggggaaggataggcctgacacaatataccgagtaaaggccttgggttcgacgcagcttttctgcaaaaatgtagggatatggcgtgcctcggttattacttcatcggactccactcaagtgtgagccgcctgttcataagcaaggtagtgccctcggcaggtcgattgatctaacaaagttcgcttgctatgatgagctgattgctgaactggatcagatgtttgacttcgatggtgagctgaagagtccatgcaaaagttggttagttgtctacactgacaatgaaggcgatataatgctggttggtgatgacccctggaatgaattctgcgatatggtccacaagatcttcatctacacgagagaggaagtcgaaaggatgaacccaggtgccctgaactcaaggtctgaagatagtctatctgactcgctgggaagaggggtagcttccagagatccccgaggaggcgggtctacttcggctctcgattccgagaactgctagtttgttcagtcagtgaggcctttggaagtgaagcagacaaaaggcgtgaatcttgcggtgtagagtgtagttggtacattgtgtgtatgcctccgggtaagccctgcggtacccagtttgtgtcctggcgccagtttaccatttaagctaagtttttgggtgtgccctgtgctggggtctgggctctagttattgtagcagagcaggcaatgcatgcaagaaactgatgatgcgcctgtttggccctctttcccttcccaagccatgtaaatagccttggctctgaagcgtagtattgtattgtcgacagccgtacttgagatagtactccaagaggcgcgcttgctcctgtcagttgggtgtgcgtatgtagatgtgcgtgtgaagccatgcaagcaagggtttgtggggttgatggcttttcatggtagcggatctgctttcatggtactgacgtgcaggtggcaggctggtgttggctgctatgttttgctgcacgatattggcagaaaacagtagtactaaggggtgtttggtttctagggact

SEQ ID NO: 34797 - DNA, 4123 bp, Zea Mays
cacacacagacacactctctccctcttcctcccctcgctctcttgcagtcttgctcacacagcacatagcacacacacgacacgctgcgagaggggtaaagaacttagaagggcaggcaggagaagcgacacaggaaactgacgtcgccttcggcggcctgctacttaaataaatcccctcgcctcgcctccggctgcctcttccctttttccttccgcgcaaatcactcaggtgccagttgcgcggcggagatcgcgacgaattccggacggcagggaggtggtcgggggaactgggaagtgcatgtgagatccgatggcggcggctgcctgcgccggtgcggaagcaggacgcggatgcggagggaaggacgcgctgttcgtcgagctgtggaaggcctgcgcggggccgctgtcctgcgtgccgccgcttggggagaaggtctactacctcccgcagggccacatcgagcaggtggaggcatcgacgaaccagcttgccgagcagcagggcacgcccctctacaacctgccatggaagattccctgcaagctcatgaacatcgaactgaaggttgagccggatactgatgaggtgtacgcccagctcaccctgctccctgataagaagcaagatgagaatacatctacaacagtggaggaagaggaggtggtggtgcctcctgcgctaccagccacaaatgagggtcctcacatccattccttctgcaagacattgactgcctcagacacaagcacacatggtggtttctcagtgttgcgccggcatgcagatgagtgcctcccaccattggatatgagtcaacatcccccaaatcaagaattggtggccaaggacctgcatggggccgagtggcggttccgtcacatctttcgaggtcagccacggagacatctcctgcaaagtggttggagtgtttttgtgagcgccaagcgtcttgtcgcgggggatgccttcatatttctcagaggtgagaatggggagctccgtgttggagttcggcgtgcactgaggcaccaaaccactatcccatcttcagtcatatcaagccacaatatgcatcttggtgttcttgcaacagcatggcatgcagtgaacactgatagtatgttcactgtctactacaagccaaggactagtccagctgaatttgtggtttcgcgagataggtactatgaatcactgaaacgaaattattcaatagggatgagatttaagatgagatttgaaggtgaagaggcagcagagcaaagattcactggcacaatagttggaataggtgcttctgatccatctggttgggctgactcaaaatggcgttcccttaaggtgagatgggatgaaccttcttctatttctcgtcctgaaagagtttctccttggcaaatagaaccttctgttagcccatgtcatgtgaaccctcttccagttagattcaagaggtctcgatcaagcgttaatgctttgccatctgacgtgtctactgtaaccagagaaggtttgaatttaaccttgtgttgtggactcatctgatgcttgtagttctttctgtcattactaatgcacacataaccttttcatgtagtcacttctaaagtcatggcagactcgcagcaaaatagtctcacaagagccttgcacaatcaaggaaggacacaattgacagttcgataccatgataacagtgatgtgaagactactcaggatcttaccgtgtggtcttcaggaactgagcaacagagaaacaatattgctgcccagacaaagctatgtctggagggttggacgccaactagaagtcctgaaggctacaatcagatattctcggcatttaaaccactgaaagatatacataacccacttggtccttttcctagtcaaatatctgggactcactcaaatagctgggacacagctgatgctcgttatccagtccaacaagctaattacagcatgttacctggcacatggtctttgaggcctcataacagtggttttaggatgaatcaacaaaattatctagtgatgcctgaaggtgcaaattttacggggaaatcagctttcacttcacttcaggaccatggcactgataaatgctccacaggctgctttggtcatattgagtcaagttcccacacagaccatgcatcctcaagtttgatcaggccccagcctttggtccttggaaatggtgttcagaaaagcaaaggcacttcatttaaattatttgggattccccttggcagcccagaaaaatctgaacctctggtatccccaccaagtgtcgcatatgacgggaaacttcaaacttctccatcagaaaaagggaatcagctagacgtagttgaagtggataattgttctcatccttctaagactgtgaagccacttgatggtcctcagtcagattctattacagagaataatcagccttctccagaagctacccttaatatccagaacaaagtgcaaagtagttccaccagaagctgcaagaaggttcatcatatgttgcacctttttccttgctagtagtcattccttgatacataaatgcttactaggcccaaaccttcaattgaatacttctcaaagtatgctccaaagaagtttatgtactcttgatcccttttggcaacttgttttatgtatctagaagcaccggtccaataaaacctgctagttgtgtaacctactaacctttcatgctaataaattacttgagtttttcttgccccttcaagtgtcgtatttggatctgtttggcatcatcaaaagagctatttatccttaagtttggctgtcaagaaagaaaaaaaaagctgtgggaatcctgtgatgagactttttaatctttaagcagtatgccttttggatatatagtctagcattatgcaaatggttattaaatacaatgtggatgacaaatgtcacgttgtcattagattggtgacatgggctttgagaaatgttagctttctaatgataacggtcaaatgttctatctaattgcatccatttttctccggttgctttttattttattttatttatttgaggggaaggataggcctgacacaatataccgagtaaaggccttgggttcgacgcagcttttctgcaaaaatgtagggatatggcgtgcctcggttattacttcatcggactccactcaagtgttcataagcaaggtagtgccctcggcaggtcgattgatctaacaaagttcgcttgctatgatgagctgattgctgaactggatcagatgtttgacttcgatggtgagctgaagagtccatgcaaaagttggttagttgtctacactgacaatgaaggcgatataatgctggttggtgatgacccctggaatgaattctgcgatatggtccacaagatcttcatctacacgagagaggaagtcgaaaggatgaacccaggtgccctgaactcaaggtctgaagatagtctatctgactcgctgggaagaggggtagcttccagagatccccgaggaggcgggtctacttcggctctcgattccgagaactgctagtttgttcagtcagtgaggcctttggaagtgaagcagacaaaaggcgtgaatcttgcggtgtagagtgtagttggtacattgtgtgtatgcctccgggtaagccctgcggtacccagtttgtgtcctggcgccagtttaccatttaagctaagtttttgggtgtgccctgtgctggggtctgggctctagttattgtagcagagcaggcaatgcatgcaagaaactgatgatgcgcctgtttggccctctttcccttcccaagccatgtaaatagccttggctctgaagcgtagtattgtattgtcgacagccgtacttgagatagtactccaagaggcgcgcttgctcctgtcagttgggtgtgcgtatgtagatgtgcgtgtgaagccatgcaagcaagggtttgtggggttgatggcttttcatggtagcggatctgctttcatggtactgacgtgcaggtggcaggctggtgttggctgctatgttttgctgcacgatattggcagaaaacagtagtactaaggggtgtttggtttctagggact

SEQ ID NO: 34798 - DNA, 3370 bp, Zea Mays
ggcaacgcgaggcggctgaaactgacacacacagacacactctctccctcttcctcccctcgctctcttgcagtcttgctcacacagcacatagcacacacacgacacgctgcgagaggggtaaagaacttagaagggcaggcaggagaagcgacacaggaaactgacgtcgccttcggcggcctgctacttaaataaatcccctcgcctcgcctccggctgcctcttccctttttccttccgcgcaaatcactcaggtgccagttgcgcggcggagatcgcgacgaattccggacggcagggaggtggtcgggggaactgggaagtgcatgtgagatccgatggcggcggctgcctgcgccggtgcggaagcaggacgcggatgcggagggaaggacgcgctgttcgtcgagctgtggaaggcctgcgcggggccgctgtcctgcgtgccgccgcttggggagaaggtctactacctcccgcagggccacatcgagcaggtggaggcatcgacgaaccagcttgccgagcagcagggcacgcccctctacaacctgccatggaagattccctgcaagctcatgaacatcgaactgaaggttgagccggatactgatgaggtgtacgcccagctcaccctgctccctgataagaagcaagatgagaatacatctacaacagtggaggaagaggaggtggtggtgcctcctgcgctaccagccacaaatgagggtcctcacatccattccttctgcaagacattgactgcctcagacacaagcacacatggtggtttctcagtgttgcgccggcatgcagatgagtgcctcccaccattggatatgagtcaacatcccccaaatcaagaattggtggccaaggacctgcatggggccgagtggcggttccgtcacatctttcgaggtcagccacggagacatctcctgcaaagtggttggagtgtttttgtgagcgccaagcgtcttgtcgcgggggatgccttcatatttctcagaggtgagaatggggagctccgtgttggagttcggcgtgcactgaggcaccaaaccactatcccatcttcagtcatatcaagccacaatatgcatcttggtgttcttgcaacagcatggcatgcagtgaacactgatagtatgttcactgtctactacaagccaaggactagtccagctgaatttgtggtttcgcgagataggtactatgaatcactgaaacgaaattattcaatagggatgagatttaagatgagatttgaaggtgaagaggcagcagagcaaagattcactggcacaatagttggaataggtgcttctgatccatctggttgggctgactcaaaatggcgttcccttaaggtgagatgggatgaaccttcttctatttctcgtcctgaaagagtttctccttggcaaatagaaccttctgttagcccatgtcatgtgaaccctcttccagttagattcaagaggtctcgatcaagcgttaatgctttgccatctgacgtgtctactgtaaccagagaagtcatggcagactcgcagcaaaatagtctcacaagagccttgcacaatcaaggaaggacacaattgacagttcgataccatgataacagtgatgtgaagactactcaggatcttaccgtgtggtcttcaggaactgagcaacagagaaacaatattgctgcccagacaaagctatgtctggagggttggacgccaactagaagtcctgaaggctacaatcagatattctcggcatttaaaccactgaaagatatacataacccacttggtccttttcctagtcaaatatctgggactcactcaaatagctgggacacagctgatgctcgttatccagtccaacaagctaattacagcatgttacctggcacatggtctttgaggcctcataacagtggttttaggatgaatcaacaaaattatctagtgatgcctgaaggtgcaaattttacggggaaatcagctttcacttcacttcaggaccatggcactgataaatgctccacaggctgctttggtcatattgagtcaagttcccacacagaccatgcatcctcaagtttgatcaggccccagcctttggtccttggaaatggtgttcagaaaagcaaaggcacttcatttaaattatttgggattccccttggcagcccagaaaaatctgaacctctggtatccccaccaagtgtcgcatatgacgggaaacttcaaacttctccatcagaaaaagggaatcagctagacgtagttgaagtggataattgttctcatccttctaagactgtgaagccacttgatggtcctcagtcagattctattacagagaataatcagccttctccagaagctacccttaatatccagaacaaagtgcaaagtagttccaccagaagctgcaagaaggttcataagcaaggtagtgccctcggcaggtcgattgatctaacaaagttcgcttgctatgatgagctgattgctgaactggatcagatgtttgacttcgatggtgagctgaagagtccatgcaaaagttggttagttgtctacactgacaatgaaggcgatataatgctggttggtgatgacccctggaatgaattctgcgatatggtccacaagatcttcatctacacgagagaggaagtcgaaaggatgaacccaggtgccctgaactcaaggtctgaagatagtctatctgactcgctgggaagaggggtagcttccagagatccccgaggaggcgggtctacttcggctctcgattccgagaactgctagtttgttcagtcagtgaggcctttggaagtgaagcagacaaaaggcgtgaatcttgcggtgtagagtgtagttggtacattgtgtgtatgcctccgggtaagccctgcggtacccagtttgtgtcctggcgccagtttaccatttaagctaagtttttgggtgtgccctgtgctggggtctgggctctagttattgtagcagagcaggcaatgcatgcaagaaactgatgatgcgcctgtttggccctctttcccttcccaagccatgtaaatagccttggctctgaagcgtagtattgtattgtcgacagccgtacttgagatagtactccaagaggcgcgcttgctcctgtcagttgggtgtgcgtatgtagatgtgcgtgtgaagccatgcaagcaagggtttgtggggttgatggcttttcatggtagcggatctgctttcatggtactgacgtgcaggtggcaggctggtgttggctgctatgttttgctgcacgatattggcagaaaacagtagtactaaggggtgtttggtttctagggact

SEQ ID NO: 34799 - DNA, 3382 bp, Zea Mays
ggcaacgcgaggcggctgaaactgacacacacagacacactctctccctcttcctcccctcgctctcttgcagtcttgctcacacagcacatagcacacacacgacacgctgcgagaggggtaaagaacttagaagggcaggcaggagaagcgacacaggaaactgacgtcgccttcggcggcctgctacttaaataaatcccctcgcctcgcctccggctgcctcttccctttttccttccgcgcaaatcactcaggtgccagttgcgcggcggagatcgcgacgaattccggacggcagggaggtggtcgggggaactgggaagtgcatgtgagatccgatggcggcggctgcctgcgccggtgcggaagcaggacgcggatgcggagggaaggacgcgctgttcgtcgagctgtggaaggcctgcgcggggccgctgtcctgcgtgccgccgcttggggagaaggtctactacctcccgcagggccacatcgagcaggtggaggcatcgacgaaccagcttgccgagcagcagggcacgcccctctacaacctgccatggaagattccctgcaagctcatgaacatcgaactgaaggttgagccggatactgatgaggtgtacgcccagctcaccctgctccctgataagaagcaagatgagaatacatctacaacagtggaggaagaggaggtggtggtgcctcctgcgctaccagccacaaatgagggtcctcacatccattccttctgcaagacattgactgcctcagacacaagcacacatggtggtttctcagtgttgcgccggcatgcagatgagtgcctcccaccattggatatgagtcaacatcccccaaatcaagaattggtggccaaggacctgcatggggccgagtggcggttccgtcacatctttcgaggtcagccacggagacatctcctgcaaagtggttggagtgtttttgtgagcgccaagcgtcttgtcgcgggggatgccttcatatttctcagaggtgagaatggggagctccgtgttggagttcggcgtgcactgaggcaccaaaccactatcccatcttcagtcatatcaagccacaatatgcatcttggtgttcttgcaacagcatggcatgcagtgaacactgatagtatgttcactgtctactacaagccaaggactagtccagctgaatttgtggtttcgcgagataggtactatgaatcactgaaacgaaattattcaatagggatgagatttaagatgagatttgaaggtgaagaggcagcagagcaaagattcactggcacaatagttggaataggtgcttctgatccatctggttgggctgactcaaaatggcgttcccttaaggtgagatgggatgaaccttcttctatttctcgtcctgaaagagtttctccttggcaaatagaaccttctgttagcccatgtcatgtgaaccctcttccagttagattcaagaggtctcgatcaagcgttaatgctttgccatctgacgtgtctactgtaaccagagaagtcacttctaaagtcatggcagactcgcagcaaaatagtctcacaagagccttgcacaatcaaggaaggacacaattgacagttcgataccatgataacagtgatgtgaagactactcaggatcttaccgtgtggtcttcaggaactgagcaacagagaaacaatattgctgcccagacaaagctatgtctggagggttggacgccaactagaagtcctgaaggctacaatcagatattctcggcatttaaaccactgaaagatatacataacccacttggtccttttcctagtcaaatatctgggactcactcaaatagctgggacacagctgatgctcgttatccagtccaacaagctaattacagcatgttacctggcacatggtctttgaggcctcataacagtggttttaggatgaatcaacaaaattatctagtgatgcctgaaggtgcaaattttacggggaaatcagctttcacttcacttcaggaccatggcactgataaatgctccacaggctgctttggtcatattgagtcaagttcccacacagaccatgcatcctcaagtttgatcaggccccagcctttggtccttggaaatggtgttcagaaaagcaaaggcacttcatttaaattatttgggattccccttggcagcccagaaaaatctgaacctctggtatccccaccaagtgtcgcatatgacgggaaacttcaaacttctccatcagaaaaagggaatcagctagacgtagttgaagtggataattgttctcatccttctaagactgtgaagccacttgatggtcctcagtcagattctattacagagaataatcagccttctccagaagctacccttaatatccagaacaaagtgcaaagtagttccaccagaagctgcaagaaggttcataagcaaggtagtgccctcggcaggtcgattgatctaacaaagttcgcttgctatgatgagctgattgctgaactggatcagatgtttgacttcgatggtgagctgaagagtccatgcaaaagttggttagttgtctacactgacaatgaaggcgatataatgctggttggtgatgacccctggaatgaattctgcgatatggtccacaagatcttcatctacacgagagaggaagtcgaaaggatgaacccaggtgccctgaactcaaggtctgaagatagtctatctgactcgctgggaagaggggtagcttccagagatccccgaggaggcgggtctacttcggctctcgattccgagaactgctagtttgttcagtcagtgaggcctttggaagtgaagcagacaaaaggcgtgaatcttgcggtgtagagtgtagttggtacattgtgtgtatgcctccgggtaagccctgcggtacccagtttgtgtcctggcgccagtttaccatttaagctaagtttttgggtgtgccctgtgctggggtctgggctctagttattgtagcagagcaggcaatgcatgcaagaaactgatgatgcgcctgtttggccctctttcccttcccaagccatgtaaatagccttggctctgaagcgtagtattgtattgtcgacagccgtacttgagatagtactccaagaggcgcgcttgctcctgtcagttgggtgtgcgtatgtagatgtgcgtgtgaagccatgcaagcaagggtttgtggggttgatggcttttcatggtagcggatctgctttcatggtactgacgtgcaggtggcaggctggtgttggctgctatgttttgctgcacgatattggcagaaaacagtagtactaaggggtgtttggtttctagggact

SEQ ID NO: 34800 - DNA, 2837 bp, Zea Mays
cctgtttccattttcgtttcttctgcctgctgattcgtaacgggtgtgcgctggttgctgcgcttgccattaaaaggctacttttctgggagctccctggtgctctcatcttggaagacgttcagtggaaggtgcaggcttgcctgcccaggatgcccctgccggcgacggactgagttggcgtattccttgtctgccagtgttgaattagtctaattgggccatggagtcatctggctgtagctctgagatagttgagtccaccgaggaattcgatactacaccctctggtggatccagcttgctgcatattaaactcaaagatgaggagaaacgcggcaaaagtcatgattattctgtggaagatgacctcgaccagctccttaaagctatcgatagcaggaccttccgacgcgcgcttagtcctggcagtacaggtggagatgcgctgggtaagagtgttctgaagaaaccagctaggtctgggttgtctcaaaatgcaggcattgggatatcctccaaggctgttaatatgaagcaagcgctaagaaggctatgcatttcccaggcatcagaaatggctgcaatgaagaggttgtcgatgtcacctggatcttcaagttcatccgaagctgggactatccacaggctttatgcctctttgatggtccaaagtagttctgagggtcttctgcatgatgatgagaagatgaacctgattgaagtatcgatcactccagagaagattgataagagttcatctagaggtacaagtgagttcagtgaagactgtgaatttgagacagctgatggaagtgcagtcacctctacctctatctgttctgcttcgtcaacctacaccgatattaggaagatcagaatccaagatgtcatcattggtgaccctatggataacgagagttccttgggggaaaatggcaacctaggaaataaattttctgcagctactgatgatggctctcccaaagtcccaatcttgagcaaacctatcactacatctcgacttgtcaagccagtctttcgatgcaagccttccggtaagaagaaagtgaaacaagaaccatcttcgttgggtgattcctccaatagtactaaattctgctcttcaaaggagtcaatctccctcacatcaaccagctgctcttcaacatctagttttacaaatcccgccaaccgtgcagaagagaaatcatctcctgggccagaaaaatctgatggcacatcttctgagtggttggcagagcaaaatgaatgttcccagaactcaaagagcagcattagtgagtatggttgcagcacaagtatcagcggtgagagccaatttggattgtgtggctatagtaacaggccacacatggcgaaggatctgcgctggctaaccattcgtcagttggcactgcaacagggttccttaggactcgacaatttcaagcttctgaagaggcttggttgtggtgacattggaactgtatatcttgctgagttggttgattcagattgcttatttgctttgaaggttatggacatcgagtaccttattaatagaaagaagatgctacgagcacaggctgagagggagatactagaaatgctagatcatccatttctcccgactctttatgcccattttaccacagacaatctctcatgcttggtcatggagtactgtccaggcggtgatttgcatgttcttcgccaaaggcaacctggaaaaagctttccagagccagcagcaaggttttatgttgcagaagttctccttgctttggaatatcttcacatgttaggggtcatataccgtgatctaaagccggagaacattttagtccgtgaagatgggcatataatgttatcggacttcgacctttcactgaggtgctcagtgaatcctgtgctccttcggtcatcttctgttactgcgaaccaccaaccgaggaaacatacaggaccttgtgcagagaactactgcataaattcgtcttgcctccagcaaccctcttgtgcccaaacatcttgcttcacaccacgcctaccatcaattccaaagcctcggaaacctaaatcctcccagaaaaggcttccacagcttgttgtagagcctactgatgcacgttctaattcctttgttggcacacatgagtaccttgcaccagaaatcatcaaaggggatggccatggaagcgctgttgactggtggacgtttggtgtcttcctttatgaacttctatacggcaagacacccttcagaggacctgggaatgatgaaacattggcaaatgtggtctcgcagaatctccggttcccagaccatccagctgtgagcagcaacaccaaagatctcatcagaggtttactggttaaggagcctgagaacagatttggatcgttgagaggagctgctgagatcaagcagcaccccttctttgaaggcttgaattgggctctgattcggtctgctgctccaccagagacacaaccttgcaacatcgtgactcttgccaaagagcggaagaaagaaggcaagtgcctggagttcagaagcaactcagaggaccttgagtttgaagttttttagtttcgttctggtacagtttagcactatttccgctgatataagcctacatttttttttctatgaatagccaaaggcttgggggtgtacatgtagatccttgtatttcagtaattgctatgtccctgtcaatagcatcaccaaattgaaaagaataagcagcttatgctattattatcattgctgctgcatatgaattggttcctattggagacccagtaaattttactcgtgtatttgcatg

SEQ ID NO: 34801 - DNA, 2826 bp, Zea Mays
ctcttgagccgctctcccgatcctaaatccgggtgtgcgctggttgctgcgcttgccattaaaaggctacttttctgggagctccctggtgctctcatcttggaagacgttcagtggaaggtgcaggcttgcctgcccaggatgcccctgccggcgacggactgagttggcgtattccttgtctgccagtgttgaattagtctaattgggccatggagtcatctggctgtagctctgagatagttgagtccaccgaggaattcgatactacaccctctggtggatccagcttgctgcatattaaactcaaagatgaggagaaacgcggcaaaagtcatgattattctgtggaagatgacctcgaccagctccttaaagctatcgatagcaggaccttccgacgcgcgcttagtcctggcagtacaggtggagatgcgctgggtaagagtgttctgaagaaaccagctaggtctgggttgtctcaaaatgcaggcattgggatatcctccaaggctgttaatatgaagcaagcgctaagaaggctatgcatttcccaggcatcagaaatggctgcaatgaagaggttgtcgatgtcacctggatcttcaagttcatccgaagctgggactatccacaggctttatgcctctttgatggtccaaagtagttctgagggtcttctgcatgatgatgagaagatgaacctgattgaagtatcgatcactccagagaagattgataagagttcatctagaggtacaagtgagttcagtgaagactgtgaatttgagacagctgatggaagtgcagtcacctctacctctatctgttctgcttcgtcaacctacaccgatattaggaagatcagaatccaagatgtcatcattggtgaccctatggataacgagagttccttgggggaaaatggcaacctaggaaataaattttctgcagctactgatgatggctctcccaaagtcccaatcttgagcaaacctatcactacatctcgacttgtcaagccagtctttcgatgcaagccttccggtaagaagaaagtgaaacaagaaccatcttcgttgggtgattcctccaatagtactaaattctgctcttcaaaggagtcaatctccctcacatcaaccagctgctcttcaacatctagttttacaaatcccgccaaccgtgcagaagagaaatcatctcctgggccagaaaaatctgatggcacatcttctgagtggttggcagagcaaaatgaatgttcccagaactcaaagagcagcattagtgagtatggttgcagcacaagtatcagcggtgagagccaatttggattgtgtggctatagtaacaggccacacatggcgaaggatctgcgctggctaaccattcgtcagttggcactgcaacagggttccttaggactcgacaatttcaagcttctgaagaggcttggttgtggtgacattggaactgtatatcttgctgagttggttgattcagattgcttatttgctttgaaggttatggacatcgagtaccttattaatagaaagaagatgctacgagcacaggctgagagggagatactagaaatgctagatcatccatttctcccgactctttatgcccattttaccacagacaatctctcatgcttggtcatggagtactgtccaggcggtgatttgcatgttcttcgccaaaggcaacctggaaaaagctttccagagccagcagcaaggttttatgttgcagaagttctccttgctttggaatatcttcacatgttaggggtcatataccgtgatctaaagccggagaacattttagtccgtgaagatgggcatataatgttatcggacttcgacctttcactgaggtgctcagtgaatcctgtgctccttcggtcatcttctgttactgcgaaccaccaaccgaggaaacatacaggaccttgtgcagagaactactgcataaattcgtcttgcctccagcaaccctcttgtgcccaaacatcttgcttcacaccacgcctaccatcaattccaaagcctcggaaacctaaatcctcccagaaaaggcttccacagcttgttgtagagcctactgatgcacgttctaattcctttgttggcacacatgagtaccttgcaccagaaatcatcaaaggggatggccatggaagcgctgttgactggtggacgtttggtgtcttcctttatgaacttctatacggcaagacacccttcagaggacctgggaatgatgaaacattggcaaatgtggtctcgcagaatctccggttcccagaccatccagctgtgagcagcaacaccaaagatctcatcagaggtttactggttaaggagcctgagaacagatttggatcgttgagaggagctgctgagatcaagcagcaccccttctttgaaggcttgaattgggctctgattcggtctgctgctccaccagagacacaaccttgcaacatcgtgactcttgccaaagagcggaagaaagaaggcaagtgcctggagttcagaagcaactcagaggaccttgagtttgaagttttttagtttcgttctggtacagtttagcactatttccgctgatataagcctacatttttttttctatgaatagccaaaggcttgggggtgtacatgtagatccttgtatttcagtaattgctatgtccctgtcaatagcatcaccaaattgaaaagaataagcagcttatgctattattatcattgctgctgcatatgaattggttcctattggagacccagtaaattttactcgtgtatttgcatg

SEQ ID NO: 34802 - DNA, 1701 bp, Zea Mays
tagaatgtccagtgaacagattggctgttcattagcagatgctgcttcaagttgtgaatatactcattttttgagggaagcttcgagatgttatccgtctttgcatgttatttacattaatacttcgctggaaacaaaagctcatgctcatgaacttgttcctacaataacttgcacctcttctaatgttgttccaactatattacaggcatttgcccaaataccaaatcttaatgtctggtatggtcctgattcatatatgggtgcaaacatagcagatttattccagagaatggctacaatgtcagatgaagaaattgcaaaaattcatccagaccacaacagaaaatctttgagttcattactgccacgcctacactattaccagggtggtaactgtatggtacatgacatgtttggccatgaggttgtggggaaaataaaggaacaatattgtgatgcatttctaacagcacactttgaggtccctggagaaatgttctctttggcaatggaagcaaaacggagagcaatgggagttgttggatccactcagaatatcttggatttcattaaggatcatgtgatgggagctctggacagaaatgtagatgaacaccttcagtttgtgctaggaacagaatcagggatgatcacttcaattgttgctgctgttcaggaattacttcatttgtattcttctcaagagagagcaaacatcgaagtagaaattgtgtttccagtatcttcggatgcaatttctaagacatcgaatggttctcatcatgttggttcttcaatggctactgatttgaatagtcttactattgttcctggtgtgagttctggcgaaggctgctccattcatggtggttgtgcctcgtgtccctacatgaagatgaataccctggggtcgctacttaaagtttgccatcagcttcctgataaaaacaacaaattatctgtataccaagctaacagaattaatgttaggactcctctcggaaaatcagttgcagaggttgggtgtgagcctattctgcatatgcggcatttccagaaaacaaggaggttacccgacaagcttgttcaccaggttgtaaatggtttggagagcaacattgaggggcatctgactggtgatttgggcggaaatggggagtttatgtggccttcgagtttagggatggaggatctcatttatcttggcaaggatgttcttaaggtttaggtgcggcaatggcggtggtgatccactccctttgcaatcatcgagagaccgggaccgacaagttcatggctgttgggggccttcctcttccgaaggtcctcaaaggtcctcgatacgaagacattgtttgaaaacgataacaacgaatgccgaagctacaactgaaggataacagcttcaacttaggatagcaacgaaggtcaagcataatgccgagccgaagaagaaaagactagttgatccctggtgatttatgttacgattatgtgtatatgttaaggtcataaatgtattgttatccgggctgcgtcccgtgcctataaattggtgaatagtaccacgtaccgtttacgttggattgtaatcattctcgcatcagcaccttcaaacaagtcgaaggtatcaatgtaatataaatcctattaatattcatatgtttatcatgaaataaatataggcttctgacttcg

SEQ ID NO: 34803 - DNA, 1134 bp, Zea Mays
aacaaaagctcatgctcatgaacttgttcctacaataacttgcacctcttctaatgttgttccaactatattacaggcatttgcccaaataccaaatcttaatgtctggtatggtcctgattcatatatgggtgcaaacatagcagatttattccagagaatggctacaatgtcagatgaagaaattgcaaaaattcatccagaccacaacagaaaatctttgagttcattactgccacgcctacactattaccagggtggtaactgtatggtacatgacatgtttggccatgaggttgtggggaaaataaaggaacaatattgtgatgcatttctaacagcacactttgaggtccctggagaaatgttctctttggcaatggaagcaaaacggagagcaatgggagttgttggatccactcagaatatcttggatttcattaaggatcatgtgatgggagctctggacagaaatgtagatgaacaccttcagtttgtgctaggaacagaatcagggatgatcacttcaattgttgctgctgttcaggaattacttcatttgtattcttctcaagagagagcaaacatcgaagtagaaattgtgtttccagtatcttcggatgcaatttctaagacatcgaatggttctcatcatgttggttcttcaatggctactgatttgaatagtcttactattgttcctggtgtgagttctggcgaaggctgctccattcatggtggttgtgcctcgtgtccctacatgaagatgaataccctggggtcgctacttaaagtttgccatcagcttcctgataaaaacaacaaattatctgtataccaagctaacagaattaatgttaggactcctctcggaaaatcagttgcagaggttgggtgtgagcctattctgcatatgcggcatttccagaaaacaaggaggttacccgacaagcttgttcaccaggttgtaaatggtaatggtgacaaacccttgcaatagctgttcatcaatacttgtatttattttataaaggtggtatggaggatgaatatatctcaagtgaatgccatgttgagctggcataccgaagataagattatttgccctgtacggtagacatgtggacttgccca

SEQ ID NO: 34804 - DNA, 1027 bp, Zea Mays
tgcaaaaattcatccagaccacaacagaaaatctttgagttcattactgccacgcctacactattaccagggtggtaactgtatggtacatgacatgtttggccatgaggttgtggggaaaataaaggaacaatattgtgatgcatttctaacagcacactttgaggtccctggagaaatgttctctttggcaatggaagcaaaacggagagcaatgggagttgttggatccactcagaatatcttggatttcattaaggatcatgtgatgggagctctggacagaaatgtagatgaacaccttcagtttgtgctaggaacagaatcagggatgatcacttcaattgttgctgctgttcaggaattacttcatttgtattcttctcaagagagagcaaacatcgaagtagaaattgtgtttccagtatcttcggatgcaatttctaagacatcgaatggttctcatcatgttggttcttcaatggctactgatttgaatagtcttactattgttcctggtgtgagttctggcgaaggctgctccattcatggtggttgtgcctcgtgtccctacatgaagatgaataccctggggtcgctacttaaagtttgccatcagcttcctgataaaaacaacaaattatctgtataccaagctaacagaattaatgttaggactcctctcggaaaatcagttgcagaggttgggtgtgagcctattctgcatatgcggcatttccaaaaacaaggaggttacccgacaagcttgttcaccaggttgtaaatggtaatggtgacaaacccttgcaatagctgttcatcaatacttgtatttattttataaaggtggtatggaggatgaatatatctcaagtgaatgccatgttgagctggcataccgaagataagattatttgccctgtacggtagacatgtggacttgccctgtacgtcagacatgttgacatctgcaggcaaattaatgttgaacaaatgtgattggtctaattgaaaaataattattctg

SEQ ID NO: 34805 - DNA, 730 bp, Zea Mays
ctcggcaaaacgcgcctcgtccgtccgcgcattttacaacacggccacaccaacgcagcgacatggacaccgccgccgcctcactcttgccccgcgccgccgccgtgaagacccgacgcgttttctctcctctccatgtttcccggagcggtctccttccccgtcaaagctccttcctcgctgctcgctgtgcccactcccgtgcccctcctccacctccgcctctccctcgcgccgattgcgatgatgctgccgccaaggcgcacccgcgcctccgtctccgcctgcttgcggaggagttccgcgcactcccatctgacgcagaccgcgcgcgccggctcctctccctcgcggccgcgctgccgcggctcccggagcccgaccgcgcccagggcaaccgcgtcatgggctgcgtcgcgcgggtgtggctcgtcgcccgctgcaacgcggcaacgggctggcggatgtggttcgcggcggactccgactctgacctctcgcgtgggtactgcgcctgcctcgtcgccgcgctggacggggccgaacctgaggacgtcctcgccgtcgaccccgccgatcccgacctcgcgccgctcggggcggggacaacggcggcccggtcgcgggccagcacgtggcataacgtgcttgtcggcatgcagaagcgggcgcgcacggccatcgcggcgcgcgagggtagacaccccgggaagccgtttccgtcggcggt

SEQ ID NO: 34806 - DNA, 2856 bp, Zea Mays
catcctgatgctgagtggcaaatcgatccttgtcatttgcatttgctctataaaaaacctatagagcatttgtacgtcttccacaaattaaacagagagcctcctcccaggagcaggagaagctatgacgccgttgaggtacgccgcctcacctcacctgcagccgcccttcctgggctacaaatcctccaacgttgatggccgatcaagaacgcggcagcaggccatgatcgccgagcgcagcagcagcagcagcacaagtgggcgaggaggacagctggaggacaggatcagggagcagctcctcaacgccgagctctcgccgtcgtcgtacgacacggcctgggccgccatggttccggcgccggggtcccttgcggcgtcgcggtacccgcagtgcgtggattggatcttgcggaaccagcgcagcgacgggtcgtgggggttggacccttcgctgcgcaaggacgcgctctcgtccacgttggcgtgcgtcctcgcgctcaggacctggggcgtcggggaggagcacgtcgggaaagggctccgcttcatcggacacaactccacctctgtgacggactgcgacaagtgcgacacgccagcagggttcaacgtcatcttccccggcatgctcgagcgcggcattggcatggggctggagatccctctggcccatgcggaccttgacgccatcctccggctgcgtgacacggagctaaaaagcatagctgcttccggaagaagtaaagcttacatgtcctacgtagcagaaggtctgggggacctactggactgggatcaggccgccatggcttaccagaggaagaacgggtccttcttcaactcgccggccacaacggccgcagctgccatccacaacggctacaacaagagagccatcggttacttggatgctctcatcagcgagtctggcagcagctcgtcagtaccggctgtgtatccacggaaggtgcacagccagctccgcatggtggacaccttggagaggatggggatctctcccagcttttcctatgaaataaacgccatacttgacatgacatacagttcgtggctgcgcaatgacgacgaggtaatgctggacatggcgacctgtgcgatggcgttccggctccttcgtatgcacggataccacgtctcatccgatgcgctagctcaattcagcgaagaatccagtttccacgactccatcgaagcgcatctgaacggcacggaggcgttgctagaactgtacaaggcgtcgcaggttcagatcttggaggaggagccggtcctagagagcatcttttcatggtcaggaaaactgctgaggcgaaaacagtgttccgattccgacgatccggcagaggtagaacatgtgctcaagttcccctcctacgcgaccctggaccggctggagcacaggaggaacatagagcgtttcaagacaggcggcttccagatgctgaaatcagcattccgcgtttctcacgcagatgaggaaattctgacgctggcaaccgacggattccactcctcccaggctgtgtaccaacaagagattgagcagctcaacaggtgggtgaaagaggtgaggctgccggagctggagttcgcgagagtactgcctctgcccatccttttctcggcagcagccaccatgttccccgccgaactgtcggaggctcgcatcgcgtggagcaagagctccgtgctcaccaccatcgtggacgacctgttcgacaccggggactccatggaggagctggagaatctcgtcacgctgttcgacctgtgggacgcgcaccaggaggctggcttctactcggagcgggtggagatcgtcttccgcgccgtctacgacacgtgcaagcatctggtgggcaaggccgcggcggtgcagaaccgcggggtcatggaccacatcgccgacctttgggtggacgtcgtgagggccatgatgcccgaggcggagtggaggatgagcggccgggtgccgtccatggaggagtacctgccgatcggggaggtgtcgttcgcgatcggccccatcgtccccatggccgcctacctggttgggccagagctcccggaggacgtggtggggagcgccgagtacgaggagatgctcagcctcgtcaacctctcggggcgcctcctcaacgacctccagacgtacgagagggagaggaagcaagggaagatcaacagcgtcctgctgctcgccgatccgtcctactgcggctccgtcgaggcggcaacccgggaggtgaggagcgtcatcgaggcctccaggaggaagctgctgaggctggtgctcagagacggggccgcggtgccccgccctgcgaggcagctgttctggaacatgtccaaggtgctccacctgttctacatggacagggacggctactcatctccgctcacgaatgccatcgacgaggtgttgatcaagccgctccagatgggaaggagacgagaagaagatcaactccccggtcgcgtccggtcaaaccaaaactaggcgcatcttccgcgacgtacggcatacaaatgctgaccggaggcgttcaggaggggaggctcccttactgcatttcattgcaaaaaggaaattatgtacaaacaaagaagaagacaattacacgtttcacctatatatgtatccactctagtattacagcttgaatgttagtctttgttccattcataagcatcaacgtttcttttcctgaaaatggtctttgctgacgcaaagttgcgtctaagaaagagatgccctatggcctcctcatgttgtagaatacaattctaacaagtataagagtctaggacatattcctagcatacctc

SEQ ID NO: 34807 - DNA, 1221 bp, Zea Mays
agttgtcttttttactgtaatagattggtgagggtgaaaaacttgttcgggcactttttggtgtggccagttgtcgtcaacctgctgtcatatttgtggatgagatagactcattattatctcagcgcaaatcagatggtgaacatgaatcaagcaggagactgaaaacacagtttctaattgagatggaaggttttgacaccggaaatgaacagatcttacttatagaaaccttagtgcaccatggttgtgaagaagcacgggcttggataattcgcaatctattggagaaagatggacttttcatgctctcggaagaagaaacaagtgccatctgtaaattaactgaaggctactcaggatctgacatgaaaaacttggtgaaagatgcctcaatgggaccactaagagaggctcttcagacgggcgttgaaatcgcaaagctcagcaaggaggatatgcggccagtgatgctgaaggatttcgagaatgctatgcgggaggtaagaccttctgtttcctcaagcgagctggggacttatgaagaatggaacaggcagtttgggagcctatcgatctagtctgtcggcaggcatcaacgaatacaatcatgtcggcactatagaaaaaggagctcaacgattttagccggaacatgacatgcataacacagctctacagtttaacaatcttttgaagcatcaaaatttgaactgtctatttggagtgctgagtaatatccaggagcctacatatcaaatagtttcaattgtttttaaatcttcacttttctgtaaatttgtttgccttggttttgattgacatatgactagcgcggaagtcaaatactccgttccaaattataaaatgttttagcttttccgcatacagttttttagatgaataaaaaaattaatgtatctataaaaagcaatatgtaaagagatggtacaacattgacaacaaagaagaagatttgtgggtccaactcagacctagaccgtcttcatgggtagtgtaaaatagagaatgcggaactgtagatgatattgtttgatactgtttgtaaagtaaagtttgtttgatactgtttgtaaagtaaagtttgatatataggatgagataggagattggataatagatctgctagagataaccttctcatgctctcgaggatcgaaatagataatgttccatgggatcgaaatagataacgaagag

SEQ ID NO: 34808 - DNA, 1196 bp, Zea Mays
ctcagtcgaggtcaagttgtcttttttactgtaatagattggtgagggtgaaaaacttgttcgggcactttttggtgtggccagttgtcgtcaacctgctgtcatatttgtggatgagatagactcattattatctcagcgcaaatcagatggtgaacatgaatcaagcaggagactgaaaacacagtttctaattgagatggaaggttttgacaccggaaatgaacagatcttacttataggagcaacaaacagaccccaggaactggatgaagcagcgcgcaggcgactcacgaaacgtctatacatcccccttccttcattaggctactcaggatctgacatgaaaaacttggtgaaagatgcctcaatgggaccactaagagaggctcttcagacgggcgttgaaatcgcaaagctcagcaaggaggatatgcggccagtgatgctgaaggatttcgagaatgctatgcgggaggtaagaccttctgtttcctcaagcgagctggggacttatgaagaatggaacaggcagtttgggagcctatcgatctagtctgtcggcaggcatcaacgaatacaatcatgtcggcactatagaaaaaggagctcaacgattttagccggaacatgacatgcataacacagctctacagtttaacaatcttttgaagcatcaaaatttgaactgtctatttggagtgctgagtaatatccaggagcctacatatcaaatagtttcaattgtttttaaatcttcacttttctgtaaatttgtttgccttggttttgattgacatatgactagcgcggaagtcaaatactccgttccaaattataaaatgttttagcttttccgcatacagttttttagatgaataaaaaaattaatgtatctataaaaagcaatatgtaaagagatggtacaacattgacaacaaagaagaagatttgtgggtccaactcagacctagaccgtcttcatgggtagtgtaaaatagagaatgcggaactgtagatgatattgtttgatactgtttgtaaagtaaagtttgtttgatactgtttgtaaagtaaagtttgatatataggatgagataggagattggataatagatctgctagagataaccttctcatgctctcgaggatcgaaatagataatgttccatgggatcgaaatagataacgaagag

SEQ ID NO: 34809 - DNA, 1336 bp, Zea Mays
ggaatttctcatctcactctagtgccaagtgcaaactagggctcctcagtcgaggtcaagttgtcttttttactgtaatagattggtgagggtgaaaaacttgttcgggcactttttggtgtggccagttgtcgtcaacctgctgtcatatttgtggatgagatagactcattattatctcagcgcaaatcagatggtgaacatgaatcaagcaggagactgaaaacacagtttctaattgagatggaaggttttgacaccggaaatgaacagatcttacttataggagcaacaaacagaccccaggaactggatgaagcagcgcgcaggcgactcacgaaacgtctatacatcccccttccttcattagaagcacgggcttggataattcgcaatctattggagaaagatggacttttcatgctctcggaagaagaaacaagtgccatctgtaaattaactgaaggctactcaggatctgacatgaaaaacttggtgaaagatgcctcaatgggaccactaagagaggctcttcagacgggcgttgaaatcgcaaagctcagcaaggaggatatgcggccagtgatgctgaaggatttcgagaatgctatgcgggaggtaagaccttctgtttcctcaagcgagctggggacttatgaagaatggaacaggcagtttgggagcctatcgatctagtctgtcggcaggcatcaacgaatacaatcatgtcggcactatagaaaaaggagctcaacgattttagccggaacatgacatgcataacacagctctacagtttaacaatcttttgaagcatcaaaatttgaactgtctatttggagtgctgagtaatatccaggagcctacatatcaaatagtttcaattgtttttaaatcttcacttttctgtaaatttgtttgccttggttttgattgacatatgactagcgcggaagtcaaatactccgttccaaattataaaatgttttagcttttccgcatacagttttttagatgaataaaaaaattaatgtatctataaaaagcaatatgtaaagagatggtacaacattgacaacaaagaagaagatttgtgggtccaactcagacctagaccgtcttcatgggtagtgtaaaatagagaatgcggaactgtagatgatattgtttgatactgtttgtaaagtaaagtttgtttgatactgtttgtaaagtaaagtttgatatataggatgagataggagattggataatagatctgctagagataaccttctcatgctctcgaggatcgaaatagataatgttccatgggatcgaaatagataacgaagag

SEQ ID NO: 34810 - DNA, 1907 bp, Zea Mays
cggtgaattgtgaagtggtcaggacgcgaagaacgcggacatcgccgacaaccacacgagcgcgggcgaaatgaaggggttggatgttgtgcaaaagccagcacaaaatggtccacaaggtgcttctgtatcaccacaatgtgataacaactatagtacacggaattatggcgtgagaccaagttggaattctcgtcgtggaccacgtggtagttttataccccctatcagaaacaatggaggatcaggtacaacgatctcacgggtcactggtaaaaatgacgagtccatggaagattcaacaaggaaatgtattgaaatgctttgtgctcctgatggtgagcttcctgagaagctgaggaatctagaacctcgccttattgaacatgtcagtaatgaaataatggatagggatcctaatgtccgctggaatgacatagctggtttggaacatgcaaagaagtgtgtgacagagatggtgatatggccactgctacgtcctgatatattccgtggttgtcggtctcctggaagaggtctactgttgtttggacctcctggaacaggcaaaaccatgattggaaaggcaatagctggtgaagccaaggcaacatttttctacatatctgctagttcactaacaagcaaatggattggtgagggtgaaaaacttgttcgggcactttttggtgtggccagttgtcgtcaacctgctgtcatatttgtggatgagatagactcattattatctcagcgcaaatcagatggtgaacatgaatcaagcaggagactgaaaacacagtttctaattgagatggaaggttttgacaccggaaatgaacagatcttacttataggagcaacaaacagaccccaggaactggatgaagcagcgcgcaggcgactcacgaaacgtctatacatcccccttccttcattagaagcacgggcttggataattcgcaatctattggagaaagatggacttttcatgctctcggaagaagaaacaagtgccatctgtaaattaactgaaggctactcaggatctgacatgaaaaacttggtgaaagatgcctcaatgggaccactaagagaggctcttcagacgggcgttgaaatcgcaaagctcagcaaggaggatatgcggccagtgatgctgaaggatttcgagaatgctatgcgggaggtaagaccttctgtttcctcaagcgagctggggacttatgaagaatggaacaggcagtttgggagcctatcgatctagtctgtcggcaggcatcaacgaatacaatcatgtcggcactatagaaaaaggagctcaacgattttagccggaacatgacatgcataacacagctctacagtttaacaatcttttgaagcatcaaaatttgaactgtctatttggagtgctgagtaatatccaggagcctacatatcaaatagtttcaattgtttttaaatcttcacttttctgtaaatttgtttgccttggttttgattgacatatgactagcgcggaagtcaaatactccgttccaaattataaaatgttttagcttttccgcatacagttttttagatgaataaaaaaattaatgtatctataaaaagcaatatgtaaagagatggtacaacattgacaacaaagaagaagatttgtgggtccaactcagacctagaccgtcttcatgggtagtgtaaaatagagaatgcggaactgtagatgatattgtttgatactgtttgtaaagtaaagtttgtttgatactgtttgtaaagtaaagtttgatatataggatgagataggagattggataatagatctgctagagataaccttctcatgctctcgaggatcgaaatagataatgttccatgggatcgaaatagataacgaagag

SEQ ID NO: 34811 - DNA, 2722 bp, Zea Mays
cgcaaaaaagcgggaaacaaagcgaagttggggcggcgagacgcgagacgcgagacgcgagacgcgagaaatggcggagccgcctttggccgccggctgcacgacaaactggaggagggaggcggatgagcggctgcggcgcctccactccctcctcttcggcgccgacgccgcactcgagcacggggacgccacggtggcgcaggcgctcgcgctccgcctcctcggcttcctcgactctcaggcgctagccgcaggcgcgggccccgaggacgccgccttcgtcgcgcccattcgcaccgcggcttccgctcggctagccgccgcctcacgcgcccgcgcctctgactccgaccgcttttgagcttgcaagaacggatgttggctgtgtttttgcaaatcagggtgacaataatgttgaaagaatccagcgttcgaagtatttccaagctcttcttcagaagtctaaagcaaatgtttctgaacaacggaatgcaacatgtcaagagttctcagttcaatgggctccatgcgtcgatgaaagccaagctgaaatggaaaatgagaagctaagcatcagggcttcaaagttaatgatgcaaacgaagttgacatcattgtatagcagtaagtccttgaagacaaatggcgtacccaacaaaaatatgttcaaatcagagaactcatctaaagtgtgtgccggtgttgaaaatagaacaagtcaaaatagtaacaggcggcatgcttacctggacgttgaggaggatgagaaatcccatgggcaattgcagaatgcaaagtggaaacatacagggttcagaagtcctatatttgaggttgcaaattctccatcaagtaatgatgaagctgatgctcctgccaatgagtttacgactgccaagagaatgatggggttggatgttgtgcaaaagccagcacaaaatggtccacaaggtgcttctgtatcaccacaatgtgataacaactatagtacacggaattatggcgtgagaccaagttggaattctcgtcgtggaccacgtggtagttttataccccctatcagaaacaatggaggatcaggtacaacgatctcacgggtcactggtaaaaatgacgagtccatggaagattcaacaaggaaatgtattgaaatgctttgtgctcctgatggtgagcttcctgagaagctgaggaatctagaacctcgccttattgaacatgtcagtaatgaaataatggatagggatcctaatgtccgctggaatgacatagaagtgtgtgacagagatggtgatatggccactgctacgtcctgatatattccgtggttgtcggtctcctggaagaggtctactgttgtttggacctcctggaacaggcaaaaccatgattggaaaggcaatagctggtgaagccaaggcaacatttttctacatatctgctagttcactaacaagcaaatggattggtgagggtgaaaaacttgttcgggcactttttggtgtggccagttgtcgtcaacctgctgtcatatttgtggatgagatagactcattattatctcagcgcaaatcagatggtgaacatgaatcaagcaggagactgaaaacacagtttctaattgagatggaaggttttgacaccggaaatgaacagatcttacttataggagcaacaaacagaccccaggaactggatgaagcagcgcgcaggcgactcacgaaacgtctatacatcccccttccttcattagaagcacgggcttggataattcgcaatctattggagaaagatggacttttcatgctctcggaagaagaaacaagtgccatctgtaaattaactgaaggctactcaggatctgacatgaaaaacttggtgaaagatgcctcaatgggaccactaagagaggctcttcagacgggcgttgaaatcgcaaagctcagcaaggaggatatgcggccagtgatgctgaaggatttcgagaatgctatgcgggaggtaagaccttctgtttcctcaagcgagctggggacttatgaagaatggaacaggcagtttgggagcctatcgatctagtctgtcggcaggcatcaacgaatacaatcatgtcggcactatagaaaaaggagctcaacgattttagccggaacatgacatgcataacacagctctacagtttaacaatcttttgaagcatcaaaatttgaactgtctatttggagtgctgagtaatatccaggagcctacatatcaaatagtttcaattgtttttaaatcttcacttttctgtaaatttgtttgccttggttttgattgacatatgactagcgcggaagtcaaatactccgttccaaattataaaatgttttagcttttccgcatacagttttttagatgaataaaaaaattaatgtatctataaaaagcaatatgtaaagagatggtacaacattgacaacaaagaagaagatttgtgggtccaactcagacctagaccgtcttcatgggtagtgtaaaatagagaatgcggaactgtagatgatattgtttgatactgtttgtaaagtaaagtttgtttgatactgtttgtaaagtaaagtttgatatataggatgagataggagattggataatagatctgctagagataaccttctcatgctctcgaggatcgaaatagataatgttccatgggatcgaaatagataacgaagag

SEQ ID NO: 34812 - DNA, 3291 bp, Zea Mays
tacaatgaacacgaaagtcattattatttttagccttggcgctatatgtttgttagcagaggttacatgattcttctttcggaataggcggaaaaatgagagccttcactgttgtttatttagtagaggttgagatcgtatttcaaattattaagaacactattgttttagattctttcacatattcatacgtttgaaaaaaaaccgcattctccatgatgttttggtcatagagaatgtaataaaagtccattaaatagcattgatactcccatactatagtattttcctttgtgttgaggattaatgcaaccacagtgttgtggtttgaacactaatcgagaaggcctctttactgttgtctaggtcagttataactttcatatatgtgcttccatacactttaatgttagtagtacaattgctgttagcagattaaaaacttagttaaacatatgcgtactcacatatttattatttctctttacatcaaggattcccatggacatgtggttgtccattacacagatgttgatacaaatgttcagctcctttttaggtaccgttgctcatgttgcagcccgaggttgtagctacacaggaacacaaattcagatagggataagtccgggcgcaaaaaagcgggaaacaaagcgaagttggggcggcgagacgcgagacgcgagacgcgagacgcgagaaatggcggagccgcctttggccgccggctgcacgacaaactggaggagggaggcggatgagcggctgcggcgcctccactccctcctcttcggcgccgacgccgcactcgagcacggggacgccacggtggcgcaggcgctcgcgctccgcctcctcggcttcctcgactctcaggcgctagccgcaggcgcgggccccgaggacgccgccttcgtcgcgcccattcgcaccgcggcttccgctcggctagccgccgcctcacgcgcccgcgcctctgactccgaccgtgcagcttttgagcttgcaagaacggatgttggctgtgtttttgcaaatcagggtgacaataatgttgaaagaatccagcgttcgaagtatttccaagctcttcttcagaagtctaaagcaaatgtttctgaacaacggaatgcaacatgtcaagagttctcagttcaatgggctccatgcgtcgatgaaagccaagctgaaatggaaaatgagaagctaagcatcagggcttcaaagttaatgatgcaaacgaagttgacatcattgtatagcaaacaagtcaaaatagtaacaggcggcatgcttacctggacgttgaggaggatgagaaatcccatgggcaattgcagaatgcaaagtggaaacatacagggttcagaagtcctatatttgaggttgcaaattctccatcaagtaatgatgaagctgatgctcctgccaatgagtttacgactgccaagagaatgatggggttggatgttgtgcaaaagccagcacaaaatggtccacaaggtgcttctgtatcaccacaatgtgataacaactatagtacacggaattatggcgtgagaccaagttggaattctcgtcgtggaccacgtggtagttttataccccctatcagaaacaatggaggatcaggtacaacgatctcacgggtcactggtaaaaatgacgagtccatggaagattcaacaaggaaatgtattgaaatgctttgtgctcctgatggtgagcttcctgagaagctgaggaatctagaacctcgccttattgaacatgtcagtaatgaaataatggatagggatcctaatgtccgctggaatgacatagctggtttggaacatgcaaagaagtgtgtgacagagatggtgatatggccactgctacgtcctgatatattccgtggttgtcggtctcctggaagaggtctactgttgtttggacctcctggaacaggcaaaaccatgattggaaaggcaatagctggtgaagccaaggcaacatttttctacatatctgctagttcactaacaagcaaatggattggtgagggtgaaaaacttgttcgggcactttttggtgtggccagttgtcgtcaacctgctgtcatatttgtggatgagatagactcattattatctcagcgcaaatcagatggtgaacatgaatcaagcaggagactgaaaacacagtttctaattgagatggaaggttttgacaccggaaatgaacagatcttacttataggagcaacaaacagaccccaggaactggatgaagcagcgcgcaggcgactcacgaaacgtctatacatcccccttccttcattagaagcacgggcttggataattcgcaatctattggagaaagatggacttttcatgctctcggaagaagaaacaagtgccatctgtaaattaactgaaggctactcaggatctgacatgaaaaacttggtgaaagatgcctcaatgggaccactaagagaggctcttcagacgggcgttgaaatcgcaaagctcagcaaggaggatatgcggccagtgatgctgaaggatttcgagaatgctatgcgggaggtaagaccttctgtttcctcaagcgagctggggacttatgaagaatggaacaggcagtttgggagcctatcgatctagtctgtcggcaggcatcaacgaatacaatcatgtcggcactatagaaaaaggagctcaacgattttagccggaacatgacatgcataacacagctctacagtttaacaatcttttgaagcatcaaaatttgaactgtctatttggagtgctgagtaatatccaggagcctacatatcaaatagtttcaattgtttttaaatcttcacttttctgtaaatttgtttgccttggttttgattgacatatgactagcgcggaagtcaaatactccgttccaaattataaaatgttttagcttttccgcatacagttttttagatgaataaaaaaattaatgtatctataaaaagcaatatgtaaagagatggtacaacattgacaacaaagaagaagatttgtgggtccaactcagacctagaccgtcttcatgggtagtgtaaaatagagaatgcggaactgtagatgatattgtttgatactgtttgtaaagtaaagtttgtttgatactgtttgtaaagtaaagtttgatatataggatgagataggagattggataatagatctgctagagataaccttctcatgctctcgaggatcgaaatagataatgttccatgggatcgaaatagataacgaagag

SEQ ID NO: 34813 - DNA, 4106 bp, Zea Mays
atcatgggtgctgcggacggcgccaccaacgtgtgcttgcaagcgcggcaggagggagcagagccggagatggggcggtgctggtgctgctgccggtacctaaagctgctatgcttggttctcctcccaccgctcaacttatgcctgcaccacagctgctgctccaatctgtccccattctcaccgccgaagattcgctccattttctatggcacctagagttggccttcaggggaagaccgctccacaggccaagaagtcgtggggttccgagattgccagtagcggtggccggagctcctccgatgtttccacgccatatgctacgacgtcttgtgcttccacgccggatgccacaatagacaagattgtgagacaaaggatatatgtaccatatcactgctcctctatcaagcatcagttctcattatgtatatagttttaccattatgacatccattttccttatcaaatgaatatccattttatccctaggaagaatgggataactgttagtattaattaggtatgtgatattcgtgaaaggcactgtgactttactacatgaatatgctcaaatcactttaatataaaacccttcatataacacatggtaacagaactgttacttatatttcctctaaccattctagacgatttaccctacaatctttcagttccttcattaatacttttcttttcaattcatgcctgtgttcttatacaacacacaaatgactacttatgttttatagctccgtctagtttagaatcgtagaatttcctgcccgtgcaagcattagattgttttttggattggttaactaacagttatcgataattatttgttgtagtcactgttgttttcttttttcctttttttacttgattcaaggactgctagtggccgaagggcactgcctcctccttttgcttttacgtgctgcaagaccattgttatgtatttcatgtttattattacttcgaatacggctagaatacaatgttttaacaaggtatggtgatggattactctcggttgttgattaatcttgtagcacgtcctttactaaatattgtgtttaaatggcgaaggatgatggagatacaatgaacacgaaagtcattattatttttagccttggcgctatatgtttgttagcagaggttacatgattcttctttcggaataggcggaaaaatgagagccttcactgttgtttatttagtagaggttgagatcgtatttcaaattattaagaacactattgttttagattctttcacatattcatacgtttgaaaaaaaaccgcattctccatgatgttttggtcatagagaatgtaataaaagtccattaaatagcattgatactcccatactatagtattttcctttgtgttgaggattaatgcaaccacagtgttgtggtttgaacactaatcgagaaggcctctttactgttgtctaggtcagttataactttcatatatgtgcttccatacactttaatgttagtagtacaattgctgttagcagattaaaaacttagttaaacatatgcgtactcacatatttattatttctctttacatcaaggattcccatggacatgtggttgtccattacacagatgttgatacaaatgttcagctcctttttaggtaccgttgctcatgttgcagcccgaggttgtagctacacaggaacacaaattcagcttttgagcttgcaagaacggatgttggctgtgtttttgcaaatcagggtgacaataatgttgaaagaatccagcgttcgaagtatttccaagctcttcttcagaagtctaaagcaaatgtttctgaacaacggaatgcaacatgtcaagagttctcagttcaatgggctccatgcgtcgatgaaagccaagctgaaatggaaaatgagaagctaagcatcagggcttcaaagttaatgatgcaaacgaagttgacatcattgtatagcagtaagtccttgaagacaaatggcgtacccaacaaaaatatgttcaaatcagagaactcatctaaagtgtgtgccggtgttgaaaatagaacaagtcaaaatagtaacaggcggcatgcttacctggacgttgaggaggatgagaaatcccatgggcaattgcagaatgcaaagtggaaacatacagggttcagaagtcctatatttgaggttgcaaattctccatcaagtaatgatgaagctgatgctcctgccaatgagtttacgactgccaagagaatgatggggttggatgttgtgcaaaagccagcacaaaatggtccacaaggtgcttctgtatcaccacaatgtgataacaactatagtacacggaattatggcgtgagaccaagttggaattctcgtcgtggaccacgtggtagttttataccccctatcagaaacaatggaggatcaggtacaacgatctcacgggtcactggtaaaaatgacgagtccatggaagattcaacaaggaaatgtattgaaatgctttgtgctcctgatggtgagcttcctgagaagctgaggaatctagaacctcgccttattgaacatgtcagtaatgaaataatggatagggatcctaatgtccgctggaatgacatagctggtttggaacatgcaaagaagtgtgtgacagagatggtgatatggccactgctacgtcctgatatattccgtggttgtcggtctcctggaagaggtctactgttgtttggacctcctggaacaggcaaaaccatgattggaaaggcaatagctggtgaagccaaggcaacatttttctacatatctgctagttcactaacaagcaaatggattggtgagggtgaaaaacttgttcgggcactttttggtgtggccagttgtcgtcaacctgctgtcatatttgtggatgagatagactcattattatctcagcgcaaatcagatggtgaacatgaatcaagcaggagactgaaaacacagtttctaattgagatggaaggttttgacaccggaaatgaacagatcttacttataggagcaacaaacagaccccaggaactggatgaagcagcgcgcaggcgactcacgaaacgtctatacatcccccttccttcattagaagcacgggcttggataattcgcaatctattggagaaagatggacttttcatgctctcggaagaagaaacaagtgccatctgtaaattaactgaaggctactcaggatctgacatgaaaaacttggtgaaagatgcctcaatgggaccactaagagaggctcttcagacgggcgttgaaatcgcaaagctcagcaaggaggatatgcggccagtgatgctgaaggatttcgagaatgctatgcgggaggtaagaccttctgtttcctcaagcgagctggggacttatgaagaatggaacaggcagtttgggagcctatcgatctagtctgtcggcaggcatcaacgaatacaatcatgtcggcactatagaaaaaggagctcaacgattttagccggaacatgacatgcataacacagctctacagtttaacaatcttttgaagcatcaaaatttgaactgtctatttggagtgctgagtaatatccaggagcctacatatcaaatagtttcaattgtttttaaatcttcacttttctgtaaatttgtttgccttggttttgattgacatatgactagcgcggaagtcaaatactccgttccaaattataaaatgttttagcttttccgcatacagttttttagatgaataaaaaaattaatgtatctataaaaagcaatatgtaaagagatggtacaacattgacaacaaagaagaagatttgtgggtccaactcagacctagaccgtcttcatgggtagtgtaaaatagagaatgcggaactgtagatgatattgtttgatactgtttgtaaagtaaagtttgtttgatactgtttgtaaagtaaagtttgatatataggatgagataggagattggataatagatctgctagagataaccttctcatgctctcgaggatcgaaatagataatgttccatgggatcgaaatagataacgaagag

SEQ ID NO: 34814 - DNA, 4120 bp, Zea Mays
atcatgggtgctgcggacggcgccaccaacgtgtgcttgcaagcgcggcaggagggagcagagccggagatggggcggtgctggtgctgctgccggtacctaaagctgctatgcttggttctcctcccaccgctcaacttatgcctgcaccacagctgctgctccaatctgtccccattctcaccgccgaagattcgctccattttctatggcacctagagttggccttcaggggaagaccgctccacaggccaagaagtcgtggggttccgagattgccagtagcggtggccggagctcctccgatgtttccacgccatatgctacgacgtcttgtgcttccacgccggatgccacaatagacaaggaagaaaggttcagattgtgagacaaaggatatatgtaccatatcactgctcctctatcaagcatcagttctcattatgtatatagttttaccattatgacatccattttccttatcaaatgaatatccattttatccctaggaagaatgggataactgttagtattaattaggtatgtgatattcgtgaaaggcactgtgactttactacatgaatatgctcaaatcactttaatataaaacccttcatataacacatggtaacagaactgttacttatatttcctctaaccattctagacgatttaccctacaatctttcagttccttcattaatacttttcttttcaattcatgcctgtgttcttatacaacacacaaatgactacttatgttttatagctccgtctagtttagaatcgtagaatttcctgcccgtgcaagcattagattgttttttggattggttaactaacagttatcgataattatttgttgtagtcactgttgttttcttttttcctttttttacttgattcaaggactgctagtggccgaagggcactgcctcctccttttgcttttacgtgctgcaagaccattgttatgtatttcatgtttattattacttcgaatacggctagaatacaatgttttaacaaggtatggtgatggattactctcggttgttgattaatcttgtagcacgtcctttactaaatattgtgtttaaatggcgaaggatgatggagatacaatgaacacgaaagtcattattatttttagccttggcgctatatgtttgttagcagaggttacatgattcttctttcggaataggcggaaaaatgagagccttcactgttgtttatttagtagaggttgagatcgtatttcaaattattaagaacactattgttttagattctttcacatattcatacgtttgaaaaaaaaccgcattctccatgatgttttggtcatagagaatgtaataaaagtccattaaatagcattgatactcccatactatagtattttcctttgtgttgaggattaatgcaaccacagtgttgtggtttgaacactaatcgagaaggcctctttactgttgtctaggtcagttataactttcatatatgtgcttccatacactttaatgttagtagtacaattgctgttagcagattaaaaacttagttaaacatatgcgtactcacatatttattatttctctttacatcaaggattcccatggacatgtggttgtccattacacagatgttgatacaaatgttcagctcctttttaggtaccgttgctcatgttgcagcccgaggttgtagctacacaggaacacaaattcagcttttgagcttgcaagaacggatgttggctgtgtttttgcaaatcagggtgacaataatgttgaaagaatccagcgttcgaagtatttccaagctcttcttcagaagtctaaagcaaatgtttctgaacaacggaatgcaacatgtcaagagttctcagttcaatgggctccatgcgtcgatgaaagccaagctgaaatggaaaatgagaagctaagcatcagggcttcaaagttaatgatgcaaacgaagttgacatcattgtatagcagtaagtccttgaagacaaatggcgtacccaacaaaaatatgttcaaatcagagaactcatctaaagtgtgtgccggtgttgaaaatagaacaagtcaaaatagtaacaggcggcatgcttacctggacgttgaggaggatgagaaatcccatgggcaattgcagaatgcaaagtggaaacatacagggttcagaagtcctatatttgaggttgcaaattctccatcaagtaatgatgaagctgatgctcctgccaatgagtttacgactgccaagagaatgatggggttggatgttgtgcaaaagccagcacaaaatggtccacaaggtgcttctgtatcaccacaatgtgataacaactatagtacacggaattatggcgtgagaccaagttggaattctcgtcgtggaccacgtggtagttttataccccctatcagaaacaatggaggatcaggtacaacgatctcacgggtcactggtaaaaatgacgagtccatggaagattcaacaaggaaatgtattgaaatgctttgtgctcctgatggtgagcttcctgagaagctgaggaatctagaacctcgccttattgaacatgtcagtaatgaaataatggatagggatcctaatgtccgctggaatgacatagctggtttggaacatgcaaagaagtgtgtgacagagatggtgatatggccactgctacgtcctgatatattccgtggttgtcggtctcctggaagaggtctactgttgtttggacctcctggaacaggcaaaaccatgattggaaaggcaatagctggtgaagccaaggcaacatttttctacatatctgctagttcactaacaagcaaatggattggtgagggtgaaaaacttgttcgggcactttttggtgtggccagttgtcgtcaacctgctgtcatatttgtggatgagatagactcattattatctcagcgcaaatcagatggtgaacatgaatcaagcaggagactgaaaacacagtttctaattgagatggaaggttttgacaccggaaatgaacagatcttacttataggagcaacaaacagaccccaggaactggatgaagcagcgcgcaggcgactcacgaaacgtctatacatcccccttccttcattagaagcacgggcttggataattcgcaatctattggagaaagatggacttttcatgctctcggaagaagaaacaagtgccatctgtaaattaactgaaggctactcaggatctgacatgaaaaacttggtgaaagatgcctcaatgggaccactaagagaggctcttcagacgggcgttgaaatcgcaaagctcagcaaggaggatatgcggccagtgatgctgaaggatttcgagaatgctatgcgggaggtaagaccttctgtttcctcaagcgagctggggacttatgaagaatggaacaggcagtttgggagcctatcgatctagtctgtcggcaggcatcaacgaatacaatcatgtcggcactatagaaaaaggagctcaacgattttagccggaacatgacatgcataacacagctctacagtttaacaatcttttgaagcatcaaaatttgaactgtctatttggagtgctgagtaatatccaggagcctacatatcaaatagtttcaattgtttttaaatcttcacttttctgtaaatttgtttgccttggttttgattgacatatgactagcgcggaagtcaaatactccgttccaaattataaaatgttttagcttttccgcatacagttttttagatgaataaaaaaattaatgtatctataaaaagcaatatgtaaagagatggtacaacattgacaacaaagaagaagatttgtgggtccaactcagacctagaccgtcttcatgggtagtgtaaaatagagaatgcggaactgtagatgatattgtttgatactgtttgtaaagtaaagtttgtttgatactgtttgtaaagtaaagtttgatatataggatgagataggagattggataatagatctgctagagataaccttctcatgctctcgaggatcgaaatagataatgttccatgggatcgaaatagataacgaagag

SEQ ID NO: 34815 - DNA, 4910 bp, Zea Mays
atcatgggtgctgcggacggcgccaccaacgtgtgcttgcaagcgcggcaggagggagcagagccggagatggggcggtgctggtgctgctgccggtacctaaagctgctatgcttggttctcctcccaccgctcaacttatgcctgcaccacagctgctgctccaatctgtccccattctcaccgccgaagattcgctccattttctatggcacctagagttggccttcaggggaagaccgctccacaggccaagaagtcgtggggttccgagattgccagtagcggtggccggagctcctccgatgtttccacgccatatgctacgacgtcttgtgcttccacgccggatgccacaatagacaagcatattaagactgtcatgtctctcaatctctgcccatacttgaagccaatctggctgatcacaaaagacagtcatcaccctttaccgcacgtagcagcccagtattcgagattaaatcctgaatttgattgttaaaagatatcatcatatcaacgaagctaggccacaagactagcctgatacactgtgatgcctgcaccacttaaggtactactttcctgaagaaagtcaatttgctgacaatgcaatgaccattcccttgcctattcacatggagaaacttgatgttcatatagaaataaatatttctagacacttcaagtaataaaaatacaaaacaacttaagactacgtatgaatggctcaaaataatcattagtcacaaagctgaaaatacaccgtgacctaacttttttaattgtggtctcacagtttgatgtatatagtgcaaaatttctttcaatctttgcttacttcaacttctttctataaagtggacataatctaactttccaggcacatgccctagaagatgagatcttttcttcattgcatgaattcttgagaacctttatttgaattctagtgttaatttcttttcaattgattttctccctgctgatatacatgcttataaagaaaaataaaattatttctttttcacttatatatgtttaaccttttcatgagagcagctttatatattcacgatttcttgttgggttgccaacgttatgtttatattgaccaactttattaggacactgcattctggtatttggcacttaacagttccactttgcaggaagaaaggttcagattgtgagacaaaggatatatgtaccatatcactgctcctctatcaagcatcagttctcattatgtatatagttttaccattatgacatccattttccttatcaaatgaatatccattttatccctaggaagaatgggataactgttagtattaattaggtatgtgatattcgtgaaaggcactgtgactttactacatgaatatgctcaaatcactttaatataaaacccttcatataacacatggtaacagaactgttacttatatttcctctaaccattctagacgatttaccctacaatctttcagttccttcattaatacttttcttttcaattcatgcctgtgttcttatacaacacacaaatgactacttatgttttatagctccgtctagtttagaatcgtagaatttcctgcccgtgcaagcattagattgttttttggattggttaactaacagttatcgataattatttgttgtagtcactgttgttttcttttttcctttttttacttgattcaaggactgctagtggccgaagggcactgcctcctccttttgcttttacgtgctgcaagaccattgttatgtatttcatgtttattattacttcgaatacggctagaatacaatgttttaacaaggtatggtgatggattactctcggttgttgattaatcttgtagcacgtcctttactaaatattgtgtttaaatggcgaaggatgatggagatacaatgaacacgaaagtcattattatttttagccttggcgctatatgtttgttagcagaggttacatgattcttctttcggaataggcggaaaaatgagagccttcactgttgtttatttagtagaggttgagatcgtatttcaaattattaagaacactattgttttagattctttcacatattcatacgtttgaaaaaaaaccgcattctccatgatgttttggtcatagagaatgtaataaaagtccattaaatagcattgatactcccatactatagtattttcctttgtgttgaggattaatgcaaccacagtgttgtggtttgaacactaatcgagaaggcctctttactgttgtctaggtcagttataactttcatatatgtgcttccatacactttaatgttagtagtacaattgctgttagcagattaaaaacttagttaaacatatgcgtactcacatatttattatttctctttacatcaaggattcccatggacatgtggttgtccattacacagatgttgatacaaatgttcagctcctttttaggtaccgttgctcatgttgcagcccgaggttgtagctacacaggaacacaaattcagtgcagcttttgagcttgcaagaacggatgttggctgtgtttttgcaaatcagggtgacaataatgttgaaagaatccagcgttcgaagtatttccaagctcttcttcagaagtctaaagcaaatgtttctgaacaacggaatgcaacatgtcaagagttctcagttcaatgggctccatgcgtcgatgaaagccaagctgaaatggaaaatgagaagctaagcatcagggcttcaaagttaatgatgcaaacgaagttgacatcattgtatagcagtaagtccttgaagacaaatggcgtacccaacaaaaatatgttcaaatcagagaactcatctaaagtgtgtgccggtgttgaaaatagaacaagtcaaaatagtaacaggcggcatgcttacctggacgttgaggaggatgagaaatcccatgggcaattgcagaatgcaaagtggaaacatacagggttcagaagtcctatatttgaggttgcaaattctccatcaagtaatgatgaagctgatgctcctgccaatgagtttacgactgccaagagaatgatggggttggatgttgtgcaaaagccagcacaaaatggtccacaaggtgcttctgtatcaccacaatgtgataacaactatagtacacggaattatggcgtgagaccaagttggaattctcgtcgtggaccacgtggtagttttataccccctatcagaaacaatggaggatcaggtacaacgatctcacgggtcactggtaaaaatgacgagtccatggaagattcaacaaggaaatgtattgaaatgctttgtgctcctgatggtgagcttcctgagaagctgaggaatctagaacctcgccttattgaacatgtcagtaatgaaataatggatagggatcctaatgtccgctggaatgacatagaagtgtgtgacagagatggtgatatggccactgctacgtcctgatatattccgtggttgtcggtctcctggaagaggtctactgttgtttggacctcctggaacaggcaaaaccatgattggaaaggcaatagctggtgaagccaaggcaacatttttctacatatctgctagttcactaacaagcaaatggattggtgagggtgaaaaacttgttcgggcactttttggtgtggccagttgtcgtcaacctgctgtcatatttgtggatgagatagactcattattatctcagcgcaaatcagatggtgaacatgaatcaagcaggagactgaaaacacagtttctaattgagatggaaggttttgacaccggaaatgaacagatcttacttataggagcaacaaacagaccccaggaactggatgaagcagcgcgcaggcgactcacgaaacgtctatacatcccccttccttcattagaagcacgggcttggataattcgcaatctattggagaaagatggacttttcatgctctcggaagaagaaacaagtgccatctgtaaattaactgaaggctactcaggatctgacatgaaaaacttggtgaaagatgcctcaatgggaccactaagagaggctcttcagacgggcgttgaaatcgcaaagctcagcaaggaggatatgcggccagtgatgctgaaggatttcgagaatgctatgcgggaggtaagaccttctgtttcctcaagcgagctggggacttatgaagaatggaacaggcagtttgggagcctatcgatctagtctgtcggcaggcatcaacgaatacaatcatgtcggcactatagaaaaaggagctcaacgattttagccggaacatgacatgcataacacagctctacagtttaacaatcttttgaagcatcaaaatttgaactgtctatttggagtgctgagtaatatccaggagcctacatatcaaatagtttcaattgtttttaaatcttcacttttctgtaaatttgtttgccttggttttgattgacatatgactagcgcggaagtcaaatactccgttccaaattataaaatgttttagcttttccgcatacagttttttagatgaataaaaaaattaatgtatctataaaaagcaatatgtaaagagatggtacaacattgacaacaaagaagaagatttgtgggtccaactcagacctagaccgtcttcatgggtagtgtaaaatagagaatgcggaactgtagatgatattgtttgatactgtttgtaaagtaaagtttgtttgatactgtttgtaaagtaaagtttgatatataggatgagataggagattggataatagatctgctagagataaccttctcatgctctcgaggatcgaaatagataatgttccatgggatcgaaatagataacgaagag

SEQ ID NO: 34816 - DNA, 5317 bp, Zea Mays
atcatgggtgctgcggacggcgccaccaacgtgtgcttgcaagcgcggcaggagggagcagagccggagatggggcggtgctggtgctgctgccggtacctaaagctgctatgcttggttctcctcccaccgctcaacttatgcctgcaccacagctgctgctccaatctgtccccattctcaccgccgaagattcgctccattttctatggcacctagagttggccttcaggggaagaccgctccacaggccaagaagtcgtggggttccgagattgccagtagcggtggccggagctcctccgatgtttccacgccatatgctacgacgtcttgtgcttccacgccggatgccacaatagacaagcatattaagactgtcatgtctctcaatctctgcccatacttgaagccaatctggctgatcacaaaagacagtcatcaccctttaccgcacgtagcagcccagtattcgagattaaatcctgaatttgattgttaaaagatatcatcatatcaacgaagctaggccacaagactagcctgatacactgtgatgcctgcaccacttaaggtactactttcctgaagaaagtcaatttgctgacaatgcaatgaccattcccttgcctattcacatggagaaacttgatgttcatatagaaataaatatttctagacacttcaagtaataaaaatacaaaacaacttaagactacgtatgaatggctcaaaataatcattagtcacaaagctgaaaatacaccgtgacctaacttttttaattgtggtctcacagtttgatgtatatagtgcaaaatttctttcaatctttgcttacttcaacttctttctataaagtggacataatctaactttccaggcacatgccctagaagatgagatcttttcttcattgcatgaattcttgagaacctttatttgaattctagtgttaatttcttttcaattgattttctccctgctgatatacatgcttataaagaaaaataaaattatttctttttcacttatatatgtttaaccttttcatgagagcagctttatatattcacgatttcttgttgggttgccaacgttatgtttatattgaccaactttattaggacactgcattctggtatttggcacttaacagttccactttgcaggaagaaaggttcagattgtgagacaaaggatatatgtaccatatcactgctcctctatcaagcatcagttctcattatgtatatagttttaccattatgacatccattttccttatcaaatgaatatccattttatccctaggaagaatgggataactgttagtattaattaggtatgtgatattcgtgaaaggcactgtgactttactacatgaatatgctcaaatcactttaatataaaacccttcatataacacatggtaacagaactgttacttatatttcctctaaccattctagacgatttaccctacaatctttcagttccttcattaatacttttcttttcaattcatgcctgtgttcttatacaacacacaaatgactacttatgttttatagctccgtctagtttagaatcgtagaatttcctgcccgtgcaagcattagattgttttttggattggttaactaacagttatcgataattatttgttgtagtcactgttgttttcttttttcctttttttacttgattcaaggactgctagtggccgaagggcactgcctcctccttttgcttttacgtgctgcaagaccattgttatgtatttcatgtttattattacttcgaatacggctagaatacaatgttttaacaaggtatggtgatggattactctcggttgttgattaatcttgtagcacgtcctttactaaatattgtgtttaaatggcgaaggatgatggagatacaatgaacacgaaagtcattattatttttagccttggcgctatatgtttgttagcagaggttacatgattcttctttcggaataggcggaaaaatgagagccttcactgttgtttatttagtagaggttgagatcgtatttcaaattattaagaacactattgttttagattctttcacatattcatacgtttgaaaaaaaaccgcattctccatgatgttttggtcatagagaatgtaataaaagtccattaaatagcattgatactcccatactatagtattttcctttgtgttgaggattaatgcaaccacagtgttgtggtttgaacactaatcgagaaggcctctttactgttgtctaggtcagttataactttcatatatgtgcttccatacactttaatgttagtagtacaattgctgttagcagattaaaaacttagttaaacatatgcgtactcacatatttattatttctctttacatcaaggattcccatggacatgtggttgtccattacacagatgttgatacaaatgttcagctcctttttaggtaccgttgctcatgttgcagcccgaggttgtagctacacaggaacacaaattcagctgtttcacggtacatagatagggataagtccgggcgcaaaaaagcgggaaacaaagcgaagttggggcggcgagacgcgagacgcgagacgcgagacgcgagaaatggcggagccgcctttggccgccggctgcacgacaaactggaggagggaggcggatgagcggctgcggcgcctccactccctcctcttcggcgccgacgccgcactcgagcacggggacgccacggtggcgcaggcgctcgcgctccgcctcctcggcttcctcgactctcaggcgctagccgcaggcgcgggccccgaggacgccgccttcgtcgcgcccattcgcaccgcggcttccgctcggctagccgccgcctcacgcgcccgcgcctctgactccgaccgcttttgagcttgcaagaacggatgttggctgtgtttttgcaaatcagggtgacaataatgttgaaagaatccagcgttcgaagtatttccaagctcttcttcagaagtctaaagcaaatgtttctgaacaacggaatgcaacatgtcaagagttctcagttcaatgggctccatgcgtcgatgaaagccaagctgaaatggaaaatgagaagctaagcatcagggcttcaaagttaatgatgcaaacgaagttgacatcattgtatagcagtaagtccttgaagacaaatggcgtacccaacaaaaatatgttcaaatcagagaactcatctaaagtgtgtgccggtgttgaaaatagaacaagtcaaaatagtaacaggcggcatgcttacctggacgttgaggaggatgagaaatcccatgggcaattgcagaatgcaaagtggaaacatacagggttcagaagtcctatatttgaggttgcaaattctccatcaagtaatgatgaagctgatgctcctgccaatgagtttacgactgccaagagaatgatggggttggatgttgtgcaaaagccagcacaaaatggtccacaaggtgcttctgtatcaccacaatgtgataacaactatagtacacggaattatggcgtgagaccaagttggaattctcgtcgtggaccacgtggtagttttataccccctatcagaaacaatggaggatcaggtacaacgatctcacgggtcactggtaaaaatgacgagtccatggaagattcaacaaggaaatgtattgaaatgctttgtgctcctgatggtgagcttcctgagaagctgaggaatctagaacctcgccttattgaacatgtcagtaatgaaataatggatagggatcctaatgtccgctggaatgacatagctggtttggaacatgcaaagaagtgtgtgacagagatggtgatatggccactgctacgtcctgatatattccgtggttgtcggtctcctggaagaggtctactgttgtttggacctcctggaacaggcaaaaccatgattggaaaggcaatagctggtgaagccaaggcaacatttttctacatatctgctagttcactaacaagcaaatggattggtgagggtgaaaaacttgttcgggcactttttggtgtggccagttgtcgtcaacctgctgtcatatttgtggatgagatagactcattattatctcagcgcaaatcagatggtgaacatgaatcaagcaggagactgaaaacacagtttctaattgagatggaaggttttgacaccggaaatgaacagatcttacttataggagcaacaaacagaccccaggaactggatgaagcagcgcgcaggcgactcacgaaacgtctatacatcccccttccttcattagaagcacgggcttggataattcgcaatctattggagaaagatggacttttcatgctctcggaagaagaaacaagtgccatctgtaaattaactgaaggctactcaggatctgacatgaaaaacttggtgaaagatgcctcaatgggaccactaagagaggctcttcagacgggcgttgaaatcgcaaagctcagcaaggaggatatgcggccagtgatgctgaaggatttcgagaatgctatgcgggaggtaagaccttctgtttcctcaagcgagctggggacttatgaagaatggaacaggcagtttgggagcctatcgatctagtctgtcggcaggcatcaacgaatacaatcatgtcggcactatagaaaaaggagctcaacgattttagccggaacatgacatgcataacacagctctacagtttaacaatcttttgaagcatcaaaatttgaactgtctatttggagtgctgagtaatatccaggagcctacatatcaaatagtttcaattgtttttaaatcttcacttttctgtaaatttgtttgccttggttttgattgacatatgactagcgcggaagtcaaatactccgttccaaattataaaatgttttagcttttccgcatacagttttttagatgaataaaaaaattaatgtatctataaaaagcaatatgtaaagagatggtacaacattgacaacaaagaagaagatttgtgggtccaactcagacctagaccgtcttcatgggtagtgtaaaatagagaatgcggaactgtagatgatattgtttgatactgtttgtaaagtaaagtttgtttgatactgtttgtaaagtaaagtttgatatataggatgagataggagattggataatagatctgctagagataaccttctcatgctctcgaggatcgaaatagataatgttccatgggatcgaaatagataacgaagag

SEQ ID NO: 34817 - DNA, 5018 bp, Zea Mays
gcggcatcatgggtgctgcggacggcgccaccaacgtgtgcttggtaggcggcgatggcgacaactgcaagtacggcaccagcctgcagcgcatctcagatctcggatttttttgccatcaatcagcaagcgcggcaggagggagcagagccggagatggggcggtgctggtgctgctgccggtacctaaagctgctatgcttggttctcctcccaccgctcaacttatgcctgcaccacagctgctgctccaatctgtccccattctcaccgccgaagattcgctccattttctatggcacctagagttggccttcaggggaagaccgctccacaggccaagaagtcgtggggttccgagattgccagtagcggtggccggagctcctccgatgtttccacgccatatgctacgacgtcttgtgcttccacgccggatgccacaatagacaagcatattaagactgtcatgtctctcaatctctgcccatacttgaagccaatctggctgatcacaaaagacagtcatcaccctttaccgcacgtagcagcccagtattcgagattaaatcctgaatttgattgttaaaagatatcatcatatcaacgaagctaggccacaagactagcctgatacactgtgatgcctgcaccacttaaggtactactttcctgaagaaagtcaatttgctgacaatgcaatgaccattcccttgcctattcacatggagaaacttgatgttcatatagaaataaatatttctagacacttcaagtaataaaaatacaaaacaacttaagactacgtatgaatggctcaaaataatcattagtcacaaagctgaaaatacaccgtgacctaacttttttaattgtggtctcacagtttgatgtatatagtgcaaaatttctttcaatctttgcttacttcaacttctttctataaagtggacataatctaactttccaggcacatgccctagaagatgagatcttttcttcattgcatgaattcttgagaacctttatttgaattctagtgttaatttcttttcaattgattttctccctgctgatatacatgcttataaagaaaaataaaattatttctttttcacttatatatgtttaaccttttcatgagagcagctttatatattcacgatttcttgttgggttgccaacgttatgtttatattgaccaactttattaggacactgcattctggtatttggcacttaacagttccactttgcaggaagaaaggttcagattgtgagacaaaggatatatgtaccatatcactgctcctctatcaagcatcagttctcattatgtatatagttttaccattatgacatccattttccttatcaaatgaatatccattttatccctaggaagaatgggataactgttagtattaattaggtatgtgatattcgtgaaaggcactgtgactttactacatgaatatgctcaaatcactttaatataaaacccttcatataacacatggtaacagaactgttacttatatttcctctaaccattctagacgatttaccctacaatctttcagttccttcattaatacttttcttttcaattcatgcctgtgttcttatacaacacacaaatgactacttatgttttatagctccgtctagtttagaatcgtagaatttcctgcccgtgcaagcattagattgttttttggattggttaactaacagttatcgataattatttgttgtagtcactgttgttttcttttttcctttttttacttgattcaaggactgctagtggccgaagggcactgcctcctccttttgcttttacgtgctgcaagaccattgttatgtatttcatgtttattattacttcgaatacggctagaatacaatgttttaacaaggtatggtgatggattactctcggttgttgattaatcttgtagcacgtcctttactaaatattgtgtttaaatggcgaaggatgatggagatacaatgaacacgaaagtcattattatttttagccttggcgctatatgtttgttagcagaggttacatgattcttctttcggaataggcggaaaaatgagagccttcactgttgtttatttagtagaggttgagatcgtatttcaaattattaagaacactattgttttagattctttcacatattcatacgtttgaaaaaaaaccgcattctccatgatgttttggtcatagagaatgtaataaaagtccattaaatagcattgatactcccatactatagtattttcctttgtgttgaggattaatgcaaccacagtgttgtggtttgaacactaatcgagaaggcctctttactgttgtctaggtcagttataactttcatatatgtgcttccatacactttaatgttagtagtacaattgctgttagcagattaaaaacttagttaaacatatgcgtactcacatatttattatttctctttacatcaaggattcccatggacatgtggttgtccattacacagatgttgatacaaatgttcagctcctttttaggtaccgttgctcatgttgcagcccgaggttgtagctacacaggaacacaaattcagtgcagcttttgagcttgcaagaacggatgttggctgtgtttttgcaaatcagggtgacaataatgttgaaagaatccagcgttcgaagtatttccaagctcttcttcagaagtctaaagcaaatgtttctgaacaacggaatgcaacatgtcaagagttctcagttcaatgggctccatgcgtcgatgaaagccaagctgaaatggaaaatgagaagctaagcatcagggcttcaaagttaatgatgcaaacgaagttgacatcattgtatagcagtaagtccttgaagacaaatggcgtacccaacaaaaatatgttcaaatcagagaactcatctaaagtgtgtgccggtgttgaaaatagaacaagtcaaaatagtaacaggcggcatgcttacctggacgttgaggaggatgagaaatcccatgggcaattgcagaatgcaaagtggaaacatacagggttcagaagtcctatatttgaggttgcaaattctccatcaagtaatgatgaagctgatgctcctgccaatgagtttacgactgccaagagaatgatggggttggatgttgtgcaaaagccagcacaaaatggtccacaaggtgcttctgtatcaccacaatgtgataacaactatagtacacggaattatggcgtgagaccaagttggaattctcgtcgtggaccacgtggtagttttataccccctatcagaaacaatggaggatcagtattgaaatgctttgtgctcctgatggtgagcttcctgagaagctgaggaatctagaacctcgccttattgaacatgtcagtaatgaaataatggatagggatcctaatgtccgctggaatgacatagctggtttggaacatgcaaagaagtgtgtgacagagatggtgatatggccactgctacgtcctgatatattccgtggttgtcggtctcctggaagaggtctactgttgtttggacctcctggaacaggcaaaaccatgattggaaaggcaatagctggtgaagccaaggcaacatttttctacatatctgctagttcactaacaagcaaatggattggtgagggtgaaaaacttgttcgggcactttttggtgtggccagttgtcgtcaacctgctgtcatatttgtggatgagatagactcattattatctcagcgcaaatcagatggtgaacatgaatcaagcaggagactgaaaacacagtttctaattgagatggaaggttttgacaccggaaatgaacagatcttacttataggagcaacaaacagaccccaggaactggatgaagcagcgcgcaggcgactcacgaaacgtctatacatcccccttccttcattaggtaacactatttcttttcttttatacttatcatttcagaaaccttagtgcaccatggttgtgaagaagcacgggcttggataattcgcaatctattggagaaagatggacttttcatgctctcggaagaagaaacaagtgccatctgtaaattaactgaaggctactcaggatctgacatgaaaaacttggtgaaagatgcctcaatgggaccactaagagaggctcttcagacgggcgttgaaatcgcaaagctcagcaaggaggatatgcggccagtgatgctgaaggatttcgagaatgctatgcgggaggtaagaccttctgtttcctcaagcgagctggggacttatgaagaatggaacaggcagtttgggagcctatcgatctagtctgtcggcaggcatcaacgaatacaatcatgtcggcactatagaaaaaggagctcaacgattttagccggaacatgacatgcataacacagctctacagtttaacaatcttttgaagcatcaaaatttgaactgtctatttggagtgctgagtaatatccaggagcctacatatcaaatagtttcaattgtttttaaatcttcacttttctgtaaatttgtttgccttggttttgattgacatatgactagcgcggaagtcaaatactccgttccaaattataaaatgttttagcttttccgcatacagttttttagatgaataaaaaaattaatgtatctataaaaagcaatatgtaaagagatggtacaacattgacaacaaagaagaagatttgtgggtccaactcagacctagaccgtcttcatgggtagtgtaaaatagagaatgcggaactgtagatgatattgtttgatactgtttgtaaagtaaagtttgtttgatactgtttgtaaagtaaagtttgatatataggatgagataggagattggataatagatctgctagagataaccttctcatgctctcgaggatcgaaatagataatgttccatgggatcgaaatagataacgaagag

SEQ ID NO: 34818 - DNA, 4996 bp, Zea Mays
cgatgcggcatcatgggtgctgcggacggcgccaccaacgtgtgcttggtaggcggcgatggcgacaactgcaagtacggcaccagcctgcagcgcatctcagatctcggatttttttgccatcaatcagcaagcgcggcaggagggagcagagccggagatggggcggtgctggtgctgctgccggtacctaaagctgctatgcttggttctcctcccaccgctcaacttatgcctgcaccacagctgctgctccaatctgtccccattctcaccgccgaagattcgctccattttctatggcacctagagttggccttcaggggaagaccgctccacaggccaagaagtcgtggggttccgagattgccagtagcggtggccggagctcctccgatgtttccacgccatatgctacgacgtcttgtgcttccacgccggatgccacaatagacaagcatattaagactgtcatgtctctcaatctctgcccatacttgaagccaatctggctgatcacaaaagacagtcatcaccctttaccgcacgtagcagcccagtattcgagattaaatcctgaatttgattgttaaaagatatcatcatatcaacgaagctaggccacaagactagcctgatacactgtgatgcctgcaccacttaaggtactactttcctgaagaaagtcaatttgctgacaatgcaatgaccattcccttgcctattcacatggagaaacttgatgttcatatagaaataaatatttctagacacttcaagtaataaaaatacaaaacaacttaagactacgtatgaatggctcaaaataatcattagtcacaaagctgaaaatacaccgtgacctaacttttttaattgtggtctcacagtttgatgtatatagtgcaaaatttctttcaatctttgcttacttcaacttctttctataaagtggacataatctaactttccaggcacatgccctagaagatgagatcttttcttcattgcatgaattcttgagaacctttatttgaattctagtgttaatttcttttcaattgattttctccctgctgatatacatgcttataaagaaaaataaaattatttctttttcacttatatatgtttaaccttttcatgagagcagctttatatattcacgatttcttgttgggttgccaacgttatgtttatattgaccaactttattaggacactgcattctggtatttggcacttaacagttccactttgcaggaagaaaggttcagattgtgagacaaaggatatatgtaccatatcactgctcctctatcaagcatcagttctcattatgtatatagttttaccattatgacatccattttccttatcaaatgaatatccattttatccctaggaagaatgggataactgttagtattaattaggtatgtgatattcgtgaaaggcactgtgactttactacatgaatatgctcaaatcactttaatataaaacccttcatataacacatggtaacagaactgttacttatatttcctctaaccattctagacgatttaccctacaatctttcagttccttcattaatacttttcttttcaattcatgcctgtgttcttatacaacacacaaatgactacttatgttttatagctccgtctagtttagaatcgtagaatttcctgcccgtgcaagcattagattgttttttggattggttaactaacagttatcgataattatttgttgtagtcactgttgttttcttttttcctttttttacttgattcaaggactgctagtggccgaagggcactgcctcctccttttgcttttacgtgctgcaagaccattgttatgtatttcatgtttattattacttcgaatacggctagaatacaatgttttaacaaggtatggtgatggattactctcggttgttgattaatcttgtagcacgtcctttactaaatattgtgtttaaatggcgaaggatgatggagatacaatgaacacgaaagtcattattatttttagccttggcgctatatgtttgttagcagaggttacatgattcttctttcggaataggcggaaaaatgagagccttcactgttgtttatttagtagaggttgagatcgtatttcaaattattaagaacactattgttttagattctttcacatattcatacgtttgaaaaaaaaccgcattctccatgatgttttggtcatagagaatgtaataaaagtccattaaatagcattgatactcccatactatagtattttcctttgtgttgaggattaatgcaaccacagtgttgtggtttgaacactaatcgagaaggcctctttactgttgtctaggtcagttataactttcatatatgtgcttccatacactttaatgttagtagtacaattgctgttagcagattaaaaacttagttaaacatatgcgtactcacatatttattatttctctttacatcaaggattcccatggacatgtggttgtccattacacagatgttgatacaaatgttcagctcctttttaggtaccgttgctcatgttgcagcccgaggttgtagctacacaggaacacaaattcagcttttgagcttgcaagaacggatgttggctgtgtttttgcaaatcagggtgacaataatgttgaaagaatccagcgttcgaagtatttccaagctcttcttcagaagtctaaagcaaatgtttctgaacaacggaatgcaacatgtcaagagttctcagttcaatgggctccatgcgtcgatgaaagccaagctgaaatggaaaatgagaagctaagcatcagggcttcaaagttaatgatgcaaacgaagttgacatcattgtatagcagtaagtccttgaagacaaatggcgtacccaacaaaaatatgttcaaatcagagaactcatctaaagtgtgtgccggtgttgaaaatagaacaagtcaaaatagtaacaggcggcatgcttacctggacgttgaggaggatgagaaatcccatgggcaattgcagaatgcaaagtggaaacatacagggttcagaagtcctatatttgaggttgcaaattctccatcaagtaatgatgaagctgatgctcctgccaatgagtttacgactgccaagagaatgatggggttggatgttgtgcaaaagccagcacaaaatggtccacaaggtgcttctgtatcaccacaatgtgataacaactatagtacacggaattatggcgtgagaccaagttggaattctcgtcgtggaccacgtggtagttttataccccctatcagaaacaatggaggatcaggtacaacgatctcacgggtcactggtaaaaatgacgagtccatggaagattcaacaaggaaatgtattgaaatgctttgtgctcctgatggtgagcttcctgagaagctgaggaatctagaacctcgccttattgaacatgtcagtaatgaaataatggatagggatcctaatgtccgctggaatgacatagaagtgtgtgacagagatggtgatatggccactgctacgtcctgatatattccgtggttgtcggtctcctggaagaggtctactgttgtttggacctcctggaacaggcaaaaccatgattggaaaggcaatagctggtgaagccaaggcaacatttttctacatatctgctagttcactaacaagcaaatggattggtgagggtgaaaaacttgttcgggcactttttggtgtggccagttgtcgtcaacctgctgtcatatttgtggatgagatagactcattattatctcagcgcaaatcagatggtgaacatgaatcaagcaggagactgaaaacacagtttctaattgagatggaaggttttgacaccggaaatgaacagatcttacttataggagcaacaaacagaccccaggaactggatgaagcagcgcgcaggcgactcacgaaacgtctatacatcccccttccttcattagaagcacgggcttggataattcgcaatctattggagaaagatggacttttcatgctctcggaagaagaaacaagtgccatctgtaaattaactgaaggctactcaggatctgacatgaaaaacttggtgaaagatgcctcaatgggaccactaagagaggctcttcagacgggcgttgaaatcgcaaagctcagcaaggaggatatgcggccagtgatgctgaaggatttcgagaatgctatgcgggaggtaagaccttctgtttcctcaagcgagctggggacttatgaagaatggaacaggcagtttgggagcctatcgatctagtctgtcggcaggcatcaacgaatacaatcatgtcggcactatagaaaaaggagctcaacgattttagccggaacatgacatgcataacacagctctacagtttaacaatcttttgaagcatcaaaatttgaactgtctatttggagtgctgagtaatatccaggagcctacatatcaaatagtttcaattgtttttaaatcttcacttttctgtaaatttgtttgccttggttttgattgacatatgactagcgcggaagtcaaatactccgttccaaattataaaatgttttagcttttccgcatacagttttttagatgaataaaaaaattaatgtatctataaaaagcaatatgtaaagagatggtacaacattgacaacaaagaagaagatttgtgggtccaactcagacctagaccgtcttcatgggtagtgtaaaatagagaatgcggaactgtagatgatattgtttgatactgtttgtaaagtaaagtttgtttgatactgtttgtaaagtaaagtttgatatataggatgagataggagattggataatagatctgctagagataaccttctcatgctctcgaggatcgaaatagataatgttccatgggatcgaaatagataacgaagag

SEQ ID NO: 34819 - DNA, 4940 bp, Zea Mays
ccgatgcggcatcatgggtgctgcggacggcgccaccaacgtgtgcttgcaagcgcggcaggagggagcagagccggagatggggcggtgctggtgctgctgccggtacctaaagctgctatgcttggttctcctcccaccgctcaacttatgcctgcaccacagctgctgctccaatctgtccccattctcaccgccgaagattcgctccattttctatggcacctagagttggccttcaggggaagaccgctccacaggccaagaagtcgtggggttccgagattgccagtagcggtggccggagctcctccgatgtttccacgccatatgctacgacgtcttgtgcttccacgccggatgccacaatagacaagcatattaagactgtcatgtctctcaatctctgcccatacttgaagccaatctggctgatcacaaaagacagtcatcaccctttaccgcacgtagcagcccagtattcgagattaaatcctgaatttgattgttaaaagatatcatcatatcaacgaagctaggccacaagactagcctgatacactgtgatgcctgcaccacttaaggtactactttcctgaagaaagtcaatttgctgacaatgcaatgaccattcccttgcctattcacatggagaaacttgatgttcatatagaaataaatatttctagacacttcaagtaataaaaatacaaaacaacttaagactacgtatgaatggctcaaaataatcattagtcacaaagctgaaaatacaccgtgacctaacttttttaattgtggtctcacagtttgatgtatatagtgcaaaatttctttcaatctttgcttacttcaacttctttctataaagtggacataatctaactttccaggcacatgccctagaagatgagatcttttcttcattgcatgaattcttgagaacctttatttgaattctagtgttaatttcttttcaattgattttctccctgctgatatacatgcttataaagaaaaataaaattatttctttttcacttatatatgtttaaccttttcatgagagcagctttatatattcacgatttcttgttgggttgccaacgttatgtttatattgaccaactttattaggacactgcattctggtatttggcacttaacagttccactttgcaggaagaaaggttcagattgtgagacaaaggatatatgtaccatatcactgctcctctatcaagcatcagttctcattatgtatatagttttaccattatgacatccattttccttatcaaatgaatatccattttatccctaggaagaatgggataactgttagtattaattaggtatgtgatattcgtgaaaggcactgtgactttactacatgaatatgctcaaatcactttaatataaaacccttcatataacacatggtaacagaactgttacttatatttcctctaaccattctagacgatttaccctacaatctttcagttccttcattaatacttttcttttcaattcatgcctgtgttcttatacaacacacaaatgactacttatgttttatagctccgtctagtttagaatcgtagaatttcctgcccgtgcaagcattagattgttttttggattggttaactaacagttatcgataattatttgttgtagtcactgttgttttcttttttcctttttttacttgattcaaggactgctagtggccgaagggcactgcctcctccttttgcttttacgtgctgcaagaccattgttatgtatttcatgtttattattacttcgaatacggctagaatacaatgttttaacaaggtatggtgatggattactctcggttgttgattaatcttgtagcacgtcctttactaaatattgtgtttaaatggcgaaggatgatggagatacaatgaacacgaaagtcattattatttttagccttggcgctatatgtttgttagcagaggttacatgattcttctttcggaataggcggaaaaatgagagccttcactgttgtttatttagtagaggttgagatcgtatttcaaattattaagaacactattgttttagattctttcacatattcatacgtttgaaaaaaaaccgcattctccatgatgttttggtcatagagaatgtaataaaagtccattaaatagcattgatactcccatactatagtattttcctttgtgttgaggattaatgcaaccacagtgttgtggtttgaacactaatcgagaaggcctctttactgttgtctaggtcagttataactttcatatatgtgcttccatacactttaatgttagtagtacaattgctgttagcagattaaaaacttagttaaacatatgcgtactcacatatttattatttctctttacatcaaggattcccatggacatgtggttgtccattacacagatgttgatacaaatgttcagctcctttttaggtaccgttgctcatgttgcagcccgaggttgtagctacacaggaacacaaattcagtgcagcttttgagcttgcaagaacggatgttggctgtgtttttgcaaatcagggtgacaataatgttgaaagaatccagcgttcgaagtatttccaagctcttcttcagaagtctaaagcaaatgtttctgaacaacggaatgcaacatgtcaagagttctcagttcaatgggctccatgcgtcgatgaaagccaagctgaaatggaaaatgagaagctaagcatcagggcttcaaagttaatgatgcaaacgaagttgacatcattgtatagcagtaagtccttgaagacaaatggcgtacccaacaaaaatatgttcaaatcagagaactcatctaaagtgtgtgccggtgttgaaaatagaacaagtcaaaatagtaacaggcggcatgcttacctggacgttgaggaggatgagaaatcccatgggcaattgcagaatgcaaagtggaaacatacagggttcagaagtcctatatttgaggttgcaaattctccatcaagtaatgatgaagctgatgctcctgccaatgagtttacgactgccaagagaatgatggggttggatgttgtgcaaaagccagcacaaaatggtccacaaggtgcttctgtatcaccacaatgtgataacaactatagtacacggaattatggcgtgagaccaagttggaattctcgtcgtggaccacgtggtagttttataccccctatcagaaacaatggaggatcaggtacaacgatctcacgggtcactggtaaaaatgacgagtccatggaagattcaacaaggaaatgtattgaaatgctttgtgctcctgatggtgagcttcctgagaagctgaggaatctagaacctcgccttattgaacatgtcagtaatgaaataatggatagggatcctaatgtccgctggaatgacatagctggtttggaacatgcaaagaagtgtgtgacagagatggtgatatggccactgctacgtcctgatatattccgtggttgtcggtctcctggaagaggtctactgttgtttggacctcctggaacaggcaaaaccatgattggaaaggcaatagctggtgaagccaaggcaacatttttctacatatctgctagttcactaacaagcaaatggattggtgagggtgaaaaacttgttcgggcactttttggtgtggccagttgtcgtcaacctgctgtcatatttgtggatgagatagactcattattatctcagcgcaaatcagatggtgaacatgaatcaagcaggagactgaaaacacagtttctaattgagatggaaggttttgacaccggaaatgaacagatcttacttataggagcaacaaacagaccccaggaactggatgaagcagcgcgcaggcgactcacgaaacgtctatacatcccccttccttcattagaagcacgggcttggataattcgcaatctattggagaaagatggacttttcatgctctcggaagaagaaacaagtgccatctgtaaattaactgaaggctactcaggatctgacatgaaaaacttggtgaaagatgcctcaatgggaccactaagagaggctcttcagacgggcgttgaaatcgcaaagctcagcaaggaggatatgcggccagtgatgctgaaggatttcgagaatgctatgcgggaggtaagaccttctgtttcctcaagcgagctggggacttatgaagaatggaacaggcagtttgggagcctatcgatctagtctgtcggcaggcatcaacgaatacaatcatgtcggcactatagaaaaaggagctcaacgattttagccggaacatgacatgcataacacagctctacagtttaacaatcttttgaagcatcaaaatttgaactgtctatttggagtgctgagtaatatccaggagcctacatatcaaatagtttcaattgtttttaaatcttcacttttctgtaaatttgtttgccttggttttgattgacatatgactagcgcggaagtcaaatactccgttccaaattataaaatgttttagcttttccgcatacagttttttagatgaataaaaaaattaatgtatctataaaaagcaatatgtaaagagatggtacaacattgacaacaaagaagaagatttgtgggtccaactcagacctagaccgtcttcatgggtagtgtaaaatagagaatgcggaactgtagatgatattgtttgatactgtttgtaaagtaaagtttgtttgatactgtttgtaaagtaaagtttgatatataggatgagataggagattggataatagatctgctagagataaccttctcatgctctcgaggatcgaaatagataatgttccatgggatcgaaatagataacgaagag

SEQ ID NO: 34820 - DNA, 4380 bp, Zea Mays
ctacatccgtgtggcacgacgctcatctccgcgacgtgctgctccgatgcggcatcatgggtgctgcggacggcgccaccaacgtgtgcttgcaagcgcggcaggagggagcagagccggagatggggcggtgctggtgctgctgccggtacctaaagctgctatgcttggttctcctcccaccgctcaacttatgcctgcaccacagctgctgctccaatctgtccccattctcaccgccgaagattcgctccattttctatggcacctagagttggccttcaggggaagaccgctccacaggccaagaagtcgtggggttccgagattgccagtagcggtggccggagctcctccgatgtttccacgccatatgctacgacgtcttgtgcttccacgccggatgccacaatagacaagcatattaagactgtcatgtctctcaatctctgcccatacttgaagccaatctggctgatcacaaaagacagtcatcaccctttaccgcacgtagcagcccagtattcgagattaaatcctgaatttgattgttaaaagatatcatcatatcaacgaagctaggccacaagactagcctgatacactgtgatgcctgcaccacttaaggaagaaaggttcagattgtgagacaaaggatatatgtaccatatcactgctcctctatcaagcatcagttctcattatgtatatagttttaccattatgacatccattttccttatcaaatgaatatccattttatccctaggaagaatgggataactgttagtattaattaggtatgtgatattcgtgaaaggcactgtgactttactacatgaatatgctcaaatcactttaatataaaacccttcatataacacatggtaacagaactgttacttatatttcctctaaccattctagacgatttaccctacaatctttcagttccttcattaatacttttcttttcaattcatgcctgtgttcttatacaacacacaaatgactacttatgttttatagctccgtctagtttagaatcgtagaatttcctgcccgtgcaagcattagattgttttttggattggttaactaacagttatcgataattatttgttgtagtcactgttgttttcttttttcctttttttacttgattcaaggactgctagtggccgaagggcactgcctcctccttttgcttttacgtgctgcaagaccattgttatgtatttcatgtttattattacttcgaatacggctagaatacaatgttttaacaaggtatggtgatggattactctcggttgttgattaatcttgtagcacgtcctttactaaatattgtgtttaaatggcgaaggatgatggagatacaatgaacacgaaagtcattattatttttagccttggcgctatatgtttgttagcagaggttacatgattcttctttcggaataggcggaaaaatgagagccttcactgttgtttatttagtagaggttgagatcgtatttcaaattattaagaacactattgttttagattctttcacatattcatacgtttgaaaaaaaaccgcattctccatgatgttttggtcatagagaatgtaataaaagtccattaaatagcattgatactcccatactatagtattttcctttgtgttgaggattaatgcaaccacagtgttgtggtttgaacactaatcgagaaggcctctttactgttgtctaggtcagttataactttcatatatgtgcttccatacactttaatgttagtagtacaattgctgttagcagattaaaaacttagttaaacatatgcgtactcacatatttattatttctctttacatcaaggattcccatggacatgtggttgtccattacacagatgttgatacaaatgttcagctcctttttaggtaccgttgctcatgttgcagcccgaggttgtagctacacaggaacacaaattcagcttttgagcttgcaagaacggatgttggctgtgtttttgcaaatcagggtgacaataatgttgaaagaatccagcgttcgaagtatttccaagctcttcttcagaagtctaaagcaaatgtttctgaacaacggaatgcaacatgtcaagagttctcagttcaatgggctccatgcgtcgatgaaagccaagctgaaatggaaaatgagaagctaagcatcagggcttcaaagttaatgatgcaaacgaagttgacatcattgtatagcagtaagtccttgaagacaaatggcgtacccaacaaaaatatgttcaaatcagagaactcatctaaagtgtgtgccggtgttgaaaatagaacaagtcaaaatagtaacaggcggcatgcttacctggacgttgaggaggatgagaaatcccatgggcaattgcagaatgcaaagtggaaacatacagggttcagaagtcctatatttgaggttgcaaattctccatcaagtaatgatgaagctgatgctcctgccaatgagtttacgactgccaagagaatgatggggttggatgttgtgcaaaagccagcacaaaatggtccacaaggtgcttctgtatcaccacaatgtgataacaactatagtacacggaattatggcgtgagaccaagttggaattctcgtcgtggaccacgtggtagttttataccccctatcagaaacaatggaggatcaggtacaacgatctcacgggtcactggtaaaaatgacgagtccatggaagattcaacaaggaaatgtattgaaatgctttgtgctcctgatggtgagcttcctgagaagctgaggaatctagaacctcgccttattgaacatgtcagtaatgaaataatggatagggatcctaatgtccgctggaatgacatagctggtttggaacatgcaaagaagtgtgtgacagagatggtgatatggccactgctacgtcctgatatattccgtggttgtcggtctcctggaagaggtctactgttgtttggacctcctggaacaggcaaaaccatgattggaaaggcaatagctggtgaagccaaggcaacatttttctacatatctgctagttcactaacaagcaaatggattggtgagggtgaaaaacttgttcgggcactttttggtgtggccagttgtcgtcaacctgctgtcatatttgtggatgagatagactcattattatctcagcgcaaatcagatggtgaacatgaatcaagcaggagactgaaaacacagtttctaattgagatggaaggttttgacaccggaaatgaacagatcttacttataggagcaacaaacagaccccaggaactggatgaagcagcgcgcaggcgactcacgaaacgtctatacatcccccttccttcattagaagcacgggcttggataattcgcaatctattggagaaagatggacttttcatgctctcggaagaagaaacaagtgccatctgtaaattaactgaaggctactcaggatctgacatgaaaaacttggtgaaagatgcctcaatgggaccactaagagaggctcttcagacgggcgttgaaatcgcaaagctcagcaaggaggatatgcggccagtgatgctgaaggatttcgagaatgctatgcgggaggtaagaccttctgtttcctcaagcgagctggggacttatgaagaatggaacaggcagtttgggagcctatcgatctagtctgtcggcaggcatcaacgaatacaatcatgtcggcactatagaaaaaggagctcaacgattttagccggaacatgacatgcataacacagctctacagtttaacaatcttttgaagcatcaaaatttgaactgtctatttggagtgctgagtaatatccaggagcctacatatcaaatagtttcaattgtttttaaatcttcacttttctgtaaatttgtttgccttggttttgattgacatatgactagcgcggaagtcaaatactccgttccaaattataaaatgttttagcttttccgcatacagttttttagatgaataaaaaaattaatgtatctataaaaagcaatatgtaaagagatggtacaacattgacaacaaagaagaagatttgtgggtccaactcagacctagaccgtcttcatgggtagtgtaaaatagagaatgcggaactgtagatgatattgtttgatactgtttgtaaagtaaagtttgtttgatactgtttgtaaagtaaagtttgatatataggatgagataggagattggataatagatctgctagagataaccttctcatgctctcgaggatcgaaatagataatgttccatgggatcgaaatagataacgaagag

SEQ ID NO: 34821 - DNA, 2863 bp, Zea Mays
atcatgggtgctgcggacggcgccaccaacgtgtgcttgcaagcgcggcaggagggagcagagccggagatggggcggtgctggtgctgctgccggtacctaaagctgctatgcttggttctcctcccaccgctcaacttatgcctgcaccacagctgctgctccaatctgtccccattctcaccgccgaagattcgctccattttctatggcacctagagttggccttcaggggaagaccgctccacaggccaagaagtcgtggggttccgagattgccagtagcggtggccggagctcctccgatgtttccacgccatatgctacgacgtcttgtgcttccacgccggatgccacaatagacaagcatattaagactgtcatgtctctcaatctctgcccatacttgaagccaatctggctgatcacaaaagacagtcatcaccctttaccgcacgtagcagcccagtattcgagattaaatcctgaatttgattgttaaaagatatcatcatatcaacgaagctaggccacaagactagcctgatacactgtgatgcctgcaccacttaaggaagaaaggttcagattgtgagacaaaggatatatgtaccatatcactgctcctctatcaagcatcagttctcattatgtatatagttttaccattatgacatccattttccttatcaaatgaatatccattttatccctaggaagaatgggataactgttagtattaattaggtatgtgatattcgtgaaaggcactgtgactttactacatgaatatgctcaaatcactttaatataaaacccttcatataacacatggtaacagaactgttacttatatttcctctaaccattctagacgatttaccctacaatctttcagttccttcattaatacttttcttttcaattcatgcctgtgttcttatacaacacacaaatgactacttatgttttatagctccgtctagtttagaatcgtagaatttcctgcccgtgcaagcattagattgttttttggattggttaactaacagttatcgataattatttgttgtagtcactgttgttttcttttttcctttttttacttgattcaaggactgctagtggccgaagggcactgcctcctccttttgcttttacgtgctgcaagaccattgttatgtatttcatgtttattattacttcgaatacggctagaatacaatgttttaacaaggtatggtgatggattactctcggttgttgattaatcttgtagcacgtcctttactaaatattgtgtttaaatggcgaaggatgatggagatacaatgaacacgaaagtcattattatttttagccttggcgctatatgtttgttagcagaggttacatgattcttctttcggaataggcggaaaaatgagagccttcactgttgtttatttagtagaggttgagatcgtatttcaaattattaagaacactattgttttagattctttcacatattcatacgtttgaaaaaaaaccgcattctccatgatgttttggtcatagagaatgtaataaaagtccattaaatagcattgatactcccatactatagtattttcctttgtgttgaggattaatgcaaccacagtgttgtggtttgaacactaatcgagaaggcctctttactgttgtctaggtcagttataactttcatatatgtgcttccatacactttaatgttagtagtacaattgctgttagcagattaaaaacttagttaaacatatgcgtactcacatatttattatttctctttacatcaaggattcccatggacatgtggttgtccattacacagatgttgatacaaatgttcagctcctttttaggtaccgttgctcatgttgcagcccgaggttgtagctacacaggaacacaaattcagcttttgagcttgcaagaacggatgttggctgtgtttttgcaaatcagggtgacaataatgttgaaagaatccagcgttcgaagtatttccaagctcttcttcagaagtctaaagcaaatgtttctgaacaacggaatgcaacatgtcaagagttctcagttcaatgggctccatgcgtcgatgaaagccaagctgaaatggaaaatgagaagctaagcatcagggcttcaaagttaatgatgcaaacgaagttgacatcattgtatagcagtaagtccttgaagacaaatggcgtacccaacaaaaatatgttcaaatcagagaactcatctaaagtgtgtgccggtgttgaaaatagaacaagtcaaaatagtaacaggcggcatgcttacctggacgttgaggaggatgagaaatcccatgggcaattgcagaatgcaaagtggaaacatacagggttcagaagtcctatatttgaggttgcaaattctccatcaagtaatgatgaagctgatgctcctgccaatgagtttacgactgccaagagaatgatgatcttggttaaatgagatagttcttcaaacacgatccaaactcagagattctcagttcgcgccaaagtgaggcaatcggggatcaggacagggtcaacacaagcactgttagtcggcgcgtctagccaaaccaatgccgagctaggcgtacaatggtgccgtcccccttagcacggcggatgcgacggtgcgcctcacgcaggtttgaatgcgcgacgacgcaatcatggggtcgggtcacacggatccggctgctcgcattgcacctaggatttcaccctagagatgccggcgacgatgtgctgagaagaaaggtggagatttaatagtatcatggcccaactcgacacgattcaaagtgggtctg

SEQ ID NO: 34822 - DNA, 3383 bp, Zea Mays
ccgatgcggcatcatgggtgctgcggacggcgccaccaacgtgtgcttgcaagcgcggcaggagggagcagagccggagatggggcggtgctggtgctgctgccggtacctaaagctgctatgcttggttctcctcccaccgctcaacttatgcctgcaccacagctgctgctccaatctgtccccattctcaccgccgaagattcgctccattttctatggcacctagagttggccttcaggggaagaccgctccacaggccaagaagtcgtggggttccgagattgccagtagcggtggccggagctcctccgatgtttccacgccatatgctacgacgtcttgtgcttccacgccggatgccacaatagacaagcatattaagactgtcatgtctctcaatctctgcccatacttgaagccaatctggctgatcacaaaagacagtcatcaccctttaccgcacgtagcagcccagtattcgagattaaatcctgaatttgattgttaaaagatatcatcatatcaacgaagctaggccacaagactagcctgatacactgtgatgcctgcaccacttaaggtactactttcctgaagaaagtcaatttgctgacaatgcaatgaccattcccttgcctattcacatggagaaacttgatgttcatatagaaataaatatttctagacacttcaagtaataaaaatacaaaacaacttaagactacgtatgaatggctcaaaataatcattagtcacaaagctgaaaatacaccgtgacctaacttttttaattgtggtctcacagtttgatgtatatagtgcaaaatttctttcaatctttgcttacttcaacttctttctataaagtggacataatctaactttccaggcacatgccctagaagatgagatcttttcttcattgcatgaattcttgagaacctttatttgaattctagtgttaatttcttttcaattgattttctccctgctgatatacatgcttataaagaaaaataaaattatttctttttcacttatatatgtttaaccttttcatgagagcagctttatatattcacgatttcttgttgggttgccaacgttatgtttatattgaccaactttattaggacactgcattctggtatttggcacttaacagttccactttgcaggaagaaaggttcagattgtgagacaaaggatatatgtaccatatcactgctcctctatcaagcatcagttctcattatgtatatagttttaccattatgacatccattttccttatcaaatgaatatccattttatccctaggaagaatgggataactgttagtattaattaggtatgtgatattcgtgaaaggcactgtgactttactacatgaatatgctcaaatcactttaatataaaacccttcatataacacatggtaacagaactgttacttatatttcctctaaccattctagacgatttaccctacaatctttcagttccttcattaatacttttcttttcaattcatgcctgtgttcttatacaacacacaaatgactacttatgttttatagctccgtctagtttagaatcgtagaatttcctgcccgtgcaagcattagattgttttttggattggttaactaacagttatcgataattatttgttgtagtcactgttgttttcttttttcctttttttacttgattcaaggactgctagtggccgaagggcactgcctcctccttttgcttttacgtgctgcaagaccattgttatgtatttcatgtttattattacttcgaatacggctagaatacaatgttttaacaaggtatggtgatggattactctcggttgttgattaatcttgtagcacgtcctttactaaatattgtgtttaaatggcgaaggatgatggagatacaatgaacacgaaagtcattattatttttagccttggcgctatatgtttgttagcagaggttacatgattcttctttcggaataggcggaaaaatgagagccttcactgttgtttatttagtagaggttgagatcgtatttcaaattattaagaacactattgttttagattctttcacatattcatacgtttgaaaaaaaaccgcattctccatgatgttttggtcatagagaatgtaataaaagtccattaaatagcattgatactcccatactatagtattttcctttgtgttgaggattaatgcaaccacagtgttgtggtttgaacactaatcgagaaggcctctttactgttgtctaggtcagttataactttcatatatgtgcttccatacactttaatgttagtagtacaattgctgttagcagattaaaaacttagttaaacatatgcgtactcacatatttattatttctctttacatcaaggattcccatggacatgtggttgtccattacacagatgttgatacaaatgttcagctcctttttaggtaccgttgctcatgttgcagcccgaggttgtagctacacaggaacacaaattcagcttttgagcttgcaagaacggatgttggctgtgtttttgcaaatcagggtgacaataatgttgaaagaatccagcgttcgaagtatttccaagctcttcttcagaagtctaaagcaaatgtttctgaacaacggaatgcaacatgtcaagagttctcagttcaatgggctccatgcgtcgatgaaagccaagctgaaatggaaaatgagaagctaagcatcagggcttcaaagttaatgatgcaaacgaagttgacatcattgtatagcaaacaagtcaaaatagtaacaggcggcatgcttacctggacgttgaggaggatgagaaatcccatgggcaattgcagaatgcaaagtggaaacatacagggttcagaagtcctatatttgaggttgcaaattctccatcaagtaatgatgaagctgatgctcctgccaatgagtttacgactgccaagagaatgatgatcttggttaaatgagatagttcttcaaacacgatccaaactcagagattctcagttcgcgccaaagtgaggcaatcggggatcaggacagggtcaacacaagcactgttagtcggcgcgtctagccaaaccaatgccgagctaggcgtacaatggtgccgtcccccttagcacggcggatgcgacggtgcgcctcacgcaggtttgaatgcgcgacgacgcaatcatggggtcgggtcacacggatccggctgctcgcattgcacctaggatttcaccctagagatgccggcgacgatgtgctgagaagaaaggtggagatttaatagtatcatggcccaactcgacacgattcaaagtgggtctg

SEQ ID NO: 34823 - DNA, 2355 bp, Zea Mays
atcatgggtgctgcggacggcgccaccaacgtgtgcttgcaagcgcggcaggagggagcagagccggagatggggcggtgctggtgctgctgccggtacctaaagctgctatgcttggttctcctcccaccgctcaacttatgcctgcaccacagctgctgctccaatctgtccccattctcaccgccgaagattcgctccattttctatggcacctagagttggccttcaggggaagaccgctccacaggccaagaagtcgtggggttccgagattgccagtagcggtggccggagctcctccgatgtttccacgccatatgctacgacgtcttgtgcttccacgccggatgccacaatagacaagcatattaagactgtcatgtctctcaatctctgcccatacttgaagccaatctggctgatcacaaaagacagtcatcaccctttaccgcacgtagcagcccagtattcgagattaaatcctgaatttgattgttaaaagatatcatcatatcaacgaagctaggccacaagactagcctgatacactgtgatgcctgcaccacttaaggtactactttcctgaagaaagtcaatttgctgacaatgcaatgaccattcccttgcctattcacatggagaaacttgatgttcatatagaaataaatatttctagacacttcaagtaataaaaatacaaaacaacttaagactacgtatgaatggctcaaaataatcattagtcacaaagctgaaaatacaccgtgacctaacttttttaattgtggtctcacagtttgatgtatatagtgcaaaatttctttcaatctttgcttacttcaacttctttctataaagtggacataatctaactttccaggcacatgccctagaagatgagatcttttcttcattgcatgaattcttgagaacctttatttgaattctagtgttaatttcttttcaattgattttctccctgctgatatacatgcttataaagaaaaataaaattatttctttttcacttatatatgtttaaccttttcatgagagcagctttatatattcacgatttcttgttgggttgccaacgttatgtttatattgaccaactttattaggacactgcattctggtatttggcacttaacagttccactttgcaggaagaaaggttcagattgtgagacaaaggatatatgtaccatatcactgctcctctatcaagcatcagttctcattatgtatatagttttaccattatgacatccattttccttatcaaatgaatatccattttatccctaggaagaatgggataactgttagtattaattaggtatgtgatattcgtgaaaggcactgtgactttactacatgaatatgctcaaatcactttaatataaaacccttcatataacacatggtaacagaactgttacttatatttcctctaaccattctagacgatttaccctacaatctttcagttccttcattaatacttttcttttcaattcatgcctgtgttcttatacaacacacaaatgactacttatgttttatagctccgtctagtttagaatcgtagaatttcctgcccgtgcaagcattagattgttttttggattggttaactaacagttatcgataattatttgttgtagtcactgttgttttcttttttcctttttttacttgattcaaggactgctagtggccgaagggcactgcctcctccttttgcttttacgtgctgcaagaccattgttatgtatttcatgtttattattacttcgaatacggctagaatacaatgttttaacaaggtatggtgatggattactctcggttgttgattaatcttgtagcacgtcctttactaaatattgtgtttaaatggcgaaggatgatggagatacaatgaacacgaaagtcattattatttttagccttggcgctatatgtttgttagcagaggttacatgattcttctttcggaataggcggaaaaatgagagccttcactgttgtttatttagtagaggattcccatggacatgtggttgtccattacacagatgttgatacaaatgttcagctcctttttaggtaccgttgctcatgttgcagcccgaggttgtagctacacaggaacacaaattcagaaagataaaagtacaagcgtgaagcacgagccagtacaagtcagcgtgaacagtacgggggtactgtttcatctatttataggcacaggacagagcatgtgaggaattacagttatgccctttacatttactattgacttatagaaaatctatgaggactagatagccttttcctctttaa

SEQ ID NO: 34824 - DNA, 2650 bp, Zea Mays
ctacatccgtgtggcacgacgctcatctccgcgacgtgctgctccgatgcggcatcatgggtgctgcggacggcgccaccaacgtgtgcttgcaagcgcggcaggagggagcagagccggagatggggcggtgctggtgctgctgccgagttggccttcaggggaagaccgctccacaggccaagaagtcgtggggttccgagattgccagtagcggtggccggagctcctccgatgtttccacgccatatgctacgacgtcttgtgcttccacgccggatgccacaatagacaagcatattaagactgtcatgtctctcaatctctgcccatacttgaagccaatctggctgatcacaaaagacagtcatcaccctttaccgcacgtagcagcccagtattcgagattaaatcctgaatttgattgttaaaagatatcatcatatcaacgaagctaggccacaagactagcctgatacactgtgatgcctgcaccacttaaggtactactttcctgaagaaagtcaatttgctgacaatgcaatgaccattcccttgcctattcacatggagaaacttgatgttcatatagaaataaatatttctagacacttcaagtaataaaaatacaaaacaacttaagactacgtatgaatggctcaaaataatcattagtcacaaagctgaaaatacaccgtgacctaacttttttaattgtggtctcacagtttgatgtatatagtgcaaaatttctttcaatctttgcttacttcaacttctttctataaagtggacataatctaactttccaggcacatgccctagaagatgagatcttttcttcattgcatgaattcttgagaacctttatttgaattctagtgttaatttcttttcaattgattttctccctgctgatatacatgcttataaagaaaaataaaattatttctttttcacttatatatgtttaaccttttcatgagagcagctttatatattcacgatttcttgttgggttgccaacgttatgtttatattgaccaactttattaggacactgcattctggtatttggcacttaacagttccactttgcaggaagaaaggttcagattgtgagacaaaggatatatgtaccatatcactgctcctctatcaagcatcagttctcattatgtatatagttttaccattatgacatccattttccttatcaaatgaatatccattttatccctaggaagaatgggataactgttagtattaattaggtatgtgatattcgtgaaaggcactgtgactttactacatgaatatgctcaaatcactttaatataaaacccttcatataacacatggtaacagaactgttacttatatttcctctaaccattctagacgatttaccctacaatctttcagttccttcattaatacttttcttttcaattcatgcctgtgttcttatacaacacacaaatgactacttatgttttatagctccgtctagtttagaatcgtagaatttcctgcccgtgcaagcattagattgttttttggattggttaactaacagttatcgataattatttgttgtagtcactgttgttttcttttttcctttttttacttgattcaaggactgctagtggccgaagggcactgcctcctccttttgcttttacgtgctgcaagaccattgttatgtatttcatgtttattattacttcgaatacggctagaatacaatgttttaacaaggtatggtgatggattactctcggttgttgattaatcttgtagcacgtcctttactaaatattgtgtttaaatggcgaaggatgatggagatacaatgaacacgaaagtcattattatttttagccttggcgctatatgtttgttagcagaggttacatgattcttctttcggaataggcggaaaaatgagagccttcactgttgtttatttagtagaggttgagatcgtatttcaaattattaagaacactattgttttagattctttcacatattcatacgtttgaaaaaaaaccgcattctccatgatgttttggtcatagagaatgtaataaaagtccattaaatagcattgatactcccatactatagtattttcctttgtgttgaggattaatgcaaccacagtgttgtggtttgaacactaatcgagaaggcctctttactgttgtctaggtcagttataactttcatatatgtgcttccatacactttaatgttagtagtacaattgctgttagcagattaaaaacttagttaaacatatgcgtactcacatatttattatttctctttacatcaaggattcccatggacatgtggttgtccattacacagatgttgatacaaatgttcagctcctttttaggtaccgttgctcatgttgcagcccgaggttgtagctacacaggaacacaaattcagaaagataaaagtacaagcgtgaagcacgagccagtacaagtcagcgtgaacagtacgggggtactgtttcatctatttataggcacaggacagagcatgtgaggaattacagttatgccctttacatttactattgacttatagaaaatctatgaggactagatagccttttcctctttaa

SEQ ID NO: 34825 - DNA, 1747 bp, Zea Mays
cgacgtcttgtgcttccacgccggatgccacaatagacaaggaagaaaggttcagattgtgagacaaaggatatatgtaccatatcactgctcctctatcaagcatcagttctcattatgtatatagttttaccattatgacatccattttccttatcaaatgaatatccattttatccctaggaagaatgggataactgttagtattaattaggtatgtgatattcgtgaaaggcactgtgactttactacatgaatatgctcaaatcactttaatataaaacccttcatataacacatggtaacagaactgttacttatatttcctctaaccattctagacgatttaccctacaatctttcagttccttcattaatacttttcttttcaattcatgcctgtgttcttatacaacacacaaatgactacttatgttttatagctccgtctagtttagaatcgtagaatttcctgcccgtgcaagcattagattgttttttggattggttaactaacagttatcgataattatttgttgtagtcactgttgttttcttttttcctttttttacttgattcaaggactgctagtggccgaagggcactgcctcctccttttgcttttacgtgctgcaagaccattgttatgtatttcatgtttattattacttcgaatacggctagaatacaatgttttaacaaggtatggtgatggattactctcggttgttgattaatcttgtagcacgtcctttactaaatattgtgtttaaatggcgaaggatgatggagatacaatgaacacgaaagtcattattatttttagccttggcgctatatgtttgttagcagaggttacatgattcttctttcggaataggcggaaaaatgagagccttcactgttgtttatttagtagaggttgagatcgtatttcaaattattaagaacactattgttttagattctttcacatattcatacgtttgaaaaaaaaccgcattctccatgatgttttggtcatagagaatgtaataaaagtccattaaatagcattgatactcccatactatagtattttcctttgtgttgaggattaatgcaaccacagtgttgtggtttgaacactaatcgagaaggcctctttactgttgtctaggtcagttataactttcatatatgtgcttccatacactttaatgttagtagtacaattgctgttagcagattaaaaacttagttaaacatatgcgtactcacatatttattatttctctttacatcaaggattcccatggacatgtggttgtccattacacagatgttgatacaaatgttcagctcctttttaggtaccgttgctcatgttgcagcccgaggttgtagctacacaggaacacaaattcagatataaacagtttcatctcagatgacacaacaacagccgcaatattttgctttgacaatattgctaaacatattcttggaaaaccttgtgaaccctgatgtcgtgaacacctttatgcagtacatagctaatgtatttttatgatattaatcatgcccctaggacatgttgctacaacagacccttttgcatgtatgtataggactataggtgatagatcgatatcttaggctactaataaatagacttgctagaaacgtacttatattgatgagtacaatgctgcttggaacatgttgaactaatctgattaatatatttttgtatggcttttgttg

SEQ ID NO: 34826 - DNA, 2909 bp, Zea Mays
tcatctccgcgacgtgctgctccgatgcggcatcatgggtgctgcggacggcgccaccaacgtgtgcttgcaagcgcggcaggagggagcagagccggagatggggcggtgctggtgctgctgccggtacctaaagctgctatgcttggttctcctcccaccgctcaacttatgcctgcaccacagctgctgctccaatctgtccccattctcaccgccgaagattcgctccattttctatggcacctagagttggccttcaggggaagaccgctccacaggccaagaagtcgtggggttccgagattgccagtagcggtggccggagctcctccgatgtttccacgccatatgctacgacgtcttgtgcttccacgccggatgccacaatagacaagcatattaagactgtcatgtctctcaatctctgcccatacttgaagccaatctggctgatcacaaaagacagtcatcaccctttaccgcacgtagcagcccagtattcgagattaaatcctgaatttgattgttaaaagatatcatcatatcaacgaagctaggccacaagactagcctgatacactgtgatgcctgcaccacttaaggtactactttcctgaagaaagtcaatttgctgacaatgcaatgaccattcccttgcctattcacatggagaaacttgatgttcatatagaaataaatatttctagacacttcaagtaataaaaatacaaaacaacttaagactacgtatgaatggctcaaaataatcattagtcacaaagctgaaaatacaccgtgacctaacttttttaattgtggtctcacagtttgatgtatatagtgcaaaatttctttcaatctttgcttacttcaacttctttctataaagtggacataatctaactttccaggcacatgccctagaagatgagatcttttcttcattgcatgaattcttgagaacctttatttgaattctagtgttaatttcttttcaattgattttctccctgctgatatacatgcttataaagaaaaataaaattatttctttttcacttatatatgtttaaccttttcatgagagcagctttatatattcacgatttcttgttgggttgccaacgttatgtttatattgaccaactttattaggacactgcattctggtatttggcacttaacagttccactttgcaggaagaaaggttcagattgtgagacaaaggatatatgtaccatatcactgctcctctatcaagcatcagttctcattatgtatatagttttaccattatgacatccattttccttatcaaatgaatatccattttatccctaggaagaatgggataactgttagtattaattaggtatgtgatattcgtgaaaggcactgtgactttactacatgaatatgctcaaatcactttaatataaaacccttcatataacacatggtaacagaactgttacttatatttcctctaaccattctagacgatttaccctacaatctttcagttccttcattaatacttttcttttcaattcatgcctgtgttcttatacaacacacaaatgactacttatgttttatagctccgtctagtttagaatcgtagaatttcctgcccgtgcaagcattagattgttttttggattggttaactaacagttatcgataattatttgttgtagtcactgttgttttcttttttcctttttttacttgattcaaggactgctagtggccgaagggcactgcctcctccttttgcttttacgtgctgcaagaccattgttatgtatttcatgtttattattacttcgaatacggctagaatacaatgttttaacaaggtatggtgatggattactctcggttgttgattaatcttgtagcacgtcctttactaaatattgtgtttaaatggcgaaggatgatggagatacaatgaacacgaaagtcattattatttttagccttggcgctatatgtttgttagcagaggttacatgattcttctttcggaataggcggaaaaatgagagccttcactgttgtttatttagtagaggttgagatcgtatttcaaattattaagaacactattgttttagattctttcacatattcatacgtttgaaaaaaaaccgcattctccatgatgttttggtcatagagaatgtaataaaagtccattaaatagcattgatactcccatactatagtattttcctttgtgttgaggattaatgcaaccacagtgttgtggtttgaacactaatcgagaaggcctctttactgttgtctaggtcagttataactttcatatatgtgcttccatacactttaatgttagtagtacaattgctgttagcagattaaaaacttagttaaacatatgcgtactcacatatttattatttctctttacatcaaggattcccatggacatgtggttgtccattacacagatgttgatacaaatgttcagctcctttttaggtaccgttgctcatgttgcagcccgaggttgtagctacacaggaacacaaattcagatataaacagtttcatctcagatgacacaacaacagccgcaatattttgctttgacaatattgctaaacatattcttggaaaaccttgtgaaccctgatgtcgtgaacacctttatgcagtacatagctaatgtatttttatgatattaatcatgcccctaggacatgttgctacaacagacccttttgcatgtatgtataggactataggtgatagatcgatatcttaggctactaataaatagacttgctagaaacgtacttatattgatgagtacaatgctgcttggaacatgttgaactaatctgattaatatatttttgtatggcttttgttg

SEQ ID NO: 34827 - DNA, 443 bp, Zea Mays
cggatccacgagcgctgctctccccgagcgctcctcctctcctcgagcaggaggctgagcgcggttgaggagcctctcttcctcatgccgcccgcacctggagacgccatggacataggggcctccttgccgccgccgcagctactgctatggtcgagtaggaacctgcctcgcgggagcatctgggtcgtctccacctggcggtggagctgcctgcatcacgagcgccgcgccgccgcctctgggttgaaggctgccggagctgcacttggttccagccactttcagccatgtgacgttaggatctcaggtcgaagttggcgaccgcgttcacgcctttctactctatcgccgcgatgtcgtatgcgcaggcgccttcttcttgagtgactggaacggaacaggcagaggttggtcaccttgttcacgacctctgtgggcag

SEQ ID NO: 34828 - DNA, 2181 bp, Zea Mays
ctcaaatatgcgattttgaaaggtcgagaaaccatagattattattttcttcatgctgcctacttgcgtaaaatatttaaataaatgaaggcaaatatgggcacaaaagctcgtccaccatctgctgatgcagaaaaaggggagattggcgaaatagatacaagggctccaattcaatctgttaaagctgcagtgagtttatttggtgaggtccgcttttcatctgacaaatcagctgaaagaaagcccaaggctcctcaaacagagagggttttagccaaggagacagagttgcacatggcccagaaagagttgaataaatacaaggaacagctcagtaatgctgagacaacgagagtacaggctctctctgagctagagaaagctaaaaaaactgttgaggagctaacagccaagctggatctgattaacaagtccaaacagttggccatccaggcaacagaggatgcaaagactcaaatcaagcagcttgaaggtggcagcacaagtgaaggtctaggaacagatggtgctctgaagcaggaactggaaagtgcaagggagcagtatgctgttgctttggcagaccttgatgcagcaaaacaagagcttagaaagctcaagaaggattttgaaacatctttggatatgaggttgtctgctgcccagcaggaagaggaatcactgcatacaactgaagccaacatagaaaaagctaaccaacttcgtagtgagattgccgaaattcaagaatcccttatgcatgttaaggcagctaccgtgcaagcacacgaagaagaggcacaaatccttgctgagaaggatgttgctaggaccacgtataaacaagctttggaagaaacacagaagaaacttttgtctttgaggaatgattttgaccctgctgcctacgatagtctgaaacaaaaactagaacaaaccaattctgagatcgcatctatgcaaaaaaaaatagaagaggctcgggctcgggatttagagtctgttgccgttgtcagcacagagttggatgatgctaaggaaatgttgcaaaaagtagcagaggagaaaagttctcttcgaagtttggtggaatcactgaaagtggaattggaagctgtaaaacaggagcacaatcagctcaaagagaaggatacagaaaccgaatctattgtcggagatttacatgtcaagcttcagaaatgtaaatctgagctggaggctgctgtggctgctgaatcaaaagctatgtcagcttctgatgacctaatgctggcccttcagcaactgtcctcggagtcaaagaatgctttgcaagaagctgaaatgatggagaagagtgcagcagagctaagagaggaaggcgaaaaagctcgggttgaactagcagaagccgaacaaaagatgcaattggctttaaaggaagcagaagaggctaaagcagctgaagcaagagcccttgatcagatcaagcaactctcggatagagcaagtgctgctagatcctcaacatccgagtctggagcaattatcacaatttctaaagaggagtttgtatctctcagccgaaaggttgaggagtcagagaagttgagtgatatgaaagttgctgctgctatggctcaagtggaagccatcagagccagtgagaatgaggcaatcaagaaactagaaactgcccgcaaggaaatggaggacatggaattggcaacagaagaggccctaaagagggcagagatggctgaggcagccaaaaaggctgtagaaggtgagctcaagagatggcgcgagaaggagaagaaaaccgcagaggctcagccgtcggcaggggcagaagaacttggaagtggatcgcctcctgtacctcagacttcagctgggaaagcttctgagaagaacgacgggcataggaacagcagaacgctactgaggaggagcttcatgctgccaaacatcacgagcatgttccataagaagaaaaaccaacctggcagcagttctccctcctaccttcctggggaaaaatctgtgtaatctataggaagctcttgtctgtgaattgaaatttccaaacttgaacgcatgcttttacattataatctgtataaaaccgtgtgcttccttgcgccttgcagtaaatttctgacataattttaaatttccctgtatccctatttttcg

SEQ ID NO: 34829 - DNA, 2404 bp, Zea Mays
atttggttagagtaaacctaaaccaactgtgttcatcgggtcctcccccgctcgtgagttgtgaaccggacccatcccaattccttgtcgagctcctcgaaactaccaccgccccctcgtttttttcacagcttcacccgacgaacacggcaccacgagccccgcacggccgcaacccacccagatttagactctcccaccgcggctgcatatctctcccccacccgcactccggtcgtcccattaccctctggcattggttgtcgatttcttcgttcgtgcttgcttgcgtaaaatatttaaataaatgaaggcaaatatgggcacaaaagctcgtccaccatctgctgatgcagaaaaaggggagattggcgaaatagatacaagggctccaattcaatctgttaaagctgcagtgagtttatttggtgaggtccgcttttcatctgacaaatcagctgaaagaaagcccaaggctcctcaaacagagagggttttagccaaggagacagagttgcacatggcccagaaagagttgaataaatacaaggaacagctcagtaatgctgagacaacgagagtacaggctctctctgagctagagaaagctaaaaaaactgttgaggagctaacagccaagctggatctgattaacaagtccaaacagttggccatccaggcaacagaggatgcaaagactcaaatcaagcagcttgaaggtggcagcacaagtgaaggtctaggaacagatggtgctctgaagcaggaactggaaagtgcaagggagcagtatgctgttgctttggcagaccttgatgcagcaaaacaagagcttagaaagctcaagaaggattttgaaacatctttggatatgaggttgtctgctgcccagcaggaagaggaatcactgcatacaactgaagccaacatagaaaaagctaaccaacttcgtagtgagattgccgaaattcaagaatcccttatgcatgttaaggcagctaccgtgcaagcacacgaagaagaggcacaaatccttgctgagaaggatgttgctaggaccacgtataaacaagctttggaagaaacacagaagaaacttttgtctttgaggaatgattttgaccctgctgcctacgatagtctgaaacaaaaactagaacaaaccaattctgagatcgcatctatgcaaaaaaaaatagaagaggctcgggctcgggatttagagtctgttgccgttgtcagcacagagttggatgatgctaaggaaatgttgcaaaaagtagcagaggagaaaagttctcttcgaagtttggtggaatcactgaaagtggaattggaagctgtaaaacaggagcacaatcagctcaaagagaaggatacagaaaccgaatctattgtcggagatttacatgtcaagcttcagaaatgtaaatctgagctggaggctgctgtggctgctgaatcaaaagctatgtcagcttctgatgacctaatgctggcccttcagcaactgtcctcggagtcaaagaatgctttgcaagaagctgaaatgatggagaagagtgcagcagagctaagagaggaaggcgaaaaagctcgggttgaactagcagaagccgaacaaaagatgcaattggctttaaaggaagcagaagaggctaaagcagctgaagcaagagcccttgatcagatcaagcaactctcggatagagcaagtgctgctagatcctcaacatccgagtctggagcaattatcacaatttctaaagaggagtttgtatctctcagccgaaaggttgaggagtcagagaagttgagtgatatgaaagttgctgctgctatggctcaagtggaagccatcagagccagtgagaatgaggcaatcaagaaactagaaactgcccgcaaggaaatggaggacatggaattggcaacagaagaggccctaaagagggcagagatggctgaggcagccaaaaaggctgtagaaggtgagctcaagagatggcgcgagaaggagaagaaaaccgcagaggctcagccgtcggcaggggcagaagaacttggaagtggatcgcctcctgtacctcagacttcagctgggaaagcttctgagaagaacgacgggcataggaacagcagaacgctactgaggaggagcttcatgctgccaaacatcacgagcatgttccataagaagaaaaaccaacctggcagcagttctccctcctaccttcctggggaaaaatctgtgtaatctataggaagctcttgtctgtgaattgaaatttccaaacttgaacgcatgcttttacattataatctgtataaaaccgtgtgcttccttgcgccttgcagtaaatttctgacataattttaaatttccctgtatccctatttttcg

SEQ ID NO: 34830 - DNA, 3225 bp, Zea Mays
ccgccgatgttatcgctgctcaaattgccgcggcggaacagcacctcgcctcgcctgcggcccacgacggcggggccacctccgctgacaccatgggcggcgtgtacggcatcccggccgtaccgacagtcgggaccgggccccggaccatccccgcggtgctctggcatgacccggctgacccgctcgtggctcagctccacctacaggctgggagtgtccagaacattcgcttgatggtttcggtcgtcctggagtcagagtcaccatcctacacgcgttggcgggacttgcttcttctcacccttagccgctacgccctggatgaccacgtcctctgcgaccccaccggtgtggcaccgactgctgcgtgggtgcgcctcgacagcatcgtgctcacctggatcgtggggacgatctccgtcgacctccacagcctcctccggaaccttccgcacgctcgggctgcttggcttgccatcgagggccagttcctgggcttgccatcgatgggatcgaggaacgggaacgtggtacgcggtacgctactaaaactaggatttaacactactggaacgagattgttcccatgttcccggaacggaacgaacgttcccggaacgaggaacgtggctaagttcccagttcccggttactaagttcctgggcaacgccgaggcccgggctctccgcctcgacgccgccttccgcaccttcgtccagggagacctcagcatcagcgagtactgtcgcaagatgaagaccatggcggactcacttggcgatctgggctgccccgtggaggaccgcatcctcgtcttcaacgtcctccgcggcctcagcgatcgctacacccacctccggtcgttgatcatgcgccagcgccccttccctaccttcctccaggtccgcgatgacctcgccctggaggagattactctgggtgctcaggttgcatcgatctccggcccagggtcctcgtcctcctcgacagcactggcggctttcaccccgacccgtccacctactccgtcacagtctgcccttggccctcgtcctcccgggccgagcatgggcggcgggggtcgaggtggcggaggcgggggcggtggtggttgtcgccgccgtggtggccgcggtggtggtggctccggcggtggtgcccgtggcagcgcaccgacgtcgggtccccgcagggtgcgccttggcccactttccaccactcgtggtccggacgcatctccatatggccgttccaggggcccggttcagacgctcgtcccccggcggtcatgttcgctggtgcgcaaccggggttcacctcgccgtcggggtacgccttcgcctctccatcgccctggccctcgacacctgtcgtttcgtcgtggcccacgtcgccggctacgccaccgtccggactgattggttgggacgcggccgccctggctgctttccagactcccactttgactccgccgatgggtcccaagtggattgcggacaccggtgctacctaccacaccactcccaaccctggtatactcacctctgttcaccctccttcctctctcccttcatctatcatggtggcgaatggctcgtgtcttcctgtcacatctgtgggtgtcgtcggctctcccggctcttttcgcattcccgatgttcttgtcgctccttctttagtccacaatcttctttctattcgtcggtttactgctgataattcttgttctgtcgagtttgactcttttggtcttactgtgaaggactcgacaactcggcaccccctcctctgatgtgacagcaccggccccctctacacccttcggctcccgcacgccacatcttcttcgtcttcgtcacctgacacagctgctgtttttgccgccaccacatctactactacctggcatcgtcgccttggacaccccggacgtgatgcctttcttcagcttactcgcagtgccactatcccatgtactcgatctcctgaggagcatctatgtcatgcatgccagttaggccgccatgttcgtcttccgttttcctcttcttcctcgcatgctactcatgttttcgatcttgtacacagcgatttgtggacttctcccattaccagtatgtcgggctacaaatactatcttgtcgtgcttgatgatttttctcattatgtgtggacttttccgttgtgtgccaagtctgagactttccccaccctccgccacttcttcgcctaggtgtccactcagttcggcctcaccattaaggccgttcagtgtgacaacgatcgggagttcgataactccgcctcccgtgacttttttctctcccacggcatacagttgcggatgtcttgcccgtatacctccccacagaacggcaaagctgagcgcatgatccgcaccaccaacgacaccatccggactcttcttctctaggcgcacctactgccacgtttctgggccgaggccctacacacctctacttaccttctcaaccgtctaccttccgctgcgtgcccggcccccactcctcaccaggtactcttcggtacccctccgcgctatgaccacctccgtgtcttcgggtgtgcttgctatccgaacaccgcggccactgctcctcacaagctagcaccccgctccaccctctgtgtgtttctcgggtactccccggaccacaagggctaccgctgctttgacctctcctctcgctgtgttctcatctctcgccatgtggtgtttgatgagtccgtatttccctactccacccccacaccaccctcctccgaccctgaccatgacctcttcactccctttccgactgacacggtgatcgagccacctatccttcctctccctgcaggtacccactcaccgcctgtcggtcctactcccggcccggtgccttgcccgggtccagtggtgtcgcctacggcggtgtcgcctctccgccgagccccgtctctgatcgcccccggaccgagcgggggtggtgggactgcaccgcattcagagccgtcggtgccgacccctccggcctgctttgcccagccggtgcaggtctaccagcgccggctgcagccgccggggttcgaacctcccccgctgccgtcgccgccaccgccgccgtcacccccggtggcccagtccccgccaaggacacctacacctccgttgcggcctcttggggcacgtgtcgagacgccggtgtaccatccaccgc

SEQ ID NO: 34831 - DNA, 1095 bp, Zea Mays
aaccccagcacagtgacgaaaaggcccaacaaccccccgacccgtcacctgacccagccgatcgagaatacccggaaggccggaacccacctgctgcgcacctgcaagcctcgagtggagctcttccacggccgcggtggagatggcggcgaatctggaggacgtgccgtcactggatctgatgcacgagctgctccgccgcatgaagtgcagctccaagcccgacaagcgcctcatcctcatcggtccacctggctctggaaagggaactcagtctcctattatcaaggatgaatattgcttgtgccatttagccactggtgacatgctgagggctgctgtggcggccaagacacctctaggtatcaaagctaaagaagctatgaataagggagagcttgtttcagatgatttggttgtgggcattattgatgaagctatgaagaaaccctcatgccagaaaggtttcattcttgatggctttcctagaactgtgactcaagcacagaagcttgatgagatgttggcaaagcaaggtgccaatgttgacaaagtcctgaactttgcaattgatgatgctgtattggaagaacggattactggtcgttggatccactcagccagtggtaggacttaccactcaaaatttgcacctccaaagtctccaggagttgatgatgtaactggagagccattgattcaaaggagagatgacaccgctgaggtcttgaagtcaaggcttgaagctttccacagacaaaccgaacctgtgattgattattactccaagaagggcttagtggtgaacctgcctgcagagaaaccaccgaaggaagtgactgctgaggtgcagaaagccctctcgtgatgaaatgtccactcttgagtaacaaactgatatgattacaacaattcatctttgggaaaatttccctgcaaaccttgttccagttcttacaagactgctatgttactggctataataatcaggaagataccttgctctgtcgagccttgagcggagagattgatgtgctgcgaggtcaaataaatgtttcatgttgtatggttctgaacttgtggtgatgtttattc

SEQ ID NO: 34832 - DNA, 1254 bp, Zea Mays
aaccccagcacagtgacgaaaaggcccaacaaccccccgacccgtcacctgacccagccgatcgagaatacccggaaggccggaacccacctgctgcgcacctgcaagcctcgagtggagctcttccacggccgcggtggagatggcggcgaatctggaggacgtgccgtcactggatctgatgcacgagctgctccgccgcatgaagtgcagctccaagcccgacaagcgcctcatcctcatcggtccacctggctctggaaagggaactcagtctcctattatcaaggatgaatattgcttgtgccatttagccactggtgacatgctgagggctgctgtggcggccaagacacctctagggagagcttgtttcagatgatttggttgtgggcattattgatgaagctatgaagaaaccctcatgccagaaaggtttcattcttgatggctttcctagaactgtgactcaagcacagaagcttgatgagatgttggcaaagcaaggtgccaatgttgacaaagtcctgaactttgcaattgatgatgctgtattggaagaacggattactggtcgttggatccactcagccagtggtaggacttaccactcaaaatttgcacctccaaagtctccaggagttgatgatgtaactggagagccattgattcaaaggagagatgacaccgctgaggtcttgaagtcaaggcttgaagctttccacagacaaaccgaacctgtgattgattattactccaagaagggcttagtggtgaacctgcctgcagagaaaccaccgaaggaagtgactgctgaggtgcagaaagccctctcgtgatgaaatgtccactcttgaggttaaacatgacatctaccaaaacccctttgtttgggtttcttcaaaatttgcactaggccaacatcatgaggttttttattttcagtatccttattgtgcggatgcaccattttttgttatcacacctttcacaagctcggcaattgtctgaataatttctgtgtctaatgatggaactgttttcagtaacaaactgatatgattacaacaattcatctttgggaaaatttccctgcaaaccttgttccagttcttacaagactgctatgttactggctataataatcaggaagataccttgctctgtcgagccttgagcggagagattgatgtgctgcgaggtcaaataaatgtttcatgttgtatggttctgaacttgtggtgatgtttattc

SEQ ID NO: 34833 - DNA, 1196 bp, Zea Mays
aaccccagcacagtgacgaaaaggcccaacaaccccccgacccgtcacctgacccagccgatcgagaatacccggaaggccggaacccacctgctgcgcacctgcaagcctcgagtggagctcttccacggccgcggtggagatggcggcgaatctggaggacgtgccgtcactggatctgatgcacgagctgctccgccgcatgaagtgcagctccaagcccgacaagcgcctcatcctcatcggtccacctggctctggaaagggaactcagtctcctattatcaaggatgaatattgcttgtgccatttagccactggtgacatgctgagggctgctgtggcggccaagacacctctaggtatcaaagctaaagaagctatgaataagggagagcttgtttcagatgatttggttgtgggcattattgatgaagctatgaagaaaccctcatgccagaaaggtttcattcttgatggctttcctagaactgtgactcaagcacagaagcttgatgagatgttggcaaagcaaggtgccaatgttgacaaagtcctgaactttgcaattgatgatgctgtattggaagaacggattactggtcgttggatccactcagccagtggtaggacttaccactcaaaatttgcacctccaaagtctccaggagttgatgatgtaactggagagccattgattcaaaggagagatgacaccgctgaggtcttgaagtcaaggcttgaagctttccacagacaaaccgaacctgtgattgattattactccaagaagggcttagtggtgaacctgcctgcagagaaaccaccgaaggaagtgactgctgaggtgcagaaagccctctcgtgatgaaatgtccactcttgagtatccttattgtgcggatgcaccattttttgttatcacacctttcacaagctcggcaattgtctgaataatttctgtgtctaatgatggaactgttttcagtaacaaactgatatgattacaacaattcatctttgggaaaatttccctgcaaaccttgttccagttcttacaagactgctatgttactggctataataatcaggaagataccttgctctgtcgagccttgagcggagagattgatgtgctgcgaggtcaaataaatgtttcatgttgtatggttctgaacttgtggtgatgtttattc

SEQ ID NO: 34834 - DNA, 956 bp, Zea Mays
caatccacgactccatgtttccttgcctagtggaatcacaacgccatcatccctatccctttcgtggtgccctcgcttccgccgcctccccaaaccactggcgattcgtacgatgacttccaagcgtcgtctccctaaatcccttgtcctgtccttccctcggctaggaccagcgactaggccaccccttgccgcctgcccagccagcgccagcgcccccacccagcgaccccgccatcaccggtgaccagccccaaccccatcacaaggttggcgacaaggaagcggatgtcgccatcatcgaaactgatgggtccaaggcggggtcatcctcatcgcactcgtctcgactgctctgggagctaggcatccacgtctcctagctgcttgtgctgctacttcttgtaggtaggcttcgacaatccgggaactacttgtggttgcaaacatagccaaacttgtcagcattgcgacccttggtggatgaatggggtctgcaatagatgaatgttcttgtttttcatctttagatgttgcgctttatgttccattggacgtatcagtatacttgcagccaaggatttattcatcttcttttccccttttgaccacgtcagggaaattggacttaagggcttcagacatttttaagtgcactgtacttttttcatccaactcaaggcccgctctttgtgaattatcaggtcattcatgggcattggtaatatcttgcctgtcaagtggcgttaacacattgtgttgatgaacctgaagacatatgatatgctcgaaagggtgttgtaaacatgttcagacttgagagtgtaaaattgtagatttttggtggtaatatcgttttctcctggcaagatgtggctattgtaatctaaaagtgtgtgtctaacttgtactttccaaactgttctgagataatgtcgaatattgtgaggacttcg

SEQ ID NO: 34835 - DNA, 391 bp, Zea Mays
ttcgtggtgccctcgcttccgccgcctccccaaaccactggcgattcgtacgatgacttccaagcgtcgtctccctaaatcccttgtcctgtccttccctcggctaggaccagcgactaggccaccccttgccgcctgcccagccagcgccagcgcccccacccagcgaccccgccatcaccggtgaccagccccaaccccatcacaaggttggcgacaaggaagcggatgtcgccatcatcgaaactgatgggtccaaggcggggtcatcctcatcgcactcgtctcgactgctctgggagctaggcatccacgtctcctagctgcttgtgctgctacttcttgtaggtcattcatgggcattggtaatatcttgcctgtcaagtggcgt

SEQ ID NO: 34836 - DNA, 3449 bp, Zea Mays
gtttctgattggctgttgactccaccagagaccccactttttcgttcattggatgatgaagatcaacacattggtatggctcataggggcagggcgcaggttaagccaatatcaatttcgaggtcttccacaatggaaaatactcaaagttttaacagaagaagtgcaagcccaagtaggcttagcccagcaccacgctcatgtagcagcactatgttgacaaggataagatcatcaaattcttcttcacgatgcagccctgcacttcatttgcaaccagcggcaccatcacgaaggtcttcgactcctccagcttctaggacatcaacacctccacaaaggtcaccaagtcctgcttcaaggaggttgagtactggctcaagtgacccaattttaaacagaaaaggaggaacttcgcctgttaaaaccagtaacaggccatcgtcaccaaaacttcaaggttggcaatcaagtgaccctggtttctcttttgacgcacctccgaatctacgcacatctctgtcagatcgtctagtatcccattcaaggggtggatctccttcatctttcagtggattggacatgaattggagaggtagaaggcaatctgtgtctcccactccatcaagaagagccagttcatcgcatagcaatgatcgattcagctcatacagcaaagcatctgcaacatcttctgctgaagacgacctagagtctatgcagtctgtgctgattagttactccagtagcccagctctaagaaagaacatgccagtaataaaatccagaactattgcatcacctaagaagccgtccaagagtttctcccctagttctggtccaaagaggtcctttgattctgcagtttggttaatggatcgtcgcaaagctcctcaagataagttcaggccacttctatcaagtgttccttgcaccacatttggtgttggcaaaggggataatgtacactcatctatgttgtctcataattcctcactcacaacaagcagtaatttaagctctgaccatggtgtcacttttagcccttgtatgggtaatgaacaaggaccaagtgatatagccggtgactgtgaagcaacacctacttacagtttgtctgctactcaaagtagcccaaaatctccaagcacagaaaaaaatgcggaaagtaacatggaagacctcaatatggaaagaagtagaatagtcgagacttcaggtaatgttgcaagtggttccaaggctgggctaactaaaatggcaacatgcactaggtgtgaaaagttatttaatgcgataaaagatgatggagaaattgatttgtgtgaagaatgtggtttagtagatgaggttctttttgtgaaccccaagatagagactttggaagaacatcaaaaagaccacaaaactagaatttctaaaccttgtgttgccttggaagctcctcacattactcccgatcatggtgaagataccaagaagtcatttcttgatagtcagctgttgaatgatgaacctccagctgattgtctgcaaaagtgtcctcagtctcagtcaacaatatatacaaccgacagaatgcttttaatgctgcatggagagaatgttaatgaaaatttaaggccagatgatgttggcaactcttcccaaggaagtagcctcgatatttcatcccatcaatgtaacataaataattatcaacaatcggaactagcatctgtagttgagtgtgataatttaagagatcaaactgccaaccaccagaatgaggtgttccaacgcctgccagggtcagtgtatcaaagcattgaatttgcctctaatacacttacctatgacagttgttgtaaacagggatcggctgggcattcaaatctaaaggttgaaaatacggagggtgctgggatttcagtactgctgcagaagtcaagcagtaacaaatggcctgttatagaagggcgacccttagctggtacaaatattatctgttcagaaccctactatacaagagatggtgttactatgctaaagcgtaccattggatgggatagttcatcagcgtcttccattgatcaagggtctacaaggcaatctggacatttggaacaccttaaaagtagtaatcgtcatgactttgagaagtctcaaataagtagtaccatgagttgtaaaagcattgcatccatgtcagacatgtcaagtagcaattgttcagtttcagtttgtcctcgggatgatgcaattgcagatactggcttcctaaccgacaattcagaaagcagtgctcctcgatccataatttgtactgaagaacttaatgagtcgtgtaagtacacactctcaagtgctatagagtgctggtctgctgcacaggctattgttaatgttggcattggttcaactgaagatgtagtgattcagaaactatgtacaggtaggatggttcacaaagattacacaagtgataactcatgttcatcagatactgaaacatgtagcaatatctcactctctctggctcctgaggaacgatgcatacagaaaattgaagaaggtacctcagttggcactccagaacacccagatggtgattgtggcatcagtaattatcaaatgcagcatgaaacaattcctgaggcagataggttggatgatggttgtgcgtctgttatctctgaggaggccaacataatggggcttcctgttgagggaccaagagaacaaactcaaagatgcttcaccttagaagaggctacggatacaattctcttctgcagctccattgcccatgacattgcatacagggctgcaacaattggactggagcatgaacagcattcagaacttgcttctgctcgtcgcccagcagttcccatggcaggacaatccattcccaggggtgatggttcacggaaaccaccccacagactagtgccaagacataggaaaagatcagaaggtgaaacagttacagaacctgacaagatggaagtggtcgctgaagatcctatacctgttcggccagttcctgaattttcaaggacatcaggcagcttcaagtctccaaaggtcgattcaaagtgcaactgtgcaattatgtagagttatgcatcaactcaagttggcaactatacttattatgatcactaaaatccatggttgcttgttattatttcagcgcatgtgagttaacaaatgaatctgcacccacctggttcagtaagcagcagcgacctacaattttttttggttgtggtgcatttgccctttatttctgggtcatagagtgctcaacgagccattcttttgtaaattcttgcttctccagtcagttctatggtttgtctatttttttttcctgagagtcaacatctcaagcttaagcatatttatataataaaataataacatttatgataccaaataagcatcattagatttttcgttaa

SEQ ID NO: 34837 - DNA, 3343 bp, Zea Mays
gtttctgattggctgttgactccaccagagaccccactttttcgttcattggatgatgaagatcaacacattggtatggctcataggggcagggcgcaggttaagccaatatcaatttcgaggtcttccacaatggaaaatactcaaagttttaacagaagaagtgcaagcccaagtaggcttagcccagcaccacgctcatgtagcagcactatgttgacaaggataagatcatcaaattcttcttcacgatgcagccctgcacttcatttgcaaccagcggcaccatcacgaaggtcttcgactcctccagcttctaggacatcaacacctccacaaaggtcaccaagtcctgcttcaaggaggttgagtactggctcaagtgacccaattttaaacagaaaaggaggaacttcgcctgttaaaaccagtaacaggccatcgtcaccaaaacttcaagtggattggacatgaattggagaggtagaaggcaatctgtgtctcccactccatcaagaagagccagttcatcgcatagcaatgatcgattcagctcatacagcaaagcatctgcaacatcttctgctgaagacgacctagagtctatgcagtctgtgctgattagttactccagtagcccagctctaagaaagaacatgccagtaataaaatccagaactattgcatcacctaagaagccgtccaagagtttctcccctagttctggtccaaagaggtcctttgattctgcagtttggttaatggatcgtcgcaaagctcctcaagataagttcaggccacttctatcaagtgttccttgcaccacatttggtgttggcaaaggggataatgtacactcatctatgttgtctcataattcctcactcacaacaagcagtaatttaagctctgaccatggtgtcacttttagcccttgtatgggtaatgaacaaggaccaagtgatatagccggtgactgtgaagcaacacctacttacagtttgtctgctactcaaagtagcccaaaatctccaagcacagaaaaaaatgcggaaagtaacatggaagacctcaatatggaaagaagtagaatagtcgagacttcaggtaatgttgcaagtggttccaaggctgggctaactaaaatggcaacatgcactaggtgtgaaaagttatttaatgcgataaaagatgatggagaaattgatttgtgtgaagaatgtggtttagtagatgaggttctttttgtgaaccccaagatagagactttggaagaacatcaaaaagaccacaaaactagaatttctaaaccttgtgttgccttggaagctcctcacattactcccgatcatggtgaagataccaagaagtcatttcttgatagtcagctgttgaatgatgaacctccagctgattgtctgcaaaagtgtcctcagtctcagtcaacaatatatacaaccgacagaatgcttttaatgctgcatggagagaatgttaatgaaaatttaaggccagatgatgttggcaactcttcccaaggaagtagcctcgatatttcatcccatcaatgtaacataaataattatcaacaatcggaactagcatctgtagttgagtgtgataatttaagagatcaaactgccaaccaccagaatgaggtgttccaacgcctgccagggtcagtgtatcaaagcattgaatttgcctctaatacacttacctatgacagttgttgtaaacagggatcggctgggcattcaaatctaaaggttgaaaatacggagggtgctgggatttcagtactgctgcagaagtcaagcagtaacaaatggcctgttatagaagggcgacccttagctggtacaaatattatctgttcagaaccctactatacaagagatggtgttactatgctaaagcgtaccattggatgggatagttcatcagcgtcttccattgatcaagggtctacaaggcaatctggacatttggaacaccttaaaagtagtaatcgtcatgactttgagaagtctcaaataagtagtaccatgagttgtaaaagcattgcatccatgtcagacatgtcaagtagcaattgttcagtttcagtttgtcctcgggatgatgcaattgcagatactggcttcctaaccgacaattcagaaagcagtgctcctcgatccataatttgtactgaagaacttaatgagtcgtgtaagtacacactctcaagtgctatagagtgctggtctgctgcacaggctattgttaatgttggcattggttcaactgaagatgtagtgattcagaaactatgtacaggtaggatggttcacaaagattacacaagtgataactcatgttcatcagatactgaaacatgtagcaatatctcactctctctggctcctgaggaacgatgcatacagaaaattgaagaaggtacctcagttggcactccagaacacccagatggtgattgtggcatcagtaattatcaaatgcagcatgaaacaattcctgaggcagataggttggatgatggttgtgcgtctgttatctctgaggaggccaacataatggggcttcctggtaatgttgagggaccaagagaacaaactcaaagatgcttcaccttagaagaggctacggatacaattctcttctgcagctccattgcccatgacattgcatacagggctgcaacaattggactggagcatgaacagcattcagaacttgcttctgctcgtcgcccagcagttcccatggcaggacaatccattcccaggggtgatggttcacggaaaccaccccacagactagtgccaagacataggaaaagatcagaaggtgaaacagttacagaacctgacaagatggaagtggtcgctgaagatcctatacctgttcggccagttcctgaattttcaaggacatcaggcagcttcaagtctccaaaggtcgattcaaagtgcaactgtgcaattatgtagagttatgcatcaactcaagttggcaactatacttattatgatcactaaaatccatggttgcttgttattatttcagcgcatgtgagttaacaaatgaatctgcacccacctggttcagtaagcagcagcgacctacaattttttttggttgtggtgcatttgccctttatttctgggtcatagagtgctcaacgagccattcttttgtaaattcttgcttctccagtcagttctatggtttgtctatttttttttcctgagagtcaacatctcaagcttaagcatatttatataataaaataataacatttatgataccaaataagcatcattagatttttcgttaa

SEQ ID NO: 34838 - DNA, 3470 bp, Zea Mays
gtttctgattggctgttgactccaccagagaccccactttttcgttcattggatgatgaagatcaacacattggtatggctcataggggcagggcgcaggttaagccaatatcaatttcgaggtcttccacaatggaaaatactcaaagttttaacagaagaagtgcaagcccaagtaggcttagcccagcaccacgctcatgtagcagcactatgttgacaaggataagatcatcaaattcttcttcacgatgcagccctgcacttcatttgcaaccagcggcaccatcacgaaggtcttcgactcctccagcttctaggacatcaacacctccacaaaggtcaccaagtcctgcttcaaggaggttgagtactggctcaagtgacccaattttaaacagaaaaggaggaacttcgcctgttaaaaccagtaacaggccatcgtcaccaaaacttcaaggttggcaatcaagtgaccctggtttctcttttgacgcacctccgaatctacgcacatctctgtcagatcgtctagtatcccattcaaggggtggatctccttcatctttcagtggattggacatgaattggagaggtagaaggcaatctgtgtctcccactccatcaagaagagccagttcatcgcatagcaatgatcgattcagctcatacagcaaagcatctgcaacatcttctgctgaagacgacctagagtctatgcagtctgtgctgattagttactccagtagcccagctctaagaaagaacatgccagtaataaaatccagaactattgcatcacctaagaagccgtccaagagtttctcccctagttctggtccaaagaggtcctttgattctgcagtttggttaatggatcgtcgcaaagctcctcaagataagttcaggccacttctatcaagtgttccttgcaccacatttggtgttggcaaaggggataatgtacactcatctatgttgtctcataattcctcactcacaacaagcagtaatttaagctctgaccatggtgtcacttttagcccttgtatgggtaatgaacaaggaccaagtgatatagccggtgactgtgaagcaacacctacttacagtttgtctgctactcaaagtagcccaaaatctccaagcacagaaaaaaatgcggaaagtaacatggaagacctcaatatggaaagaagtagaatagtcgagacttcaggtaatgttgcaagtggttccaaggctgggctaactaaaatggcaacatgcactaggtgtgaaaagttatttaatgcgataaaagatgatggagaaattgatttgtgtgaagaatgtggtttagtagatgaggttctttttgtgaaccccaagatagagactttggaagaacatcaaaaagaccacaaaactagaatttctaaaccttgtgttgccttggaagctcctcacattactcccgatcatggtgaagataccaagaagtcatttcttgatagtcagctgttgaatgatgaacctccagctgattgtctgcaaaagtgtcctcagtctcagtcaacaatatatacaaccgacagaatgcttttaatgctgcatggagagaatgttaatgaaaatttaaggccagatgatgttggcaactcttcccaaggaagtagcctcgatatttcatcccatcaatgtaacataaataattatcaacaatcggaactagcatctgtagttgagtgtgataatttaagagatcaaactgccaaccaccagaatgaggtgttccaacgcctgccagggtcagtgtatcaaagcattgaatttgcctctaatacacttacctatgacagttgttgtaaacagggatcggctgggcattcaaatctaaaggttgaaaatacggagggtgctgggatttcagtactgctgcagaagtcaagcagtaacaaatggcctgttatagaagggcgacccttagctggtacaaatattatctgttcagaaccctactatacaagagatggtgttactatgctaaagcgtaccattggatgggatagttcatcagcgtcttccattgatcaagggtctacaaggcaatctggacatttggaacaccttaaaagtagtaatcgtcatgactttgagaagtctcaaataagtagtaccatgagttgtaaaagcattgcatccatgtcagacatgtcaagtagcaattgttcagtttcagtttgtcctcgggatgatgcaattgcagatactggcttcctaaccgacaattcagaaagcagtgctcctcgatccataatttgtactgaagaacttaatgagtcgtgtaagtacacactctcaagtgctatagagtgctggtctgctgcacaggctattgttaatgttggcattggttcaactgaagatgtagtgattcagaaactatgtacaggtaggatggttcacaaagattacacaagtgataactcatgttcatcagatactgaaacatgtagcaatatctcactctctctggctcctgaggaacgatgcatacagaaaattgaagaaggtacctcagttggcactccagaacacccagatggtgattgtggcatcagtaattatcaaatgcagcatgaaacaattcctgaggcagataggttggatgatggttgtgcgtctgttatctctgaggaggccaacataatggggcttcctggtaatgaatcactggctacagttgagggaccaagagaacaaactcaaagatgcttcaccttagaagaggctacggatacaattctcttctgcagctccattgcccatgacattgcatacagggctgcaacaattggactggagcatgaacagcattcagaacttgcttctgctcgtcgcccagcagttcccatggcaggacaatccattcccaggggtgatggttcacggaaaccaccccacagactagtgccaagacataggaaaagatcagaaggtgaaacagttacagaacctgacaagatggaagtggtcgctgaagatcctatacctgttcggccagttcctgaattttcaaggacatcaggcagcttcaagtctccaaaggtcgattcaaagtgcaactgtgcaattatgtagagttatgcatcaactcaagttggcaactatacttattatgatcactaaaatccatggttgcttgttattatttcagcgcatgtgagttaacaaatgaatctgcacccacctggttcagtaagcagcagcgacctacaattttttttggttgtggtgcatttgccctttatttctgggtcatagagtgctcaacgagccattcttttgtaaattcttgcttctccagtcagttctatggtttgtctatttttttttcctgagagtcaacatctcaagcttaagcatatttatataataaaataataacatttatgataccaaataagcatcattagatttttcgttaa

SEQ ID NO: 34839 - DNA, 4111 bp, Zea Mays
cctgtctgtttgctttctaggaaggtagtacctatgtcagcatgaggtattgggtaattttgtgtggtggtgagatcgcttggttactttgggcaatgcatggttcacaacttaagagttcttttattactttccatttcttgccctctgttcgctgtgtcagcaactctcttcgtatatttgacaaggatatgtgtcgaatgccttttgaattttggagcattttatgtttgtgttctttaatctttactaacaaaagcctatttgcagatacttcaaatggactattatggactcagcttggtatctgaaaaagaaccagcatagctacactccctttgcaagactaatagactctaaagatgcctccctcaccatcacctaggagatctctgaaagaagtttgccacgcaagggggcatagttttgtcagtattctgcctgctaaatcgaaggatgatgaactcacgttgttcaaggatatgcagaaatatgagagggataacttcttactggaagcaacagaggattttgatgaatccatctcaaagttgagatattttcgagattcaaagattggtgtcaacattgctgcacgcggagaaaatcgtgatttacttaatactgatggtgaaagaaatgactatgattggctgttgactccaccagagaccccactttttcgttcattggatgatgaagatcaacacattggtatggctcataggggcagggcgcaggttaagccaatatcaatttcgaggtcttccacaatggaaaatactcaaagttttaacagaagaagtgcaagcccaagtaggcttagcccagcaccacgctcatgtagcagcactatgttgacaaggataagatcatcaaattcttcttcacgatgcagccctgcacttcatttgcaaccagcggcaccatcacgaaggtcttcgactcctccagcttctaggacatcaacacctccacaaaggtcaccaagtcctgcttcaaggaggttgagtactggctcaagtgacccaattttaaacagaaaaggaggaacttcgcctgttaaaaccagtaacaggccatcgtcaccaaaacttcaaggttggcaatcaagtgaccctggtttctcttttgacgcacctccgaatctacgcacatctctgtcagatcgtctagtatcccattcaaggggtggatctccttcatctttcagtggattggacatgaattggagaggtagaaggcaatctgtgtctcccactccatcaagaagagccagttcatcgcatagcaatgatcgattcagctcatacagcaaagcatctgcaacatcttctgctgaagacgacctagagtctatgcagtctgtgctgattagttactccagtagcccagctctaagaaagaacatgccagtaataaaatccagaactattgcatcacctaagaagccgtccaagagtttctcccctagttctggtccaaagaggtcctttgattctgcagtttggttaatggatcgtcgcaaagctcctcaagataagttcaggccacttctatcaagtgttccttgcaccacatttggtgttggcaaaggggataatgtacactcatctatgttgtctcataattcctcactcacaacaagcagtaatttaagctctgaccatggtgtcacttttagcccttgtatgggtaatgaacaaggaccaagtgatatagccggtgactgtgaagcaacacctacttacagtttgtctgctactcaaagtagcccaaaatctccaagcacagaaaaaaatgcggaaagtaacatggaagacctcaatatggaaagaagtagaatagtcgagacttcaggtaatgttgcaagtggttccaaggctgggctaactaaaatggcaacatgcactaggtgtgaaaagttatttaatgcgataaaagatgatggagaaattgatttgtgtgaagaatgtggtttagtagatgaggttctttttgtgaaccccaagatagagactttggaagaacatcaaaaagaccacaaaactagaatttctaaaccttgtgttgccttggaagctcctcacattactcccgatcatggtgaagataccaagaagtcatttcttgatagtcagctgttgaatgatgaacctccagctgattgtctgcaaaagtgtcctcagtctcagtcaacaatatatacaaccgacagaatgcttttaatgctgcatggagagaatgttaatgaaaatttaaggccagatgatgttggcaactcttcccaaggaagtagcctcgatatttcatcccatcaatgtaacataaataattatcaacaatcggaactagcatctgtagttgagtgtgataatttaagagatcaaactgccaaccaccagaatgaggtgttccaacgcctgccagggtcagtgtatcaaagcattgaatttgcctctaatacacttacctatgacagttgttgtaaacagggatcggctgggcattcaaatctaaaggttgaaaatacggagggtgctgggatttcagtactgctgcagaagtcaagcagtaacaaatggcctgttatagaagggcgacccttagctggtacaaatattatctgttcagaaccctactatacaagagatggtgttactatgctaaagcgtaccattggatgggatagttcatcagcgtcttccattgatcaagggtctacaaggcaatctggacatttggaacaccttaaaagtagtaatcgtcatgactttgagaagtctcaaataagtagtaccatgagttgtaaaagcattgcatccatgtcagacatgtcaagtagcaattgttcagtttcagtttgtcctcgggatgatgcaattgcagatactggcttcctaaccgacaattcagaaagcagtgctcctcgatccataatttgtactgaagaacttaatgagtcgtgtaagtacacactctcaagtgctatagagtgctggtctgctgcacaggctattgttaatgttggcattggttcaactgaagatgtagtgattcagaaactatgtacaggtaggatggttcacaaagattacacaagtgataactcatgttcatcagatactgaaacatgtagcaatatctcactctctctggctcctgaggaacgatgcatacagaaaattgaagaaggtacctcagttggcactccagaacacccagatggtgattgtggcatcagtaattatcaaatgcagcatgaaacaattcctgaggcagataggttggatgatggttgtgcgtctgttatctctgaggaggccaacataatggggcttcctggtaatgaatcactggctacagttgagggaccaagagaacaaactcaaagatgcttcaccttagaagaggctacggatacaattctcttctgcagctccattgcccatgacattgcatacagggctgcaacaattggactggagcatgaacagcattcagaacttgcttctgctcgtcgcccagcagttcccatggcaggacaatccattcccaggggtgatggttcacggaaaccaccccacagactagtgccaagacataggaaaagatcagaaggtgaaacagttacagaacctgacaagatggaagtggtcgctgaagatcctatacctgttcggccagttcctgaattttcaaggacatcaggcagcttcaagtctccaaaggtcgattcaaagtgcaactgtgcaattatgtagagttatgcatcaactcaagttggcaactatacttattatgatcactaaaatccatggttgcttgttattatttcagcgcatgtgagttaacaaatgaatctgcacccacctggttcagtaagcagcagcgacctacaattttttttggttgtggtgcatttgccctttatttctgggtcatagagtgctcaacgagccattcttttgtaaattcttgcttctccagtcagttctatggtttgtctatttttttttcctgagagtcaacatctcaagcttaagcatatttatataataaaataataacatttatgataccaaataagcatcattagatttttcgttaa

SEQ ID NO: 34840 - DNA, 4057 bp, Zea Mays
cgcatagggaggggaggaacattagcctggaccctggaaagagcaagcaagtcggcgacgggcaacccgtttcggcggcggcgctagggcgcggacccccagcaagtagccaccgcaggcaagctcctcctcccgcccgcccattggaatgcggagagatccacccgggagtgggtggattggtttcttcctctgttgcctgctgcttggtgtctatccgttcaggacctgatacttcaaatggactattatggactcagcttggtatctgaaaaagaaccagcatagctacactccctttgcaagactaatagactctaaagatgcctccctcaccatcacctaggagatctctgaaagaagtttgccacgcaagggggcatagttttgtcagtattctgcctgctaaatcgaaggatgatgaactcacgttgttcaaggatatgcagaaatatgagagggataacttcttactggaagcaacagaggattttgatgaatccatctcaaagttgagatattttcgagattcaaagattggtgtcaacattgctgcacgcggagaaaatcgtgatttacttaatactgatggtgaaagaaatgactatgattggctgttgactccaccagagaccccactttttcgttcattggatgatgaagatcaacacattggtatggctcataggggcagggcgcaggttaagccaatatcaatttcgaggtcttccacaatggaaaatactcaaagttttaacagaagaagtgcaagcccaagtaggcttagcccagcaccacgctcatgtagcagcactatgttgacaaggataagatcatcaaattcttcttcacgatgcagccctgcacttcatttgcaaccagcggcaccatcacgaaggtcttcgactcctccagcttctaggacatcaacacctccacaaaggtcaccaagtcctgcttcaaggaggttgagtactggctcaagtgacccaattttaaacagaaaaggaggaacttcgcctgttaaaaccagtaacaggccatcgtcaccaaaacttcaaggttggcaatcaagtgaccctggtttctcttttgacgcacctccgaatctacgcacatctctgtcagatcgtctagtatcccattcaaggggtggatctccttcatctttcagtggattggacatgaattggagaggtagaaggcaatctgtgtctcccactccatcaagaagagccagttcatcgcatagcaatgatcgattcagctcatacagcaaagcatctgcaacatcttctgctgaagacgacctagagtctatgcagtctgtgctgattagttactccagtagcccagctctaagaaagaacatgccagtaataaaatccagaactattgcatcacctaagaagccgtccaagagtttctcccctagttctggtccaaagaggtcctttgattctgcagtttggttaatggatcgtcgcaaagctcctcaagataagttcaggccacttctatcaagtgttccttgcaccacatttggtgttggcaaaggggataatgtacactcatctatgttgtctcataattcctcactcacaacaagcagtaatttaagctctgaccatggtgtcacttttagcccttgtatgggtaatgaacaaggaccaagtgatatagccggtgactgtgaagcaacacctacttacagtttgtctgctactcaaagtagcccaaaatctccaagcacagaaaaaaatgcggaaagtaacatggaagacctcaatatggaaagaagtagaatagtcgagacttcaggtaatgttgcaagtggttccaaggctgggctaactaaaatggcaacatgcactaggtgtgaaaagttatttaatgcgataaaagatgatggagaaattgatttgtgtgaagaatgtggtttagtagatgaggttctttttgtgaaccccaagatagagactttggaagaacatcaaaaagaccacaaaactagaatttctaaaccttgtgttgccttggaagctcctcacattactcccgatcatggtgaagataccaagaagtcatttcttgatagtcagctgttgaatgatgaacctccagctgattgtctgcaaaagtgtcctcagtctcagtcaacaatatatacaaccgacagaatgcttttaatgctgcatggagagaatgttaatgaaaatttaaggccagatgatgttggcaactcttcccaaggaagtagcctcgatatttcatcccatcaatgtaacataaataattatcaacaatcggaactagcatctgtagttgagtgtgataatttaagagatcaaactgccaaccaccagaatgaggtgttccaacgcctgccagggtcagtgtatcaaagcattgaatttgcctctaatacacttacctatgacagttgttgtaaacagggatcggctgggcattcaaatctaaaggttgaaaatacggagggtgctgggatttcagtactgctgcagaagtcaagcagtaacaaatggcctgttatagaagggcgacccttagctggtacaaatattatctgttcagaaccctactatacaagagatggtgttactatgctaaagcgtaccattggatgggatagttcatcagcgtcttccattgatcaagggtctacaaggcaatctggacatttggaacaccttaaaagtagtaatcgtcatgactttgagaagtctcaaataagtagtaccatgagttgtaaaagcattgcatccatgtcagacatgtcaagtagcaattgttcagtttcagtttgtcctcgggatgatgcaattgcagatactggcttcctaaccgacaattcagaaagcagtgctcctcgatccataatttgtactgaagaacttaatgagtcgtgtaagtacacactctcaagtgctatagagtgctggtctgctgcacaggctattgttaatgttggcattggttcaactgaagatgtagtgattcagaaactatgtacaggtaggatggttcacaaagattacacaagtgataactcatgttcatcagatactgaaacatgtagcaatatctcactctctctggctcctgaggaacgatgcatacagaaaattgaagaaggtacctcagttggcactccagaacacccagatggtgattgtggcatcagtaattatcaaatgcagcatgaaacaattcctgaggcagataggttggatgatggttgtgcgtctgttatctctgaggaggccaacataatggggcttcctggtaatgttgagggaccaagagaacaaactcaaagatgcttcaccttagaagaggctacggatacaattctcttctgcagctccattgcccatgacattgcatacagggctgcaacaattggactggagcatgaacagcattcagaacttgcttctgctcgtcgcccagcagttcccatggcaggacaatccattcccaggggtgatggttcacggaaaccaccccacagactagtgccaagacataggaaaagatcagaaggtgaaacagttacagaacctgacaagatggaagtggtcgctgaagatcctatacctgttcggccagttcctgaattttcaaggacatcaggcagcttcaagtctccaaaggtcgattcaaagtgcaactgtgcaattatgtagagttatgcatcaactcaagttggcaactatacttattatgatcactaaaatccatggttgcttgttattatttcagcgcatgtgagttaacaaatgaatctgcacccacctggttcagtaagcagcagcgacctacaattttttttggttgtggtgcatttgccctttatttctgggtcatagagtgctcaacgagccattcttttgtaaattcttgcttctccagtcagttctatggtttgtctatttttttttcctgagagtcaacatctcaagcttaagcatatttatataataaaataataacatttatgataccaaataagcatcattagatttttcgttaa

SEQ ID NO: 34841 - DNA, 3963 bp, Zea Mays
cgcatagggaggggaggaacattagcctggaccctggaaagagcaagcaagtcggcgacgggcaacccgtttcggcggcggcgctagggcgcggacccccagcaagtagccaccgcaggcagatacttcaaatggactattatggactcagcttggtatctgaaaaagaaccagcatagctacactccctttgcaagactaatagactctaaagatgcctccctcaccatcacctaggagatctctgaaagaagtttgccacgcaagggggcatagttttgtcagtattctgcctgctaaatcgaaggatgatgaactcacgttgttcaaggatatgcagaaatatgagagggataacttcttactggaagcaacagaggattttgatgaatccatctcaaagttgagatattttcgagattcaaagattggtgtcaacattgctgcacgcggagaaaatcgtgatttacttaatactgatggtgaaagaaatgactatgattggctgttgactccaccagagaccccactttttcgttcattggatgatgaagatcaacacattggtatggctcataggggcagggcgcaggttaagccaatatcaatttcgaggtcttccacaatggaaaatactcaaagttttaacagaagaagtgcaagcccaagtaggcttagcccagcaccacgctcatgtagcagcactatgttgacaaggataagatcatcaaattcttcttcacgatgcagccctgcacttcatttgcaaccagcggcaccatcacgaaggtcttcgactcctccagcttctaggacatcaacacctccacaaaggtcaccaagtcctgcttcaaggaggttgagtactggctcaagtgacccaattttaaacagaaaaggaggaacttcgcctgttaaaaccagtaacaggccatcgtcaccaaaacttcaaggttggcaatcaagtgaccctggtttctcttttgacgcacctccgaatctacgcacatctctgtcagatcgtctagtatcccattcaaggggtggatctccttcatctttcagtggattggacatgaattggagaggtagaaggcaatctgtgtctcccactccatcaagaagagccagttcatcgcatagcaatgatcgattcagctcatacagcaaagcatctgcaacatcttctgctgaagacgacctagagtctatgcagtctgtgctgattagttactccagtagcccagctctaagaaagaacatgccagtaataaaatccagaactattgcatcacctaagaagccgtccaagagtttctcccctagttctggtccaaagaggtcctttgattctgcagtttggttaatggatcgtcgcaaagctcctcaagataagttcaggccacttctatcaagtgttccttgcaccacatttggtgttggcaaaggggataatgtacactcatctatgttgtctcataattcctcactcacaacaagcagtaatttaagctctgaccatggtgtcacttttagcccttgtatgggtaatgaacaaggaccaagtgatatagccggtgactgtgaagcaacacctacttacagtttgtctgctactcaaagtagcccaaaatctccaagcacagaaaaaaatgcggaaagtaacatggaagacctcaatatggaaagaagtagaatagtcgagacttcaggtaatgttgcaagtggttccaaggctgggctaactaaaatggcaacatgcactaggtgtgaaaagttatttaatgcgataaaagatgatggagaaattgatttgtgtgaagaatgtggtttagtagatgaggttctttttgtgaaccccaagatagagactttggaagaacatcaaaaagaccacaaaactagaatttctaaaccttgtgttgccttggaagctcctcacattactcccgatcatggtgaagataccaagaagtcatttcttgatagtcagctgttgaatgatgaacctccagctgattgtctgcaaaagtgtcctcagtctcagtcaacaatatatacaaccgacagaatgcttttaatgctgcatggagagaatgttaatgaaaatttaaggccagatgatgttggcaactcttcccaaggaagtagcctcgatatttcatcccatcaatgtaacataaataattatcaacaatcggaactagcatctgtagttgagtgtgataatttaagagatcaaactgccaaccaccagaatgaggtgttccaacgcctgccagggtcagtgtatcaaagcattgaatttgcctctaatacacttacctatgacagttgttgtaaacagggatcggctgggcattcaaatctaaaggttgaaaatacggagggtgctgggatttcagtactgctgcagaagtcaagcagtaacaaatggcctgttatagaagggcgacccttagctggtacaaatattatctgttcagaaccctactatacaagagatggtgttactatgctaaagcgtaccattggatgggatagttcatcagcgtcttccattgatcaagggtctacaaggcaatctggacatttggaacaccttaaaagtagtaatcgtcatgactttgagaagtctcaaataagtagtaccatgagttgtaaaagcattgcatccatgtcagacatgtcaagtagcaattgttcagtttcagtttgtcctcgggatgatgcaattgcagatactggcttcctaaccgacaattcagaaagcagtgctcctcgatccataatttgtactgaagaacttaatgagtcgtgtaagtacacactctcaagtgctatagagtgctggtctgctgcacaggctattgttaatgttggcattggttcaactgaagatgtagtgattcagaaactatgtacaggtaggatggttcacaaagattacacaagtgataactcatgttcatcagatactgaaacatgtagcaatatctcactctctctggctcctgaggaacgatgcatacagaaaattgaagaaggtacctcagttggcactccagaacacccagatggtgattgtggcatcagtaattatcaaatgcagcatgaaacaattcctgaggcagataggttggatgatggttgtgcgtctgttatctctgaggaggccaacataatggggcttcctggtaatgaatcactggctacagttgagggaccaagagaacaaactcaaagatgcttcaccttagaagaggctacggatacaattctcttctgcagctccattgcccatgacattgcatacagggctgcaacaattggactggagcatgaacagcattcagaacttgcttctgctcgtcgcccagcagttcccatggcaggacaatccattcccaggggtgatggttcacggaaaccaccccacagactagtgccaagacataggaaaagatcagaaggtgaaacagttacagaacctgacaagatggaagtggtcgctgaagatcctatacctgttcggccagttcctgaattttcaaggacatcaggcagcttcaagtctccaaaggtcgattcaaagtgcaactgtgcaattatgtagagttatgcatcaactcaagttggcaactatacttattatgatcactaaaatccatggttgcttgttattatttcagcgcatgtgagttaacaaatgaatctgcacccacctggttcagtaagcagcagcgacctacaattttttttggttgtggtgcatttgccctttatttctgggtcatagagtgctcaacgagccattcttttgtaaattcttgcttctccagtcagttctatggtttgtctatttttttttcctgagagtcaacatctcaagcttaagcatatttatataataaaataataacatttatgataccaaataagcatcattagatttttcgttaa

SEQ ID NO: 34842 - DNA, 3979 bp, Zea Mays
gtaaaacgaggcgaacctgcaaaacccgtagctgacgcatagggaggggaggaacattagcctggaccctggaaagagcaagcaagtcggcgacgggcaacccgtttcggcggcggcgctagggcgcggacccccagcaagtagccaccgcagatacttcaaatggactattatggactcagcttggtatctgaaaaagaaccagcatagctacactccctttgcaagactaatagactctaaagatgcctccctcaccatcacctaggagatctctgaaagaagtttgccacgcaagggggcatagttttgtcagtattctgcctgctaaatcgaaggatgatgaactcacgttgttcaaggatatgcagaaatatgagagggataacttcttactggaagcaacagaggattttgatgaatccatctcaaagttgagatattttcgagattcaaagattggtgtcaacattgctgcacgcggagaaaatcgtgatttacttaatactgatggtgaaagaaatgactatgattggctgttgactccaccagagaccccactttttcgttcattggatgatgaagatcaacacattggtatggctcataggggcagggcgcaggttaagccaatatcaatttcgaggtcttccacaatggaaaatactcaaagttttaacagaagaagtgcaagcccaagtaggcttagcccagcaccacgctcatgtagcagcactatgttgacaaggataagatcatcaaattcttcttcacgatgcagccctgcacttcatttgcaaccagcggcaccatcacgaaggtcttcgactcctccagcttctaggacatcaacacctccacaaaggtcaccaagtcctgcttcaaggaggttgagtactggctcaagtgacccaattttaaacagaaaaggaggaacttcgcctgttaaaaccagtaacaggccatcgtcaccaaaacttcaaggttggcaatcaagtgaccctggtttctcttttgacgcacctccgaatctacgcacatctctgtcagatcgtctagtatcccattcaaggggtggatctccttcatctttcagtggattggacatgaattggagaggtagaaggcaatctgtgtctcccactccatcaagaagagccagttcatcgcatagcaatgatcgattcagctcatacagcaaagcatctgcaacatcttctgctgaagacgacctagagtctatgcagtctgtgctgattagttactccagtagcccagctctaagaaagaacatgccagtaataaaatccagaactattgcatcacctaagaagccgtccaagagtttctcccctagttctggtccaaagaggtcctttgattctgcagtttggttaatggatcgtcgcaaagctcctcaagataagttcaggccacttctatcaagtgttccttgcaccacatttggtgttggcaaaggggataatgtacactcatctatgttgtctcataattcctcactcacaacaagcagtaatttaagctctgaccatggtgtcacttttagcccttgtatgggtaatgaacaaggaccaagtgatatagccggtgactgtgaagcaacacctacttacagtttgtctgctactcaaagtagcccaaaatctccaagcacagaaaaaaatgcggaaagtaacatggaagacctcaatatggaaagaagtagaatagtcgagacttcaggtaatgttgcaagtggttccaaggctgggctaactaaaatggcaacatgcactaggtgtgaaaagttatttaatgcgataaaagatgatggagaaattgatttgtgtgaagaatgtggtttagtagatgaggttctttttgtgaaccccaagatagagactttggaagaacatcaaaaagaccacaaaactagaatttctaaaccttgtgttgccttggaagctcctcacattactcccgatcatggtgaagataccaagaagtcatttcttgatagtcagctgttgaatgatgaacctccagctgattgtctgcaaaagtgtcctcagtctcagtcaacaatatatacaaccgacagaatgcttttaatgctgcatggagagaatgttaatgaaaatttaaggccagatgatgttggcaactcttcccaaggaagtagcctcgatatttcatcccatcaatgtaacataaataattatcaacaatcggaactagcatctgtagttgagtgtgataatttaagagatcaaactgccaaccaccagaatgaggtgttccaacgcctgccagggtcagtgtatcaaagcattgaatttgcctctaatacacttacctatgacagttgttgtaaacagggatcggctgggcattcaaatctaaaggttgaaaatacggagggtgctgggatttcagtactgctgcagaagtcaagcagtaacaaatggcctgttatagaagggcgacccttagctggtacaaatattatctgttcagaaccctactatacaagagatggtgttactatgctaaagcgtaccattggatgggatagttcatcagcgtcttccattgatcaagggtctacaaggcaatctggacatttggaacaccttaaaagtagtaatcgtcatgactttgagaagtctcaaataagtagtaccatgagttgtaaaagcattgcatccatgtcagacatgtcaagtagcaattgttcagtttcagtttgtcctcgggatgatgcaattgcagatactggcttcctaaccgacaattcagaaagcagtgctcctcgatccataatttgtactgaagaacttaatgagtcgtgtaagtacacactctcaagtgctatagagtgctggtctgctgcacaggctattgttaatgttggcattggttcaactgaagatgtagtgattcagaaactatgtacaggtaggatggttcacaaagattacacaagtgataactcatgttcatcagatactgaaacatgtagcaatatctcactctctctggctcctgaggaacgatgcatacagaaaattgaagaaggtacctcagttggcactccagaacacccagatggtgattgtggcatcagtaattatcaaatgcagcatgaaacaattcctgaggcagataggttggatgatggttgtgcgtctgttatctctgaggaggccaacataatggggcttcctggtaatgttgagggaccaagagaacaaactcaaagatgcttcaccttagaagaggctacggatacaattctcttctgcagctccattgcccatgacattgcatacagggctgcaacaattggactggagcatgaacagcattcagaacttgcttctgctcgtcgcccagcagttcccatggcaggacaatccattcccaggggtgatggttcacggaaaccaccccacagactagtgccaagacataggaaaagatcagaaggtgaaacagttacagaacctgacaagatggaagtggtcgctgaagatcctatacctgttcggccagttcctgaattttcaaggacatcaggcagcttcaagtctccaaaggtcgattcaaagtgcaactgtgcaattatgtagagttatgcatcaactcaagttggcaactatacttattatgatcactaaaatccatggttgcttgttattatttcagcgcatgtgagttaacaaatgaatctgcacccacctggttcagtaagcagcagcgacctacaattttttttggttgtggtgcatttgccctttatttctgggtcatagagtgctcaacgagccattcttttgtaaattcttgcttctccagtcagttctatggtttgtctatttttttttcctgagagtcaacatctcaagcttaagcatatttatataataaaataataacatttatgataccaaataagcatcattagatttttcgttaa

SEQ ID NO: 34843 - DNA, 4963 bp, Zea Mays
cttgggtgcctactgcctacaagtaaaacgaggcgaacctgcaaaacccgtagctgacgcatagggaggggaggaacattagcctggaccctggaaagagcaagcaagtcggcgacgggcaacccgtttcggcggcggcgctagggcgcggacccccagcaagtagccaccgcaggcaagctcctcctcccgcccgcccattggaatgcggagagatccacccgggagtgggtggattggtttcttcctctgttggtaagtgattcctggccgggctttgcttggacggattccgtcctaggagcttttgtttctttgtcgccaggcgaactgaatcttgcttcttccccacacgttgtgctgtggataagcctgctgcttggtgtctatccgttcaggacctggtgaggttcttcttcctctcctccggtgcgcaagaatgaaattaggttccacaatggcacattggtgtctcattcgtccccaatctgaagttcattttctaacaatttttccgggttcagtttttttactcaattctcgagggtttatagtcagaaatcttaggggacgttattggcgtttgagttttgctattgcggtagattaatattggatcctagagtgtggttgagtgaagtgtgtaattctttctttttccctttttaagggtttcttgaattgtgaggttagtagttcatttagatcatctcactgtttgatccaccagatgcggctaatggtgtttgtgtattgcgaaatgatgagcttgaatgtgagcttttccagtggtgtggtgttggtctggtttgttttcccgacacattttttggagacatgcctctgggttgctgttttctcttgatggggtggaacttttcgtccagaatgtgatgaattgggctttggagtgcaacaattatacgatacacttcaagttttgagggtcctttcgggggcctttttttatgttcatcctgtctgtttgctttctaggaaggtagtacctatgtcagcatgaggtattgggtaattttgtgtggtggtgagatcgcttggttactttgggcaatgcatggttcacaacttaagagttcttttattactttccatttcttgccctctgttcgctgtgtcagcaactctcttcgtatatttgacaaggatatgtgtcgaatgccttttgaattttggagcattttatgtttgtgttctttaatctttactaacaaaagcctatttgcagatacttcaaatggactattatggactcagcttggtatctgaaaaagaaccagcatagctacactccctttgcaagactaatagactctaaagatgcctccctcaccatcacctaggagatctctgaaagaagtttgccacgcaagggggcatagttttgtcagtattctgcctgctaaatcgaaggatgatgaactcacgttgttcaaggatatgcagaaatatgagagggataacttcttactggaagcaacagaggattttgatgaatccatctcaaagttgagatattttcgagattcaaagattggtgtcaacattgctgcacgcggagaaaatcgtgatttacttaatactgatggtgaaagaaatgactatgattggctgttgactccaccagagaccccactttttcgttcattggatgatgaagatcaacacattggtatggctcataggggcagggcgcaggttaagccaatatcaatttcgaggtcttccacaatggaaaatactcaaagttttaacagaagaagtgcaagcccaagtaggcttagcccagcaccacgctcatgtagcagcactatgttgacaaggataagatcatcaaattcttcttcacgatgcagccctgcacttcatttgcaaccagcggcaccatcacgaaggtcttcgactcctccagcttctaggacatcaacacctccacaaaggtcaccaagtcctgcttcaaggaggttgagtactggctcaagtgacccaattttaaacagaaaaggaggaacttcgcctgttaaaaccagtaacaggccatcgtcaccaaaacttcaaggttggcaatcaagtgaccctggtttctcttttgacgcacctccgaatctacgcacatctctgtcagatcgtctagtatcccattcaaggggtggatctccttcatctttcagtggattggacatgaattggagaggtagaaggcaatctgtgtctcccactccatcaagaagagccagttcatcgcatagcaatgatcgattcagctcatacagcaaagcatctgcaacatcttctgctgaagacgacctagagtctatgcagtctgtgctgattagttactccagtagcccagctctaagaaagaacatgccagtaataaaatccagaactattgcatcacctaagaagccgtccaagagtttctcccctagttctggtccaaagaggtcctttgattctgcagtttggttaatggatcgtcgcaaagctcctcaagataagttcaggccacttctatcaagtgttccttgcaccacatttggtgttggcaaaggggataatgtacactcatctatgttgtctcataattcctcactcacaacaagcagtaatttaagctctgaccatggtgtcacttttagcccttgtatgggtaatgaacaaggaccaagtgatatagccggtgactgtgaagcaacacctacttacagtttgtctgctactcaaagtagcccaaaatctccaagcacagaaaaaaatgcggaaagtaacatggaagacctcaatatggaaagaagtagaatagtcgagacttcaggtaatgttgcaagtggttccaaggctgggctaactaaaatggcaacatgcactaggtgtgaaaagttatttaatgcgataaaagatgatggagaaattgatttgtgtgaagaatgtggtttagtagatgaggttctttttgtgaaccccaagatagagactttggaagaacatcaaaaagaccacaaaactagaatttctaaaccttgtgttgccttggaagctcctcacattactcccgatcatggtgaagataccaagaagtcatttcttgatagtcagctgttgaatgatgaacctccagctgattgtctgcaaaagtgtcctcagtctcagtcaacaatatatacaaccgacagaatgcttttaatgctgcatggagagaatgttaatgaaaatttaaggccagatgatgttggcaactcttcccaaggaagtagcctcgatatttcatcccatcaatgtaacataaataattatcaacaatcggaactagcatctgtagttgagtgtgataatttaagagatcaaactgccaaccaccagaatgaggtgttccaacgcctgccagggtcagtgtatcaaagcattgaatttgcctctaatacacttacctatgacagttgttgtaaacagggatcggctgggcattcaaatctaaaggttgaaaatacggagggtgctgggatttcagtactgctgcagaagtcaagcagtaacaaatggcctgttatagaagggcgacccttagctggtacaaatattatctgttcagaaccctactatacaagagatggtgttactatgctaaagcgtaccattggatgggatagttcatcagcgtcttccattgatcaagggtctacaaggcaatctggacatttggaacaccttaaaagtagtaatcgtcatgactttgagaagtctcaaataagtagtaccatgagttgtaaaagcattgcatccatgtcagacatgtcaagtagcaattgttcagtttcagtttgtcctcgggatgatgcaattgcagatactggcttcctaaccgacaattcagaaagcagtgctcctcgatccataatttgtactgaagaacttaatgagtcgtgtaagtacacactctcaagtgctatagagtgctggtctgctgcacaggctattgttaatgttggcattggttcaactgaagatgtagtgattcagaaactatgtacaggtaggatggttcacaaagattacacaagtgataactcatgttcatcagatactgaaacatgtagcaatatctcactctctctggctcctgaggaacgatgcatacagaaaattgaagaaggtacctcagttggcactccagaacacccagatggtgattgtggcatcagtaattatcaaatgcagcatgaaacaattcctgaggcagataggttggatgatggttgtgcgtctgttatctctgaggaggccaacataatggggcttcctggtaatgttgagggaccaagagaacaaactcaaagatgcttcaccttagaagaggctacggatacaattctcttctgcagctccattgcccatgacattgcatacagggctgcaacaattggactggagcatgaacagcattcagaacttgcttctgctcgtcgcccagcagttcccatggcaggacaatccattcccaggggtgatggttcacggaaaccaccccacagactagtgccaagacataggaaaagatcagaaggtgaaacagttacagaacctgacaagatggaagtggtcgctgaagatcctatacctgttcggccagttcctgaattttcaaggacatcaggcagcttcaagtctccaaagcgcatgtgagttaacaaatgaatctgcacccacctggttcagtaagcagcagcgacctacaattttttttggttgtggtgcatttgccctttatttctgggtcatagagtgctcaacgagccattcttttgtaaattcttgcttctccagtcagttctatggtttgtctatttttttttcctgagagtcaacatctcaagcttaagcatatttatataataaaataataacatttatgataccaaataagcatcattagatttttcgttaa

SEQ ID NO: 34844 - DNA, 2042 bp, Zea Mays
ggaatcccaaattcccaattcccaaacccctagtagacccacgtctccggtccccctctcctcgcgccccgccatggcagcctgcggcggcgccggctgcgggccgcagtgctcctcgtcctcctccgcgggcggccaggaggatgctctggtggagagcatgggacgcctttcgaccgcctccgccgccgccgcgtgcggcaagtgcgacggcggcggcgcggccgtcgcggtggccggcggcgtcggcatgtgcgccggctgcttccgggctcacctcttcggcaagttcaagctctccgtcacgagcaacgccatggtgcgccccacagacgccgtcctcctcgccttctccggcggtcccgcctccagggtggctctgcagttcatacacgagatgcagtccaaggcgatccagagctgggaggcgagcaactcccaggccctgccggtcttcagcctcggcgtcgcgttcgtcgacgagaggagcgtcatctcagcgagtcttccggggcacgaaatccaagctgcgatagaagatatcaggtccgtcgtgtcgggtctgtcaccgggggataagcgagtgcacatcgcctctctcgaggaggtgttctcgtccgggtcagacgacaaggcggccaggctgaaggaggtggtcggcgtgatcagtgacgagacgggcagggacgactttgttaggcgcctgcgcatgctttcactgcagaaggttgcactggagaacagatacaccaagatcatgctgggaacgtgtgcttccggaatagcatgccatgtgctatctgcaaccgtgaaggggcaaggctacgctttaccagctgatgtccagtatgttgatacgcgatgggaagtacccgtggttcttccacttcatgattgcctggcccaagagcttaacttgctctgtgaaattgatagtttgaagacacagcaacttctcgataggccttgcagtggcatcaatggcttagtttcatcctttgtttcacggctaagggaagagaactcttctcgagagcataccattttaagaactgctcaaaagcttaagccattctcgtttaacaagttctcagcaaacggctaccatgatttcctgccatcgcggcttcgtcccaagtttcagaacattgatgccaacgagtgtactttctctgagattctttgcctaatatgtggaagcccgttcagtgaatcagagctcctgaatttggaaaacacaaagctcaaggctcagaagaaaattgatctttatactgcccattgttgtcaaagttgccatttccagattctcccagcagctacagatatgtatggacatttcttttcgctactaccgaagttttggactgagaaagtggacgctgcatctgccagccatagctcactaagatagcggactacctgctggatgaagatgatggaaactgactttattctctggtttcgtgacataatttcatggagtcaaatgtttaactcacatggaattcccgaatgcctgtctgtactgacatgttttgtttgttgtactataagacatcgcattctaattgggcctcacacaggcatatgccaaacttatggataacagtgtttcttctttttttgtttctgacaaaaccagtatcactagcatgacactgctactggtattcttcaactcatctgggatctgtatagtggtgaggcaaaccatcactagccagcaagtttccactgattttacagagacagcacgggttggagagctgaacgtttcccacttaaaatgtgatttcatatgaactggtctcatctcctgtgctgtgcgagctattctgccagcaaacattgtaacaagatgaatttatccggtggtttggacaattcgttttctctacaaattctgtacgaactgtggttacactcagttaccctgttgtattcgactcgaagatactttggggatgttgtgcagacaagcgctgcatctttcagcctgttcgttgtttttaattcgtatcggctcctactgtttctat

SEQ ID NO: 34845 - DNA, 1641 bp, Zea Mays
ggaatcccaaattcccaattcccaaacccctagtagacccacgtctccggtccccctctcctcgcgccccgccatggcagcctgcggcggcgccggctgcgggccgcagtgctcctcgtcctcctccgcgggcggccaggaggatgctctggtggagagcatgggacgcctttcgaccgcctccgccgccgccgcgtgcggcaagtgcgacggcggcggcgcggccgtcgcggtggccggcggcgtcggcatgtgcgccggctgcttccgggctcacctcttcggcaagttcaagctctccgtcacgagcaacgccatggttgcactggagaacagatacaccaagatcatgctgggaacgtgtgcttccggaatagcatgccatgtgctatctgcaaccgtgaaggggcaaggctacgctttaccagctgatgtccagtatgttgatacgcgatgggaagtacccgtggttcttccacttcatgattgcctggcccaagagcttaacttgctctgtgaaattgatagtttgaagacacagcaacttctcgataggccttgcagtggcatcaatggcttagtttcatcctttgtttcacggctaagggaagagaactcttctcgagagcataccattttaagaactgctcaaaagcttaagccattctcgtttaacaagttctcagcaaacggctaccatgatttcctgccatcgcggcttcgtcccaagtttcagaacattgatgccaacgagtgtactttctctgagattctttgcctaatatgtggaagcccgttcagtgaatcagagctcctgaatttggaaaacacaaagctcaaggctcagaagaaaattgatctttatactgcccattgttgtcaaagttgccatttccagattctcccagcagctacagatatgtatggacatttcttttcgctactaccgaagttttggactgagaaagtggacgctgcatctgccagccatagctcactaagagatcagatagcggactacctgctggatgaagatgatggaaactgactttattctctggtttcgtgacataatttcatggagtcaaatgtttaactcacatggaattcccgaatgcctgtctgtactgacatgttttgtttgttgtactataagacatcgcattctaattgggcctcacacaggcatatgccaaacttatggataacagtgtttcttctttttttgtttctgacaaaaccagtatcactagcatgacactgctactggtattcttcaactcatctgggatctgtatagtggtgaggcaaaccatcactagccagcaagtttccactgattttacagagacagcacgggttggagagctgaacgtttcccacttaaaatgtgatttcatatgaactggtctcatctcctgtgctgtgcgagctattctgccagcaaacattgtaacaagatgaatttatccggtggtttggacaattcgttttctctacaaattctgtacgaactgtggttacactcagttaccctgttgtattcgactcgaagatactttggggatgttgtgcagacaagcgctgcatctttcagcctgttcgttgtttttaattcgtatcggctcctactgtttctat

SEQ ID NO: 34846 - DNA, 1694 bp, Zea Mays
ggaatcccaaattcccaattcccaaacccctagtagacccacgtctccggtccccctctcctcgcgccccgccatggcagcctgcggcggcgccggctgcgggccgcagtgctcctcgtcctcctccgcgggcggccaggaggatgctctggtggagagcatgggacgcctttcgaccgcctccgccgccgccgcgtgcggcaagtgcgacggcggcggcgcggccgtcgcggtggccggcggcgtcggcatgtgcgccggctgcttccgggctcacctcttcggcaagttcaagctctccgtcacgagcaacgccatggtgcgccccacagacgccgtcctcctcgccttctccggcggtcccgcctccaggttgcactggagaacagatacaccaagatcatgctgggaacgtgtgcttccggaatagcatgccatgtgctatctgcaaccgtgaaggggcaaggctacgctttaccagctgatgtccagtatgttgatacgcgatgggaagtacccgtggttcttccacttcatgattgcctggcccaagagcttaacttgctctgtgaaattgatagtttgaagacacagcaacttctcgataggccttgcagtggcatcaatggcttagtttcatcctttgtttcacggctaagggaagagaactcttctcgagagcataccattttaagaactgctcaaaagcttaagccattctcgtttaacaagttctcagcaaacggctaccatgatttcctgccatcgcggcttcgtcccaagtttcagaacattgatgccaacgagtgtactttctctgagattctttgcctaatatgtggaagcccgttcagtgaatcagagctcctgaatttggaaaacacaaagctcaaggctcagaagaaaattgatctttatactgcccattgttgtcaaagttgccatttccagattctcccagcagctacagatatgtatggacatttcttttcgctactaccgaagttttggactgagaaagtggacgctgcatctgccagccatagctcactaagagatcagatagcggactacctgctggatgaagatgatggaaactgactttattctctggtttcgtgacataatttcatggagtcaaatgtttaactcacatggaattcccgaatgcctgtctgtactgacatgttttgtttgttgtactataagacatcgcattctaattgggcctcacacaggcatatgccaaacttatggataacagtgtttcttctttttttgtttctgacaaaaccagtatcactagcatgacactgctactggtattcttcaactcatctgggatctgtatagtggtgaggcaaaccatcactagccagcaagtttccactgattttacagagacagcacgggttggagagctgaacgtttcccacttaaaatgtgatttcatatgaactggtctcatctcctgtgctgtgcgagctattctgccagcaaacattgtaacaagatgaatttatccggtggtttggacaattcgttttctctacaaattctgtacgaactgtggttacactcagttaccctgttgtattcgactcgaagatactttggggatgttgtgcagacaagcgctgcatctttcagcctgttcgttgtttttaattcgtatcggctcctactgtttctat

SEQ ID NO: 34847 - DNA, 1035 bp, Zea Mays
gaaagataccggtcgagggtgcatgaaatggacgagataattgcatgaaatggtcggtggcgagagaagagccgagaagaacgcagagtttccaggagagacgaacgaagaaaccagggagagggatcatgttccaggacatcacgacactgctgctcgaccccaaggcgttccgtgacaccatcgacctcttcgttgagcggtacaaggaccaagggatcaccgtagttgctggtgtggaagctagagggttcatttttggtcctcctatcgctctagccatcggtgctaaatttgtacctttgaggaagccgaagaagttgccaggcgaggtgatctccgaagaatattctctggaatacggaactgacaagatagagatgcatgttggagctgtacaggccaacgatcgggctcttgtagtcgatgatcttattgccaccggtggaacactctgtgcagctgtcaaacttattgaacgtgttggagcaaaggttgttgagtgtgcttgcgtcattgaattgccagaactgaagggccgagacaaacttggggacaggccagtttttgttcttgtggaagcagatgcttgagcggaacttgggacttctcttctcagagagttagagttggtgctgttgatgctacctctctgtcaacaacaaagtttcccatgttggctatattcttgctgacacgtaataaagtttcattccaaattgtgatcccctgaatgatttgtcaatgtagacatgattgctggtccttgtatactgtggcttattattcacatcaattaaggataatcctgattggagcttatcggtgcaactattggtgttatgtggggccaccactactagcgcagatcgtgcggccagaagcaacaaacgccggcagcaaaggcttaggcgctagcatgaagataagcatggctagaaagtaggagataagtattagagttgtttagataagatgataagtggcatgagtttgttagggaaccgggctatacaatgctggcaggcgattgaa

SEQ ID NO: 34848 - DNA, 984 bp, Zea Mays
ggcagagcagccgccaccgcgccgggcagagctgccaccgcgccgggcttcagtctatcagtcactgagccgggatcatgttccaggacatcacgacactgctgctcgaccccaaggcgttccgtgacaccatcgacctcttcgttgagcggtacaaggaccaagggatcaccgtagttgctggtgtggaagctagagggttcatttttggtcctcctatcgctctagccatcggtgctaaatttgtacctttgaggaagccgaagaagttgccaggcgaggtgatctccgaagaatattctctggaatacggaactgacaagatagagatgcatgttggagctgtacaggccaacgatcgggctcttgtagtcgatgatcttattgccaccggtggaacactctgtgcagctgtcaaacttattgaacgtgttggagcaaaggttgttgagtgtgcttgcgtcattgaattgccagaactgaagggccgagacaaacttggggacaggccagtttttgttcttgtggaagcagatgcttgagcggaacttgggacttctcttctcagagagttagagttggtgctgttgatgctacctctctgtcaacaacaaagtttcccatgttggctatattcttgctgacacgtaataaagtttcattccaaattgtgatcccctgaatgatttgtcaatgtagacatgattgctggtccttgtatactgtggcttattattcacatcaattaaggataatcctgattggagcttatcggtgcaactattggtgttatgtggggccaccactactagcgcagatcgtgcggccagaagcaacaaacgccggcagcaaaggcttaggcgctagcatgaagataagcatggctagaaagtaggagataagtattagagttgtttagataagatgataagtggcatgagtttgttagggaaccgggctatacaatgctggcaggcgattgaa

SEQ ID NO: 34849 - DNA, 5231 bp, Zea Mays
ctgcgccgttcgccactgttcctcccagtcccagtctcagtccttcttcaagcagcagacagggcgcggagaggagggactagggagggttctagaaccttctagaagtgaacactccttgccgggggcagctcctgttgctctgcgccttctgcagcgtctttgttccgccactcctgttcctgagctcctccactccactcaagtgctctcagaaggcggccgcggcggcagacgatagagagcaccattcgccgcctcaccatcctcctgctcgccgcctccgcctcctccgccccgctcagaatggtgagggatcacgccgcgctccgccgaactccggcgaaggcttccgcctcggaagccggcaacgacgagaactcgccgggcgtcgtcccagatgtcgcggccgttggcgtcgccgtcgccgccacggaccccggccgccctccgctgctcgctatccagccgccggcgtccggtctgaagcggaagcccgagtcgccggcgccgacgccgtccaagctcccgttccggacccccgagaaggccgccacgcggagccggttcggctgggtcccgccccgcgccgacgaggccccaccgcgggtcggcgtgggggcaaccccgcactgcgcgatgaccacgccccgtgcgcatcggggcaaggcggtgacggtggcgccggcggcctccgagggcgggtccacgcacagcacgcccaccaagagcgtcaccaagccggcgcacagcattggggcgagcgggtcgaggccgcccatgagcggtggcgggcccaggggggcagggtttggcctggggttcaccatggcggggaggggaccgccgacgtcacttgggccgccgacggtggtgaattccgtggaggtgcctcatttcgagctccgagaggacccctccttttggatggacaacaatgtgcaggtcgtcatccgtgtgcgcccgctaaataataacgaaaagaacctgcacagttattaccgatgcttgaaacaagaaagtgcgcagactatcacttggattgggcagcccgaaactcgttttacatttgaccatgttgcttgtgaagcagtggatcaggaggtgctcttcagagttgctggtttaccaatggttgagaactgtatggctggatacaacagctgtgtgtttgcttatggacagaccggaagcggaaaaacatatacaatgcttggtgaaataagcgatctggaagtaaggcctagtccagaccgagggatgacaccacgcatttttgagttcttatttgccagaattaaagcggaagaagagagcaggagagatgagaagctcaaatacagttgcaagtgttctttcctggagatatataatgaacaaattacagatcttcttgatccttctgccacaaatctcccactccgagaagatataaggaatggagtgtacgtcgaaaatttgactgaattcgaagttggctgtgccagtgacataataaaactcctgatgcagggttctgcaaatagaagagtggctgctacaaatatgaaccgtgagagtagccgctcccacagtgttttcacctgtatcattgagagtaggtgggagaaggattcagcatccaacttacggtttgcaagattaaatctggttgatcttgctgggtctgaaaggcagaggacatctggagcagaaggtgagcggctgaaggaagctgttaatattaacaaatcgttatcaacacttggccttgtgataatgagtttagttgatctagcgcatggcaaacaaagacacattccatatagggactcaagattgacattccttctccaagattcacttggagggaactcaaaaactatgatcattgcaaatgtcagcccttcagtatgttctgctaacgaaacactcagcaccctgaagtttgctcagcgtgcaaggctcattcagaacaatgcggttgttaatgaagacgcttcaggagatgtgctagctttacaacatcagatacgtctcctaaaggaggagcttgctgtcctcaagcgtcaacatgtcactagatctttatccttctcagctgatgtttttggaggtgatgttgatgatggtagtgaaaacatgagtgtggatgacaagaatgataataaagcccataacggacactttttgaaagatatacgattttcaaataagcaggtgaggtcactggaagaagcacttgccggagcattacggagagaatcaactgcagaaaatactataaaggaacttgaacttcaaattgagcagttgaatgaattggttcgacaaagagaggatgacacaagatcggctaagatgatgcttaagtttcgggatgataagattcatagaatggaggttcttgtgaacagtaaattgccagcacaatcatatctactggaggaaaacaaaaccttatcacaagaagttgaacttcttagggaaagagttgataaaaatccagaagtaactcgttttgcactagaaaatattcgtctctcaagccaactgaagaggtcccagctcttcttcaacgaaggggagagggagcttctattgaatgaaatttctgagcttcgaaatcaggtttcacaaatacttgaacagaggacagaaaccgagcaacaaaataccttttctgacaaaactaagttgaaaaggaccagccaagaagtagaaacatgtagaagcaaccgtcaagtttgcttagaatcgaacatagcactaacaagggaaatagctgatcttgtggaagagaaaacagcccatgcggaagctgaggaaaaaccagctggtttaggtgacaaactgcaagaagcaaacatacatatcctccaatcgtgtaagcattgtgaggcaatggaaagagaattgaacgagtcaagatctcttattgaagctcttgaatcacagcagattatattgataaacgaaatagctgaacttaagaaggggtgtgtcgaaatctcaaggttgaacagtgaacttgacctccaccataggcaggattacttgaccaaagaggagcccaaagcggaacttcttaagtgtttcggtaaagaagattcacctttgcagaggaagtttaaaagaatgcaagcttcacttgaaaaggcacggaacctaaatacaaggtaccaaatagatcaggcatcacactgttttgctgagaaagaaatggatgaagttcgtaaacaggttgaggttgaaacagctaaggtgattcaatgcttagaagaagatctgatatcagtccaacagcaactaaatgcaagcaacaaaaatgacttgttagccaaacaaagcataaatgaacttcaactagaaatcaagcagttgaatgataagttacttgaggtgttgaaagagaacgaaatattttcttctgtgaccaaggaaaaagaaaaggaaattgaactattgtccaatgactggaacagattagctgccgacattggaaaatgtcttgtggatggaaatgcagctttaggtgaagcttctgatcaggttgcctttatttccaaatctttatctcaaagaaaatggatcgagaaacaagttcgaaagctgtgtagtggtatatctgaaagagatgagctactcgaagagcttcagaacaggttgaaagaggcagatgatataagacgtgacttagacttgaaattaaggtccttaagaggagcaatgcaggttgtaaatgaagagcatcagcaggaaaaatgtgatcaagaaaaagaaatatattttctaagatcacaaatatctgaacaaggacatgtaaacaatcaccaactagaagaaattcacagaataaacctattgttggatgaatcaattgagacttttgtacagaaggaggttctgcaacagacctgtgtttctttacaaaaggcaatgggagaagagattcatcgtctggagtcacaattagaccagtcaaagatacattttgctcatttattgaatcagactcaggaaaaggaacagcttattgggaagcttaaaaatgaagagttaaatgttttgttaagactgatgtcagaagttctaaagacaaacagtactgtacgtgagcttcgaattggattcaatacattgcagtcaagcctttatatgagccctgaagtgatcgcctgtcaaaattcagatttgaacttagaggatcgggtaagctaatgctcttgttatttggtatcaaggtcgaccttagggccaatgaagcgttccaatctgtggagcggcaaaatgctgaggttctttgccaacatagcaaagaaatggagcttgcagttcaaggaatgcagataatgcagtctcaaatgactaaacttcttcaagaaaaagaaaatgcgaaggagtttaatttggagagtcaaagaacaattaaagatctaagtgatgaggtccttagattgaattcacatataattgaaaaagaaagatcctatgaagctaaattggaagagctgaatacaaaaatccacgaacacgatgcatcatttatttcatggaatgaagagaacgaggcacttcgaattgaggtttcggaggcaaaacttgttgtggcccagaaatcttttgagtctgcaactcttacagccaaatttgaagaagcgcaggcaactataagagatgcagactctacggtcaaggcattggtcgaagcaaacgaaaaggcaaaattcgaagcagataagtatgaagagaaggaggctttgtttagtgctgaaacagaaagcatgctaagtgaaattagtagtctgaaaatgctgctggatatgaaggaacaaagttacaagcttatggaaaagcaattccagtcaggcttgcttgaagcaaatgagctagctcttgagctggaagatggcattagacttacgcagaatttattacagcagaagcttgagtttgtttcttctgatgttgagtggatgaaggaaagggtccagcagtttgcagggttgactagaaaatggttagaggagaattggctggagataattggcaaagattgtgctatctctgtgttgcacctctgtcacatggagattcttttggagagaatcactgggttgaatgcagaaaatggtttcccttcagcacgggctgtgtgaatctaattctttgatatctaaactgcgagagcacaatgaaaaagccaagaatgaactggagaatgtgcagtgttctcaaagggaaattattaa

SEQ ID NO: 34850 - DNA, 5199 bp, Zea Mays
ctgcgccgttcgccactgttcctcccagtcccagtctcagtccttcttcaagcagcagacagggcgcggagaggagggactagggagggttctagaaccttctagaagtgaacactccttgccgggggcagctcctgttgctctgcgccttctgcagcgtctttgttccgccactcctgttcctgagctcctccactccactcaagtgctctcagaaggcggccgcggcggcagacgatagagagcaccattcgccgcctcaccatcctcctgctcgccgcctccgcctcctccgccccgctcagaatggtgagggatcacgccgcgctccgccgaactccggcgaaggcttccgcctcggaagccggcaacgacgagaactcgccgggcgtcgtcccagatgtcgcggccgttggcgtcgccgtcgccgccacggaccccggccgccctccgctgctcgctatccagccgccggcgtccggtctgaagcggaagcccgagtcgccggcgccgacgccgtccaagctcccgttccggacccccgagaaggccgccacgcggagccggttcggctgggtcccgccccgcgccgacgaggccccaccgcgggtcggcgtgggggcaaccccgcactgcgcgatgaccacgccccgtgcgcatcggggcaaggcggtgacggtggcgccggcggcctccgagggcgggtccacgcacagcacgcccaccaagagcgtcaccaagccggcgcacagcattggggcgagcgggtcgaggccgcccatgagcggtggcgggcccaggggggcagggtttggcctggggttcaccatggcggggaggggaccgccgacgtcacttgggccgccgacggtggtgaattccgtggaggtgcctcatttcgagctccgagaggacccctccttttggatggacaacaatgtgcaggtcgtcatccgtgtgcgcccgctaaataataacgaaaagaacctgcacagttattaccgatgcttgaaacaagaaagtgcgcagactatcacttggattgggcagcccgaaactcgttttacatttgaccatgttgcttgtgaagcagtggatcaggaggtgctcttcagagttgctggtttaccaatggttgagaactgtatggctggatacaacagctgtgtgtttgcttatggacagaccggaagcggaaaaacatatacaatgcttggtgaaataagcgatctggaagtaaggcctagtccagaccgagggatgacaccacgcatttttgagttcttatttgccagaattaaagcggaagaagagagcaggagagatgagaagctcaaatacagttgcaagtgttctttcctggagatatataatgaacaaattacagatcttcttgatccttctgccacaaatctcccactccgagaagatataaggaatggagtgtacgtcgaaaatttgactgaattcgaagttggctgtgccagtgacataataaaactcctgatgcagggttctgcaaatagaagagtggctgctacaaatatgaaccgtgagagtagccgctcccacagtgttttcacctgtatcattgagagtaggtgggagaaggattcagcatccaacttacggtttgcaagattaaatctggttgatcttgctgggtctgaaaggcagaggacatctggagcagaaggtgagcggctgaaggaagctgttaatattaacaaatcgttatcaacacttggccttgtgataatgagtttagttgatctagcgcatggcaaacaaagacacattccatatagggactcaagattgacattccttctccaagattcacttggagggaactcaaaaactatgatcattgcaaatgtcagcccttcagtatgttctgctaacgaaacactcagcaccctgaagtttgctcagcgtgcaaggctcattcagaacaatgcggttgttaatgaagacgcttcaggagatgtgctagctttacaacatcagatacgtctcctaaaggaggagcttgctgtcctcaagcgtcaacatgtcactagatctttatccttctcagctgatgtttttggaggtgatgttgatgatggtagtgaaaacatgagtgtggatgacaagaatgataataaagcccataacggacactttttgaaagatatacgattttcaaataagcaggtgaggtcactggaagaagcacttgccggagcattacggagagaatcaactgcagaaaatactataaaggaacttgaacttcaaattgagcagttgaatgaattggttcgacaaagagaggatgacacaagatcggctaagatgatgcttaagtttcgggatgataagattcatagaatggaggttcttgtgaacagtaaattgccagcacaatcatatctactggaggaaaacaaaaccttatcacaagaagttgaacttcttagggaaagagttgataaaaatccagaagtaactcgttttgcactagaaaatattcgtctctcaagccaactgaagaggtcccagctcttcttcaacgaaggggagagggagcttctattgaatgaaatttctgagcttcgaaatcaggtttcacaaatacttgaacagaggacagaaaccgagcaacaaaataccttttctgacaaaactaagttgaaaaggaccagccaagaagtagaaacatgtagaagcaaccgtcaagtttgcttagaatcgaacatagcactaacaagggaaatagctgatcttgtggaagagaaaacagcccatgcggaagctgaggaaaaaccagctggtttaggtgacaaactgcaagaagcaaacatacatatcctccaatcgtgtaagcattgtgaggcaatggaaagagaattgaacgagtcaagatctcttattgaagctcttgaatcacagcagattatattgataaacgaaatagctgaacttaagaaggggtgtgtcgaaatctcaaggttgaacagtgaacttgacctccaccataggcaggattacttgaccaaagaggagcccaaagcggaacttcttaagtgtttcggtaaagaagattcacctttgcagaggaagtttaaaagaatgcaagcttcacttgaaaaggcacggaacctaaatacaaggtaccaaatagatcaggcatcacactgttttgctgagaaagaaatggatgaagttcgtaaacaggttgaggttgaaacagctaaggtgattcaatgcttagaagaagatctgatatcagtccaacagcaactaaatgcaagcaacaaaaatgacttgttagccaaacaaagcataaatgaacttcaactagaaatcaagcagttgaatgataagttacttgaggtgttgaaagagaacgaaatattttcttctgtgaccaaggaaaaagaaaaggaaattgaactattgtccaatgactggaacagattagctgccgacattggaaaatgtcttgtggatggaaatgcagctttaggtgaagcttctgatcaggttgcctttatttccaaatctttatctcaaagaaaatggatcgagaaacaagttcgaaagctgtgtagtggtatatctgaaagagatgagctactcgaagagcttcagaacaggttgaaagaggcagatgatataagacgtgacttagacttgaaattaaggtccttaagaggagcaatgcaggttgtaaatgaagagcatcagcaggaaaaatgtgatcaagaaaaagaaatatattttctaagatcacaaatatctgaacaaggacatgtaaacaatcaccaactagaagaaattcacagaataaacctattgttggatgaatcaattgagacttttgtacagaaggaggttctgcaacagacctgtgtttctttacaaaaggcaatgggagaagagattcatcgtctggagtcacaattagaccagtcaaagatacattttgctcatttattgaatcagactcaggaaaaggaacagcttattgggaagcttaaaaatgaagagttaaatgttttgttaagactgatgtcagaagttctaaagacaaacagtactgtacgtgagcttcgaattggattcaatacattgcagtcaagcctttatatgagccctgaagtgatcgcctgtcaaaattcagatttgaacttagaggatcgggtcgaccttagggccaatgaagcgttccaatctgtggagcggcaaaatgctgaggttctttgccaacatagcaaagaaatggagcttgcagttcaaggaatgcagataatgcagtctcaaatgactaaacttcttcaagaaaaagaaaatgcgaaggagtttaatttggagagtcaaagaacaattaaagatctaagtgatgaggtccttagattgaattcacatataattgaaaaagaaagatcctatgaagctaaattggaagagctgaatacaaaaatccacgaacacgatgcatcatttatttcatggaatgaagagaacgaggcacttcgaattgaggtttcggaggcaaaacttgttgtggcccagaaatcttttgagtctgcaactcttacagccaaatttgaagaagcgcaggcaactataagagatgcagactctacggtcaaggcattggtcgaagcaaacgaaaaggcaaaattcgaagcagataagtatgaagagaaggaggctttgtttagtgctgaaacagaaagcatgctaagtgaaattagtagtctgaaaatgctgctggatatgaaggaacaaagttacaagcttatggaaaagcaattccagtcaggcttgcttgaagcaaatgagctagctcttgagctggaagatggcattagacttacgcagaatttattacagcagaagcttgagtttgtttcttctgatgttgagtggatgaaggaaagggtccagcagtttgcagggttgactagaaaatggttagaggagaattggctggagataattggcaaagattgtgctatctctgtgttgcacctctgtcacatggagattcttttggagagaatcactgggttgaatgcagaaaatggtttcccttcagcacgggctgtgtgaatctaattctttgatatctaaactgcgagagcacaatgaaaaagccaagaatgaactggagaatgtgcagtgttctcaaagggaaattattaa

SEQ ID NO: 34851 - DNA, 5213 bp, Zea Mays
ctgcgccgttcgccactgttcctcccagtcccagtctcagtccttcttcaagcagcagacagggcgcggagaggagggactagggagggttctagaaccttctagaagtgaacactccttgccgggggcagctcctgttgctctgcgccttctgcagcgtctttgttccgccactcctgttcctgagctcctccactccactcaagtgctctcagaaggcggccgcggcggcagacgatagagagcaccattcgccgcctcaccatcctcctgctcgccgcctccgcctcctccgccccgctcagaatggtgagggatcacgccgcgctccgccgaactccggcgaaggcttccgcctcggaagccggcaacgacgagaactcgccgggcgtcgtcccagatgtcgcggccgttggcgtcgccgtcgccgccacggaccccggccgccctccgctgctcgctatccagccgccggcgtccggtctgaagcggaagcccgagtcgccggcgccgacgccgtccaagctcccgttccggacccccgagaaggccgccacgcggagccggttcggctgggtcccgccccgcgccgacgaggccccaccgcgggtcggcgtgggggcaaccccgcactgcgcgatgaccacgccccgtgcgcatcggggcaaggcggtgacggtggcgccggcggcctccgagggcgggtccacgcacagcacgcccaccaagagcgtcaccaagccggcgcacagcattggggcgagcgggtcgaggccgcccatgagcggtggcgggcccaggggggcagggtttggcctggggttcaccatggcggggaggggaccgccgacgtcacttgggccgccgacggtggtgaattccgtggaggtgcctcatttcgagctccgagaggacccctccttttggatggacaacaatgtgcaggtcgtcatccgtgtgcgcccgctaaataataacgaaaagaacctgcacagttattaccgatgcttgaaacaagaaagtgcgcagactatcacttggattgggcagcccgaaactcgttttacatttgaccatgttgcttgtgaagcagtggatcaggaggtgctcttcagagttgctggtttaccaatggttgagaactgtatggctggatacaacagctgtgtgtttgcttatggacagaccggaagcggaaaaacatatacaatgcttggtgaaataagcgatctggaagtaaggcctagtccagaccgagggatgacaccacgcatttttgagttcttatttgccagaattaaagcggaagaagagagcaggagagatgagaagctcaaatacagttgcaagtgttctttcctggagatatataatgaacaaattacagatcttcttgatccttctgccacaaatctcccactccgagaagatataaggaatggagtgtacgtcgaaaatttgactgaattcgaagttggctgtgccagtgacataataaaactcctgatgcagggttctgcaaatagaagagtggctgctacaaatatgaaccgtgagagtagccgctcccacagtgttttcacctgtatcattgagagtaggtgggagaaggattcagcatccaacttacggtttgcaagattaaatctggttgatcttgctgggtctgaaaggcagaggacatctggagcagaaggtgagcggctgaaggaagctgttaatattaacaaatcgttatcaacacttggccttgtgataatgagtttagttgatctagcgcatggcaaacaaagacacattccatatagggactcaagattgacattccttctccaagattcacttggagggaactcaaaaactatgatcattgcaaatgtcagcccttcagtatgttctgctaacgaaacactcagcaccctgaagtttgctcagcgtgcaaggctcattcagaacaatgcggttgttaatgaagacgcttcaggagatgtgctagctttacaacatcagatacgtctcctaaaggaggagcttgctgtcctcaagcgtcaacatgtcactagatctttatccttctcagctgatgtttttggaggtgatgttgatgatggtagtgaaaacatgagtgtggatgacaagaatgataataaagcccataacggacactttttgaaagatatacgattttcaaataagcaggtgaggtcactggaagaagcacttgccggagcattacggagagaatcaactgcagaaaatactataaaggaacttgaacttcaaattgagcagttgaatgaattggttcgacaaagagaggatgacacaagatcggctaagatgatgcttaagtttcgggatgataagattcatagaatggaggttcttgtgaacagtaaattgccagcacaatcatatctactggaggaaaacaaaaccttatcacaagaagttgaacttcttagggaaagagttgataaaaatccagaagtaactcgttttgcactagaaaatattcgtctctcaagccaactgaagaggtcccagctcttcttcaacgaaggggagagggagcttctattgaatgaaatttctgagcttcgaaatcaggtttcacaaatacttgaacagaggacagaaaccgagcaacaaaataccttttctgacaaaactaagttgaaaaggaccagccaagaagtagaaacatgtagaagcaaccgtcaagtttgcttagaatcgaacatagcactaacaagggaaatagctgatcttgtggaagagaaaacagcccatgcggaagctgaggaaaaaccagctggtttaggtgacaaactgcaagaagcaaacatacatatcctccaatcgtgtaagcattgtgaggcaatggaaagagaattgaacgagtcaagatctcttattgaagctcttgaatcacagcagattatattgataaacgaaatagctgaacttaagaaggggtgtgtcgaaatctcaaggttgaacagtgaacttgacctccaccataggcaggattacttgaccaaagaggagcccaaagcggaacttcttaagtgtttcggtaaagaagattcacctttgcagaggaagtttaaaagaatgcaagcttcacttgaaaaggcacggaacctaaatacaaggtaccaaatagatcaggcatcacactgttttgctgagaaagaaatggatgaagttcgtaaacaggttgaggttgaaacagctaaggtgattcaatgcttagaagaagatctgatatcagtccaacagcaactaaatgcaagcaacaaaaatgacttgttagccaaacaaagcataaatgaacttcaactagaaatcaagcagttgaatgataagttacttgaggtgttgaaagagaacgaaatattttcttctgtgaccaaggaaaaagaaaaggaaattgaactattgtccaatgactggaacagattagctgccgacattggaaaatgtcttgtggatggaaatgcagctttaggtgaagcttctgatcaggttgcctttatttccaaatctttatctcaaagaaaatggatcgagaaacaagttcgaaagctgtgtagtggtatatctgaaagagatgagctactcgaagagcttcagaacaggttgaaagaggcagatgatataagacgtgacttagacttgaaattaaggtccttaagaggagcaatgcaggttgtaaatgaagagcatcagcaggaaaaatgtgatcaagaaaaagaaatatattttctaagatcacaaatatctgaacaaggacatgtaaacaatcaccaactagaagaaattcacagaataaacctattgttggatgaatcaattgagacttttgtacagaaggaggttctgcaacagacctgtgtttctttacaaaaggcaatgggagaagagattcatcgtctggagtcacaattagaccagtcaaagatacattttgctcatttattgaatcagactcaggaaaaggaacagcttattgggaagcttaaaaatgaagagttaaatgttttgttaagactgatgtcagaagttctaaagacaaacagtactgtacgtgagcttcgaattggattcaatacattgcagtcaagcctttatatgagccctgaagtgatcgcctgtcaaaattcagatttgaacttagaggatcgggtcgaccttagggccaatgaagcgttccaatctgtggagcggcaaaatgctgaggttctttgccaacatagcaaagaaatggagcttgcagttcaaggaatgcagataatgcagtctcaaatgactaaacttcttcaagaaaaagaaaatgcgaaggagtttaatttggagagtcaaagaacaattaaagatctaagtgatgaggtccttagattgaattcacatataattgaaaaagaaagatcctatgaagctaaattggaagagctgaatacaaaaatccacgaacacgatgcatcatttatttcatggaatgaagagaacgaggtaaagattgaaaggcacttcgaattgaggtttcggaggcaaaacttgttgtggcccagaaatcttttgagtctgcaactcttacagccaaatttgaagaagcgcaggcaactataagagatgcagactctacggtcaaggcattggtcgaagcaaacgaaaaggcaaaattcgaagcagataagtatgaagagaaggaggctttgtttagtgctgaaacagaaagcatgctaagtgaaattagtagtctgaaaatgctgctggatatgaaggaacaaagttacaagcttatggaaaagcaattccagtcaggcttgcttgaagcaaatgagctagctcttgagctggaagatggcattagacttacgcagaatttattacagcagaagcttgagtttgtttcttctgatgttgagtggatgaaggaaagggtccagcagtttgcagggttgactagaaaatggttagaggagaattggctggagataattggcaaagattgtgctatctctgtgttgcacctctgtcacatggagattcttttggagagaatcactgggttgaatgcagaaaatggtttcccttcagcacgggctgtgtgaatctaattctttgatatctaaactgcgagagcacaatgaaaaagccaagaatgaactggagaatgtgcagtgttctcaaagggaaattattaa

SEQ ID NO: 34852 - DNA, 5196 bp, Zea Mays
ctgcgccgttcgccactgttcctcccagtcccagtctcagtccttcttcaagcagcagacagggcgcggagaggagggactagggagggttctagaaccttctagaagtgaacactccttgccgggggcagctcctgttgctctgcgccttctgcagcgtctttgttccgccactcctgttcctgagctcctccactccactcaagtgctctcagaaggcggccgcggcggcagacgatagagagcaccattcgccgcctcaccatcctcctgctcgccgcctccgcctcctccgccccgctcagaatggtgagggatcacgccgcgctccgccgaactccggcgaaggcttccgcctcggaagccggcaacgacgagaactcgccgggcgtcgtcccagatgtcgcggccgttggcgtcgccgtcgccgccacggaccccggccgccctccgctgctcgctatccagccgccggcgtccggtctgaagcggaagcccgagtcgccggcgccgacgccgtccaagctcccgttccggacccccgagaaggccgccacgcggagccggttcggctgggtcccgccccgcgccgacgaggccccaccgcgggtcggcgtgggggcaaccccgcactgcgcgatgaccacgccccgtgcgcatcggggcaaggcggtgacggtggcgccggcggcctccgagggcgggtccacgcacagcacgcccaccaagagcgtcaccaagccggcgcacagcattggggcgagcgggtcgaggccgcccatgagcggtggcgggcccaggggggcagggtttggcctggggttcaccatggcggggaggggaccgccgacgtcacttgggccgccgacggtggtgaattccgtggaggtgcctcatttcgagctccgagaggacccctccttttggatggacaacaatgtgcaggtcgtcatccgtgtgcgcccgctaaataataacgaaaagaacctgcacagttattaccgatgcttgaaacaagaaagtgcgcagactatcacttggattgggcagcccgaaactcgttttacatttgaccatgttgcttgtgaagcagtggatcaggaggtgctcttcagagttgctggtttaccaatggttgagaactgtatggctggatacaacagctgtgtgtttgcttatggacagaccggaagcggaaaaacatatacaatgcttggtgaaataagcgatctggaagtaaggcctagtccagaccgagggatgacaccacgcatttttgagttcttatttgccagaattaaagcggaagaagagagcaggagagatgagaagctcaaatacagttgcaagtgttctttcctggagatatataatgaacaaattacagatcttcttgatccttctgccacaaatctcccactccgagaagatataaggaatggagtgtacgtcgaaaatttgactgaattcgaagttggctgtgccagtgacataataaaactcctgatgcagggttctgcaaatagaagagtggctgctacaaatatgaaccgtgagagtagccgctcccacagtgttttcacctgtatcattgagagtaggtgggagaaggattcagcatccaacttacggtttgcaagattaaatctggttgatcttgctgggtctgaaaggcagaggacatctggagcagaaggtgagcggctgaaggaagctgttaatattaacaaatcgttatcaacacttggccttgtgataatgagtttagttgatctagcgcatggcaaacaaagacacattccatatagggactcaagattgacattccttctccaagattcacttggagggaactcaaaaactatgatcattgcaaatgtcagcccttcagtatgttctgctaacgaaacactcagcaccctgaagtttgctcagcgtgcaaggctcattcagaacaatgcggttgttaatgaagacgcttcaggagatgtgctagctttacaacatcagatacgtctcctaaaggagcttgctgtcctcaagcgtcaacatgtcactagatctttatccttctcagctgatgtttttggaggtgatgttgatgatggtagtgaaaacatgagtgtggatgacaagaatgataataaagcccataacggacactttttgaaagatatacgattttcaaataagcaggtgaggtcactggaagaagcacttgccggagcattacggagagaatcaactgcagaaaatactataaaggaacttgaacttcaaattgagcagttgaatgaattggttcgacaaagagaggatgacacaagatcggctaagatgatgcttaagtttcgggatgataagattcatagaatggaggttcttgtgaacagtaaattgccagcacaatcatatctactggaggaaaacaaaaccttatcacaagaagttgaacttcttagggaaagagttgataaaaatccagaagtaactcgttttgcactagaaaatattcgtctctcaagccaactgaagaggtcccagctcttcttcaacgaaggggagagggagcttctattgaatgaaatttctgagcttcgaaatcaggtttcacaaatacttgaacagaggacagaaaccgagcaacaaaataccttttctgacaaaactaagttgaaaaggaccagccaagaagtagaaacatgtagaagcaaccgtcaagtttgcttagaatcgaacatagcactaacaagggaaatagctgatcttgtggaagagaaaacagcccatgcggaagctgaggaaaaaccagctggtttaggtgacaaactgcaagaagcaaacatacatatcctccaatcgtgtaagcattgtgaggcaatggaaagagaattgaacgagtcaagatctcttattgaagctcttgaatcacagcagattatattgataaacgaaatagctgaacttaagaaggggtgtgtcgaaatctcaaggttgaacagtgaacttgacctccaccataggcaggattacttgaccaaagaggagcccaaagcggaacttcttaagtgtttcggtaaagaagattcacctttgcagaggaagtttaaaagaatgcaagcttcacttgaaaaggcacggaacctaaatacaaggtaccaaatagatcaggcatcacactgttttgctgagaaagaaatggatgaagttcgtaaacaggttgaggttgaaacagctaaggtgattcaatgcttagaagaagatctgatatcagtccaacagcaactaaatgcaagcaacaaaaatgacttgttagccaaacaaagcataaatgaacttcaactagaaatcaagcagttgaatgataagttacttgaggtgttgaaagagaacgaaatattttcttctgtgaccaaggaaaaagaaaaggaaattgaactattgtccaatgactggaacagattagctgccgacattggaaaatgtcttgtggatggaaatgcagctttaggtgaagcttctgatcaggttgcctttatttccaaatctttatctcaaagaaaatggatcgagaaacaagttcgaaagctgtgtagtggtatatctgaaagagatgagctactcgaagagcttcagaacaggttgaaagaggcagatgatataagacgtgacttagacttgaaattaaggtccttaagaggagcaatgcaggttgtaaatgaagagcatcagcaggaaaaatgtgatcaagaaaaagaaatatattttctaagatcacaaatatctgaacaaggacatgtaaacaatcaccaactagaagaaattcacagaataaacctattgttggatgaatcaattgagacttttgtacagaaggaggttctgcaacagacctgtgtttctttacaaaaggcaatgggagaagagattcatcgtctggagtcacaattagaccagtcaaagatacattttgctcatttattgaatcagactcaggaaaaggaacagcttattgggaagcttaaaaatgaagagttaaatgttttgttaagactgatgtcagaagttctaaagacaaacagtactgtacgtgagcttcgaattggattcaatacattgcagtcaagcctttatatgagccctgaagtgatcgcctgtcaaaattcagatttgaacttagaggatcgggtcgaccttagggccaatgaagcgttccaatctgtggagcggcaaaatgctgaggttctttgccaacatagcaaagaaatggagcttgcagttcaaggaatgcagataatgcagtctcaaatgactaaacttcttcaagaaaaagaaaatgcgaaggagtttaatttggagagtcaaagaacaattaaagatctaagtgatgaggtccttagattgaattcacatataattgaaaaagaaagatcctatgaagctaaattggaagagctgaatacaaaaatccacgaacacgatgcatcatttatttcatggaatgaagagaacgaggcacttcgaattgaggtttcggaggcaaaacttgttgtggcccagaaatcttttgagtctgcaactcttacagccaaatttgaagaagcgcaggcaactataagagatgcagactctacggtcaaggcattggtcgaagcaaacgaaaaggcaaaattcgaagcagataagtatgaagagaaggaggctttgtttagtgctgaaacagaaagcatgctaagtgaaattagtagtctgaaaatgctgctggatatgaaggaacaaagttacaagcttatggaaaagcaattccagtcaggcttgcttgaagcaaatgagctagctcttgagctggaagatggcattagacttacgcagaatttattacagcagaagcttgagtttgtttcttctgatgttgagtggatgaaggaaagggtccagcagtttgcagggttgactagaaaatggttagaggagaattggctggagataattggcaaagattgtgctatctctgtgttgcacctctgtcacatggagattcttttggagagaatcactgggttgaatgcagaaaatggtttcccttcagcacgggctgtgtgaatctaattctttgatatctaaactgcgagagcacaatgaaaaagccaagaatgaactggagaatgtgcagtgttctcaaagggaaattattaa

SEQ ID NO: 34853 - DNA, 5261 bp, Zea Mays
ctgcgccgttcgccactgttcctcccagtcccagtctcagtccttcttcaagcagcagacagggcgcggagaggagggactagggagggttctagaaccttctagaagtgaacactccttgccgggggcagctcctgttgctctgcgccttctgcagcgtctttgttccgccactcctgttcctgagctcctccactccactcaagtgctctcagaaggcggccgcggcggcagacgatagagagcaccattcgccgcctcaccatcctcctgctcgccgcctccgcctcctccgccccgctcagaatggtgagggatcacgccgcgctccgccgaactccggcgaaggcttccgcctcggaagccggcaacgacgagaactcgccgggcgtcgtcccagatgtcgcggccgttggcgtcgccgtcgccgccacggaccccggccgccctccgctgctcgctatccagccgccggcgtccggtctgaagcggaagcccgagtcgccggcgccgacgccgtccaagctcccgttccggacccccgagaaggccgccacgcggagccggttcggctgggtcccgccccgcgccgacgaggccccaccgcgggtcggcgtgggggcaaccccgcactgcgcgatgaccacgccccgtgcgcatcggggcaaggcggtgacggtggcgccggcggcctccgagggcgggtccacgcacagcacgcccaccaagagcgtcaccaagccggcgcacagcattggggcgagcgggtcgaggccgcccatgagcggtggcgggcccaggggggcagggtttggcctggggttcaccatggcggggaggggaccgccgacgtcacttgggccgccgacggtggtgaattccgtggaggtgcctcatttcgagctccgagaggacccctccttttggatggacaacaatgtgcaggtcgtcatccgtgtgcgcccgctaaataataacgaaaagaacctgcacagttattaccgatgcttgaaacaagaaagtgcgcagactatcacttggattgggcagcccgaaactcgttttacatttgaccatgttgcttgtgaagcagtggatcaggaggtgctcttcagagttgctggtttaccaatggttgagaactgtatggctggatacaacagctgtgtgtttgcttatggacagaccggaagcggaaaaacatatacaatgcttggtgaaataagcgatctggaagtaaggcctagtccagaccgagggatgacaccacgcatttttgagttcttatttgccagaattaaagcggaagaagagagcaggagagatgagaagctcaaatacagttgcaagtgttctttcctggagatatataatgaacaaattacagatcttcttgatccttctgccacaaatctcccactccgagaagatataaggaatggagtgtacgtcgaaaatttgactgaattcgaagttggctgtgccagtgacataataaaactcctgatgcagggttctgcaaatagaagagtggctgctacaaatatgaaccgtgagagtagccgctcccacagtgttttcacctgtatcattgagagtaggtgggagaaggattcagcatccaacttacggtttgcaagattaaatctggttgatcttgctgggtctgaaaggcagaggacatctggagcagaaggtgagcggctgaaggaagctgttaatattaacaaatcgttatcaacacttggccttgtgataatgagtttagttgatctagcgcatggcaaacaaagacacattccatatagggactcaagattgacattccttctccaagattcacttggagggaactcaaaaactatgatcattgcaaatgtcagcccttcagtatgttctgctaacgaaacactcagcaccctgaagtttgctcagcgtgcaaggctcattcagaacaatgcggttgttaatgaagacgcttcaggagatgtgctagctttacaacatcagatacgtctcctaaaggaggagcttgctgtcctcaagcgtcaacatgtcactagatctttatccttctcagctgatgtttttggaggtgatgttgatgatggtagtgaaaacatgagtgtggatgacaagaatgataataaagcccataacggacactttttgaaagatatacgattttcaaataagcaggtgaggtcactggaagaagcacttgccggagcattacggagagaatcaactgcagaaaatactataaaggaacttgaacttcaaattgagcagttgaatgaattggttcgacaaagagaggatgacacaagatcggctaagatgatgcttaagtttcgggatgataagattcatagaatggaggttcttgtgaacagtaaattgccagcacaatcatatctactggaggaaaacaaaaccttatcacaagaagttgaacttcttagggaaagagttgataaaaatccagaagtaactcgttttgcactagaaaatattcgtctctcaagccaactgaagaggtcccagctcttcttcaacgaaggggagagggagcttctattgaatgaaatttctgagcttcgaaatcaggtttcacaaatacttgaacagaggacagaaaccgagcaacaaaataccttttctgacaaaactaagttgaaaaggaccagccaagaagtagaaacatgtagaagcaaccgtcaagtttgcttagaatcgaacatagcactaacaagggaaatagctgatcttgtggaagagaaaacagcccatgcggaagctgaggaaaaaccagctggtttaggtgacaaactgcaagaagcaaacatacatatcctccaatcgtgtaagcattgtgaggcaatggaaagagaattgaacgagtcaagatctcttattgaagctcttgaatcacagcagattatattgataaacgaaatagctgaacttaagaaggggtgtgtcgaaatctcaaggttgaacagtgaacttgacctccaccataggcaggattacttgaccaaagaggagcccaaagcggaacttcttaagtgtttcggtaaagaagattcacctttgcagaggaagtttaaaagaatgcaagcttcacttgaaaaggcacggaacctaaatacaaggtaccaaatagatcaggcatcacactgttttgctgagaaagaaatggatgaagttcgtaaacaggttgaggttgaaacagctaaggtgattcaatgcttagaagaagatctgatatcagtccaacagcaactaaatgcaagcaacaaaaatgacttgttagccaaacaaagcataaatgaacttcaactagaaatcaagcagttgaatgataagttacttgaggtgttgaaagagaacgaaatattttcttctgtgaccaaggaaaaagaaaaggaaattgaactattgtccaatgactggaacagattagctgccgacattggaaaatgtcttgtggatggaaatgcagctttaggtgaagcttctgatcaggttgcctttatttccaaatctttatctcaaagaaaatggatcgagaaacaagttcgaaagctgtgtagtggtatatctgaaagagatgagctactcgaagagcttcagaacaggttgaaagaggcagatgatataagacgtgacttagacttgaaattaaggtccttaagaggagcaatgcaggttgtaaatgaagagcatcagcaggaaaaatgtgatcaagaaaaagaaatatattttctaagatcacaaatatctgaacaaggacatgtaaacaatcaccaactagaagaaattcacagaataaacctattgttggatgaatcaattgagacttttgtacagaaggaggttctgcaacagacctgtgtttctttacaaaaggcaatgggagaagagattcatcgtctggagtcacaattagaccagtcaaagatacattttgctcatttattgaatcagactcaggaaaaggaacagcttattgggaagcttaaaaatgaagagttaaatgttttgttaagactgatgtcagaagttctaaagacaaacagtactgtacgtgagcttcgaattggattcaatacattgcagtcaagcctttatatgagccctgaagtgatcgcctgtcaaaattcagatttgaacttagaggatcgggtaagctaatgctcttgttatttggtatcaaggtgaacaatacaatccactgttatatgtcagtcgaccttagggccaatgaagcgttccaatctgtggagcggcaaaatgctgaggttctttgccaacatagcaaagaaatggagcttgcagttcaaggaatgcagataatgcagtctcaaatgactaaacttcttcaagaaaaagaaaatgcgaaggagtttaatttggagagtcaaagaacaattaaagatctaagtgatgaggtccttagattgaattcacatataattgaaaaagaaagatcctatgaagctaaattggaagagctgaatacaaaaatccacgaacacgatgcatcatttatttcatggaatgaagagaacgaggcacttcgaattgaggtttcggaggcaaaacttgttgtggcccagaaatcttttgagtctgcaactcttacagccaaatttgaagaagcgcaggcaactataagagatgcagactctacggtcaaggcattggtcgaagcaaacgaaaaggcaaaattcgaagcagataagtatgaagagaaggaggctttgtttagtgctgaaacagaaagcatgctaagtgaaattagtagtctgaaaatgctgctggatatgaaggaacaaagttacaagcttatggaaaagcaattccagtcaggcttgcttgaagcaaatgagctagctcttgagctggaagatggcattagacttacgcagaatttattacagcagaagcttgagtttgtttcttctgatgttgagtggatgaaggaaagggtccagcagtttgcagggttgactagaaaatggttagaggagaattggctggagataattggcaaagattgtgctatctctgtgttgcacctctgtcacatggagattcttttggagagaatcactgggttgaatgcagaaaatggtttcccttcagcacgggctgtgtgaatctaattctttgatatctaaactgcgagagcacaatgaaaaagccaagaatgaactggagaatgtgcagtgttctcaaagggaaattattaa

SEQ ID NO: 34854 - DNA, 5111 bp, Zea Mays
ctcgtctcgaccaacgggcaaggcacaatacactgcgccgttcgccactgttcctcccagtcccagtctcagtccttcttcaagcagcagacagggcgcggagaggagggactagggagggttctagaaccttctagaagtgaacactccttgccgggggcagctcctgttgctctgcgccttctgcagcgtctttgttccgccactcctgttcctgagctcctccactccactcaagtgctctcagaaggcggccgcggcggcagacgatagagagcaccattcgccgcctcaccatcctcctgctcgccgcctccgcctcctccgccccgctcagaatggtgagggatcacgccgcgctccgccgaactccggcgaaggcttccgcctcggaagccggcaacgacgagaactcgccgggcgtcgtcccagatgtcgcggccgttggcgtcgccgtcgccgccacggaccccggccgccctccgctgctcgctatccagccgccggcgtccggtctgaagcggaagcccgagtcgccggcgccgacgccgtccaagctcccgttccggacccccgagaaggccgccacgcggagccggttcggctgggtcccgccccgcgccgacgaggccccaccgcgggtcggcgtgggggcaaccccgcactgcgcgatgaccacgccccgtgcgcatcggggcaaggcggtgacggtggcgccggcggcctccgagggcgggtccacgcacagcacgcccaccaagagcgtcaccaagccggcgcacagcattggggcgagcgggtcgaggccgcccatgagcggtggcgggcccaggggggcagggtttggcctggggttcaccatggcggggaggggaccgccgacgtcacttgggccgccgacggtggtgaattccgtggaggtgcctcatttcgagctccgagaggacccctccttttggatggacaacaatgtgcaggtcgtcatccgtgtgcgcccgctaaataataacgaaaagaacctgcacagttattaccgatgcttgaaacaagaaagtgcgcagactatcacttggattgggcagcccgaaactcgttttacatttgaccatgttgcttgtgaagcagtggatcaggaggtgctcttcagagttgctggtttaccaatggttgagaactgtatggctggatacaacagctgtgtgtttgcttatggacaggaagaagagagcaggagagatgagaagctcaaatacagttgcaagtgttctttcctggagatatataatgaacaaattacagatcttcttgatccttctgccacaaatctcccactccgagaagatataaggaatggagtgtacgtcgaaaatttgactgaattcgaagttggctgtgccagtgacataataaaactcctgatgcagggttctgcaaatagaagagtggctgctacaaatatgaaccgtgagagtagccgctcccacagtgttttcacctgtatcattgagagtaggtgggagaaggattcagcatccaacttacggtttgcaagattaaatctggttgatcttgctgggtctgaaaggcagaggacatctggagcagaaggtgagcggctgaaggaagctgttaatattaacaaatcgttatcaacacttggccttgtgataatgagtttagttgatctagcgcatggcaaacaaagacacattccatatagggactcaagattgacattccttctccaagattcacttggagggaactcaaaaactatgatcattgcaaatgtcagcccttcagtatgttctgctaacgaaacactcagcaccctgaagtttgctcagcgtgcaaggctcattcagaacaatgcggttgttaatgaagacgcttcaggagatgtgctagctttacaacatcagatacgtctcctaaaggaggagcttgctgtcctcaagcgtcaacatgtcactagatctttatccttctcagctgatgtttttggaggtgatgttgatgatggtagtgaaaacatgagtgtggatgacaagaatgataataaagcccataacggacactttttgaaagatatacgattttcaaataagcaggtgaggtcactggaagaagcacttgccggagcattacggagagaatcaactgcagaaaatactataaaggaacttgaacttcaaattgagcagttgaatgaattggttcgacaaagagaggatgacacaagatcggctaagatgatgcttaagtttcgggatgataagattcatagaatggaggttcttgtgaacagtaaattgccagcacaatcatatctactggaggaaaacaaaaccttatcacaagaagttgaacttcttagggaaagagttgataaaaatccagaagtaactcgttttgcactagaaaatattcgtctctcaagccaactgaagaggtcccagctcttcttcaacgaaggggagagggagcttctattgaatgaaatttctgagcttcgaaatcaggtttcacaaatacttgaacagaggacagaaaccgagcaacaaaataccttttctgacaaaactaagttgaaaaggaccagccaagaagtagaaacatgtagaagcaaccgtcaagtttgcttagaatcgaacatagcactaacaagggaaatagctgatcttgtggaagagaaaacagcccatgcggaagctgaggaaaaaccagctggtttaggtgacaaactgcaagaagcaaacatacatatcctccaatcgtgtaagcattgtgaggcaatggaaagagaattgaacgagtcaagatctcttattgaagctcttgaatcacagcagattatattgataaacgaaatagctgaacttaagaaggggtgtgtcgaaatctcaaggttgaacagtgaacttgacctccaccataggcaggattacttgaccaaagaggagcccaaagcggaacttcttaagtgtttcggtaaagaagattcacctttgcagaggaagtttaaaagaatgcaagcttcacttgaaaaggcacggaacctaaatacaaggtaccaaatagatcaggcatcacactgttttgctgagaaagaaatggatgaagttcgtaaacaggttgaggttgaaacagctaaggtgattcaatgcttagaagaagatctgatatcagtccaacagcaactaaatgcaagcaacaaaaatgacttgttagccaaacaaagcataaatgaacttcaactagaaatcaagcagttgaatgataagttacttgaggtgttgaaagagaacgaaatattttcttctgtgaccaaggaaaaagaaaaggaaattgaactattgtccaatgactggaacagattagctgccgacattggaaaatgtcttgtggatggaaatgcagctttaggtgaagcttctgatcaggttgcctttatttccaaatctttatctcaaagaaaatggatcgagaaacaagttcgaaagctgtgtagtggtatatctgaaagagatgagctactcgaagagcttcagaacaggttgaaagaggcagatgatataagacgtgacttagacttgaaattaaggtccttaagaggagcaatgcaggttgtaaatgaagagcatcagcaggaaaaatgtgatcaagaaaaagaaatatattttctaagatcacaaatatctgaacaaggacatgtaaacaatcaccaactagaagaaattcacagaataaacctattgttggatgaatcaattgagacttttgtacagaaggaggttctgcaacagacctgtgtttctttacaaaaggcaatgggagaagagattcatcgtctggagtcacaattagaccagtcaaagatacattttgctcatttattgaatcagactcaggaaaaggaacagcttattgggaagcttaaaaatgaagagttaaatgttttgttaagactgatgtcagaagttctaaagacaaacagtactgtacgtgagcttcgaattggattcaatacattgcagtcaagcctttatatgagccctgaagtgatcgcctgtcaaaattcagatttgaacttagaggatcgggtcgaccttagggccaatgaagcgttccaatctgtggagcggcaaaatgctgaggttctttgccaacatagcaaagaaatggagcttgcagttcaaggaatgcagataatgcagtctcaaatgactaaacttcttcaagaaaaagaaaatgcgaaggagtttaatttggagagtcaaagaacaattaaagatctaagtgatgaggtccttagattgaattcacatataattgaaaaagaaagatcctatgaagctaaattggaagagctgaatacaaaaatccacgaacacgatgcatcatttatttcatggaatgaagagaacgaggcacttcgaattgaggtttcggaggcaaaacttgttgtggcccagaaatcttttgagtctgcaactcttacagccaaatttgaagaagcgcaggcaactataagagatgcagactctacggtcaaggcattggtcgaagcaaacgaaaaggcaaaattcgaagcagataagtatgaagagaaggaggctttgtttagtgctgaaacagaaagcatgctaagtgaaattagtagtctgaaaatgctgctggatatgaaggaacaaagttacaagcttatggaaaagcaattccagtcaggcttgcttgaagcaaatgagctagctcttgagctggaagatggcattagacttacgcagaatttattacagcagaagcttgagtttgtttcttctgatgttgagtggatgaaggaaagggtccagcagtttgcagggttgactagaaaatggttagaggagaattggctggagataattggcaaagattgtgctatctctgtgttgcacctctgtcacatggagattcttttggagagaatcactgggttgaatgcagaaaatggtttcccttcagcacgggctgtgtgaatctaattctttgatatctaaactgcgagagcacaatgaaaaagccaagaatgaactggagaatgtgcagtgttctcaaagggaaattattaa

SEQ ID NO: 34855 - DNA, 2590 bp, Zea Mays
ctgcgccgttcgccactgttcctcccagtcccagtctcagtccttcttcaagcagcagacagggcgcggagaggagggactagggagggttctagaaccttctagaagtgaacactccttgccgggggcagctcctgttgctctgcgccttctgcagcgtctttgttccgccactcctgttcctgagctcctccactccactcaagtgctctcagaaggcggccgcggcggcagacgatagagagcaccattcgccgcctcaccatcctcctgctcgccgcctccgcctcctccgccccgctcagaatggtgagggatcacgccgcgctccgccgaactccggcgaaggcttccgcctcggaagccggcaacgacgagaactcgccgggcgtcgtcccagatgtcgcggccgttggcgtcgccgtcgccgccacggaccccggccgccctccgctgctcgctatccagccgccggcgtccggtctgaagcggaagcccgagtcgccggcgccgacgccgtccaagctcccgttccggacccccgagaaggccgccacgcggagccggttcggctgggtcccgccccgcgccgacgaggccccaccgcgggtcggcgtgggggcaaccccgcactgcgcgatgaccacgccccgtgcgcatcggggcaaggcggtgacggtggcgccggcggcctccgagggcgggtccacgcacagcacgcccaccaagagcgtcaccaagccggcgcacagcattggggcgagcgggtcgaggccgcccatgagcggtggcgggcccaggggggcagggtttggcctggggttcaccatggcggggaggggaccgccgacgtcacttgggccgccgacggtggtgaattccgtggaggtgcctcatttcgagctccgagaggacccctccttttggatggacaacaatgtgcaggtcgtcatccgtgtgcgcccgctaaataataacgaaaagaacctgcacagttattaccgatgcttgaaacaagaaagtgcgcagactatcacttggattgggcagcccgaaactcgttttacatttgaccatgttgcttgtgaagcagtggatcaggaggtgctcttcagagttgctggtttaccaatggttgagaactgtatggctggatacaacagctgtgtgtttgcttatggacaggaagaagagagcaggagagatgagaagctcaaatacagttgcaagtgttctttcctggagatatataatgaacaaattacagatcttcttgatccttctgccacaaatctcccactccgagaagatataaggaatggagtgtacgtcgaaaatttgactgaattcgaagttggctgtgccagtgacataataaaactcctgatgcagggttctgcaaatagaagagtggctgctacaaatatgaaccgtgagagtagccgctcccacagtgttttcacctgtatcattgagagtaggtgggagaaggattcagcatccaacttacggtttgcaagattaaatctggttgatcttgctgggtctgaaaggcagaggacatctggagcagaaggtgagcggctgaaggaagctgttaatattaacaaatcgttatcaacacttggccttgtgataatgagtttagttgatctagcgcatggcaaacaaagacacattccatatagggactcaagattgacattccttctccaagattcacttggagggaactcaaaaactatgatcattgcaaatgtcagcccttcagtatgttctgctaacgaaacactcagcaccctgaagtttgctcagcgtgcaaggctcattcagaacaatgcggttgttaatgaagacgcttcaggagatgtgctagctttacaacatcagatacgtctcctaaaggtgatgcatggagaattctagatctaccgtttgtttcatgatcctaaactaaaagaatgtccttctatcaggaggagcttgctgtcctcaagcgtcaacatgtcactagatctttatccttctcagctgatgtttttggaggtgatgttgatgatggtagtgaaaacatgagtgtggatgacaagaatgataataaagcccataacggacactttttgaaagatatacgattttcaaataagcaggtgaggtcactggaagaagcacttgccggagcattacggagagaatcaactgcagaaaatactataaaggaacttgaacttcaaattgagcagttgaatgaattggttcgacaaagagaggatgacacaagatcggctaagatgatgcttaagtttcgggatgataagattcatagaatggaggttcttgtgaacagtaaattgccagcacaatcatatctactggaggaaaacaaaaccttatcacaagaagttgaacttcttagggaaagagttgataaaaatccagaagtaactcgttttgcactagaaaatattcgtctctcaagccaactgaagaggtcccagctcttcttcaacgaaggggagagggagcttctattgaatgaaatttctgagcttcgaaatcagggtttcacaaatacttgaacagaggacag

SEQ ID NO: 34856 - DNA, 743 bp, Zea Mays
cagaggtataaataagttaacgactcatgtgcccactctcaatcttgtacttgatggaaacatgtcaggctttccccttggaaaatctgtaccgtggcagttcagtgtcctcccaggataacacttgcgaccatactgaacgggtcaatgggcagagtgaatagagatgcaggctaccattgcaggggtacaggaggattgatgtggcgaaccccgcagggaagttaggagtttactctgcagatggtgtctgtgctctgaaccagtttcagtttctctgtaacctcagatatcgatttctgcttgctccacacgaagacagagtttgcagaagcagccagacatgaacacacaagatggcagaagaagtcctggtgcattctgctattggcatttggcattgcgttgcatttgcattcagctcgctgctcttcttgccttgttgtgtgtgatctgggccaatctgacggcattttgggcacagttggtggtcgcgtatcccgtcggcccgtgttctcagttgctgagccaagcatattcagaatgggtcgcatcgcaacctaacatgtgctccatgttcacaaaaagctgggcccggatgttctctcaatataaagaaaaaaatatattttatgtctaccaattatggttaaagttagttttttcttcctcaactataaaaacccaacacagctccttcatcatcttctaaaaccagacacatgaccgtcctagctgttttt

SEQ ID NO: 34857 - DNA, 2357 bp, Zea Mays
atggggtacgagcaaggaagggacacagacaaagtttgtttgaagaaaaagaatggcatacggaaattgtcgttggattggtattcaagatgggaggatcagccaaatgacatggaagaagagttatcattaaatatggagaaggaattgcatttgctcgacaatcttgaaccaccatcaaaaatcgagaagctgagaattcgtggctaccggggttcacaattgccatgttggatggcaaagcaaagtgactcttgtggtccagccgatgatacacatatagtaatgcaaagaaatccatctgaattctcccatctgactaaactagtattggacaacttaccaaacttggagcatcttggggagcttgtggaactgccactgataaagatccttaagctcaaaagactgccaaagttgggagagctgcttacgaccacaactggggaggaaggagtggaagcgcaatgttgtttccatcacgtttccactctagtaataattgattgcccgaaacttgttgtgaagccgtactttcctccgtccttgcagagattgacactagaaggaaacaatatgcagttggtttcttcaggatgcttcttccatccacgtcatcatcatgcatctcatgctcatggtgacgagtcttcatcttcctcctattttgcggatgagacgggtactcacctcgagagacttgaacttcgtcggttgacaggatcatcatctggttgggaggtgctgcagcatctcactgggcttcataccctagaaatattcaagtgcacaggccttacgcatttacctgagagcatccactgccccaccaatctctgtagactggtgataacacagtgtgataatcttcgtgtgctgcctgactggcttgtggaactgaaatctctacagagtctggaagtacggttatgtgatgctctccagcagcttcctgaacaaataggagaactctgctcactccagcacctcaccatatcttctttgacttccctgacttgccttcccgagagcatgcagcacctcacctcgcttcgaactctcaacttgtgtctttgtaacgcgttgacccatctgccggagtggctaggcgaactctctgtacttcaaaaactctggctccagggctgccgtggccttacatccttgccccaatccatacaacgccttactgctctagaggacttacttataagctacaaccctgacctagataggcgttgcacggaaggattgggggaggattggcaccttgtctcacatattcaaaatttaaggctacgggactaggggcttcagattagtgcataatattctaaggaagacaaggatggccaggtgagacatttttgtttctctctggcatgtgagcacacatatttattttcttatgtttgtgaaagttgcacagcttagatattggcacttgattatatgctgcctcgtttgttcctcaaaaaatcgtattgtgtgctcgtgttacattgccactttttgctatattgttggttcacaggatccacactcttgctttcattctcatccctacttgttctcaggatccacactcttccctctaagtagcgtcgaaagtcgaaactaactgttccttttttatcagaatctgcagcgtttacatatatgtgcatcaactttggaaaacaagtgtttgcagagttggcaggtaccgtggcagttcagtgtcctcccaggataacacttgcgaccatactgaacgggtcaatgggcagagtgaatagagatgcaggctaccattgcaggggtacaggaggattgatgtggcgaaccccgcagggaagttaggagtttactctgcagatggtgtctgtgctctgaaccagtttcagtttctctgtaacctcagatatcgatttctgcttgctccacacgaagacagagtttgcagaagcagccagacatgaacacacaagatggcagaagaagtcctggtgcattctgctattggcatttggcattgcgttgcatttgcattcagctcgctgctcttcttgccttgttgtgtgtgatctgggccaatctgacggcattttgggcacagttggtggtcgcgtatcccgtcggcccgtgttctcagttgctgagccaagcatattcagaatgggtcgcatcgcaacctaacatgtgctccatgttcacaaaaagctgggcccggatgttctctcaatataaagaaaaaaatatattttatgtctaccaattatggttaaagttagttttttcttcctcaactataaaaacccaacacagctccttcatcatcttctaaaaccagacacatgaccgtcctagctgttttt

SEQ ID NO: 34858 - DNA, 2157 bp, Zea Mays
atggggtacgagcaaggaagggacacagacaaagtttgtttgaagaaaaagaatggcatacggaaattgtcgttggattggtattcaagatgggaggatcagccaaatgacatggaagaagagttatcattaaatatggagaaggaattgcatttgctcgacaatcttgaaccaccatcaaaaatcgagaagctgagaattcgtggctaccggggttcacaattgccatgttggatggcaaagcaaagtgactcttgtggtccagccgatgatacacatatagtaatgcaaagaaatccatctgaattctcccatctgactaaactagtattggacaacttaccaaacttggagcatcttggggagcttgtggaactgccactgataaagatccttaagctcaaaagactgccaaagttgggagagctgcttacgaccacaactggggaggaaggagtggaagcgcaatgttgtttccatcacgtttccactctagtaataattgattgcccgaaacttgttgtgaagccgtactttcctccgtccttgcagagattgacactagaaggaaacaatatgcagttggtttcttcaggatgcttcttccatccacgtcatcatcatgcatctcatgctcatggtgacgagtcttcatcttcctcctattttgcggatgagacgggtactcacctcgagagacttgaacttcgtcggttgacaggatcatcatctggttgggaggtgctgcagcatctcactgggcttcataccctagaaatattcaagtgcacaggccttacgcatttacctgagagcatccactgccccaccaatctctgtagactggtgataacacagtgtgataatcttcgtgtgctgcctgactggcttgtggaactgaaatctctacagagtctggaagtacggttatgtgatgctctccagcagcttcctgaacaaataggagaactctgctcactccagcacctcaccatatcttctttgacttccctgacttgccttcccgagagcatgcagcacctcacctcgcttcgaactctcaacttgtgtctttgtaacgcgttgacccatctgccggagtggctaggcgaactctctgtacttcaaaaactctggctccagggctgccgtggccttacatccttgccccaatccatacaacgccttactgctctagaggacttacttataagctacaaccctgacctagataggcgttgcacggaaggattgggggaggattggcaccttgtctcacatattcaaaatttaaggctacgggactaggggcttcagattagtgcataatattctaaggaagacaaggatggccagaatctgcagcgtttacatatatgtgcatcaactttggaaaacaagtgtttgcagaggtataaataagttaacgactcatgtgcccactctcaatcttgtacttgatggaaacatgtcaggctttccccttggaaaatctttggcaggtaccgtggcagttcagtgtcctcccaggataacacttgcgaccatactgaacgggtcaatgggcagagtgaatagagatgcaggctaccattgcaggggtacaggaggattgatgtggcgaaccccgcagggaagttaggagtttactctgcagatggtgtctgtgctctgaaccagtttcagtttctctgtaacctcagatatcgatttctgcttgctccacacgaagacagagtttgcagaagcagccagacatgaacacacaagatggcagaagaagtcctggtgcattctgctattggcatttggcattgcgttgcatttgcattcagctcgctgctcttcttgccttgttgtgtgtgatctgggccaatctgacggcattttgggcacagttggtggtcgcgtatcccgtcggcccgtgttctcagttgctgagccaagcatattcagaatgggtcgcatcgcaacctaacatgtgctccatgttcacaaaaagctgggcccggatgttctctcaatataaagaaaaaaatatattttatgtctaccaattatggttaaagttagttttttcttcctcaactataaaaacccaacacagctccttcatcatcttctaaaaccagacacatgaccgtcctagctgttttt

SEQ ID NO: 34859 - DNA, 2741 bp, Zea Mays
cacaaagccttcaaaaaatacagaaagctctctgtagacctgcagtctgagctacactccttcaatgtttctgcaacccaagcctccgtatgctcgacaaaaacatttggaggttgcacagaacacatcatttggtcagatcccaaggggaactctatttacaggaggctggaaactagtctgtagaagaacgaagcagttaatctattcttctctgataccagcgcttggaaacaagaataacataagagtttccttgcgaaggaacacctcaagagtctaaagtctaaagggtgttgtcccagggtacgagcaaggaagggacacagacaaagtttgtttgaagaaaaagaatggcatacggaaattgtcgttggattggtattcaagatgggaggatcagccaaatgacatggaagaagagttatcattaaatatggagaaggaattgcatttgctcgacaatcttgaaccaccatcaaaaatcgagaagctgagaattcgtggctaccggggttcacaattgccatgttggatggcaaagcaaagtgactcttgtggtccagccgatgatacacatatagtaatgcaaagaaatccatctgaattctcccatctgactaaactagtattggacaacttaccaaacttggagcatcttggggagcttgtggaactgccactgataaagatccttaagctcaaaagactgccaaagttgggagagctgcttacgaccacaactggggaggaaggagtggaagcgcaatgttgtttccatcacgtttccactctagtaataattgattgcccgaaacttgttgtgaagccgtactttcctccgtccttgcagagattgacactagaaggaaacaatatgcagttggtttcttcaggatgcttcttccatccacgtcatcatcatgcatctcatgctcatggtgacgagtcttcatcttcctcctattttgcggatgagacgggtactcacctcgagagacttgaacttcgtcggttgacaggatcatcatctggttgggaggtgctgcagcatctcactgggcttcataccctagaaatattcaagtgcacaggccttacgcatttacctgagagcatccactgccccaccaatctctgtagactggtgataacacagtgtgataatcttcgtgtgctgcctgactggcttgtggaactgaaatctctacagagtctggaagtacggttatgtgatgctctccagcagcttcctgaacaaataggagaactctgctcactccagcacctcaccatatcttctttgacttccctgacttgccttcccgagagcatgcagcacctcacctcgcttcgaactctcaacttgtgtctttgtaacgcgttgacccatctgccggagtggctaggcgaactctctgtacttcaaaaactctggctccagggctgccgtggccttacatccttgccccaatccatacaacgccttactgctctagaggacttacttataagctacaaccctgacctagataggcgttgcacggaaggattgggggaggattggcaccttgtctcacatattcaaaatttaaggctacgggactaggggcttcagattagtgcataatattctaaggaagacaaggatggccaggtgagacatttttgtttctctctggcatgtgagcacacatatttattttcttatgtttgtgaaagttgcacagcttagatattggcacttgattatatgctgcctcgtttgttcctcaaaaaatcgtattgtgtgctcgtgttacattgccactttttgctatattgttggttcacaggatccacactcttgctttcattctcatccctacttgttctcaggatccacactcttccctctaagtagcgtcgaaagtcgaaactaactgttccttttttatcagaatctgcagcgtttacatatatgtgcatcaactttggaaaacaagtgtttgcagaggtataaataagttaacgactcatgtgcccactctcaatcttgtacttgatggaaacatgtcaggctttccccttggaaaatctttggcaggtaccgtggcagttcagtgtcctcccaggataacacttgcgaccatactgaacgggtcaatgggcagagtgaatagagatgcaggctaccattgcaggggtacaggaggattgatgtggcgaaccccgcagggaagttaggagtttactctgcagatggtgtctgtgctctgaaccagtttcagtttctctgtaacctcagatatcgatttctgcttgctccacacgaagacagagtttgcagaagcagccagacatgaacacacaagatggcagaagaagtcctggtgcattctgctattggcatttggcattgcgttgcatttgcattcagctcgctgctcttcttgccttgttgtgtgtgatctgggccaatctgacggcattttgggcacagttggtggtcgcgtatcccgtcggcccgtgttctcagttgctgagccaagcatattcagaatgggtcgcatcgcaacctaacatgtgctccatgttcacaaaaagctgggcccggatgttctctcaatataaagaaaaaaatatattttatgtctaccaattatggttaaagttagttttttcttcctcaactataaaaacccaacacagctccttcatcatcttctaaaaccagacacatgaccgtcctagctgttttt

SEQ ID NO: 34860 - DNA, 1106 bp, Zea Mays
cacaaagccttcaaaaaatacagaaagctctctgtagacctgcagtctgagctacactccttcaatgtttctgcaacccaagcctccgtatgctcgacaaaaacatttggaggttgcacagaacacatcatttggtcagatcccaaggggaactctatttacaggaggctggaaactagtctgtagaagaacgaagcagttaatctattcttctctgataccagcgcttggaaacaagaataacataagagtttccttgcgaaggaacacctcaagagtctaaagtctaaagggtgttgtcccagaatctgcagcgtttacatatatgtgcatcaactttggaaaacaagtgtttgcagaggtataaataagttaacgactcatgtgcccactctcaatcttgtacttgatggaaacatgtcaggctttccccttggaaaatctttggcaggtaccgtggcagttcagtgtcctcccaggataacacttgcgaccatactgaacgggtcaatgggcagagtgaatagagatgcaggctaccattgcaggggtacaggaggattgatgtggcgaaccccgcagggaagttaggagtttactctgcagatggtgtctgtgctctgaaccagtttcagtttctctgtaacctcagatatcgatttctgcttgctccacacgaagacagagtttgcagaagcagccagacatgaacacacaagatggcagaagaagtcctggtgcattctgctattggcatttggcattgcgttgcatttgcattcagctcgctgctcttcttgccttgttgtgtgtgatctgggccaatctgacggcattttgggcacagttggtggtcgcgtatcccgtcggcccgtgttctcagttgctgagccaagcatattcagaatgggtcgcatcgcaacctaacatgtgctccatgttcacaaaaagctgggcccggatgttctctcaatataaagaaaaaaatatattttatgtctaccaattatggttaaagttagttttttcttcctcaactataaaaacccaacacagctccttcatcatcttctaaaaccagacacatgaccgtcctagctgttttt

SEQ ID NO: 34861 - DNA, 2458 bp, Zea Mays
cacaaagccttcaaaaaatacagaaagctctctgtagacctgcagtctgagctacactccttcaatgtttctgcaacccaagcctccgtatgctcgacaaaaacatttggaggttgcacagaacacatcatttggtcagatcccaaggggaactctatttacaggaggctggaaactagtctgtagaagaacgaagcagttaatctattcttctctgataccagcgcttggaaacaagaataacataagagtttccttgcgaaggaacacctcaagagtctaaagtctaaagggtgttgtcccagggtacgagcaaggaagggacacagacaaagtttgtttgaagaaaaagaatggcatacggaaattgtcgttggattggtattcaagatgggaggatcagccaaatgacatggaagaagagttatcattaaatatggagaaggaattgcatttgctcgacaatcttgaaccaccatcaaaaatcgagaagctgagaattcgtggctaccggggttcacaattgccatgttggatggcaaagcaaagtgactcttgtggtccagccgatgatacacatatagtaatgcaaagaaatccatctgaattctcccatctgactaaactagtattggacaacttaccaaacttggagcatcttggggagcttgtggaactgccactgataaagatccttaagctcaaaagactgccaaagttgggagagctgcttacgaccacaactggggaggaaggagtggaagcgcaatgttgtttccatcacgtttccactctagtaataattgattgcccgaaacttgttgtgaagccgtactttcctccgtccttgcagagattgacactagaaggaaacaatatgcagttggtttcttcaggatgcttcttccatccacgtcatcatcatgcatctcatgctcatggtgacgagtcttcatcttcctcctattttgcggatgagacgggtactcacctcgagagacttgaacttcgtcggttgacaggatcatcatctggttgggaggtgctgcagcatctcactgggcttcataccctagaaatattcaagtgcacaggccttacgcatttacctgagagcatccactgccccaccaatctctgtagactggtgataacacagtgtgataatcttcgtgtgctgcctgactggcttgtggaactgaaatctctacagagtctggaagtacggttatgtgatgctctccagcagcttcctgaacaaataggagaactctgctcactccagcacctcaccatatcttctttgacttccctgacttgccttcccgagagcatgcagcacctcacctcgcttcgaactctcaacttgtgtctttgtaacgcgttgacccatctgccggagtggctaggcgaactctctgtacttcaaaaactctggctccagggctgccgtggccttacatccttgccccaatccatacaacgccttactgctctagaggacttacttataagctacaaccctgacctagataggcgttgcacggaaggattgggggaggattggcaccttgtctcacatattcaaaatttaaggctacgggactaggggcttcagattagtgcataatattctaaggaagacaaggatggccagaatctgcagcgtttacatatatgtgcatcaactttggaaaacaagtgtttgcagaggtataaataagttaacgactcatgtgcccactctcaatcttgtacttgatggaaacatgtcaggctttccccttggaaaatctttggcaggtaccgtggcagttcagtgtcctcccaggataacacttgcgaccatactgaacgggtcaatgggcagagtgaatagagatgcaggctaccattgcaggggtacaggaggattgatgtggcgaaccccgcagggaagttaggagtttactctgcagatggtgtctgtgctctgaaccagtttcagtttctctgtaacctcagatatcgatttctgcttgctccacacgaagacagagtttgcagaagcagccagacatgaacacacaagatggcagaagaagtcctggtgcattctgctattggcatttggcattgcgttgcatttgcattcagctcgctgctcttcttgccttgttgtgtgtgatctgggccaatctgacggcattttgggcacagttggtggtcgcgtatcccgtcggcccgtgttctcagttgctgagccaagcatattcagaatgggtcgcatcgcaacctaacatgtgctccatgttcacaaaaagctgggcccggatgttctctcaatataaagaaaaaaatatattttatgtctaccaattatggttaaagttagttttttcttcctcaactataaaaacccaacacagctccttcatcatcttctaaaaccagacacatgaccgtcctagctgttttt

SEQ ID NO: 34862 - DNA, 5091 bp, Zea Mays
ggattattgaccaactgaattcaattaaaaattcttcagataggaactggtttttcaggaatgcttcaaacaaaaattcgttaagaaataatccatatttaatctgggccttcagtttactcaatttgtcttttaccacatcaatgaaaaagttcaacgagaaattaaataagccatcaggcttctgaggaacaggagcagtttgtggaggtataaacaaaatcaacctccatgattaaacaaaagttcaacgagtaattaaataagcgcccgctgggtcgttcgttgccagatcatgtttttcaggtctgtctacctccatgattattaaattttttttcgagcgatcccgattccaacaggggacacgagaacggctttcgaggctaggcatgtggtttggaggaataatctcacgtggtaccacgctttggaggggcacacgagatgcggtcgtgcgtgcagatgggtttcacatggcagcggtttcctggtctgggccagctcgatcaccgagttaagaagctgactgaagccacaagccactgaggcaccaaagaatacgcaaagctctctgcagacctgcagtctgagctacactcattcaaagtttcggctaacaaaaacatttggaggttgcacagaacaacacatcatttggtcagatcccaaggtttctactatcatgaaagctagaacagatgcgttttcttttttgcttttgtcatgcttatcaatttcttccttggcatctggaggctggaaactagtctgtacaagaacgaagcagttaatctattcttctctgataccagcgcttggggtacgagcaaggaagggacttcaagaaatacgggtgggatggaagttgccttggtatcaactgtattgaaggttttggggacgaagttagctcctcttgcactcaaagagttgagctctaaagcaggtgtggccaaagatcttcaggaactccaggacctagttgaggagatcaacaattggttgcaaacagttggtgataaagaccgatcatctaaatggctcaaaaaattgaaagaagttgcttatgatgctgaagatttagtccatgagttccacatcgaggctgaaaaacaagacagagaaattactggtggcaagaataccttggtcaaatacttcatcacaaaacctaaagcaactgtgactgaatttaagatagctcacaagatcaagaaaataaaaaacagatttgatgcaattgtgaaaggaaggagtgactatagcacaatagcaaatagcatgccagtggattatcctgttgagcatacaagaaagacaattggagaggtgccattgtatactattgtggatgagacatcaatatttggcagggatcaagcaaagaatcagataatatctaagctgatagagactgatagccaacaaagaataaagatagtttcagtaattgggctaggtggctctggtaaaactactctcgcgaaacaagtatttaatgatggtaacattataaagcattttgaagttatattgtgggttcatgtgtcaagagaatttgctgttgaaaagcttgtggcgaagttgtttgaagccattgctggtgacatgtctgaccacctcctattgcagcatgtgagcagaactatctcagacaagttagttggaaagaggttcctagctgtcttggatgacgtttggacagaggatcgtgttgagtgggagcgattcatggtacatttaaagtgcggtgcacctggaagtagtattttactcactactcgtagtagaaaagttgcagaagcagtggattctagttatgcatacgacctaccactcttgtctatggaagatagctggaaagtgttccaacaatgttttggaattgccatgaaagctctagaccctgaattcctacagtccgggatagagattgtggagaaatgcggaggtgtgccccttgcaattaaagttattgcaggcatcctccatggaatgaaaggaattgaagaatggcagtccatatgcaatagtaatttattagatgtccaggatgacgaacatagagtatttgcatgcttgtggttgagttttgttcatttaccggaccatctaaagccttgttttctacactgctctatatttccaagaggctatgtaatcaacaggtgtcatttgatttctcaatggatagctcatggcttcgtcccgacaaaccaagctcgacaagcagaagatgttggaattggctactttgattcccttcttaaagtggggttccttcaagaccatgatcgagaccaaatttggtccacaaggggtgaagtaacatgcaaaatgcatgacctggttcatgatctcgctagacaaattctacgggatgaatttgagtctgagatagaaacaaacaagcaaataaagagatgcagatacctatctttgacttcatgcactgggaagcttgataacaaattatgtggcaaggtccgtgcactctatgtttgtggccgtgcactcgaatttgacaagacaatgagcaagcagtgttgtgtccgtaccattatattgaagtatataactgctgactcattgcctctgtttgtgtcaaaatttgaatacctggggtatcttgaaatatccgatgttaactgtgaagcactaccagaagctctctcgcgttgttggaacttgcaggcccttcatatattaaattgctcaagacttgcagttgtacctgaaagtatcggcaagcttaagaagcttagaactctggaactgaatggtgtttctagtatcaagagtttaccacagtctattggcgattgtgataatcttcgaagattatacctagaaggttgtcatagattcgaagatataccaaattccttgggaaaattggaaaatttaaggatacttagtattgttcattgctttagttttgaaaaactttcgccatcagcatcatttgggaagcttttgaacttacaaactatcacctttaactgttgcttcaatctccgaaacctacctcagtgcatgacttctttgagtcatctagagatggtggatcttggatattgttacgagcttgttgaattgcctgaaggcatagggaatttaagaaaccttaaagttttgaatctgaagcaatgcacacaattgcgtggactaccagctggttgtgggcagctaactcgtttacaacagttgagcttgtttgttattggagacagtgccaaacacgcaaggatctctgagcttggtaatcttgataagttggatggtgagctgcagattaaaaacattagatatgtgaaagatccaagtgacacagacaaagttcgtttgaagaaaaagattggcatccggaaattgtcgttggattggtattcaagattggaggttcagcctgatgatgtggaagaagagttatcattaaatatggagaaggaattgcatttgctcgacagtcttgaaccaccatcaaaaattgagaagctgagaattcgtggctaccggggttcacaattgccacgttggatggcaaagcaaagtgactcttgtggtccagcggatgatacacacatagtaatgcaaagaaatccatctgaattctcccatctgactgaattagtactggacaacttaccaaacttggagcaccttggggaacttgtggaactgccactggtaaagatccttaagctcaaaagactgccaaagttggtagagctgcttacgaccacaacgggggaggaaggagtggaagtgctatgtcgtttccatcacgtttccactctagtaataattgattgccggaaacttgttgtgaagccgtactttcctccgtccttgcagagattgacactagaaggaaacaatatgcagttggtttcttcaggatgcttcttccatccacgtcatcatcatgcatctcatgctcatggtgacgagtcttcatcttcctcctattttgcggatgagacgggtactcacctcgagagacttgaacttcgtcggttgacaggatcatcatctggttgggaggtgctgcagcatctcactgggcttcataccctagaaatatacatgtgcacagaccttacacatttacctgagagcatccactgccccaccactctctgtagactgatgataagaagttgtgataatcttcgtgtgctgcctgactggcttgtggaactgaaatctctacagagtctggacatagactcatgtgatgctctccagcagcttcctgaacaaataggagaactctgctcactccagcacctccaaataatttctatgcctttcctgacttgccttcccgagagcatgcagcacctcacctcgcttcgaattctcaacttgtgtgaatgtaacgcgctgacccatcttccggagtggctaggcgaactctctgcgcttaaaaaactcttgatccagagctgccgtggccttacatctttgccccgctccatacaatgccttactgctctcgaggaattatatataagcggcaaccccaaactgcttcagatcagtgcatcatattctaaggaagacaaggatggccaggctccgacgacattcagatcacatggcttgacaggtcgacatacaaatccccgttccatgtagtatttctgcagggacaagagtcttctctcttgaactctacagctgcaaccgttccgatgttgcaggcctgacgaccagcattgcagtgaggcccaagagttcgatctggtccggaacatgctcatcgtcgcagtagaagaacgctacaaggatgctggtaaacgtctaagaaaacaccatgtaaatatggaggccttttttttgctgaagcgcatgaagcttcggcaaacatctaaagaacaccatgcaaatggctgtggtgtcctgcgattggtctacgcgatgtacatgtgcgcaagctgctttgaagagaatttaaccaccttgaattttaggtacccatacagttcgctcatgtattgatctggcgcaagcttcgatgaacattttttggtttcatgtggttgatatgttgcttgagccttgtcagcttgacgatttttt

SEQ ID NO: 34863 - DNA, 5032 bp, Zea Mays
ggattattgaccaactgaattcaattaaaaattcttcagataggaactggtttttcaggaatgcttcaaacaaaaattcgttaagaaataatccatatttaatctgggccttcagtttactcaatttgtcttttaccacatcaatgaaaaagttcaacgagaaattaaataagccatcaggcttctgaggaacaggagcagtttgtggaggtataaacaaaatcaacctccatgattaaacaaaagttcaacgagtaattaaataagcgcccgctgggtcgttcgttgccagatcatgtttttcaggtctgtctacctccatgattattaaattttttttcgagcgatcccgattccaacaggggacacgagaacggctttcgaggctaggcatgtggtttggaggaataatctcacgtggtaccacgctttggaggggcacacgagatgcggtcgtgcgtgcagatgggtttcacatggcagcggtttcctggtctgggccagctcgatcaccgagttaagaagctgactgaagccacaagccactgaggcaccaaagaatacgcaaagctctctgcagacctgcagtctgagctacactcattcaaagtttcggctaacaaaaacatttggaggttgcacagaacaacacatcatttggtcagatcccaaggggaactctatttacaggaggctggaaactagtctgtacaagaacgaagcagttaatctattcttctctgataccagcgcttggggtacgagcaaggaagggacttcaagaaatacgggtgggatggaagttgccttggtatcaactgtattgaaggttttggggacgaagttagctcctcttgcactcaaagagttgagctctaaagcaggtgtggccaaagatcttcaggaactccaggacctagttgaggagatcaacaattggttgcaaacagttggtgataaagaccgatcatctaaatggctcaaaaaattgaaagaagttgcttatgatgctgaagatttagtccatgagttccacatcgaggctgaaaaacaagacagagaaattactggtggcaagaataccttggtcaaatacttcatcacaaaacctaaagcaactgtgactgaatttaagatagctcacaagatcaagaaaataaaaaacagatttgatgcaattgtgaaaggaaggagtgactatagcacaatagcaaatagcatgccagtggattatcctgttgagcatacaagaaagacaattggagaggtgccattgtatactattgtggatgagacatcaatatttggcagggatcaagcaaagaatcagataatatctaagctgatagagactgatagccaacaaagaataaagatagtttcagtaattgggctaggtggctctggtaaaactactctcgcgaaacaagtatttaatgatggtaacattataaagcattttgaagttatattgtgggttcatgtgtcaagagaatttgctgttgaaaagcttgtggcgaagttgtttgaagccattgctggtgacatgtctgaccacctcctattgcagcatgtgagcagaactatctcagacaagttagttggaaagaggttcctagctgtcttggatgacgtttggacagaggatcgtgttgagtgggagcgattcatggtacatttaaagtgcggtgcacctggaagtagtattttactcactactcgtagtagaaaagttgcagaagcagtggattctagttatgcatacgacctaccactcttgtctatggaagatagctggaaagtgttccaacaatgttttggaattgccatgaaagctctagaccctgaattcctacagtccgggatagagattgtggagaaatgcggaggtgtgccccttgcaattaaagttattgcaggcatcctccatggaatgaaaggaattgaagaatggcagtccatatgcaatagtaatttattagatgtccaggatgacgaacatagagtatttgcatgcttgtggttgagttttgttcatttaccggaccatctaaagccttgttttctacactgctctatatttccaagaggctatgtaatcaacaggtgtcatttgatttctcaatggatagctcatggcttcgtcccgacaaaccaagctcgacaagcagaagatgttggaattggctactttgattcccttcttaaagtggggttccttcaagaccatgatcgagaccaaatttggtccacaaggggtgaagtaacatgcaaaatgcatgacctggttcatgatctcgctagacaaattctacgggatgaatttgagtctgagatagaaacaaacaagcaaataaagagatgcagatacctatctttgacttcatgcactgggaagcttgataacaaattatgtggcaaggtccgtgcactctatgtttgtggccgtgcactcgaatttgacaagacaatgagcaagcagtgttgtgtccgtaccattatattgaagtatataactgctgactcattgcctctgtttgtgtcaaaatttgaatacctggggtatcttgaaatatccgatgttaactgtgaagcactaccagaagctctctcgcgttgttggaacttgcaggcccttcatatattaaattgctcaagacttgcagttgtacctgaaagtatcggcaagcttaagaagcttagaactctggaactgaatggtgtttctagtatcaagagtttaccacagtctattggcgattgtgataatcttcgaagattatacctagaaggttgtcatagattcgaagatataccaaattccttgggaaaattggaaaatttaaggatacttagtattgttcattgctttagttttgaaaaactttcgccatcagcatcatttgggaagcttttgaacttacaaactatcacctttaactgttgcttcaatctccgaaacctacctcagtgcatgacttctttgagtcatctagagatggtggatcttggatattgttacgagcttgttgaattgcctgaaggcatagggaatttaagaaaccttaaagttttgaatctgaagcaatgcacacaattgcgtggactaccagctggttgtgggcagctaactcgtttacaacagttgagcttgtttgttattggagacagtgccaaacacgcaaggatctctgagcttggtaatcttgataagttggatggtgagctgcagattaaaaacattagatatgtgaaagatccaagtgacacagacaaagttcgtttgaagaaaaagattggcatccggaaattgtcgttggattggtattcaagattggaggttcagcctgatgatgtggaagaagagttatcattaaatatggagaaggaattgcatttgctcgacagtcttgaaccaccatcaaaaattgagaagctgagaattcgtggctaccggggttcacaattgccacgttggatggcaaagcaaagtgactcttgtggtccagcggatgatacacacatagtaatgcaaagaaatccatctgaattctcccatctgactgaattagtactggacaacttaccaaacttggagcaccttggggaacttgtggaactgccactggtaaagatccttaagctcaaaagactgccaaagttggtagagctgcttacgaccacaacgggggaggaaggagtggaagtgctatgtcgtttccatcacgtttccactctagtaataattgattgccggaaacttgttgtgaagccgtactttcctccgtccttgcagagattgacactagaaggaaacaatatgcagttggtttcttcaggatgcttcttccatccacgtcatcatcatgcatctcatgctcatggtgacgagtcttcatcttcctcctattttgcggatgagacgggtactcacctcgagagacttgaacttcgtcggttgacaggatcatcatctggttgggaggtgctgcagcatctcactgggcttcataccctagaaatatacatgtgcacagaccttacacatttacctgagagcatccactgccccaccactctctgtagactgatgataagaagttgtgataatcttcgtgtgctgcctgactggcttgtggaactgaaatctctacagagtctggacatagactcatgtgatgctctccagcagcttcctgaacaaataggagaactctgctcactccagcacctccaaataatttctatgcctttcctgacttgccttcccgagagcatgcagcacctcacctcgcttcgaattctcaacttgtgtgaatgtaacgcgctgacccatcttccggagtggctaggcgaactctctgcgcttaaaaaactcttgatccagagctgccgtggccttacatctttgccccgctccatacaatgccttactgctctcgaggaattatatataagcggcaaccccaaactgcttcagatcagtgcatcatattctaaggaagacaaggatggccagctgcaaccgttccgatgttgcaggcctgacgaccagcattgcagtgaggcccaagagttcgatctggtccggaacatgctcatcgtcgcagtagaagaacgctacaaggatgctgctcaatacagaggccaacattccatgttgcggtcaaagaaaaagaacgcgatatagcaggcccaggccgttattatgtacatccacatgtgtgccaagttcaacttgttaggtaaacgtctaagaaaacaccatgtaaatatggaggccttttttttgctgaagcgcatgaagcttcggcaaacatctaaagaacaccatgcaaatggctgtggtgtcctgcgattggtctacgcgatgtacatgtgcgcaagctgctttgaagagaatttaaccaccttgaattttaggtacccatacagttcgctcatgtattgatctggcgcaagcttcgatgaacattttttggtttcatgtggttgatatgttgcttgagccttgtcagcttgacgatttttt

SEQ ID NO: 34864 - DNA, 5075 bp, Zea Mays
ggattattgaccaactgaattcaattaaaaattcttcagataggaactggtttttcaggaatgcttcaaacaaaaattcgttaagaaataatccatatttaatctgggccttcagtttactcaatttgtcttttaccacatcaatgaaaaagttcaacgagaaattaaataagccatcaggcttctgaggaacaggagcagtttgtggaggtataaacaaaatcaacctccatgattaaacaaaagttcaacgagtaattaaataagcgcccgctgggtcgttcgttgccagatcatgtttttcaggtctgtctacctccatgattattaaattttttttcgagcgatcccgattccaacaggggacacgagaacggctttcgaggctaggcatgtggtttggaggaataatctcacgtggtaccacgctttggaggggcacacgagatgcggtcgtgcgtgcagatgggtttcacatggcagcggtttcctggtctgggccagctcgatcaccgagttaagaagctgactgaagccacaagccactgaggcaccaaagaatacgcaaagctctctgcagacctgcagtctgagctacactcattcaaagtttcggctaacaaaaacatttggaggttgcacagaacaacacatcatttggtcagatcccaaggggaactctatttacaggaggctggaaactagtctgtacaagaacgaagcagttaatctattcttctctgataccagcgcttggaaacaagaataacataaagggtgttgtcccagggtacgagcaaggaagggacttcaagaaatacgggtgggatggaagttgccttggtatcaactgtattgaaggttttggggacgaagttagctcctcttgcactcaaagagttgagctctaaagcaggtgtggccaaagatcttcaggaactccaggacctagttgaggagatcaacaattggttgcaaacagttggtgataaagaccgatcatctaaatggctcaaaaaattgaaagaagttgcttatgatgctgaagatttagtccatgagttccacatcgaggctgaaaaacaagacagagaaattactggtggcaagaataccttggtcaaatacttcatcacaaaacctaaagcaactgtgactgaatttaagatagctcacaagatcaagaaaataaaaaacagatttgatgcaattgtgaaaggaaggagtgactatagcacaatagcaaatagcatgccagtggattatcctgttgagcatacaagaaagacaattggagaggtgccattgtatactattgtggatgagacatcaatatttggcagggatcaagcaaagaatcagataatatctaagctgatagagactgatagccaacaaagaataaagatagtttcagtaattgggctaggtggctctggtaaaactactctcgcgaaacaagtatttaatgatggtaacattataaagcattttgaagttatattgtgggttcatgtgtcaagagaatttgctgttgaaaagcttgtggcgaagttgtttgaagccattgctggtgacatgtctgaccacctcctattgcagcatgtgagcagaactatctcagacaagttagttggaaagaggttcctagctgtcttggatgacgtttggacagaggatcgtgttgagtgggagcgattcatggtacatttaaagtgcggtgcacctggaagtagtattttactcactactcgtagtagaaaagttgcagaagcagtggattctagttatgcatacgacctaccactcttgtctatggaagatagctggaaagtgttccaacaatgttttggaattgccatgaaagctctagaccctgaattcctacagtccgggatagagattgtggagaaatgcggaggtgtgccccttgcaattaaagttattgcaggcatcctccatggaatgaaaggaattgaagaatggcagtccatatgcaatagtaatttattagatgtccaggatgacgaacatagagtatttgcatgcttgtggttgagttttgttcatttaccggaccatctaaagccttgttttctacactgctctatatttccaagaggctatgtaatcaacaggtgtcatttgatttctcaatggatagctcatggcttcgtcccgacaaaccaagctcgacaagcagaagatgttggaattggctactttgattcccttcttaaagtggggttccttcaagaccatgatcgagaccaaatttggtccacaaggggtgaagtaacatgcaaaatgcatgacctggttcatgatctcgctagacaaattctacgggatgaatttgagtctgagatagaaacaaacaagcaaataaagagatgcagatacctatctttgacttcatgcactgggaagcttgataacaaattatgtggcaaggtccgtgcactctatgtttgtggccgtgcactcgaatttgacaagacaatgagcaagcagtgttgtgtccgtaccattatattgaagtatataactgctgactcattgcctctgtttgtgtcaaaatttgaatacctggggtatcttgaaatatccgatgttaactgtgaagcactaccagaagctctctcgcgttgttggaacttgcaggcccttcatatattaaattgctcaagacttgcagttgtacctgaaagtatcggcaagcttaagaagcttagaactctggaactgaatggtgtttctagtatcaagagtttaccacagtctattggcgattgtgataatcttcgaagattatacctagaaggttgtcatagattcgaagatataccaaattccttgggaaaattggaaaatttaaggatacttagtattgttcattgctttagttttgaaaaactttcgccatcagcatcatttgggaagcttttgaacttacaaactatcacctttaactgttgcttcaatctccgaaacctacctcagtgcatgacttctttgagtcatctagagatggtggatcttggatattgttacgagcttgttgaattgcctgaaggcatagggaatttaagaaaccttaaagttttgaatctgaagcaatgcacacaattgcgtggactaccagctggttgtgggcagctaactcgtttacaacagttgagcttgtttgttattggagacagtgccaaacacgcaaggatctctgagcttggtaatcttgataagttggatggtgagctgcagattaaaaacattagatatgtgaaagatccaagtgacacagacaaagttcgtttgaagaaaaagattggcatccggaaattgtcgttggattggtattcaagattggaggttcagcctgatgatgtggaagaagagttatcattaaatatggagaaggaattgcatttgctcgacagtcttgaaccaccatcaaaaattgagaagctgagaattcgtggctaccggggttcacaattgccacgttggatggcaaagcaaagtgactcttgtggtccagcggatgatacacacatagtaatgcaaagaaatccatctgaattctcccatctgactgaattagtactggacaacttaccaaacttggagcaccttggggaacttgtggaactgccactggtaaagatccttaagctcaaaagactgccaaagttggtagagctgcttacgaccacaacgggggaggaaggagtggaagtgctatgtcgtttccatcacgtttccactctagtaataattgattgccggaaacttgttgtgaagccgtactttcctccgtccttgcagagattgacactagaaggaaacaatatgcagttggtttcttcaggatgcttcttccatccacgtcatcatcatgcatctcatgctcatggtgacgagtcttcatcttcctcctattttgcggatgagacgggtactcacctcgagagacttgaacttcgtcggttgacaggatcatcatctggttgggaggtgctgcagcatctcactgggcttcataccctagaaatatacatgtgcacagaccttacacatttacctgagagcatccactgccccaccactctctgtagactgatgataagaagttgtgataatcttcgtgtgctgcctgactggcttgtggaactgaaatctctacagagtctggacatagactcatgtgatgctctccagcagcttcctgaacaaataggagaactctgctcactccagcacctccaaataatttctatgcctttcctgacttgccttcccgagagcatgcagcacctcacctcgcttcgaattctcaacttgtgtgaatgtaacgcgctgacccatcttccggagtggctaggcgaactctctgcgcttaaaaaactcttgatccagagctgccgtggccttacatctttgccccgctccatacaatgccttactgctctcgaggaattatatataagcggcaaccccaaactgcttcagatcagtgcatcatattctaaggaagacaaggatggccaggctccgacgacattcagatcacatggcttgacaggcctgacgaccagcattgcagtgaggcccaagagttcgatctggtccggaacatgctcatcgtcgcagtagaagaacgctacaaggatgctgctcaatacagaggccaacattccatgttgcggtcaaagaaaaagaacgcgatatagcaggcccaggccgttattatgtacatccacatgtgtgccaagttcaacttgttaggtaaacgtctaagaaaacaccatgtaaatatggaggccttttttttgctgaagcgcatgaagcttcggcaaacatctaaagaacaccatgcaaatggctgtggtgtcctgcgattggtctacgcgatgtacatgtgcgcaagctgctttgaagagaatttaaccaccttgaattttaggtacccatacagttcgctcatgtattgatctggcgcaagcttcgatgaacattttttggtttcatgtggttgatatgttgcttgagccttgtcagcttgacgatttttt

SEQ ID NO: 34865 - DNA, 5264 bp, Zea Mays
ggattattgaccaactgaattcaattaaaaattcttcagataggaactggtttttcaggaatgcttcaaacaaaaattcgttaagaaataatccatatttaatctgggccttcagtttactcaatttgtcttttaccacatcaatgaaaaagttcaacgagaaattaaataagccatcaggcttctgaggaacaggagcagtttgtggaggtataaacaaaatcaacctccatgattaaacaaaagttcaacgagtaattaaataagcgcccgctgggtcgttcgttgccagatcatgtttttcaggtctgtctacctccatgattattaaattttttttcgagcgatcccgattccaacaggggacacgagaacggctttcgaggctaggcatgtggtttggaggaataatctcacgtggtaccacgctttggaggggcacacgagatgcggtcgtgcgtgcagatgggtttcacatggcagcggtttcctggtctgggccagctcgatcaccgagttaagaagctgactgaagccacaagccactgaggcaccaaagaatacgcaaagctctctgcagacctgcagtctgagctacactcattcaaagtttcggctaacaaaaacatttggaggttgcacagaacaacacatcatttggtcagatcccaaggtttctactatcatgaaagctagaacagatgcgttttcttttttgcttttgtcatgcttatcaatttcttccttggcatctggtattttctttgctggataaatttactttccctgcctcttcttaggggaactctatttacaggaggctggaaactagtctgtacaagaacgaagcagttaatctattcttctctgataccagcgcttggggtacgagcaaggaagggacttcaagaaatacgggtgggatggaagttgccttggtatcaactgtattgaaggttttggggacgaagttagctcctcttgcactcaaagagttgagctctaaagcaggtgtggccaaagatcttcaggaactccaggacctagttgaggagatcaacaattggttgcaaacagttggtgataaagaccgatcatctaaatggctcaaaaaattgaaagaagttgcttatgatgctgaagatttagtccatgagttccacatcgaggctgaaaaacaagacagagaaattactggtggcaagaataccttggtcaaatacttcatcacaaaacctaaagcaactgtgactgaatttaagatagctcacaagatcaagaaaataaaaaacagatttgatgcaattgtgaaaggaaggagtgactatagcacaatagcaaatagcatgccagtggattatcctgttgagcatacaagaaagacaattggagaggtgccattgtatactattgtggatgagacatcaatatttggcagggatcaagcaaagaatcagataatatctaagctgatagagactgatagccaacaaagaataaagatagtttcagtaattgggctaggtggctctggtaaaactactctcgcgaaacaagtatttaatgatggtaacattataaagcattttgaagttatattgtgggttcatgtgtcaagagaatttgctgttgaaaagcttgtggcgaagttgtttgaagccattgctggtgacatgtctgaccacctcctattgcagcatgtgagcagaactatctcagacaagttagttggaaagaggttcctagctgtcttggatgacgtttggacagaggatcgtgttgagtgggagcgattcatggtacatttaaagtgcggtgcacctggaagtagtattttactcactactcgtagtagaaaagttgcagaagcagtggattctagttatgcatacgacctaccactcttgtctatggaagatagctggaaagtgttccaacaatgttttggaattgccatgaaagctctagaccctgaattcctacagtccgggatagagattgtggagaaatgcggaggtgtgccccttgcaattaaagttattgcaggcatcctccatggaatgaaaggaattgaagaatggcagtccatatgcaatagtaatttattagatgtccaggatgacgaacatagagtatttgcatgcttgtggttgagttttgttcatttaccggaccatctaaagccttgttttctacactgctctatatttccaagaggctatgtaatcaacaggtgtcatttgatttctcaatggatagctcatggcttcgtcccgacaaaccaagctcgacaagcagaagatgttggaattggctactttgattcccttcttaaagtggggttccttcaagaccatgatcgagaccaaatttggtccacaaggggtgaagtaacatgcaaaatgcatgacctggttcatgatctcgctagacaaattctacgggatgaatttgagtctgagatagaaacaaacaagcaaataaagagatgcagatacctatctttgacttcatgcactgggaagcttgataacaaattatgtggcaaggtccgtgcactctatgtttgtggccgtgcactcgaatttgacaagacaatgagcaagcagtgttgtgtccgtaccattatattgaagtatataactgctgactcattgcctctgtttgtgtcaaaatttgaatacctggggtatcttgaaatatccgatgttaactgtgaagcactaccagaagctctctcgcgttgttggaacttgcaggcccttcatatattaaattgctcaagacttgcagttgtacctgaaagtatcggcaagcttaagaagcttagaactctggaactgaatggtgtttctagtatcaagagtttaccacagtctattggcgattgtgataatcttcgaagattatacctagaaggttgtcatagattcgaagatataccaaattccttgggaaaattggaaaatttaaggatacttagtattgttcattgctttagttttgaaaaactttcgccatcagcatcatttgggaagcttttgaacttacaaactatcacctttaactgttgcttcaatctccgaaacctacctcagtgcatgacttctttgagtcatctagagatggtggatcttggatattgttacgagcttgttgaattgcctgaaggcatagggaatttaagaaaccttaaagttttgaatctgaagcaatgcacacaattgcgtggactaccagctggttgtgggcagctaactcgtttacaacagttgagcttgtttgttattggagacagtgccaaacacgcaaggatctctgagcttggtaatcttgataagttggatggtgagctgcagattaaaaacattagatatgtgaaagatccaagtgacacagacaaagttcgtttgaagaaaaagattggcatccggaaattgtcgttggattggtattcaagattggaggttcagcctgatgatgtggaagaagagttatcattaaatatggagaaggaattgcatttgctcgacagtcttgaaccaccatcaaaaattgagaagctgagaattcgtggctaccggggttcacaattgccacgttggatggcaaagcaaagtgactcttgtggtccagcggatgatacacacatagtaatgcaaagaaatccatctgaattctcccatctgactgaattagtactggacaacttaccaaacttggagcaccttggggaacttgtggaactgccactggtaaagatccttaagctcaaaagactgccaaagttggtagagctgcttacgaccacaacgggggaggaaggagtggaagtgctatgtcgtttccatcacgtttccactctagtaataattgattgccggaaacttgttgtgaagccgtactttcctccgtccttgcagagattgacactagaaggaaacaatatgcagttggtttcttcaggatgcttcttccatccacgtcatcatcatgcatctcatgctcatggtgacgagtcttcatcttcctcctattttgcggatgagacgggtactcacctcgagagacttgaacttcgtcggttgacaggatcatcatctggttgggaggtgctgcagcatctcactgggcttcataccctagaaatatacatgtgcacagaccttacacatttacctgagagcatccactgccccaccactctctgtagactgatgataagaagttgtgataatcttcgtgtgctgcctgactggcttgtggaactgaaatctctacagagtctggacatagactcatgtgatgctctccagcagcttcctgaacaaataggagaactctgctcactccagcacctccaaataatttctatgcctttcctgacttgccttcccgagagcatgcagcacctcacctcgcttcgaattctcaacttgtgtgaatgtaacgcgctgacccatcttccggagtggctaggcgaactctctgcgcttaaaaaactcttgatccagagctgccgtggccttacatctttgccccgctccatacaatgccttactgctctcgaggaattatatataagcggcaaccccaaactgcttcagatcagtgcatcatattctaaggaagacaaggatggccaggctccgacgacattcagatcacatggcttgacaggtcgacatacaaatccccgttccatgtagtatttctgcagggacaagagtcttctctcttgaactctacagctgcaaccgttccgatgttgcaggcctgacgaccagcattgcagtgaggcccaagagttcgatctggtccggaacatgctcatcgtcgcagtagaagaacgctacaaggatgctgctcaatacagaggccaacattccatgttgcggtcaaagaaaaagaacgcgatatagcaggcccaggccgttattatgtacatccacatgtgtgccaagttcaacttgttaggtaaacgtctaagaaaacaccatgtaaatatggaggccttttttttgctgaagcgcatgaagcttcggcaaacatctaaagaacaccatgcaaatggctgtggtgtcctgcgattggtctacgcgatgtacatgtgcgcaagctgctttgaagagaatttaaccaccttgaattttaggtacccatacagttcgctcatgtattgatctggcgcaagcttcgatgaacattttttggtttcatgtggttgatatgttgcttgagccttgtcagcttgacgatttttt

SEQ ID NO: 34866 - DNA, 4678 bp, Zea Mays
gcgtttctcctgctccctatccgacgtagtgaatcccttcccaggcaccactcgccgacggaacgcctcccttcctaggcaccactcgccggagcgcatcccttcccagccactgatggccctgacccgccagcgcgcttccctccccaccgttgacggccccgacccgccggtggactgcgctcctcatcgaccagcgtggccatattttgcatttgttcctgtttcagcttgtgagcaactgatactactgtcccggcccatcgttactggaccaagaactttgagatgtggggaactctatttacaggaggctggaaactagtctgtacaagaacgaagcagttaatctattcttctctgataccagcgcttggaaacaagaataacataaagggtgttgtcccagggtacgagcaaggaagggacttcaagaaatacgggtgggatggaagttgccttggtatcaactgtattgaaggttttggggacgaagttagctcctcttgcactcaaagagttgagctctaaagcaggtgtggccaaagatcttcaggaactccaggacctagttgaggagatcaacaattggttgcaaacagttggtgataaagaccgatcatctaaatggctcaaaaaattgaaagaagttgcttatgatgctgaagatttagtccatgagttccacatcgaggctgaaaaacaagacagagaaattactggtggcaagaataccttggtcaaatacttcatcacaaaacctaaagcaactgtgactgaatttaagatagctcacaagatcaagaaaataaaaaacagatttgatgcaattgtgaaaggaaggagtgactatagcacaatagcaaatagcatgccagtggattatcctgttgagcatacaagaaagacaattggagaggtgccattgtatactattgtggatgagacatcaatatttggcagggatcaagcaaagaatcagataatatctaagctgatagagactgatagccaacaaagaataaagatagtttcagtaattgggctaggtggctctggtaaaactactctcgcgaaacaagtatttaatgatggtaacattataaagcattttgaagttatattgtgggttcatgtgtcaagagaatttgctgttgaaaagcttgtggcgaagttgtttgaagccattgctggtgacatgtctgaccacctcctattgcagcatgtgagcagaactatctcagacaagttagttggaaagaggttcctagctgtcttggatgacgtttggacagaggatcgtgttgagtgggagcgattcatggtacatttaaagtgcggtgcacctggaagtagtattttactcactactcgtagtagaaaagttgcagaagcagtggattctagttatgcatacgacctaccactcttgtctatggaagatagctggaaagtgttccaacaatgttttggaattgccatgaaagctctagaccctgaattcctacagtccgggatagagattgtggagaaatgcggaggtgtgccccttgcaattaaagttattgcaggcatcctccatggaatgaaaggaattgaagaatggcagtccatatgcaatagtaatttattagatgtccaggatgacgaacatagagtatttgcatgcttgtggttgagttttgttcatttaccggaccatctaaagccttgttttctacactgctctatatttccaagaggctatgtaatcaacaggtgtcatttgatttctcaatggatagctcatggcttcgtcccgacaaaccaagctcgacaagcagaagatgttggaattggctactttgattcccttcttaaagtggggttccttcaagaccatgatcgagaccaaatttggtccacaaggggtgaagtaacatgcaaaatgcatgacctggttcatgatctcgctagacaaattctacgggatgaatttgagtctgagatagaaacaaacaagcaaataaagagatgcagatacctatctttgacttcatgcactgggaagcttgataacaaattatgtggcaaggtccgtgcactctatgtttgtggccgtgcactcgaatttgacaagacaatgagcaagcagtgttgtgtccgtaccattatattgaagtatataactgctgactcattgcctctgtttgtgtcaaaatttgaatacctggggtatcttgaaatatccgatgttaactgtgaagcactaccagaagctctctcgcgttgttggaacttgcaggcccttcatatattaaattgctcaagacttgcagttgtacctgaaagtatcggcaagcttaagaagcttagaactctggaactgaatggtgtttctagtatcaagagtttaccacagtctattggcgattgtgataatcttcgaagattatacctagaaggttgtcatagattcgaagatataccaaattccttgggaaaattggaaaatttaaggatacttagtattgttcattgctttagttttgaaaaactttcgccatcagcatcatttgggaagcttttgaacttacaaactatcacctttaactgttgcttcaatctccgaaacctacctcagtgcatgacttctttgagtcatctagagatggtggatcttggatattgttacgagcttgttgaattgcctgaaggcatagggaatttaagaaaccttaaagttttgaatctgaagcaatgcacacaattgcgtggactaccagctggttgtgggcagctaactcgtttacaacagttgagcttgtttgttattggagacagtgccaaacacgcaaggatctctgagcttggtaatcttgataagttggatggtgagctgcagattaaaaacattagatatgtgaaagatccaagtgacacagacaaagttcgtttgaagaaaaagattggcatccggaaattgtcgttggattggtattcaagattggaggttcagcctgatgatgtggaagaagagttatcattaaatatggagaaggaattgcatttgctcgacagtcttgaaccaccatcaaaaattgagaagctgagaattcgtggctaccggggttcacaattgccacgttggatggcaaagcaaagtgactcttgtggtccagcggatgatacacacatagtaatgcaaagaaatccatctgaattctcccatctgactgaattagtactggacaacttaccaaacttggagcaccttggggaacttgtggaactgccactggtaaagatccttaagctcaaaagactgccaaagttggtagagctgcttacgaccacaacgggggaggaaggagtggaagtgctatgtcgtttccatcacgtttccactctagtaataattgattgccggaaacttgttgtgaagccgtactttcctccgtccttgcagagattgacactagaaggaaacaatatgcagttggtttcttcaggatgcttcttccatccacgtcatcatcatgcatctcatgctcatggtgacgagtcttcatcttcctcctattttgcggatgagacgggtactcacctcgagagacttgaacttcgtcggttgacaggatcatcatctggttgggaggtgctgcagcatctcactgggcttcataccctagaaatatacatgtgcacagaccttacacatttacctgagagcatccactgccccaccactctctgtagactgatgataagaagttgtgataatcttcgtgtgctgcctgactggcttgtggaactgaaatctctacagagtctggacatagactcatgtgatgctctccagcagcttcctgaacaaataggagaactctgctcactccagcacctccaaataatttctatgcctttcctgacttgccttcccgagagcatgcagcacctcacctcgcttcgaattctcaacttgtgtgaatgtaacgcgctgacccatcttccggagtggctaggcgaactctctgcgcttaaaaaactcttgatccagagctgccgtggccttacatctttgccccgctccatacaatgccttactgctctcgaggaattatatataagcggcaaccccaaactgcttcagatcagtgcatcatattctaaggaagacaaggatggccaggctccgacgacattcagatcacatggcttgacaggtcgacatacaaatccccgttccatgtagtatttctgcagggacaagagtcttctctcttgaactctacagctgcaaccgttccgatgttgcaggcctgacgaccagcattgcagtgaggcccaagagttcgatctggtccggaacatgctcatcgtcgcagtagaagaacgctacaaggatgctggtaaacgtctaagaaaacaccatgtaaatatggaggccttttttttgctgaagcgcatgaagcttcggcaaacatctaaagaacaccatgcaaatggctgtggtgtcctgcgattggtctacgcgatgtacatgtgcgcaagctgctttgaagagaatttaaccaccttgaattttaggtacccatacagttcgctcatgtattgatctggcgcaagcttcgatgaacattttttggtttcatgtggttgatatgttgcttgagccttgtcagcttgacgatttttt

SEQ ID NO: 34867 - DNA, 4729 bp, Zea Mays
gcgtttctcctgctccctatccgacgtagtgaatcccttcccaggcaccactcgccgacggaacgcctcccttcctaggcaccactcgccggagcgcatcccttcccagccactgatggccctgacccgccagcgcgcttccctccccaccgttgacggccccgacccgccggtggactgcgctcctcatcgaccagcgtggccatattttgcatttgttcctgtttcagcttgtgagcaactgatactactgtcccggcccatcgttactggaccaagaactttgagatgtgaatcaatcatttttggctctttcatgcaccacatatttcagcagcacagaaagtttatgggtgaaaatggtcatttggggaactctatttacaggaggctggaaactagtctgtacaagaacgaagcagttaatctattcttctctgataccagcgcttggggtacgagcaaggaagggacttcaagaaatacgggtgggatggaagttgccttggtatcaactgtattgaaggttttggggacgaagttagctcctcttgcactcaaagagttgagctctaaagcaggtgtggccaaagatcttcaggaactccaggacctagttgaggagatcaacaattggttgcaaacagttggtgataaagaccgatcatctaaatggctcaaaaaattgaaagaagttgcttatgatgctgaagatttagtccatgagttccacatcgaggctgaaaaacaagacagagaaattactggtggcaagaataccttggtcaaatacttcatcacaaaacctaaagcaactgtgactgaatttaagatagctcacaagatcaagaaaataaaaaacagatttgatgcaattgtgaaaggaaggagtgactatagcacaatagcaaatagcatgccagtggattatcctgttgagcatacaagaaagacaattggagaggtgccattgtatactattgtggatgagacatcaatatttggcagggatcaagcaaagaatcagataatatctaagctgatagagactgatagccaacaaagaataaagatagtttcagtaattgggctaggtggctctggtaaaactactctcgcgaaacaagtatttaatgatggtaacattataaagcattttgaagttatattgtgggttcatgtgtcaagagaatttgctgttgaaaagcttgtggcgaagttgtttgaagccattgctggtgacatgtctgaccacctcctattgcagcatgtgagcagaactatctcagacaagttagttggaaagaggttcctagctgtcttggatgacgtttggacagaggatcgtgttgagtgggagcgattcatggtacatttaaagtgcggtgcacctggaagtagtattttactcactactcgtagtagaaaagttgcagaagcagtggattctagttatgcatacgacctaccactcttgtctatggaagatagctggaaagtgttccaacaatgttttggaattgccatgaaagctctagaccctgaattcctacagtccgggatagagattgtggagaaatgcggaggtgtgccccttgcaattaaagttattgcaggcatcctccatggaatgaaaggaattgaagaatggcagtccatatgcaatagtaatttattagatgtccaggatgacgaacatagagtatttgcatgcttgtggttgagttttgttcatttaccggaccatctaaagccttgttttctacactgctctatatttccaagaggctatgtaatcaacaggtgtcatttgatttctcaatggatagctcatggcttcgtcccgacaaaccaagctcgacaagcagaagatgttggaattggctactttgattcccttcttaaagtggggttccttcaagaccatgatcgagaccaaatttggtccacaaggggtgaagtaacatgcaaaatgcatgacctggttcatgatctcgctagacaaattctacgggatgaatttgagtctgagatagaaacaaacaagcaaataaagagatgcagatacctatctttgacttcatgcactgggaagcttgataacaaattatgtggcaaggtccgtgcactctatgtttgtggccgtgcactcgaatttgacaagacaatgagcaagcagtgttgtgtccgtaccattatattgaagtatataactgctgactcattgcctctgtttgtgtcaaaatttgaatacctggggtatcttgaaatatccgatgttaactgtgaagcactaccagaagctctctcgcgttgttggaacttgcaggcccttcatatattaaattgctcaagacttgcagttgtacctgaaagtatcggcaagcttaagaagcttagaactctggaactgaatggtgtttctagtatcaagagtttaccacagtctattggcgattgtgataatcttcgaagattatacctagaaggttgtcatagattcgaagatataccaaattccttgggaaaattggaaaatttaaggatacttagtattgttcattgctttagttttgaaaaactttcgccatcagcatcatttgggaagcttttgaacttacaaactatcacctttaactgttgcttcaatctccgaaacctacctcagtgcatgacttctttgagtcatctagagatggtggatcttggatattgttacgagcttgttgaattgcctgaaggcatagggaatttaagaaaccttaaagttttgaatctgaagcaatgcacacaattgcgtggactaccagctggttgtgggcagctaactcgtttacaacagttgagcttgtttgttattggagacagtgccaaacacgcaaggatctctgagcttggtaatcttgataagttggatggtgagctgcagattaaaaacattagatatgtgaaagatccaagtgacacagacaaagttcgtttgaagaaaaagattggcatccggaaattgtcgttggattggtattcaagattggaggttcagcctgatgatgtggaagaagagttatcattaaatatggagaaggaattgcatttgctcgacagtcttgaaccaccatcaaaaattgagaagctgagaattcgtggctaccggggttcacaattgccacgttggatggcaaagcaaagtgactcttgtggtccagcggatgatacacacatagtaatgcaaagaaatccatctgaattctcccatctgactgaattagtactggacaacttaccaaacttggagcaccttggggaacttgtggaactgccactggtaaagatccttaagctcaaaagactgccaaagttggtagagctgcttacgaccacaacgggggaggaaggagtggaagtgctatgtcgtttccatcacgtttccactctagtaataattgattgccggaaacttgttgtgaagccgtactttcctccgtccttgcagagattgacactagaaggaaacaatatgcagttggtttcttcaggatgcttcttccatccacgtcatcatcatgcatctcatgctcatggtgacgagtcttcatcttcctcctattttgcggatgagacgggtactcacctcgagagacttgaacttcgtcggttgacaggatcatcatctggttgggaggtgctgcagcatctcactgggcttcataccctagaaatatacatgtgcacagaccttacacatttacctgagagcatccactgccccaccactctctgtagactgatgataagaagttgtgataatcttcgtgtgctgcctgactggcttgtggaactgaaatctctacagagtctggacatagactcatgtgatgctctccagcagcttcctgaacaaataggagaactctgctcactccagcacctccaaataatttctatgcctttcctgacttgccttcccgagagcatgcagcacctcacctcgcttcgaattctcaacttgtgtgaatgtaacgcgctgacccatcttccggagtggctaggcgaactctctgcgcttaaaaaactcttgatccagagctgccgtggccttacatctttgccccgctccatacaatgccttactgctctcgaggaattatatataagcggcaaccccaaactgcttcagatcagtgcatcatattctaaggaagacaaggatggccagctgcaaccgttccgatgttgcaggcctgacgaccagcattgcagtgaggcccaagagttcgatctggtccggaacatgctcatcgtcgcagtagaagaacgctacaaggatgctgctcaatacagaggccaacattccatgttgcggtcaaagaaaaagaacgcgatatagcaggcccaggccgttattatgtacatccacatgtgtgccaagttcaacttgttaggtaaacgtctaagaaaacaccatgtaaatatggaggccttttttttgctgaagcgcatgaagcttcggcaaacatctaaagaacaccatgcaaatggctgtggtgtcctgcgattggtctacgcgatgtacatgtgcgcaagctgctttgaagagaatttaaccaccttgaattttaggtacccatacagttcgctcatgtattgatctggcgcaagcttcgatgaacattttttggtttcatgtggttgatatgttgcttgagccttgtcagcttgacgatttttt

SEQ ID NO: 34868 - DNA, 4663 bp, Zea Mays
gcgtttctcctgctccctatccgacgtagtgaatcccttcccaggcaccactcgccgacggaacgcctcccttcctaggcaccactcgccggagcgcatcccttcccagccactgatggccctgacccgccagcgcgcttccctccccaccgttgacggccccgacccgccggtggactgcgctcctcatcgaccagcgtggccatattttgcatttgttcctgtttcagcttgtgagcaactgatactactgtcccggcccatcgttactggaccaagaactttgagatgtggggaactctatttacaggaggctggaaactagtctgtacaagaacgaagcagttaatctattcttctctgataccagcgcttggggtacgagcaaggaagggacttcaagaaatacgggtgggatggaagttgccttggtatcaactgtattgaaggttttggggacgaagttagctcctcttgcactcaaagagttgagctctaaagcaggtgtggccaaagatcttcaggaactccaggacctagttgaggagatcaacaattggttgcaaacagttggtgataaagaccgatcatctaaatggctcaaaaaattgaaagaagttgcttatgatgctgaagatttagtccatgagttccacatcgaggctgaaaaacaagacagagaaattactggtggcaagaataccttggtcaaatacttcatcacaaaacctaaagcaactgtgactgaatttaagatagctcacaagatcaagaaaataaaaaacagatttgatgcaattgtgaaaggaaggagtgactatagcacaatagcaaatagcatgccagtggattatcctgttgagcatacaagaaagacaattggagaggtgccattgtatactattgtggatgagacatcaatatttggcagggatcaagcaaagaatcagataatatctaagctgatagagactgatagccaacaaagaataaagatagtttcagtaattgggctaggtggctctggtaaaactactctcgcgaaacaagtatttaatgatggtaacattataaagcattttgaagttatattgtgggttcatgtgtcaagagaatttgctgttgaaaagcttgtggcgaagttgtttgaagccattgctggtgacatgtctgaccacctcctattgcagcatgtgagcagaactatctcagacaagttagttggaaagaggttcctagctgtcttggatgacgtttggacagaggatcgtgttgagtgggagcgattcatggtacatttaaagtgcggtgcacctggaagtagtattttactcactactcgtagtagaaaagttgcagaagcagtggattctagttatgcatacgacctaccactcttgtctatggaagatagctggaaagtgttccaacaatgttttggaattgccatgaaagctctagaccctgaattcctacagtccgggatagagattgtggagaaatgcggaggtgtgccccttgcaattaaagttattgcaggcatcctccatggaatgaaaggaattgaagaatggcagtccatatgcaatagtaatttattagatgtccaggatgacgaacatagagtatttgcatgcttgtggttgagttttgttcatttaccggaccatctaaagccttgttttctacactgctctatatttccaagaggctatgtaatcaacaggtgtcatttgatttctcaatggatagctcatggcttcgtcccgacaaaccaagctcgacaagcagaagatgttggaattggctactttgattcccttcttaaagtggggttccttcaagaccatgatcgagaccaaatttggtccacaaggggtgaagtaacatgcaaaatgcatgacctggttcatgatctcgctagacaaattctacgggatgaatttgagtctgagatagaaacaaacaagcaaataaagagatgcagatacctatctttgacttcatgcactgggaagcttgataacaaattatgtggcaaggtccgtgcactctatgtttgtggccgtgcactcgaatttgacaagacaatgagcaagcagtgttgtgtccgtaccattatattgaagtatataactgctgactcattgcctctgtttgtgtcaaaatttgaatacctggggtatcttgaaatatccgatgttaactgtgaagcactaccagaagctctctcgcgttgttggaacttgcaggcccttcatatattaaattgctcaagacttgcagttgtacctgaaagtatcggcaagcttaagaagcttagaactctggaactgaatggtgtttctagtatcaagagtttaccacagtctattggcgattgtgataatcttcgaagattatacctagaaggttgtcatagattcgaagatataccaaattccttgggaaaattggaaaatttaaggatacttagtattgttcattgctttagttttgaaaaactttcgccatcagcatcatttgggaagcttttgaacttacaaactatcacctttaactgttgcttcaatctccgaaacctacctcagtgcatgacttctttgagtcatctagagatggtggatcttggatattgttacgagcttgttgaattgcctgaaggcatagggaatttaagaaaccttaaagttttgaatctgaagcaatgcacacaattgcgtggactaccagctggttgtgggcagctaactcgtttacaacagttgagcttgtttgttattggagacagtgccaaacacgcaaggatctctgagcttggtaatcttgataagttggatggtgagctgcagattaaaaacattagatatgtgaaagatccaagtgacacagacaaagttcgtttgaagaaaaagattggcatccggaaattgtcgttggattggtattcaagattggaggttcagcctgatgatgtggaagaagagttatcattaaatatggagaaggaattgcatttgctcgacagtcttgaaccaccatcaaaaattgagaagctgagaattcgtggctaccggggttcacaattgccacgttggatggcaaagcaaagtgactcttgtggtccagcggatgatacacacatagtaatgcaaagaaatccatctgaattctcccatctgactgaattagtactggacaacttaccaaacttggagcaccttggggaacttgtggaactgccactggtaaagatccttaagctcaaaagactgccaaagttggtagagctgcttacgaccacaacgggggaggaaggagtggaagtgctatgtcgtttccatcacgtttccactctagtaataattgattgccggaaacttgttgtgaagccgtactttcctccgtccttgcagagattgacactagaaggaaacaatatgcagttggtttcttcaggatgcttcttccatccacgtcatcatcatgcatctcatgctcatggtgacgagtcttcatcttcctcctattttgcggatgagacgggtactcacctcgagagacttgaacttcgtcggttgacaggatcatcatctggttgggaggtgctgcagcatctcactgggcttcataccctagaaatatacatgtgcacagaccttacacatttacctgagagcatccactgccccaccactctctgtagactgatgataagaagttgtgataatcttcgtgtgctgcctgactggcttgtggaactgaaatctctacagagtctggacatagactcatgtgatgctctccagcagcttcctgaacaaataggagaactctgctcactccagcacctccaaataatttctatgcctttcctgacttgccttcccgagagcatgcagcacctcacctcgcttcgaattctcaacttgtgtgaatgtaacgcgctgacccatcttccggagtggctaggcgaactctctgcgcttaaaaaactcttgatccagagctgccgtggccttacatctttgccccgctccatacaatgccttactgctctcgaggaattatatataagcggcaaccccaaactgcttcagatcagtgcatcatattctaaggaagacaaggatggccaggctccgacgacattcagatcacatggcttgacaggcctgacgaccagcattgcagtgaggcccaagagttcgatctggtccggaacatgctcatcgtcgcagtagaagaacgctacaaggatgctgctcaatacagaggccaacattccatgttgcggtcaaagaaaaagaacgcgatatagcaggcccaggccgttattatgtacatccacatgtgtgccaagttcaacttgttaggtaaacgtctaagaaaacaccatgtaaatatggaggccttttttttgctgaagcgcatgaagcttcggcaaacatctaaagaacaccatgcaaatggctgtggtgtcctgcgattggtctacgcgatgtacatgtgcgcaagctgctttgaagagaatttaaccaccttgaattttaggtacccatacagttcgctcatgtattgatctggcgcaagcttcgatgaacattttttggtttcatgtggttgatatgttgcttgagccttgtcagcttgacgatttttt

SEQ ID NO: 34869 - DNA, 4771 bp, Zea Mays
tttcagcttgcgtttctcctgctccctatccgacgtagtgaatcccttcccaggcaccactcgccgacggaacgcctcccttcctaggcaccactcgccggagcgcatcccttcccagccactgatggccctgacccgccagcgcgcttccctccccaccgttgacggccccgacccgccggtggactgcgctcctcatcgaccagcgtggccatattttgcatttgttcctgtttcagcttgtgagcaactgatactactgtcccggcccatcgttactggaccaagaactttgagatgtgaatcaatcatttttggctctttcatgcaccacatatttcagcagcacagaaagtttatgggtgaaaatggtcatttggggaactctatttacaggaggctggaaactagtctgtacaagaacgaagcagttaatctattcttctctgataccagcgcttgggtatattaacataatcctatcttatatagctcactttcatgtatgtgcagtataataccctgtgtttcctctcactcatgctaatttcctggtgatgttagaaacaagaataacataaagggtgttgtcccagggtacgagcaaggaagggacttcaagaaatacgggtgggatggaagttgccttggtatcaactgtattgaaggttttggggacgaagttagctcctcttgcactcaaagagttgagctctaaagcaggtgtggccaaagatcttcaggaactccaggacctagttgaggagatcaacaattggttgcaaacagttggtgataaagaccgatcatctaaatggctcaaaaaattgaaagaagttgcttatgatgctgaagatttagtccatgagttccacatcgaggctgaaaaacaagacagagaaattactggtggcaagaataccttggtcaaatacttcatcacaaaacctaaagcaactgtgactgaatttaagatagctcacaagatcaagaaaataaaaaacagatttgatgcaattgtgaaaggaaggagtgactatagcacaatagcaaatagcatgccagtggattatcctgttgagcatacaagaaagacaattggagaggtgccattgtatactattgtggatgagacatcaatatttggcagggatcaagcaaagaatcagataatatctaagctgatagagactgatagccaacaaagaataaagatagtttcagtaattgggctaggtggctctggtaaaactactctcgcgaaacaagtatttaatgatggtaacattataaagcattttgaagttatattgtgggttcatgtgtcaagagaatttgctgttgaaaagcttgtggcgaagttgtttgaagccattgctggtgacatgtctgaccacctcctattgcagcatgtgagcagaactatctcagacaagttagttggaaagaggttcctagctgtcttggatgacgtttggacagaggatcgtgttgagtgggagcgattcatggtacatttaaagtgcggtgcacctggaagtagtattttactcactactcgtagtagaaaagttgcagaagcagtggattctagttatgcatacgacctaccactcttgtctatggaagatagctggaaagtgttccaacaatgttttggaattgccatgaaagctctagaccctgaattcctacagtccgggatagagattgtggagaaatgcggaggtgtgccccttgcaattaaagttattgcaggcatcctccatggaatgaaaggaattgaagaatggcagtccatatgcaatagtaatttattagatgtccaggatgacgaacatagagtatttgcatgcttgtggttgagttttgttcatttaccggaccatctaaagccttgttttctacactgctctatatttccaagaggctatgtaatcaacaggtgtcatttgatttctcaatggatagctcatggcttcgtcccgacaaaccaagctcgacaagcagaagatgttggaattggctactttgattcccttcttaaagtggggttccttcaagaccatgatcgagaccaaatttggtccacaaggggtgaagtaacatgcaaaatgcatgacctggttcatgatctcgctagacaaattctacgggatgaatttgagtctgagatagaaacaaacaagcaaataaagagatgcagatacctatctttgacttcatgcactgggaagcttgataacaaattatgtggcaaggtccgtgcactctatgtttgtggccgtgcactcgaatttgacaagacaatgagcaagcagtgttgtgtccgtaccattatattgaagtatataactgctgactcattgcctctgtttgtgtcaaaatttgaatacctggggtatcttgaaatatccgatgttaactgtgaagcactaccagaagctctctcgcgttgttggaacttgcaggcccttcatatattaaattgctcaagacttgcagttgtacctgaaagtatcggcaagcttaagaagcttagaactctggaactgaatggtgtttctagtatcaagagtttaccacagtctattggcgattgtgataatcttcgaagattatacctagaaggttgtcatagattcgaagatataccaaattccttgggaaaattggaaaatttaaggatacttagtattgttcattgctttagttttgaaaaactttcgccatcagcatcatttgggaagcttttgaacttacaaactatcacctttaactgttgcttcaatctccgaaacctacctcagtgcatgacttctttgagtcatctagagatggtggatcttggatattgttacgagcttgttgaattgcctgaaggcatagggaatttaagaaaccttaaagttttgaatctgaagcaatgcacacaattgcgtggactaccagctggttgtgggcagctaactcgtttacaacagttgagcttgtttgttattggagacagtgccaaacacgcaaggatctctgagcttggtaatcttgataagttggatggtgagctgcagattaaaaacattagatatgtgaaagatccaagtgacacagacaaagttcgtttgaagaaaaagattggcatccggaaattgtcgttggattggtattcaagattggaggttcagcctgatgatgtggaagaagagttatcattaaatatggagaaggaattgcatttgctcgacagtcttgaaccaccatcaaaaattgagaagctgagaattcgtggctaccggggttcacaattgccacgttggatggcaaagcaaagtgactcttgtggtccagcggatgatacacacatagtaatgcaaagaaatccatctgaattctcccatctgactgaattagtactggacaacttaccaaacttggagcaccttggggaacttgtggaactgccactggtaaagatccttaagctcaaaagactgccaaagttggtagagctgcttacgaccacaacgggggaggaaggagtggaagtgctatgtcgtttccatcacgtttccactctagtaataattgattgccggaaacttgttgtgaagccgtactttcctccgtccttgcagagattgacactagaaggaaacaatatgcagttggtttcttcaggatgcttcttccatccacgtcatcatcatgcatctcatgctcatggtgacgagtcttcatcttcctcctattttgcggatgagacgggtactcacctcgagagacttgaacttcgtcggttgacaggatcatcatctggttgggaggtgctgcagcatctcactgggcttcataccctagaaatatacatgtgcacagaccttacacatttacctgagagcatccactgccccaccactctctgtagactgatgataagaagttgtgataatcttcgtgtgctgcctgactggcttgtggaactgaaatctctacagagtctggacatagactcatgtgatgctctccagcagcttcctgaacaaataggagaactctgctcactccagcacctccaaataatttctatgcctttcctgacttgccttcccgagagcatgcagcacctcacctcgcttcgaattctcaacttgtgtgaatgtaacgcgctgacccatcttccggagtggctaggcgaactctctgcgcttaaaaaactcttgatccagagctgccgtggccttacatctttgccccgctccatacaatgccttactgctctcgaggaattatatataagcggcaaccccaaactgcttcagatcagtgcatcatattctaaggaagacaaggatggccaggctccgacgacattcagatcacatggcttgacaggcctgacgaccagcattgcagtgaggcccaagagttcgatctggtccggaacatgctcatcgtcgcagtagaagaacgctacaaggatgctggtaaacgtctaagaaaacaccatgtaaatatggaggccttttttttgctgaagcgcatgaagcttcggcaaacatctaaagaacaccatgcaaatggctgtggtgtcctgcgattggtctacgcgatgtacatgtgcgcaagctgctttgaagagaatttaaccaccttgaattttaggtacccatacagttcgctcatgtattgatctggcgcaagcttcgatgaacattttttggtttcatgtggttgatatgttgcttgagccttgtcagcttgacgatttttt

SEQ ID NO: 34870 - DNA, 4660 bp, Zea Mays
tttcagcttgcgtttctcctgctccctatccgacgtagtgaatcccttcccaggcaccactcgccgacggaacgcctcccttcctaggcaccactcgccggagcgcatcccttcccagccactgatggccctgacccgccagcgcgcttccctccccaccgttgacggccccgacccgccggtggactgcgctcctcatcgaccagcgtggccatattttgcatttgttcctgtttcagcttgtgagcaactgatactactgtcccggcccatcgttactggaccaagaactttgagatgtgtataataccctgtgtttcctctcactcatgctaatttcctggtgatgttagaaacaagaataacataaagggtgttgtcccagggtacgagcaaggaagggacttcaagaaatacgggtgggatggaagttgccttggtatcaactgtattgaaggttttggggacgaagttagctcctcttgcactcaaagagttgagctctaaagcaggtgtggccaaagatcttcaggaactccaggacctagttgaggagatcaacaattggttgcaaacagttggtgataaagaccgatcatctaaatggctcaaaaaattgaaagaagttgcttatgatgctgaagatttagtccatgagttccacatcgaggctgaaaaacaagacagagaaattactggtggcaagaataccttggtcaaatacttcatcacaaaacctaaagcaactgtgactgaatttaagatagctcacaagatcaagaaaataaaaaacagatttgatgcaattgtgaaaggaaggagtgactatagcacaatagcaaatagcatgccagtggattatcctgttgagcatacaagaaagacaattggagaggtgccattgtatactattgtggatgagacatcaatatttggcagggatcaagcaaagaatcagataatatctaagctgatagagactgatagccaacaaagaataaagatagtttcagtaattgggctaggtggctctggtaaaactactctcgcgaaacaagtatttaatgatggtaacattataaagcattttgaagttatattgtgggttcatgtgtcaagagaatttgctgttgaaaagcttgtggcgaagttgtttgaagccattgctggtgacatgtctgaccacctcctattgcagcatgtgagcagaactatctcagacaagttagttggaaagaggttcctagctgtcttggatgacgtttggacagaggatcgtgttgagtgggagcgattcatggtacatttaaagtgcggtgcacctggaagtagtattttactcactactcgtagtagaaaagttgcagaagcagtggattctagttatgcatacgacctaccactcttgtctatggaagatagctggaaagtgttccaacaatgttttggaattgccatgaaagctctagaccctgaattcctacagtccgggatagagattgtggagaaatgcggaggtgtgccccttgcaattaaagttattgcaggcatcctccatggaatgaaaggaattgaagaatggcagtccatatgcaatagtaatttattagatgtccaggatgacgaacatagagtatttgcatgcttgtggttgagttttgttcatttaccggaccatctaaagccttgttttctacactgctctatatttccaagaggctatgtaatcaacaggtgtcatttgatttctcaatggatagctcatggcttcgtcccgacaaaccaagctcgacaagcagaagatgttggaattggctactttgattcccttcttaaagtggggttccttcaagaccatgatcgagaccaaatttggtccacaaggggtgaagtaacatgcaaaatgcatgacctggttcatgatctcgctagacaaattctacgggatgaatttgagtctgagatagaaacaaacaagcaaataaagagatgcagatacctatctttgacttcatgcactgggaagcttgataacaaattatgtggcaaggtccgtgcactctatgtttgtggccgtgcactcgaatttgacaagacaatgagcaagcagtgttgtgtccgtaccattatattgaagtatataactgctgactcattgcctctgtttgtgtcaaaatttgaatacctggggtatcttgaaatatccgatgttaactgtgaagcactaccagaagctctctcgcgttgttggaacttgcaggcccttcatatattaaattgctcaagacttgcagttgtacctgaaagtatcggcaagcttaagaagcttagaactctggaactgaatggtgtttctagtatcaagagtttaccacagtctattggcgattgtgataatcttcgaagattatacctagaaggttgtcatagattcgaagatataccaaattccttgggaaaattggaaaatttaaggatacttagtattgttcattgctttagttttgaaaaactttcgccatcagcatcatttgggaagcttttgaacttacaaactatcacctttaactgttgcttcaatctccgaaacctacctcagtgcatgacttctttgagtcatctagagatggtggatcttggatattgttacgagcttgttgaattgcctgaaggcatagggaatttaagaaaccttaaagttttgaatctgaagcaatgcacacaattgcgtggactaccagctggttgtgggcagctaactcgtttacaacagttgagcttgtttgttattggagacagtgccaaacacgcaaggatctctgagcttggtaatcttgataagttggatggtgagctgcagattaaaaacattagatatgtgaaagatccaagtgacacagacaaagttcgtttgaagaaaaagattggcatccggaaattgtcgttggattggtattcaagattggaggttcagcctgatgatgtggaagaagagttatcattaaatatggagaaggaattgcatttgctcgacagtcttgaaccaccatcaaaaattgagaagctgagaattcgtggctaccggggttcacaattgccacgttggatggcaaagcaaagtgactcttgtggtccagcggatgatacacacatagtaatgcaaagaaatccatctgaattctcccatctgactgaattagtactggacaacttaccaaacttggagcaccttggggaacttgtggaactgccactggtaaagatccttaagctcaaaagactgccaaagttggtagagctgcttacgaccacaacgggggaggaaggagtggaagtgctatgtcgtttccatcacgtttccactctagtaataattgattgccggaaacttgttgtgaagccgtactttcctccgtccttgcagagattgacactagaaggaaacaatatgcagttggtttcttcaggatgcttcttccatccacgtcatcatcatgcatctcatgctcatggtgacgagtcttcatcttcctcctattttgcggatgagacgggtactcacctcgagagacttgaacttcgtcggttgacaggatcatcatctggttgggaggtgctgcagcatctcactgggcttcataccctagaaatatacatgtgcacagaccttacacatttacctgagagcatccactgccccaccactctctgtagactgatgataagaagttgtgataatcttcgtgtgctgcctgactggcttgtggaactgaaatctctacagagtctggacatagactcatgtgatgctctccagcagcttcctgaacaaataggagaactctgctcactccagcacctccaaataatttctatgcctttcctgacttgccttcccgagagcatgcagcacctcacctcgcttcgaattctcaacttgtgtgaatgtaacgcgctgacccatcttccggagtggctaggcgaactctctgcgcttaaaaaactcttgatccagagctgccgtggccttacatctttgccccgctccatacaatgccttactgctctcgaggaattatatataagcggcaaccccaaactgcttcagatcagtgcatcatattctaaggaagacaaggatggccagctgcaaccgttccgatgttgcaggcctgacgaccagcattgcagtgaggcccaagagttcgatctggtccggaacatgctcatcgtcgcagtagaagaacgctacaaggatgctgctcaatacagaggccaacattccatgttgcggtcaaagaaaaagaacgcgatatagcaggcccaggccgttattatgtacatccacatgtgtgccaagttcaacttgttaggtaaacgtctaagaaaacaccatgtaaatatggaggccttttttttgctgaagcgcatgaagcttcggcaaacatctaaagaacaccatgcaaatggctgtggtgtcctgcgattggtctacgcgatgtacatgtgcgcaagctgctttgaagagaatttaaccaccttgaattttaggtacccatacagttcgctcatgtattgatctggcgcaagcttcgatgaacattttttggtttcatgtggttgatatgttgcttgagccttgtcagcttgacgatttttt

SEQ ID NO: 34871 - DNA, 4887 bp, Zea Mays
gaaccaatgatttttcagcttgcgtttctcctgctccctatccgacgtagtgaatcccttcccaggcaccactcgccgacggaacgcctcccttcctaggcaccactcgccggagcgcatcccttcccagccactgatggccctgacccgccagcgcgcttccctccccaccgttgacggccccgacccgccggtggactgcgctcctcatcgaccagcgtggccatattttgcatttgttcctgtttcagcttgtgagcaactgatactactgtcccggcccatcgttactggaccaagaactttgagatgtgaatcaatcatttttggctctttcatgcaccacatatttcagcagcacagaaagtttatgggtgaaaatggtcatttggggaactctatttacaggaggctggaaactagtctgtacaagaacgaagcagttaatctattcttctctgataccagcgcttggaaacaagaataacataaagggtgttgtcccagggtacgagcaaggaagggacttcaagaaatacgggtgggatggaagttgccttggtatcaactgtattgaaggttttggggacgaagttagctcctcttgcactcaaagagttgagctctaaagcaggtgtggccaaagatcttcaggaactccaggacctagttgaggagatcaacaattggttgcaaacagttggtgataaagaccgatcatctaaatggctcaaaaaattgaaagaagttgcttatgatgctgaagatttagtccatgagttccacatcgaggctgaaaaacaagacagagaaattactggtggcaagaataccttggtcaaatacttcatcacaaaacctaaagcaactgtgactgaatttaagatagctcacaagatcaagaaaataaaaaacagatttgatgcaattgtgaaaggaaggagtgactatagcacaatagcaaatagcatgccagtggattatcctgttgagcatacaagaaagacaattggagaggtgccattgtatactattgtggatgagacatcaatatttggcagggatcaagcaaagaatcagataatatctaagctgatagagactgatagccaacaaagaataaagatagtttcagtaattgggctaggtggctctggtaaaactactctcgcgaaacaagtatttaatgatggtaacattataaagcattttgaagttatattgtgggttcatgtgtcaagagaatttgctgttgaaaagcttgtggcgaagttgtttgaagccattgctggtgacatgtctgaccacctcctattgcagcatgtgagcagaactatctcagacaagttagttggaaagaggttcctagctgtcttggatgacgtttggacagaggatcgtgttgagtgggagcgattcatggtacatttaaagtgcggtgcacctggaagtagtattttactcactactcgtagtagaaaagttgcagaagcagtggattctagttatgcatacgacctaccactcttgtctatggaagatagctggaaagtgttccaacaatgttttggaattgccatgaaagctctagaccctgaattcctacagtccgggatagagattgtggagaaatgcggaggtgtgccccttgcaattaaagttattgcaggcatcctccatggaatgaaaggaattgaagaatggcagtccatatgcaatagtaatttattagatgtccaggatgacgaacatagagtatttgcatgcttgtggttgagttttgttcatttaccggaccatctaaagccttgttttctacactgctctatatttccaagaggctatgtaatcaacaggtgtcatttgatttctcaatggatagctcatggcttcgtcccgacaaaccaagctcgacaagcagaagatgttggaattggctactttgattcccttcttaaagtggggttccttcaagaccatgatcgagaccaaatttggtccacaaggggtgaagtaacatgcaaaatgcatgacctggttcatgatctcgctagacaaattctacgggatgaatttgagtctgagatagaaacaaacaagcaaataaagagatgcagatacctatctttgacttcatgcactgggaagcttgataacaaattatgtggcaaggtccgtgcactctatgtttgtggccgtgcactcgaatttgacaagacaatgagcaagcagtgttgtgtccgtaccattatattgaagtatataactgctgactcattgcctctgtttgtgtcaaaatttgaatacctggggtatcttgaaatatccgatgttaactgtgaagcactaccagaagctctctcgcgttgttggaacttgcaggcccttcatatattaaattgctcaagacttgcagttgtacctgaaagtatcggcaagcttaagaagcttagaactctggaactgaatggtgtttctagtatcaagagtttaccacagtctattggcgattgtgataatcttcgaagattatacctagaaggttgtcatagattcgaagatataccaaattccttgggaaaattggaaaatttaaggatacttagtattgttcattgctttagttttgaaaaactttcgccatcagcatcatttgggaagcttttgaacttacaaactatcacctttaactgttgcttcaatctccgaaacctacctcagtgcatgacttctttgagtcatctagagatggtggatcttggatattgttacgagcttgttgaattgcctgaaggcatagggaatttaagaaaccttaaagttttgaatctgaagcaatgcacacaattgcgtggactaccagctggttgtgggcagctaactcgtttacaacagttgagcttgtttgttattggagacagtgccaaacacgcaaggatctctgagcttggtaatcttgataagttggatggtgagctgcagattaaaaacattagatatgtgaaagatccaagtgacacagacaaagttcgtttgaagaaaaagattggcatccggaaattgtcgttggattggtattcaagattggaggttcagcctgatgatgtggaagaagagttatcattaaatatggagaaggaattgcatttgctcgacagtcttgaaccaccatcaaaaattgagaagctgagaattcgtggctaccggggttcacaattgccacgttggatggcaaagcaaagtgactcttgtggtccagcggatgatacacacatagtaatgcaaagaaatccatctgaattctcccatctgactgaattagtactggacaacttaccaaacttggagcaccttggggaacttgtggaactgccactggtaaagatccttaagctcaaaagactgccaaagttggtagagctgcttacgaccacaacgggggaggaaggagtggaagtgctatgtcgtttccatcacgtttccactctagtaataattgattgccggaaacttgttgtgaagccgtactttcctccgtccttgcagagattgacactagaaggaaacaatatgcagttggtttcttcaggatgcttcttccatccacgtcatcatcatgcatctcatgctcatggtgacgagtcttcatcttcctcctattttgcggatgagacgggtactcacctcgagagacttgaacttcgtcggttgacaggatcatcatctggttgggaggtgctgcagcatctcactgggcttcataccctagaaatatacatgtgcacagaccttacacatttacctgagagcatccactgccccaccactctctgtagactgatgataagaagttgtgataatcttcgtgtgctgcctgactggcttgtggaactgaaatctctacagagtctggacatagactcatgtgatgctctccagcagcttcctgaacaaataggagaactctgctcactccagcacctccaaataatttctatgcctttcctgacttgccttcccgagagcatgcagcacctcacctcgcttcgaattctcaacttgtgtgaatgtaacgcgctgacccatcttccggagtggctaggcgaactctctgcgcttaaaaaactcttgatccagagctgccgtggccttacatctttgccccgctccatacaatgccttactgctctcgaggaattatatataagcggcaaccccaaactgcttcagatcagtgcatcatattctaaggaagacaaggatggccaggctccgacgacattcagatcacatggcttgacaggtcgacatacaaatccccgttccatgtagtatttctgcagggacaagagtcttctctcttgaactctacagctgcaaccgttccgatgttgcaggcctgacgaccagcattgcagtgaggcccaagagttcgatctggtccggaacatgctcatcgtcgcagtagaagaacgctacaaggatgctgctcaatacagaggccaacattccatgttgcggtcaaagaaaaagaacgcgatatagcaggcccaggccgttattatgtacatccacatgtgtgccaagttcaacttgttaggtaaacgtctaagaaaacaccatgtaaatatggaggccttttttttgctgaagcgcatgaagcttcggcaaacatctaaagaacaccatgcaaatggctgtggtgtcctgcgattggtctacgcgatgtacatgtgcgcaagctgctttgaagagaatttaaccaccttgaattttaggtacccatacagttcgctcatgtattgatctggcgcaagcttcgatgaacattttttggtttcatgtggttgatatgttgcttgagccttgtcagcttgacgatttttt

SEQ ID NO: 34872 - DNA, 4887 bp, Zea Mays
ctctgaaccaatgatttttcagcttgcgtttctcctgctccctatccgacgtagtgaatcccttcccaggcaccactcgccgacggaacgcctcccttcctaggcaccactcgccggagcgcatcccttcccagccactgatggccctgacccgccagcgcgcttccctccccaccgttgacggccccgacccgccggtggactgcgctcctcatcgaccagcgtggccatattttgcatttgttcctgtttcagcttgtgagcaactgatactactgtcccggcccatcgttactggaccaagaactttgagatgtgaatcaatcatttttggctctttcatgcaccacatatttcagcagcacagaaagtttatgggtgaaaatggtcatttggggaactctatttacaggaggctggaaactagtctgtacaagaacgaagcagttaatctattcttctctgataccagcgcttgggtatattaacataatcctatcttatatagctcactttcatgtatgtgcagtataataccctgtgtttcctctcactcatgctaatttcctggtgatgttagaaacaagaataacataaagggtgttgtcccagggtacgagcaaggaagggacttcaagaaatacgggtgggatggaagttgccttggtatcaactgtattgaaggttttggggacgaagttagctcctcttgcactcaaagagttgagctctaaagcaggtgtggccaaagatcttcaggaactccaggacctagttgaggagatcaacaattggttgcaaacagttggtgataaagaccgatcatctaaatggctcaaaaaattgaaagaagttgcttatgatgctgaagatttagtccatgagttccacatcgaggctgaaaaacaagacagagaaattactggtggcaagaataccttggtcaaatacttcatcacaaaacctaaagcaactgtgactgaatttaagatagctcacaagatcaagaaaataaaaaacagatttgatgcaattgtgaaaggaaggagtgactatagcacaatagcaaatagcatgccagtggattatcctgttgagcatacaagaaagacaattggagaggtgccattgtatactattgtggatgagacatcaatatttggcagggatcaagcaaagaatcagataatatctaagctgatagagactgatagccaacaaagaataaagatagtttcagtaattgggctaggtggctctggtaaaactactctcgcgaaacaagtatttaatgatggtaacattataaagcattttgaagttatattgtgggttcatgtgtcaagagaatttgctgttgaaaagcttgtggcgaagttgtttgaagccattgctggtgacatgtctgaccacctcctattgcagcatgtgagcagaactatctcagacaagttagttggaaagaggttcctagctgtcttggatgacgtttggacagaggatcgtgttgagtgggagcgattcatggtacatttaaagtgcggtgcacctggaagtagtattttactcactactcgtagtagaaaagttgcagaagcagtggattctagttatgcatacgacctaccactcttgtctatggaagatagctggaaagtgttccaacaatgttttggaattgccatgaaagctctagaccctgaattcctacagtccgggatagagattgtggagaaatgcggaggtgtgccccttgcaattaaagttattgcaggcatcctccatggaatgaaaggaattgaagaatggcagtccatatgcaatagtaatttattagatgtccaggatgacgaacatagagtatttgcatgcttgtggttgagttttgttcatttaccggaccatctaaagccttgttttctacactgctctatatttccaagaggctatgtaatcaacaggtgtcatttgatttctcaatggatagctcatggcttcgtcccgacaaaccaagctcgacaagcagaagatgttggaattggctactttgattcccttcttaaagtggggttccttcaagaccatgatcgagaccaaatttggtccacaaggggtgaagtaacatgcaaaatgcatgacctggttcatgatctcgctagacaaattctacgggatgaatttgagtctgagatagaaacaaacaagcaaataaagagatgcagatacctatctttgacttcatgcactgggaagcttgataacaaattatgtggcaaggtccgtgcactctatgtttgtggccgtgcactcgaatttgacaagacaatgagcaagcagtgttgtgtccgtaccattatattgaagtatataactgctgactcattgcctctgtttgtgtcaaaatttgaatacctggggtatcttgaaatatccgatgttaactgtgaagcactaccagaagctctctcgcgttgttggaacttgcaggcccttcatatattaaattgctcaagacttgcagttgtacctgaaagtatcggcaagcttaagaagcttagaactctggaactgaatggtgtttctagtatcaagagtttaccacagtctattggcgattgtgataatcttcgaagattatacctagaaggttgtcatagattcgaagatataccaaattccttgggaaaattggaaaatttaaggatacttagtattgttcattgctttagttttgaaaaactttcgccatcagcatcatttgggaagcttttgaacttacaaactatcacctttaactgttgcttcaatctccgaaacctacctcagtgcatgacttctttgagtcatctagagatggtggatcttggatattgttacgagcttgttgaattgcctgaaggcatagggaatttaagaaaccttaaagttttgaatctgaagcaatgcacacaattgcgtggactaccagctggttgtgggcagctaactcgtttacaacagttgagcttgtttgttattggagacagtgccaaacacgcaaggatctctgagcttggtaatcttgataagttggatggtgagctgcagattaaaaacattagatatgtgaaagatccaagtgacacagacaaagttcgtttgaagaaaaagattggcatccggaaattgtcgttggattggtattcaagattggaggttcagcctgatgatgtggaagaagagttatcattaaatatggagaaggaattgcatttgctcgacagtcttgaaccaccatcaaaaattgagaagctgagaattcgtggctaccggggttcacaattgccacgttggatggcaaagcaaagtgactcttgtggtccagcggatgatacacacatagtaatgcaaagaaatccatctgaattctcccatctgactgaattagtactggacaacttaccaaacttggagcaccttggggaacttgtggaactgccactggtaaagatccttaagctcaaaagactgccaaagttggtagagctgcttacgaccacaacgggggaggaaggagtggaagtgctatgtcgtttccatcacgtttccactctagtaataattgattgccggaaacttgttgtgaagccgtactttcctccgtccttgcagagattgacactagaaggaaacaatatgcagttggtttcttcaggatgcttcttccatccacgtcatcatcatgcatctcatgctcatggtgacgagtcttcatcttcctcctattttgcggatgagacgggtactcacctcgagagacttgaacttcgtcggttgacaggatcatcatctggttgggaggtgctgcagcatctcactgggcttcataccctagaaatatacatgtgcacagaccttacacatttacctgagagcatccactgccccaccactctctgtagactgatgataagaagttgtgataatcttcgtgtgctgcctgactggcttgtggaactgaaatctctacagagtctggacatagactcatgtgatgctctccagcagcttcctgaacaaataggagaactctgctcactccagcacctccaaataatttctatgcctttcctgacttgccttcccgagagcatgcagcacctcacctcgcttcgaattctcaacttgtgtgaatgtaacgcgctgacccatcttccggagtggctaggcgaactctctgcgcttaaaaaactcttgatccagagctgccgtggccttacatctttgccccgctccatacaatgccttactgctctcgaggaattatatataagcggcaaccccaaactgcttcagatcagtgcatcatattctaaggaagacaaggatggccagctgcaaccgttccgatgttgcaggcctgacgaccagcattgcagtgaggcccaagagttcgatctggtccggaacatgctcatcgtcgcagtagaagaacgctacaaggatgctgctcaatacagaggccaacattccatgttgcggtcaaagaaaaagaacgcgatatagcaggcccaggccgttattatgtacatccacatgtgtgccaagttcaacttgttaggtaaacgtctaagaaaacaccatgtaaatatggaggccttttttttgctgaagcgcatgaagcttcggcaaacatctaaagaacaccatgcaaatggctgtggtgtcctgcgattggtctacgcgatgtacatgtgcgcaagctgctttgaagagaatttaaccaccttgaattttaggtacccatacagttcgctcatgtattgatctggcgcaagcttcgatgaacattttttggtttcatgtggttgatatgttgcttgagccttgtcagcttgacgatttttt

SEQ ID NO: 34873 - DNA, 4909 bp, Zea Mays
ctctgaaccaatgatttttcagcttgcgtttctcctgctccctatccgacgtagtgaatcccttcccaggcaccactcgccgacggaacgcctcccttcctaggcaccactcgccggagcgcatcccttcccagccactgatggccctgacccgccagcgcgcttccctccccaccgttgacggccccgacccgccggtggactgcgctcctcatcgaccagcgtggccatattttgcatttgttcctgtttcagcttgtgagcaactgatactactgtcccggcccatcgttactggaccaagaactttgagatgtgaatcaatcatttttggctctttcatgcaccacatatttcagcagcacagaaagtttatgggtgaaaatggtcatttggggaactctatttacaggaggctggaaactagtctgtacaagaacgaagcatataataccctgtgtttcctctcactcatgctaatttcctggtgatgttagaaacaagaataacataaagggtgttgtcccagggtacgagcaaggaagggacttcaagaaatacgggtgggatggaagttgccttggtatcaactgtattgaaggttttggggacgaagttagctcctcttgcactcaaagagttgagctctaaagcaggtgtggccaaagatcttcaggaactccaggacctagttgaggagatcaacaattggttgcaaacagttggtgataaagaccgatcatctaaatggctcaaaaaattgaaagaagttgcttatgatgctgaagatttagtccatgagttccacatcgaggctgaaaaacaagacagagaaattactggtggcaagaataccttggtcaaatacttcatcacaaaacctaaagcaactgtgactgaatttaagatagctcacaagatcaagaaaataaaaaacagatttgatgcaattgtgaaaggaaggagtgactatagcacaatagcaaatagcatgccagtggattatcctgttgagcatacaagaaagacaattggagaggtgccattgtatactattgtggatgagacatcaatatttggcagggatcaagcaaagaatcagataatatctaagctgatagagactgatagccaacaaagaataaagatagtttcagtaattgggctaggtggctctggtaaaactactctcgcgaaacaagtatttaatgatggtaacattataaagcattttgaagttatattgtgggttcatgtgtcaagagaatttgctgttgaaaagcttgtggcgaagttgtttgaagccattgctggtgacatgtctgaccacctcctattgcagcatgtgagcagaactatctcagacaagttagttggaaagaggttcctagctgtcttggatgacgtttggacagaggatcgtgttgagtgggagcgattcatggtacatttaaagtgcggtgcacctggaagtagtattttactcactactcgtagtagaaaagttgcagaagcagtggattctagttatgcatacgacctaccactcttgtctatggaagatagctggaaagtgttccaacaatgttttggaattgccatgaaagctctagaccctgaattcctacagtccgggatagagattgtggagaaatgcggaggtgtgccccttgcaattaaagttattgcaggcatcctccatggaatgaaaggaattgaagaatggcagtccatatgcaatagtaatttattagatgtccaggatgacgaacatagagtatttgcatgcttgtggttgagttttgttcatttaccggaccatctaaagccttgttttctacactgctctatatttccaagaggctatgtaatcaacaggtgtcatttgatttctcaatggatagctcatggcttcgtcccgacaaaccaagctcgacaagcagaagatgttggaattggctactttgattcccttcttaaagtggggttccttcaagaccatgatcgagaccaaatttggtccacaaggggtgaagtaacatgcaaaatgcatgacctggttcatgatctcgctagacaaattctacgggatgaatttgagtctgagatagaaacaaacaagcaaataaagagatgcagatacctatctttgacttcatgcactgggaagcttgataacaaattatgtggcaaggtccgtgcactctatgtttgtggccgtgcactcgaatttgacaagacaatgagcaagcagtgttgtgtccgtaccattatattgaagtatataactgctgactcattgcctctgtttgtgtcaaaatttgaatacctggggtatcttgaaatatccgatgttaactgtgaagcactaccagaagctctctcgcgttgttggaacttgcaggcccttcatatattaaattgctcaagacttgcagttgtacctgaaagtatcggcaagcttaagaagcttagaactctggaactgaatggtgtttctagtatcaagagtttaccacagtctattggcgattgtgataatcttcgaagattatacctagaaggttgtcatagattcgaagatataccaaattccttgggaaaattggaaaatttaaggatacttagtattgttcattgctttagttttgaaaaactttcgccatcagcatcatttgggaagcttttgaacttacaaactatcacctttaactgttgcttcaatctccgaaacctacctcagtgcatgacttctttgagtcatctagagatggtggatcttggatattgttacgagcttgttgaattgcctgaaggcatagggaatttaagaaaccttaaagttttgaatctgaagcaatgcacacaattgcgtggactaccagctggttgtgggcagctaactcgtttacaacagttgagcttgtttgttattggagacagtgccaaacacgcaaggatctctgagcttggtaatcttgataagttggatggtgagctgcagattaaaaacattagatatgtgaaagatccaagtgacacagacaaagttcgtttgaagaaaaagattggcatccggaaattgtcgttggattggtattcaagattggaggttcagcctgatgatgtggaagaagagttatcattaaatatggagaaggaattgcatttgctcgacagtcttgaaccaccatcaaaaattgagaagctgagaattcgtggctaccggggttcacaattgccacgttggatggcaaagcaaagtgactcttgtggtccagcggatgatacacacatagtaatgcaaagaaatccatctgaattctcccatctgactgaattagtactggacaacttaccaaacttggagcaccttggggaacttgtggaactgccactggtaaagatccttaagctcaaaagactgccaaagttggtagagctgcttacgaccacaacgggggaggaaggagtggaagtgctatgtcgtttccatcacgtttccactctagtaataattgattgccggaaacttgttgtgaagccgtactttcctccgtccttgcagagattgacactagaaggaaacaatatgcagttggtttcttcaggatgcttcttccatccacgtcatcatcatgcatctcatgctcatggtgacgagtcttcatcttcctcctattttgcggatgagacgggtactcacctcgagagacttgaacttcgtcggttgacaggatcatcatctggttgggaggtgctgcagcatctcactgggcttcataccctagaaatatacatgtgcacagaccttacacatttacctgagagcatccactgccccaccactctctgtagactgatgataagaagttgtgataatcttcgtgtgctgcctgactggcttgtggaactgaaatctctacagagtctggacatagactcatgtgatgctctccagcagcttcctgaacaaataggagaactctgctcactccagcacctccaaataatttctatgcctttcctgacttgccttcccgagagcatgcagcacctcacctcgcttcgaattctcaacttgtgtgaatgtaacgcgctgacccatcttccggagtggctaggcgaactctctgcgcttaaaaaactcttgatccagagctgccgtggccttacatctttgccccgctccatacaatgccttactgctctcgaggaattatatataagcggcaaccccaaactgcttcagatcagtgcatcatattctaaggaagacaaggatggccaggctccgacgacattcagatcacatggcttgacaggtcgacatacaaatccccgttccatgtagtatttctgcagggacaagagtcttctctcttgaactctacagctgcaaccgttccgatgttgcaggcctgacgaccagcattgcagtgaggcccaagagttcgatctggtccggaacatgctcatcgtcgcagtagaagaacgctacaaggatgctgctcaatacagaggccaacattccatgttgcggtcaaagaaaaagaacgcgatatagcaggcccaggccgttattatgtacatccacatgtgtgccaagttcaacttgttaggtaaacgtctaagaaaacaccatgtaaatatggaggccttttttttgctgaagcgcatgaagcttcggcaaacatctaaagaacaccatgcaaatggctgtggtgtcctgcgattggtctacgcgatgtacatgtgcgcaagctgctttgaagagaatttaaccaccttgaattttaggtacccatacagttcgctcatgtattgatctggcgcaagcttcgatgaacattttttggtttcatgtggttgatatgttgcttgagccttgtcagcttgacgatttttt

SEQ ID NO: 34874 - DNA, 4765 bp, Zea Mays
ctctgaaccaatgatttttcagcttgcgtttctcctgctccctatccgacgtagtgaatcccttcccaggcaccactcgccgacggaacgcctcccttcctaggcaccactcgccggagcgcatcccttcccagccactgatggccctgacccgccagcgcgcttccctccccaccgttgacggccccgacccgccggtggactgcgctcctcatcgaccagcgtggccatattttgcatttgttcctgtttcagcttgtgagcaactgatactactgtcccggcccatcgttactggaccaagaactttgagatgtgaatcaatcatttttggctctttcatgcaccacatatttcagcagcacagaaagtttatgggtgaaaatggtcatttggggaactctatttacaggaggctggaaactagtctgtacaagaacgaagcagttaatctattcttctctgataccagcgcttggggtacgagcaaggaagggacttcaagaaatacgggtgggatggaagttgccttggtatcaactgtattgaaggttttggggacgaagttagctcctcttgcactcaaagagttgagctctaaagcaggtgtggccaaagatcttcaggaactccaggacctagttgaggagatcaacaattggttgcaaacagttggtgataaagaccgatcatctaaatggctcaaaaaattgaaagaagttgcttatgatgctgaagatttagtccatgagttccacatcgaggctgaaaaacaagacagagaaattactggtggcaagaataccttggtcaaatacttcatcacaaaacctaaagcaactgtgactgaatttaagatagctcacaagatcaagaaaataaaaaacagatttgatgcaattgtgaaaggaaggagtgactatagcacaatagcaaatagcatgccagtggattatcctgttgagcatacaagaaagacaattggagaggtgccattgtatactattgtggatgagacatcaatatttggcagggatcaagcaaagaatcagataatatctaagctgatagagactgatagccaacaaagaataaagatagtttcagtaattgggctaggtggctctggtaaaactactctcgcgaaacaagtatttaatgatggtaacattataaagcattttgaagttatattgtgggttcatgtgtcaagagaatttgctgttgaaaagcttgtggcgaagttgtttgaagccattgctggtgacatgtctgaccacctcctattgcagcatgtgagcagaactatctcagacaagttagttggaaagaggttcctagctgtcttggatgacgtttggacagaggatcgtgttgagtgggagcgattcatggtacatttaaagtgcggtgcacctggaagtagtattttactcactactcgtagtagaaaagttgcagaagcagtggattctagttatgcatacgacctaccactcttgtctatggaagatagctggaaagtgttccaacaatgttttggaattgccatgaaagctctagaccctgaattcctacagtccgggatagagattgtggagaaatgcggaggtgtgccccttgcaattaaagttattgcaggcatcctccatggaatgaaaggaattgaagaatggcagtccatatgcaatagtaatttattagatgtccaggatgacgaacatagagtatttgcatgcttgtggttgagttttgttcatttaccggaccatctaaagccttgttttctacactgctctatatttccaagaggctatgtaatcaacaggtgtcatttgatttctcaatggatagctcatggcttcgtcccgacaaaccaagctcgacaagcagaagatgttggaattggctactttgattcccttcttaaagtggggttccttcaagaccatgatcgagaccaaatttggtccacaaggggtgaagtaacatgcaaaatgcatgacctggttcatgatctcgctagacaaattctacgggatgaatttgagtctgagatagaaacaaacaagcaaataaagagatgcagatacctatctttgacttcatgcactgggaagcttgataacaaattatgtggcaaggtccgtgcactctatgtttgtggccgtgcactcgaatttgacaagacaatgagcaagcagtgttgtgtccgtaccattatattgaagtatataactgctgactcattgcctctgtttgtgtcaaaatttgaatacctggggtatcttgaaatatccgatgttaactgtgaagcactaccagaagctctctcgcgttgttggaacttgcaggcccttcatatattaaattgctcaagacttgcagttgtacctgaaagtatcggcaagcttaagaagcttagaactctggaactgaatggtgtttctagtatcaagagtttaccacagtctattggcgattgtgataatcttcgaagattatacctagaaggttgtcatagattcgaagatataccaaattccttgggaaaattggaaaatttaaggatacttagtattgttcattgctttagttttgaaaaactttcgccatcagcatcatttgggaagcttttgaacttacaaactatcacctttaactgttgcttcaatctccgaaacctacctcagtgcatgacttctttgagtcatctagagatggtggatcttggatattgttacgagcttgttgaattgcctgaaggcatagggaatttaagaaaccttaaagttttgaatctgaagcaatgcacacaattgcgtggactaccagctggttgtgggcagctaactcgtttacaacagttgagcttgtttgttattggagacagtgccaaacacgcaaggatctctgagcttggtaatcttgataagttggatggtgagctgcagattaaaaacattagatatgtgaaagatccaagtgacacagacaaagttcgtttgaagaaaaagattggcatccggaaattgtcgttggattggtattcaagattggaggttcagcctgatgatgtggaagaagagttatcattaaatatggagaaggaattgcatttgctcgacagtcttgaaccaccatcaaaaattgagaagctgagaattcgtggctaccggggttcacaattgccacgttggatggcaaagcaaagtgactcttgtggtccagcggatgatacacacatagtaatgcaaagaaatccatctgaattctcccatctgactgaattagtactggacaacttaccaaacttggagcaccttggggaacttgtggaactgccactggtaaagatccttaagctcaaaagactgccaaagttggtagagctgcttacgaccacaacgggggaggaaggagtggaagtgctatgtcgtttccatcacgtttccactctagtaataattgattgccggaaacttgttgtgaagccgtactttcctccgtccttgcagagattgacactagaaggaaacaatatgcagttggtttcttcaggatgcttcttccatccacgtcatcatcatgcatctcatgctcatggtgacgagtcttcatcttcctcctattttgcggatgagacgggtactcacctcgagagacttgaacttcgtcggttgacaggatcatcatctggttgggaggtgctgcagcatctcactgggcttcataccctagaaatatacatgtgcacagaccttacacatttacctgagagcatccactgccccaccactctctgtagactgatgataagaagttgtgataatcttcgtgtgctgcctgactggcttgtggaactgaaatctctacagagtctggacatagactcatgtgatgctctccagcagcttcctgaacaaataggagaactctgctcactccagcacctccaaataatttctatgcctttcctgacttgccttcccgagagcatgcagcacctcacctcgcttcgaattctcaacttgtgtgaatgtaacgcgctgacccatcttccggagtggctaggcgaactctctgcgcttaaaaaactcttgatccagagctgccgtggccttacatctttgccccgctccatacaatgccttactgctctcgaggaattatatataagcggcaaccccaaactgcttcagatcagtgcatcatattctaaggaagacaaggatggccaggctccgacgacattcagatcacatggcttgacaggcctgacgaccagcattgcagtgaggcccaagagttcgatctggtccggaacatgctcatcgtcgcagtagaagaacgctacaaggatgctgctcaatacagaggccaacattccatgttgcggtcaaagaaaaagaacgcgatatagcaggcccaggccgttattatgtacatccacatgtgtgccaagttcaacttgttaggtaaacgtctaagaaaacaccatgtaaatatggaggccttttttttgctgaagcgcatgaagcttcggcaaacatctaaagaacaccatgcaaatggctgtggtgtcctgcgattggtctacgcgatgtacatgtgcgcaagctgctttgaagagaatttaaccaccttgaattttaggtacccatacagttcgctcatgtattgatctggcgcaagcttcgatgaacattttttggtttcatgtggttgatatgttgcttgagccttgtcagcttgacgatttttt

SEQ ID NO: 34875 - DNA, 6308 bp, Zea Mays
cggacctattcctctgaaccaatgatttttcagcttgcgtttctcctgctccctatccgacgtagtgaatcccttcccaggcaccactcgccgacggaacgcctcccttcctaggcaccactcgccggagcgcatcccttcccagccactgatggccctgacccgccagcgcgcttccctccccaccgttgacggccccgacccgccggtggactgcgctcctcatcgaccagcgtggccatattttgcatttgttcctgtttcagcttgtgagcaactgatactactgtcccggcccatcgttactggaccaagaactttgagatgtggtaattagtttatgattttgcatttgtcccggttggtgctactactgttgccatagcaggaaacgctgcaaaacaaaaaataagagtcccaaaattcattttaatctttaatttgctcatgattttgcattagcttatgattcactaaactgttatggccatgcagaatcaatcatttttggctctttcatgcaccacatatttcagcagcacagaaagtttatgggtgaaaatggtcatttggttcaggcccaaactaaaaccattcaggattattgaccaactgaattcaattaaaaattcttcagataggaactggtttttcaggaatgcttcaaacaaaaattcgttaagaaataatccatatttaatctgggccttcagtttactcaatttgtcttttaccacatcaatgaaaaagttcaacgagaaattaaataagccatcaggcttctgaggaacaggagcagtttgtggaggtataaacaaaatcaacctccatgattaaacaaaagttcaacgagtaattaaataagcgcccgctgggtcgttcgttgccagatcatgtttttcaggtctgtctacctccatgattattaaattttttttcgagcgatcccgattccaacaggggacacgagaacggctttcgaggctaggcatgtggtttggaggaataatctcacgtggtaccacgctttggaggggcacacgagatgcggtcgtgcgtgcagatgggtttcacatggcagcggtttcctggtctgggccagctcgatcaccgagttaagaagctgactgaagccacaagccactgaggcaccaaagaatacgcaaagctctctgcagacctgcagtctgagctacactcattcaaagtttcggctaacaaaaacatttggaggttgcacagaacaacacatcatttggtcagatcccaaggtttctactatcatgaaagctagaacagatgcgttttcttttttgcttttgtcatgcttatcaatttcttccttggcatctggtattttctttgctggataaatttactttccctgcctcttcttaggggaactctatttacaggaggctggaaactagtctgtacaagaacgaagcagttaatctattcttctctgataccagcgcttgggtatattaacataatcctatcttatatagctcactttcatgtatgtgcagtataataccctgtgtttcctctcactcatgctaatttcctggtgatgttagaaacaagaataacataaagggtgttgtcccaggtcagatgtctatcactattagtctattatcacctgccaattcatgcacatcatttccatcattgtctgtgcgaatcatacatgacagagagttagcaaacagagaaaataaacagatgggtatgtgctgtgtgtagcaacaaattaaagtagttataagttctagtagaaagattattgtagctcatttatgcaaaaaaaaaataaggttgcagctcttgacaaatttaatttgcagggtacgagcaaggaagggacttcaagaaatacgggtgggatggaagttgccttggtatcaactgtattgaaggttttggggacgaagttagctcctcttgcactcaaagagttgagctctaaagcaggtgtggccaaagatcttcaggaactccaggacctagttgaggagatcaacaattggttgcaaacagttggtgataaagaccgatcatctaaatggctcaaaaaattgaaagaagttgcttatgatgctgaagatttagtccatgagttccacatcgaggctgaaaaacaagacagagaaattactggtggcaagaataccttggtcaaatacttcatcacaaaacctaaagcaactgtgactgaatttaagatagctcacaagatcaagaaaataaaaaacagatttgatgcaattgtgaaaggaaggagtgactatagcacaatagcaaatagcatgccagtggattatcctgttgagcatacaagaaagacaattggagaggtgccattgtatactattgtggatgagacatcaatatttggcagggatcaagcaaagaatcagataatatctaagctgatagagactgatagccaacaaagaataaagatagtttcagtaattgggctaggtggctctggtaaaactactctcgcgaaacaagtatttaatgatggtaacattataaagcattttgaagttatattgtgggttcatgtgtcaagagaatttgctgttgaaaagcttgtggcgaagttgtttgaagccattgctggtgacatgtctgaccacctcctattgcagcatgtgagcagaactatctcagacaagttagttggaaagaggttcctagctgtcttggatgacgtttggacagaggatcgtgttgagtgggagcgattcatggtacatttaaagtgcggtgcacctggaagtagtattttactcactactcgtagtagaaaagttgcagaagcagtggattctagttatgcatacgacctaccactcttgtctatggaagatagctggaaagtgttccaacaatgttttggaattgccatgaaagctctagaccctgaattcctacagtccgggatagagattgtggagaaatgcggaggtgtgccccttgcaattaaagttattgcaggcatcctccatggaatgaaaggaattgaagaatggcagtccatatgcaatagtaatttattagatgtccaggatgacgaacatagagtatttgcatgcttgtggttgagttttgttcatttaccggaccatctaaagccttgttttctacactgctctatatttccaagaggctatgtaatcaacaggtgtcatttgatttctcaatggatagctcatggcttcgtcccgacaaaccaagctcgacaagcagaagatgttggaattggctactttgattcccttcttaaagtggggttccttcaagaccatgatcgagaccaaatttggtccacaaggggtgaagtaacatgcaaaatgcatgacctggttcatgatctcgctagacaaattctacgggatgaatttgagtctgagatagaaacaaacaagcaaataaagagatgcagatacctatctttgacttcatgcactgggaagcttgataacaaattatgtggcaaggtccgtgcactctatgtttgtggccgtgcactcgaatttgacaagacaatgagcaagcagtgttgtgtccgtaccattatattgaagtatataactgctgactcattgcctctgtttgtgtcaaaatttgaatacctggggtatcttgaaatatccgatgttaactgtgaagcactaccagaagctctctcgcgttgttggaacttgcaggcccttcatatattaaattgctcaagacttgcagttgtacctgaaagtatcggcaagcttaagaagcttagaactctggaactgaatggtgtttctagtatcaagagtttaccacagtctattggcgattgtgataatcttcgaagattatacctagaaggttgtcatagattcgaagatataccaaattccttgggaaaattggaaaatttaaggatacttagtattgttcattgctttagttttgaaaaactttcgccatcagcatcatttgggaagcttttgaacttacaaactatcacctttaactgttgcttcaatctccgaaacctacctcagtgcatgacttctttgagtcatctagagatggtggatcttggatattgttacgagcttgttgaattgcctgaaggcatagggaatttaagaaaccttaaagttttgaatctgaagcaatgcacacaattgcgtggactaccagctggttgtgggcagctaactcgtttacaacagttgagcttgtttgttattggagacagtgccaaacacgcaaggatctctgagcttggtaatcttgataagttggatggtgagctgcagattaaaaacattagatatgtgaaagatccaagtgacacagacaaagttcgtttgaagaaaaagattggcatccggaaattgtcgttggattggtattcaagattggaggttcagcctgatgatgtggaagaagagttatcattaaatatggagaaggaattgcatttgctcgacagtcttgaaccaccatcaaaaattgagaagctgagaattcgtggctaccggggttcacaattgccacgttggatggcaaagcaaagtgactcttgtggtccagcggatgatacacacatagtaatgcaaagaaatccatctgaattctcccatctgactgaattagtactggacaacttaccaaacttggagcaccttggggaacttgtggaactgccactggtaaagatccttaagctcaaaagactgccaaagttggtagagctgcttacgaccacaacgggggaggaaggagtggaagtgctatgtcgtttccatcacgtttccactctagtaataattgattgccggaaacttgttgtgaagccgtactttcctccgtccttgcagagattgacactagaaggaaacaatatgcagttggtttcttcaggatgcttcttccatccacgtcatcatcatgcatctcatgctcatggtgacgagtcttcatcttcctcctattttgcggatgagacgggtactcacctcgagagacttgaacttcgtcggttgacaggatcatcatctggttgggaggtgctgcagcatctcactgggcttcataccctagaaatatacatgtgcacagaccttacacatttacctgagagcatccactgccccaccactctctgtagactgatgataagaagttgtgataatcttcgtgtgctgcctgactggcttgtggaactgaaatctctacagagtctggacatagactcatgtgatgctctccagcagcttcctgaacaaataggagaactctgctcactccagcacctccaaataatttctatgcctttcctgacttgccttcccgagagcatgcagcacctcacctcgcttcgaattctcaacttgtgtgaatgtaacgcgctgacccatcttccggagtggctaggcgaactctctgcgcttaaaaaactcttgatccagagctgccgtggccttacatctttgccccgctccatacaatgccttactgctctcgaggaattatatataagcggcaaccccaaactgcttcagatcagtgcatcatattctaaggaagacaaggatggccaggtgagacatttctgtttctctctggcatgtgcgcacacattcgtttctgaatgaacccacatttattttctgaacaatggattatatataatgtatgcggacgtattgtataagctgttctattgttcataattggatacggtacttgttccaatttggtgctttacatgtatgtgtatcatgtaggctccgacgacattcagatcacatggcttgacaggtcgacatacaaatccccgttccatgtagtatttctgcagggacaagagtcttctctcttgaactctacagctgcaaccgttccgatgttgcaggcctgacgaccagcattgcagtgaggcccaagagttcgatctggtccggaacatgctcatcgtcgcagtagaagaacgctacaaggatgctggtaaacgtctaagaaaacaccatgtaaatatggaggccttttttttgctgaagcgcatgaagcttcggcaaacatctaaagaacaccatgcaaatggctgtggtgtcctgcgattggtctacgcgatgtacatgtgcgcaagctgctttgaagagaatttaaccaccttgaattttaggtacccatacagttcgctcatgtattgatctggcgcaagcttcgatgaacattttttggtttcatgtggttgatatgttgcttgagccttgtcagcttgacgatttttt

SEQ ID NO: 34876 - DNA, 2644 bp, Zea Mays
gtcagacgttagattccacatcagaaaggccgaatcccgccggccgccgctgcctcgccgaccgttctggctccagttgctctacctcttcgccagggatggtggacagcgacagtccctggcccggcacgcgttgcatcaaggccgactgcacctgtcaagcaaaggtgagagttatcaacatctcttctgtatcagatgttatcaagatttctattgtcggaatttttactactggcataacatggatctgccagaaaatgagctacaaagatacataaaggacaatggcaaaccaatgtggacagcacataacaatcacaacataaggtatttcaaagaagaagatataagaataatcactaacaactataacactttccttgggaaaggggcatttggagaagtttataaaggggttcttgatgataacagtttagttgctgtaaagaagtacatccataatgtaaaggaggactttgccaaagaagtgattgtccattgccaaatcaatcaccggaatgtagttagactcattggttattgtataggtgaaaatgcactaatgatggtgactgaatatatctctagaggaaacctcagtgatattcttcactccagtgaaatttctatatctttggaaacacgattgagtattgctatagggtgtgcagaagcattaagctatatgcattcgcaaatgtatgggaaagtcatccatggagacattaagcctgccaacatacttctcgatgacaacctcactgcaaaaatatcagactttgggatatcaaagttactttcaacggataataccttatacaccacacatgtactggggagcatagggtatatggatcctttgtttgcacggagcggacgcctcacctcaaagagtgatgtttatagttttggagttgttctcttggaactgattacaagaagaaaggctgtcgatggtggtcaaattagccttactgaaaacttcactcaagctctagcgaaacggaataagatacgggaattttatgatgtaaaagttgcagatgagaacagtttgaggattcttgatggaattgggaaactagcagcaaaatgcttagcaatggaaatagagaaacgtccagaaatgaaagatgttgcagaacagcttcggatgtttagaaaaactcaatatcagtcacaagaaaaaatatttttctttggctgggtacggagaagcaaacagccaccccaaaatatggtccagattcacaaaaatcgtggaaatcaagttcttaaagcggaggtacaaacacaggaagtcagtaaagtagataaagatgttcataatgtcacagtagtgagagataggagttcaaaactttacagctttggttcatcgcaggggatagaattagaaaagctgttggaagcatctgccgaggttcttgggaaaggcaagtatggaacaacatacaagactacactgcatgatggttccacgttaattataaagagactgaagactctagacgtgccagaggcagtgttcaagaaacgaatagtagcaataggaacaattgagcatgagcttgtagtcccactacgtcagtactactacagcaaggatgagaagctactggtgtatgattattttcccaatggtagcctagcttcaaatcttcatggaaaagatgtgaagccagtaggctgggagactcggtctgccattgcactctctgtagctcgtgctgttgccttcatccactcaaccaatgctgcagcttcccatggcaacatcagctcctccaacgttcttctcaccagtaactacgagggacttgtctcagaacacggcctcaaaactcttgtcagtatcccaacgttacttgctgacaacaacattgcacaaaaggatgatgtgtacagttttggcgtcatactgcttgagatgctcacaagcaagtcaccaatcgtcacagacgagccagatttggtcgattgggttttatcaataccccatgagcactgggcaacacaagcattcgataagaagctccttacaaacaaaactgtggtagaggagctggttcagtttctcaaacttgcaattcattgctgtgacaagaaccccacaatgagaccagcaatggcagaagttgttcaacggattgaggggatacgacgtttctacagctgggaataggcaccttatgtggaacagcagtgcaggttgagaggaacaaactttgagccaaggaacacgaggatacaaattttactgtgagcatacactactgttacaagcatttcttgttgtctgaaaaagacactcacgttccatcacttggttgtttgcgataccgtttccgtttgaaatatagagccctttttcaccaacattttgttctagtacacatgacacatattgtatattgagggtgctattttgttgcaattatgtcagggacgtgacaaaccgacttagttctatggaagcgggaagatgtgattcatttgtaatccatttgtgtgtttggaccctatgatggtcgtattagtagtgggccgtattggcctagtgttgtaatacaaatactggacaagtagtgaagaaagacagaaaaatagaatatcgaaaattacacatacctgttttctc

SEQ ID NO: 34877 - DNA, 440 bp, Zea Mays
gtctttttagttgacctgactcttctaactcatcgcccatccctttctggctttttcgaattcttgtcgctaaggataatatatgtcggttttagtgaggacgtacagaaaaatgtcaacgccgcgttagaaccaaaatcaaagaaggtcactgcagacctgaagcctagcaactaagttgtgcctaaaaggtctcttcagccaaaaccccgcaagctcagttttccattgagaagatgcctggagattgcagggtggacagctgttgatgaggttccgaggaggactatatggcatactgaagatccaatcagtaaagaaacatatatttttatccttcagcctttggtatgttagtttcaccctctttaaaaagttcattttcaagtaattgtcacagatttcctttcctctcacactcatattgcttcctcttaaca

SEQ ID NO: 34878 - DNA, 482 bp, Zea Mays
gtcacggttccatgtattttgtctgcttcatcaagcattcagatggcctgggccgttttgtcttcttttatggtctgcgccaactcgatcaccgttcttgagtaggccgacggactgagacggcaccacctgctcgtcgcacagaacctcctcgtcgtcagacgttagattccacatcagaaaggccgaatcccgccggccgccgctgcctcgccgaccgttctggctccagttgctctacctcttcgccagggatggtggacagcgacagtccctggcccggcacgcgttgcatcaaggccgactgcacctgtcaagcaaaggaggactatatggcatactgaagatccaatcagtaaagaaacatatatttttatccttcagcctttggtatgttagtttcaccctctttaaaaagttcattttcaagtaattgtcacagatttcctttcctctcacactcatattgcttcctcttaaca

SEQ ID NO: 34879 - DNA, 142 bp, Zea Mays
ctgcagacctgaagcctagcaactaagttgtgcctaaaaggtctcttcagccaaaaccccgcaagctcagttttccattgagaagatgcctggagattgcagggtggacagctgttgatgaggttccgagattttacattcg

SEQ ID NO: 34880 - DNA, 489 bp, Zea Mays
agattcagggtggtgaggaacagtttgatgcttccaatgttgctgggagacctattcctggtccagctccacttgtccgacctagcatgtcgctgccccgacctcctcagccacttcctcttgttagaaacgacctcctcagccacttcgctggtgacattgtcaagaatcgctcagagagtgatgctccctgctgggaagctgatgctatggatgagagcgaggaaagagaggtaaagaagatgaaatgctgatgcagtcgacgagagatcagattcagagttgctgccagtggttatcttgtgaagcagccaagcctaattatttatgccacataacatgtgctattgtaatgtgccacatgcttatatttgcaataaacagctttaggtggtcagctttgtctgccgcaatgagcaatgtatcgatattgtggttttgaattgtttggatctaaataaagtcttgtgttcgatacaatttgcatat

SEQ ID NO: 34881 - DNA, 1895 bp, Zea Mays
aacatctttccggaaagaaaccggtggtgctggtgcgcagctagcagtagcagttgaatcatcgccctcgtcgcccgtttttgtgactatggttgtacgtctcctaaatgctaggctgtgaaattaatagcttgtttggttgccctcgtcgcccgtttttgtgattgtgactatagtagaagccctgcagcgcagtgaacaatctgctagcagttgagtgctcgcccttgtcgtcagtcgagtcgagcgatggagaagacgacggtcgtgctgtacccgggcgcgggcgtcggccatctcgcgccgatgctcgagctagccaaggcgttgctccgccacgcaggtgaccaggtggacgtcgccatcgtggtcgtcgagccgcccgtctacgcggacggcttcgccgccacggtcgcgcgcgccaaggcctccaacgcctccgtcgcctgccacgtgctacccccgccggcctccgacggcggcgccgagcctgacgaccccctgacccgactgctccgcttcctccgcgccacgaacgcgccgctccgggacttcctccgcgcgctgtcggcgtcgcgccgcgtccaggcgatcgtcctcgacatgttctgcgccggcgcgctcgacgtcgcggcggacctcggcctgcccgcctacttccacttcgcctcgggcgccgccggcctcgcctacttcctcggcctgcccgccatgcgggccagcgtgggcacgagcttcgccgagctcggcgggtcgaccgtcctgtcgttcccgggcgtccctccgctcacggtcgcggacctgccacagggggtgctcaacgacagcgaggcgtgccgggtcatcatgggcgcggctgcccggatgcccgacgcccgcgggatcctcatcaactcgttcgagtcgctggagccgcgcgcgatgcgggcgctaagggatgggctgtgtgtgccgggccgcgccacgccgccggtctactgcgtcgggccgatggtctcgcccggcggcgacggtgccggccacgagtgcctccgctggctggacgcgcagccggaccgcagcgtcgtgttcctctgcttcgggagtttgggcacgttccccaagaggcagctggaggagatcgccgtgggtctggagaggtccgggcagaggttcctctgggtggtgcggagccctcccggcgggccaccagccgacgacgtgcgcgcgctgctcccggcagggttcgcggagcgcaccgagggcagggggctcgtagtcgcgtcgtgggcgccgcaggtggacgtgctgcgtcacagggcggccggcgcgttcgtgacgcactgcgggtggaactccacgctagagggcgtcgtggcgggactgccgctgctgtgctggccgctgtacgcggagcagaggatgaacaaggtgcggatcgtggaggagatgaagctcggggtggaggtgaggagggacggcgagggcctggtgacggctcaagaggtcgaggcgaaggtgaggtgggtgatgcaggactccgacggcgcgcgggagctcaaggaacgcgcggaggcggcgagggcgagagcggccgaggcgctggcggaagggggtccgtcgcgtgcagctttcctcgactttcctcaagttcgtcgtagacctatcggcttcggaaggcatggttaacgtagggatggcaacgagtcagattcggatcggatgttgtaaatatccgtccgtagccatatccacggtcacagataatatccgcccgcaactatacctgcggttagaaattcatatccatgcccatgctcatcgggttttggatatccatcggatatgacaaagaactattttcaacaattcaataacataattaatcaaatttcttcccaattatcagttaaaat

SEQ ID NO: 34882 - DNA, 1106 bp, Zea Mays
ataccccgccagccgccatcccctccgaccaaaccctagccggccatggcgtggcgtggccccgcctcccgggccgtccttgccgccgtccgccgcccagccgcagcgcccgcggccgcacgcctccacgccccgcgacctttcgcggccccgcgccgccgcgtcccgtccgccttcgccacctcctcgctcccgtccgcgcggcctctggcggcgatgatggggtccccggtgacggtggccgcggtgatggcgcgtctcacggcgcaccccggtgccagcgcgcgggcgtgctgcgagctctcccaggggagtgggaaagatggttgatgctggaggctgcacaacttgatggggaccttccgtcctagcataataaaaagaaagtgagctatgcggagttccactgttagcagtaccacactaatgctctgatatgcagagtgcagctttcactgttagcagtaccacactaatgctcggatgcattgctggtgttttgattcatcaccaacctttttgtgccgtcatttctgaagcgtggaaagcgaaacggaaaggatgggtgatgcaagaaaggccgttgtagagcctgccaaagaagctggtttgaagcatgtactcctttggtacttgaagctgctgtgtagatcccatccttttcgaaaggataaaaggtgtctttttttttgggggggggggggggggaaatgctattgtggcacttcttccactgcaaagttggaagaatttacccacccagcgatagccagttccctcgttaggatgttagaatatactggaataattttaatgttattcatggcacggtttgagcacatggatttaccttctcttccccttagagattcattgatgtcatgtttcagttggcatgagttaaatgattgtgttaccgtgctttgggcgttagcatagttttcattgtcgtttttgaaatcattggcgacgacacaaatatcccctaaatgacaggccacgtacatccatgtgggcaattttcaggcatgtaataataacagtactcaatctcaaggtcatttatttttttttataaaaaaacagcagaattctgtgtccctgct

SEQ ID NO: 34883 - DNA, 936 bp, Zea Mays
ataccccgccagccgccatcccctccgaccaaaccctagccggccatggcgtggcgtggccccgcctcccgggccgtccttgccgccgtccgccgcccagccgcagcgcccgcggccgcacgcctccacgccccgcgacctttcgcggccccgcgccgccgcgtcccgtccgccttcgccacctcctcgctcccgtccgcgcggcctctggcggcgatgatggggtccccggtgacggtggccgcggtgatggcgcgtctcacggcgcaccccggtgccagcgcgcgggcgtgctgcgagctctcccaggagggagtgggaaagatggttgatgctggaggctgcacaacttgatggggaccttccgtcctagcataatgaaacggaaaggatgggtgatgcaagaaaggccgttgtagagcctgccaaagaagctggtttgaagcatgtactcctttggtacttgaagctgctgtgtagatcccatccttttcgaaaggataaaaggtgtctttttttttgggggggggggggggggaaatgctattgtggcacttcttccactgcaaagttggaagaatttacccacccagcgatagccagttccctcgttaggatgttagaatatactggaataattttaatgttattcatggcacggtttgagcacatggatttaccttctcttccccttagagattcattgatgtcatgtttcagttggcatgagttaaatgattgtgttaccgtgctttgggcgttagcatagttttcattgtcgtttttgaaatcattggcgacgacacaaatatcccctaaatgacaggccacgtacatccatgtgggcaattttcaggcatgtaataataacagtactcaatctcaaggtcatttatttttttttataaaaaaacagcagaattctgtgtccctgct

SEQ ID NO: 34884 - DNA, 1374 bp, Zea Mays
ataccccgccagccgccatcccctccgaccaaaccctagccggccatggcgtggcgtggccccgcctcccgggccgtccttgccgccgtccgccgcccagccgcagcgcccgcggccgcacgcctccacgccccgcgacctttcgcggccccgcgccgccgcgtcccgtccgccttcgccacctcctcgctcccgtccgcgcggcctctggcggcgatgatggggtccccggtgacggtggccgcggtgatggcgcgtctcacggcgcaccccggtgccagcgcgcgggcgtgctgcgagctctcccagggtgttaggatcatgaaaccagtatctcatacaaactcttacgtactgctgtcaaaaagtacaattccaagcaatgcaggggcgcactaagtgcatttccaagctttattttctgctcttaacaaagttgatgagtggagctcatttaaggagatcaaaattgggattttatagggagtgggaaagatggttgatgctggaggctgcacaacttgatggggaccttccgtcctagcataatagtgcagctttcactgttagcagtaccacactaatgctcggatgcattgctggtgttttgattcatcaccaacctttttgtgccgtcatttctgaagcgtggaaagcgtataacgattcacatttatctataatcagttgtttaatgctatattcactttaaccaagttggttacagtgtacagctgttcaaataccctgcctagagaaacatttttacacaatattgaaactttagttgattgtgggtacggttgggatttgttaggaaacggaaaggatgggtgatgcaagaaaggccgttgtagagcctgccaaagaagctggtttgaagcatgtactcctttggtacttgaagctgctgtgtagatcccatccttttcgaaaggataaaaggtgtctttttttttgggggggggggggggggaaatgctattgtggcacttcttccactgcaaagttggaagaatttacccacccagcgatagccagttccctcgttaggatgttagaatatactggaataattttaatgttattcatggcacggtttgagcacatggatttaccttctcttccccttagagattcattgatgtcatgtttcagttggcatgagttaaatgattgtgttaccgtgctttgggcgttagcatagttttcattgtcgtttttgaaatcattggcgacgacacaaatatcccctaaatgacaggccacgtacatccatgtgggcaattttcaggcatgtaataataacagtactcaatctcaaggtcatttatttttttttataaaaaaacagcagaattctgtgtccctgct

SEQ ID NO: 34885 - DNA, 936 bp, Zea Mays
ataccccgccagccgccatcccctccgaccaaaccctagccggccatggcgtggcgtggccccgcctcccgggccgtccttgccgccgtccgccgcccagccgcagcgcccgcggccgcacgcctccacgccccgcgacctttcgcggccccgcgccgccgcgtcccgtccgccttcgccacctcctcgctcccgtccgcgcggcctctggcggcgatgatggggtccccggtgacggtggccgcggtgatggcgcgtctcacggcgcaccccggtgccagcgcgcgggcgtgctgcgagctctcccaggggagtgggaaagatggttgatgctggaggctgcacaacttgatggggaccttccgtcctagcataatgtgaaacggaaaggatgggtgatgcaagaaaggccgttgtagagcctgccaaagaagctggtttgaagcatgtactcctttggtacttgaagctgctgtgtagatcccatccttttcgaaaggataaaaggtgtctttttttttgggggggggggggggggaaatgctattgtggcacttcttccactgcaaagttggaagaatttacccacccagcgatagccagttccctcgttaggatgttagaatatactggaataattttaatgttattcatggcacggtttgagcacatggatttaccttctcttccccttagagattcattgatgtcatgtttcagttggcatgagttaaatgattgtgttaccgtgctttgggcgttagcatagttttcattgtcgtttttgaaatcattggcgacgacacaaatatcccctaaatgacaggccacgtacatccatgtgggcaattttcaggcatgtaataataacagtactcaatctcaaggtcatttatttttttttataaaaaaacagcagaattctgtgtccctgct

SEQ ID NO: 34886 - DNA, 953 bp, Zea Mays
gctaaatgaaaaaacccctataccccgccagccgccatcccctccgaccaaaccctagccggccatggcgtggcgtggccccgcctcccgggccgtccttgccgccgtccgccgcccagccgcagcgcccgcggccgcacgcctccacgccccgcgacctttcgcggccccgcgccgccgcgtcccgtccgccttcgccacctcctcgctcccgtccgcgcggcctctggcggcgatgatggggtccccggtgacggtggccgcggtgatggcgcgtctcacggcgcaccccggtgccagcgcgcgggcgtgctgcgagctctcccaggggagtgggaaagatggttgatgctggaggctgcacaacttgatggggaccttccgtcctagcataatgaaacggaaaggatgggtgatgcaagaaaggccgttgtagagcctgccaaagaagctggtttgaagcatgtactcctttggtacttgaagctgctgtgtagatcccatccttttcgaaaggataaaaggtgtctttttttttgggggggggggggggggaaatgctattgtggcacttcttccactgcaaagttggaagaatttacccacccagcgatagccagttccctcgttaggatgttagaatatactggaataattttaatgttattcatggcacggtttgagcacatggatttaccttctcttccccttagagattcattgatgtcatgtttcagttggcatgagttaaatgattgtgttaccgtgctttgggcgttagcatagttttcattgtcgtttttgaaatcattggcgacgacacaaatatcccctaaatgacaggccacgtacatccatgtgggcaattttcaggcatgtaataataacagtactcaatctcaaggtcatttatttttttttataaaaaaacagcagaattctgtgtccctgct

SEQ ID NO: 34887 - DNA, 901 bp, Zea Mays
cctcaccatcttctagcaagacagttgtgctaaatgaaaaaacccctataccccgccagccgccatcccctccgaccaaaccctagccggccatggcgtggcgtggccccgcctcccgggccgtccttgccgccgtccgccgcccagccgcagcgcccgcggccgcacgcctccacgccccgcgacctttcgcggccccgcgccgccgcgtcccgtccgccttcgccacctcctcgctcccgtccgcgcggcctctggcggcgatgatggggtccccggtgacggtggccgcggtgatggcgcgtctcacggcgcaccccggtgccagcgcgcgggcgtgctgcgagctctcccaggggagtgggaaagatggttgatgctggaggctgcacaacttgatggggaccttccgtcctagcataatgtacttgaagctgctgtgtagatcccatccttttcgaaaggataaaaggtgtctttttttttgggggggggggggggggaaatgctattgtggcacttcttccactgcaaagttggaagaatttacccacccagcgatagccagttccctcgttaggatgttagaatatactggaataattttaatgttattcatggcacggtttgagcacatggatttaccttctcttccccttagagattcattgatgtcatgtttcagttggcatgagttaaatgattgtgttaccgtgctttgggcgttagcatagttttcattgtcgtttttgaaatcattggcgacgacacaaatatcccctaaatgacaggccacgtacatccatgtgggcaattttcaggcatgtaataataacagtactcaatctcaaggtcatttatttttttttataaaaaaacagcagaattctgtgtccctgct

SEQ ID NO: 34888 - DNA, 972 bp, Zea Mays
ataccccgccagccgccatcccctccgaccaaaccctagccggccatggcgtggcgtggccccgcctcccgggccgtccttgccgccgtccgccgcccagccgcagcgcccgcggccgcacgcctccacgccccgcgacctttcgcggccccgcgccgccgcgtcccgtccgccttcgccacctcctcgctcccgtccgcgcggcctctggcggcgatgatggggtccccggtgacggtggccgcggtgatggcgcgtctcacggcgcaccccggtgccagcgcgcgggcgtgctgcgagctctcccagggaaacggaaaggatgggtgatgcaagaaaggccgttgtagagcctgccaaagaagctggtttgaagcatgtactcctttggtaataatgattttcccccctcaatccatcctaaaccaaaattcagcggaactggtcctattagtatctctgtgaaacatttgtcaggttttactttaatgtcagaaaataaccctgcagtatcaaccggacataataaacatgacctatgtttcttattctttgtttgatatctattgctttttttgtctgcaatctttttcagctagagaatggcaccaccgatccaactgttttctatgactgtcgcataacacttactaacacattttcagttctcttagtttctactattcatagattcgtttttctaatttcctgtttatttggagttagtatcgatttagtcagtgtggtaccttttttttccgtggttgtccaaatgtggtgccaacaagcatttaatctaattttcttacctttgctttgggccctgatgaatgaatgcttcctttctgccccttgacgtttctttaattccatatatttccgtcttgaatattccattttttttccagatttgtctgatctttgttcttgatgtctcatattacagtgagctttaaatttcccaggcctttg

SEQ ID NO: 34889 - DNA, 1463 bp, Zea Mays
ataccccgccagccgccatcccctccgaccaaaccctagccggccatggcgtggcgtggccccgcctcccgggccgtccttgccgccgtccgccgcccagccgcagcgcccgcggccgcacgcctccacgccccgcgacctttcgcggccccgcgccgccgcgtcccgtccgccttcgccacctcctcgctcccgtccgcgcggcctctggcggcgatgatggggtccccggtgacggtggccgcggtgatggcgcgtctcacggcgcaccccggtgccagcgcgcgggcgtgctgcgagctctcccaggggagtgggaaagatggttgatgctggaggctgcacaacttgatggggaccttccgtcctagcataatgtaggtccccctttttcacattctttccccatttcccttgaatattgaatcacgcaagtatatttcattagttgagtttgtaattgtttcagaaaaagaaagtgagctatgcggagttccactgttagcagtaccacactaatgctctgatatgcagagtgcagctttcactgttagcagtaccacactaatgctcggatgcattgctggtgttttgattcatcaccaacctttttgtgccgtcatttctgaagcgtggaaagcgtataacgattcacatttatctataatcagttgtttaatgctatattcactttaaccaagttggttacagtgtacagctgttcaaataccctgcctagagaaacatttttacacaatattgaaactttagttgattgtgggtacggttgggatttgttaggaaacggaaaggatgggtgatgcaagaaaggccgttgtagagcctgccaaagaagctggtttgaagcatgtactcctttggtaataatgattttcccccctcaatccatcctaaaccaaaattcagcggaactggtcctattagtatctctgtgaaacatttgtcaggttttactttaatgtcagaaaataaccctgcagtatcaaccggacataataaacatgacctatgtttcttattctttgtttgatatctattgctttttttgtctgcaatctttttcagctagagaatggcaccaccgatccaactgttttctatgactgtcgcataacacttactaacacattttcagttctcttagtttctactattcatagattcgtttttctaatttcctgtttatttggagttagtatcgatttagtcagtgtggtaccttttttttccgtggttgtccaaatgtggtgccaacaagcatttaatctaattttcttacctttgctttgggccctgatgaatgaatgcttcctttctgccccttgacgtttctttaattccatatatttccgtcttgaatattccattttttttccagatttgtctgatctttgttcttgatgtctcatattacagtgagctttaaatttcccaggcctttg

SEQ ID NO: 34890 - DNA, 4466 bp, Zea Mays
cccgcagccgcccaaaccctagccctagcccctagccccgctgccggcaaggccggagcgcccggagcccccgctggccggccccggagaagacgtcccatgcggctgtatcgcgcaggggaaatttaggtgaatgttacaagcatgatgactcaaaccctgcaagggaaagttatggcctacacaccgagcagttttcctgttcagcaacagattctgccggaggatcttgaaatgcttcagctggataacatggaccagggtacctctccggttcgtgctgtcatcattaaaagaattgaaacatgcctgagaaatagagaagaattttgtaacttgtgcccagattcattactgaaagcttcagaaatcattgacaacctgctatacaaaattgatccgcagccccaatacatggatcttgacacaatagaagccagggtgaatgatttgctgagatcgttcctgtatggaaaccaaagagacccatggatatcttcagcagttccatcaacaaaagatttgaggcagctgcctgggatacaaatgacagactctagtgtatatcataatagagttgtccctggttttactaatttgcctgcacgcccaggaggcataccttcacatgctgtgttcactgctcagagatatgtaccactgaatcacaacatgactgctgccagttttgctctagttgaaaggcctgaaagctttatgagtaccgtagttgctccatctgtgtcaggacttcctaactgtatttctggccctggtgggattgatagttctggattgcaaaatggctattcaaaggaccattttccagccttatgtgatccaatcacaagttcgggtgcaatgataagatcatcaatggattttatccctaaagcaagtgggcaaaaactctttactggcaaaggacaaatgtttcaacaatacagagaatatgagaaagagttagatggtgcatggagccaccccacagagaagccagttcactcaaataggacaactcagagcgatgaaatatatctcaaaggagaatgcggacctgatacactcacagaaatgaaggaaaactatgggcgcatctcagactctagagatccttgtgaccctgagagagaaattgttgagagatctgaacagacatcaaatatcacagtatcaaaggcaacttcaccaatttcagatgaatcttctggcaggcgtccagcaaaacgcctgaaggctgatgctccccgtcttgtcaatgtcaatcaagtagagagtccacaggagcaaaaacctgttgtgaatgagaatcatgtatctggtggtgaaacagtacaatcggaaatcacagaattacctgcaaaaccaccttgcagttcattgggagacattaatgctgagagcaataatatgcttgaacagggtagtgaagatgtacccaacatggatattgttaaggaagaggaattgtcccgtgcaaaaggtgacattgagatgaaagatgctaagactgttgcattggatcatacaccaaaaggggtcaatttaagttcaagacgaaagagaggggcttctatactttatggattaactgctgaggagcttagagatcacatgagtagtctaataaaccggcatacttgtcagagcaaggtgacatctcaagaattcccatcaattgatggattgcctgatcagaacacatgcagtttgtgtgggatggagaagcttctttttgaacctcctccacgattttgtgcgctctgtttcaaaataataaattctgcagggtgctattatgttgaagttgaaaatggaactgagaaatcttctatatgtagcaaatgccaccatcttagcagtttaagagctaaatatcagaagaaatttaattatgcagaaacagatgctgaggctgaatggtgggtccagtgcgacaagtgcaaagcttggcaacatgaaatctgtgctctttttaacagaaagtgtgaaggggcaaaggctgagtatacttgtgcaaaatgttttttgaaggaaaaggatagtggagatattcaggcactggagtcatccactgttcttggggcacaggagttacaaagaaccaagctaagtgatcatattgagcaaagactttcagagaggcttgagcaggacaggcaacagagggcgagcgcctctggaaaagttgctgaagaggtgtgaaagggcttacagttagagtagtttcttcagccgaaagattactgcaagtccaaccacgttttcgtggtttttttaaacaaggaaagtatcctggggaatttccatacaaatcgaaggccattctcttgtttcaaaagatcgaaggtgtggatgtttgcctctttgccatgtatgtacaagagtatggctcagattgcccaccaccaaatcaaagacatgtttatcttgcatatattgattctgtcaaatacttccggcctgaaatcaaatctgcaactggagaagctctccgcacctttgtgtatcatgaaattttgattggttatctggactactgcaagaaacgagggtttgtaagctgttcaatatgggcttgcccatctacgaagcgagatgattatgttttatattgccatccaacagtacaaaagatgcccaagtctgacaagcttcgaagctggtaccagaacctgatcaagaaggccattaaggagggtgttgttgtggagcgtaatacactctctgacttcttccttcagcctacaaatgagtgcaaggccaatatttcggcagcatgcttgccatattgtgagaacgatttctggcctggagaagcagagaggctgcttgagaagaaagatgataatgcttcacagaaggaagagacacaggtaggaaggctcttgcgtgttgccaaacgcgacgacagaaaaggaaaccttgatgatattttgcttgtgcataagcttggggaaaggatgcgcacaatgaaagaagacttcattatgctttgtctgcaacagttttgcaagcactgccaccatcctatcctatctggcaaaagttgggtttgcactagctgtaaaaatttccatctatgtgacaagtgtcatgcagaggagcagaatacagcacagaaggacaggcatccggccaccacaaaacagaagcatgcattcgaaagaatggaggtacaacctcttccagagactgatgatggagatccgacaatggaaagtaagtattttgacagcaggatcgatttcttgaagcactgccaagacaatcaattccagtttgataccatccggcgggcaaagcactctacaatgatgattctgtattacctacacaattcaacctgctctgcttgccatcgtgccgtggaccaatgcttggtgtggcggtgcctagagtgcctaggctgcaccttttgtggtcaatgctataaacaaaatggtcaaggcttgcatattcatgaattaaggcagattgacactagagaaacttcacagaagcacactctacaggactacattgatggccttgtgcatgcatcgaggtgctatgatccacgtaactgcacccatccactctgtttaaccctgaagaaactgttcgcccatggtgcacgatgccatgtccgtgcctgcaatagcggcggttgcaaaaagtgtctctttatgtggaaactcctgttccgccactcaaaagattgcaacgacggagactgcgcggttcctagatgcagggatgtaaaggcattcatagctgaaaagatgaagcttaaaatctagtaatggaccccctcccccttctcccccttccttaaccagtcaaattcgttgatgaagatgcaataaactgcggttggccattgctggtggatggaactgcaaggtaaataatgtggtgacttactgcttctggtgtggttgcatgtgctccatgccacagaggatcacccaaccgaagcttacataggcaatctgacattggtttttagtgcccgtacataccttgtacatatagtttttctctccaacacaaataggggtttgttttaatttcttcatcgtcaaagttttgttctccataatgtctgcctcatttttgttcagtgttgcagtgctgcggtggcatccaaatattcaatgaatgggtaactaacaagtcagcgactagatagtttactagggtaaacaagagctaacagggaccagttagtcccatagatcaaacaagacctgacaaccatcctataagcttgttattcaagtggcaatttgcaaggcacggactactaattagtgctataacttgagaagttacacaatgatcttatccagggacccattgcgccgttcattttcttttccattcgaaccattggcttcatagagccgttgtctaaactcacgtatgatagattctagatagctataaaggggtaaataacgtataaaatatttttttataaa

SEQ ID NO: 34891 - DNA, 4569 bp, Zea Mays
ctccatcctccccttccttctgatcgcctccttcccgttccccgcagccgcccaaaccctagccctagcccctagccccgctgccggcaaggccggagcgcccggagcccccgctggccggccccggagaagacgtcccatgcggctgtatcgcgcaggggaaatttaggtgaatgttacaagcatgatgactcaaaccctgcaagggaaagttatggcctacacaccgagcagttttcctgttcagcaacagattctgccggaggatcttgaaatgcttcagctggataacatggaccagggtacctctccggttcgtgctgtcatcattaaaagaattgaaacatgcctgagaaatagagaagaattttgtaacttgtgcccagattcattactgaaagcttcagaaatcattgacaacctgctatacaaaattgatccgcagccccaatacatggatcttgacacaatagaagccagggtgaatgatttgctgagatcgttcctgtatggaaaccaaagagacccatggatatcttcagcagttccatcaacaaaagatttgaggcagctgcctgggatacaaatgacagactctagtgtatatcataatagagttgtccctggttttactaatttgcctgcacgcccaggaggcataccttcacatgctgtgttcactgctcagagatatgtaccactgaatcacaacatgactgctgccagttttgctctagttgaaaggcctgaaagctttatgagtaccgtagttgctccatctgtgtcaggacttcctaactgtatttctggccctggtgggattgatagttctggattgcaaaatggctattcaaaggaccattttccaggtgatgcttatcatgttgatagtccacaactgtctatgtccgggagtcccagtcctttatcagccttatgtgatccaatcacaagttcgggtgcaatgataagatcatcaatggattttatccctaaagcaagtgggcaaaaactctttactggcaaaggacaaatgtttcaacaatacagagaatatgagaaagagttagatggtgcatggagccaccccacagagaagccagttcactcaaataggacaactcagagcgatgaaatatatctcaaaggagaatgcggacctgatacactcacagaaatgaaggaaaactatgggcgcatctcagactctagagatccttgtgaccctgagagagaaattgttgagagatctgaacagacatcaaatatcacagtatcaaaggcaacttcaccaatttcagatgaatcttctggcaggcgtccagcaaaacgcctgaaggctgatgctccccgtcttgtcaatgtcaatcaagtagagagtccacaggagcaaaaacctgttgtgaatgagaatcatgtatctggtggtgaaacagtacaatcggaaatcacagaattacctgcaaaaccaccttgcagttcattgggagacattaatgctgagagcaataatatgcttgaacagggtagtgaagatgtacccaacatggatattgttaaggaagaggaattgtcccgtgcaaaaggtgacattgagatgaaagatgctaagactgttgcattggatcatacaccaaaaggggtcaatttaagttcaagacgaaagagaggggcttctatactttatggattaactgctgaggagcttagagatcacatgagtagtctaataaaccggcatacttgtcagagcaaggtgacatctcaagaattcccatcaattgatggattgcctgatcagaacacatgcagtttgtgtgggatggagaagcttctttttgaacctcctccacgattttgtgcgctctgtttcaaaataataaattctgcagggtgctattatgttgaagttgaaaatggaactgagaaatcttctatatgtagcaaatgccaccatcttagcagtttaagagctaaatatcagaagaaatttaattatgcagaaacagatgctgaggctgaatggtgggtccagtgcgacaagtgcaaagcttggcaacatgaaatctgtgctctttttaacagaaagtgtgaaggggcaaaggctgagtatacttgtgcaaaatgttttttgaaggaaaaggatagtggagatattcaggcactggagtcatccactgttcttggggcacaggagttacaaagaaccaagctaagtgatcatattgagcaaagactttcagagaggcttgagcaggacaggcaacagagggcgagcgcctctggaaaagttgctgaagaggtgtgaaagggcttacagttagagtagtttcttcagccgaaagattactgcaagtccaaccacgttttcgtggtttttttaaacaaggaaagtatcctggggaatttccatacaaatcgaaggccattctcttgtttcaaaagatcgaaggtgtggatgtttgcctctttgccatgtatgtacaagagtatggctcagattgcccaccaccaaatcaaagacatgtttatcttgcatatattgattctgtcaaatacttccggcctgaaatcaaatctgcaactggagaagctctccgcacctttgtgtatcatgaaattttgattggttatctggactactgcaagaaacgagggtttgtaagctgttcaatatgggcttgcccatctacgaagcgagatgattatgttttatattgccatccaacagtacaaaagatgcccaagtctgacaagcttcgaagctggtaccagaacctgatcaagaaggccattaaggagggtgttgttgtggagcgtaatacactctctgacttcttccttcagcctacaaatgagtgcaaggccaatatttcggcagcatgcttgccatattgtgagaacgatttctggcctggagaagcagagaggctgcttgagaagaaagatgataatgcttcacagaaggaagagacacaggtaggaaggctcttgcgtgttgccaaacgcgacgacagaaaaggaaaccttgatgatattttgcttgtgcataagcttggggaaaggatgcgcacaatgaaagaagacttcattatgctttgtctgcaacagttttgcaagcactgccaccatcctatcctatctggcaaaagttgggtttgcactagctgtaaaaatttccatctatgtgacaagtgtcatgcagaggagcagaatacagcacagaaggacaggcatccggccaccacaaaacagaagcatgcattcgaaagaatggaggtacaacctcttccagagactgatgatggagatccgacaatggaaagtaagtattttgacagcaggatcgatttcttgaagcactgccaagacaatcaattccagtttgataccatccggcgggcaaagcactctacaatgatgattctgtattacctacacaattcaacctgctctgcttgccatcgtgccgtggaccaatgcttggtgtggcggtgcctagagtgcctaggctgcaccttttgtggtcaatgctataaacaaaatggtcaaggcttgcatattcatgaattaaggcagattgacactagagaaacttcacagaagcacactctacaggactacattgatggccttgtgcatgcatcgaggtgctatgatccacgtaactgcacccatccactctgtttaaccctgaagaaactgttcgcccatggtgcacgatgccatgtccgtgcctgcaatagcggcggttgcaaaaagtgtctctttatgtggaaactcctgttccgccactcaaaagattgcaacgacggagactgcgcggttcctagatgcagggatgtaaaggcattcatagctgaaaagatgaagcttaaaatctagtaatggaccccctcccccttctcccccttccttaaccagtcaaattcgttgatgaagatgcaataaactgcggttggccattgctggtggatggaactgcaaggtaaataatgtggtgacttactgcttctggtgtggttgcatgtgctccatgccacagaggatcacccaaccgaagcttacataggcaatctgacattggtttttagtgcccgtacataccttgtacatatagtttttctctccaacacaaataggggtttgttttaatttcttcatcgtcaaagttttgttctccataatgtctgcctcatttttgttcagtgttgcagtgctgcggtggcatccaaatattcaatgaatgggtaactaacaagtcagcgactagatagtttactagggtaaacaagagctaacagggaccagttagtcccatagatcaaacaagacctgacaaccatcctataagcttgttattcaagtggcaatttgcaaggcacggactactaattagtgctataacttgagaagttacacaatgatcttatccagggacccattgcgccgttcattttcttttccattcgaaccattggcttcatagagccgttgtctaaactcacgtatgatagattctagatagctataaaggggtaaataacgtataaaatatttttttataaa

SEQ ID NO: 34892 - DNA, 4552 bp, Zea Mays
ctccatcctccccttccttctgatcgcctccttcccgttccccgcagccgcccaaaccctagccctagcccctagccccgctgccggcaaggccggagcgcccggagcccccgctggccggccccggagaagacgtcccatgcggctgtatcgcgcaggggaaatttaggtgaatgttacaagcatgatgactcaaaccctgcaagggaaagttatggcctacacaccgagcagttttcctgttcagcaacagattctgccggaggatcttgaaatgcttcagctggataacatggaccagggtacctctccggttcgtgctgtcatcattaaaagaattgaaacatgcctgagaaatagagaagaattttgtaacttgtgcccagattcattactgaaagcttcagaaatcattgacaacctgctatacaaaattgatccgcagccccaatacatggatcttgacacaatagaagccagggtgaatgatttgctgagatcgttcctgtatggaaaccaaagagacccatggatatcttcagcagttccatcaacaaaagatttgaggcagctgcctgggatacaaatgacagactctagtgtatatcataatagagttgtccctggttttactaatttgcctgcacgcccaggaggcataccttcacatgctgtgttcactgctcagagatatgtaccactgaatcacaacatgactgctgccagttttgctctagttgaaaggcctgaaagctttatgagtaccgtagttgctccatctgtgtcaggacttcctaactgtatttctggccctggtgggattgatagttctggattgcaaaatggctattcaaaggaccattttccaggtgatgcttatcatgttgatagtccacaactgtctatgtccgggagtcccagtcctttatcagccttatgtgatccaatcacaagttcgggtgcaatgataagatcatcaatggattttatccctaaagcaagtgggcaaaaactctttactggcaaaggacaaatgtttcaacaatacagagaatatgagaaagagttagatggtgcatggagccaccccacagagaagccagttcactcaaataggacaactcagagcgatgaaatatatctcaaaggagaatgcggacctgatacactcacagaaatgaaggaaaactatgggcgcatctcagactctagagatccttgtgaccctgagagagaaattgttgagagatctgaacagacatcaaatatcacagtatcaaaggcaacttcaccaatttcagatgaatcttctggcaggcgtccagcaaaacgcctgaaggctgatgctccccgtcttgtcaatgtcaatcaagtagagagtccacaggagcaaaaacctgttgtgaatgagaatcatgtatctggtggtgaaacagtacaatcggaaatcacagaattacctgcaaaaccaccttgcagttcattgggagacattaatgctgagagcaataatatgcttgaacagggtagtgaagatgtacccaacatggatattgttaaggaagaggaattgtcccgtgcaaaaggtgacattgagatgaaagatgctaagactgttgcattggatcatacaccaaaaggggtcaatttaagttcaagacgaaagagaggggcttctatactttatggattaactgctgaggagcttagagatcacatgagtagtctaataaaccggcatacttgtcagagcaaggtgacatctcaagaattcccatcaattgatggattgcctgatcagaacacatgcagtttgtgtgggatggagaagcttctttttgaacctcctccacgattttgtgcgctctgtttcaaaataataaattctgcagggtgctattatgttgaagttgaaaatggaactgagaaatcttctatatgtagcaaatgccaccatcttagcagtttaagagctaaatatcagaagaaatttaattatgcagaaacagatgctgaggctgaatggtgggtccagtgcgacaagtgcaaagcttggcaacatgaaatctgtgctctttttaacagaaagtgtgaaggggcaaaggctgagtatacttgtgcaaaatgttttttgaaggaaaaggatagtggagatattcaggcactggagtcatccactgttcttggggcacaggagttacaaagaaccaagctaagtgatcatattgagcaaagactttcagagaggcttgagcaggacaggcaacagagggcgagcgcctctggaaaagttgctgaagaggtaccaggtgtgaaagggcttacagttagagtagtttcttcagccgaaagattactgcaagtccaaccacgttttcgtggtttttttaaacaaggaaagtatcctggggaatttccatacaaatcgaaggccattctcttgtttcaaaagatcgaaggtgtggatgtttgcctctttgccatgtatgtacaagagtatggctcagattgcccaccaccaaatcaaagacatgtttatcttgcatatattgattctgtcaaatacttccggcctgaaatcaaatctgcaactggagaagctctccgcacctttgtgtatcatgaaattttgaaacgagggtttgtaagctgttcaatatgggcttgcccatctacgaagcgagatgattatgttttatattgccatccaacagtacaaaagatgcccaagtctgacaagcttcgaagctggtaccagaacctgatcaagaaggccattaaggagggtgttgttgtggagcgtaatacactctctgacttcttccttcagcctacaaatgagtgcaaggccaatatttcggcagcatgcttgccatattgtgagaacgatttctggcctggagaagcagagaggctgcttgagaagaaagatgataatgcttcacagaaggaagagacacaggtaggaaggctcttgcgtgttgccaaacgcgacgacagaaaaggaaaccttgatgatattttgcttgtgcataagcttggggaaaggatgcgcacaatgaaagaagacttcattatgctttgtctgcaacagttttgcaagcactgccaccatcctatcctatctggcaaaagttgggtttgcactagctgtaaaaatttccatctatgtgacaagtgtcatgcagaggagcagaatacagcacagaaggacaggcatccggccaccacaaaacagaagcatgcattcgaaagaatggaggtacaacctcttccagagactgatgatggagatccgacaatggaaagtaagtattttgacagcaggatcgatttcttgaagcactgccaagacaatcaattccagtttgataccatccggcgggcaaagcactctacaatgatgattctgtattacctacacaattcaacctgctctgcttgccatcgtgccgtggaccaatgcttggtgtggcggtgcctagagtgcctaggctgcaccttttgtggtcaatgctataaacaaaatggtcaaggcttgcatattcatgaattaaggcagattgacactagagaaacttcacagaagcacactctacaggactacattgatggccttgtgcatgcatcgaggtgctatgatccacgtaactgcacccatccactctgtttaaccctgaagaaactgttcgcccatggtgcacgatgccatgtccgtgcctgcaatagcggcggttgcaaaaagtgtctctttatgtggaaactcctgttccgccactcaaaagattgcaacgacggagactgcgcggttcctagatgcagggatgtaaaggcattcatagctgaaaagatgaagcttaaaatctagtaatggaccccctcccccttctcccccttccttaaccagtcaaattcgttgatgaagatgcaataaactgcggttggccattgctggtggatggaactgcaaggtaaataatgtggtgacttactgcttctggtgtggttgcatgtgctccatgccacagaggatcacccaaccgaagcttacataggcaatctgacattggtttttagtgcccgtacataccttgtacatatagtttttctctccaacacaaataggggtttgttttaatttcttcatcgtcaaagttttgttctccataatgtctgcctcatttttgttcagtgttgcagtgctgcggtggcatccaaatattcaatgaatgggtaactaacaagtcagcgactagatagtttactagggtaaacaagagctaacagggaccagttagtcccatagatcaaacaagacctgacaaccatcctataagcttgttattcaagtggcaatttgcaaggcacggactactaattagtgctataacttgagaagttacacaatgatcttatccagggacccattgcgccgttcattttcttttccattcgaaccattggcttcatagagccgttgtctaaactcacgtatgatagattctagatagctataaaggggtaaataacgtataaaatatttttttataaa

SEQ ID NO: 34893 - DNA, 4626 bp, Zea Mays
ctggacccgccgagtggcccccatggccttgacttatttaccctttccctctccatcctccccttccttctgatcgcctccttcccgttccccgcagccgcccaaaccctagccctagcccctagccccgctgccggcaaggccggagcgcccggagcccccgctggccggccccggagaagacgtcccatgcggctgtatcgcgcaggggaaatttaggtgaatgttacaagcatgatgactcaaaccctgcaagggaaagttatggcctacacaccgagcagttttcctgttcagcaacagattctgccggaggatcttgaaatgcttcagctggataacatggaccagggtacctctccggttcgtgctgtcatcattaaaagaattgaaacatgcctgagaaatagagaagaattttgtaacttgtgcccagattcattactgaaagcttcagaaatcattgacaacctgctatacaaaattgatccgcagccccaatacatggatcttgacacaatagaagccagggtgaatgatttgctgagatcgttcctgtatggaaaccaaagagacccatggatatcttcagcagttccatcaacaaaagatttgaggcagctgcctgggatacaaatgacagactctagtgtatatcataatagagttgtccctggttttactaatttgcctgcacgcccaggaggcataccttcacatgctgtgttcactgctcagagatatgtaccactgaatcacaacatgactgctgccagttttgctctagttgaaaggcctgaaagctttatgagtaccgtagttgctccatctgtgtcaggacttcctaactgtatttctggccctggtgggattgatagttctggattgcaaaatggctattcaaaggaccattttccaggtgatgcttatcatgttgatagtccacaactgtctatgtccgggagtcccagtcctttatcagccttatgtgatccaatcacaagttcgggtgcaatgataagatcatcaatggattttatccctaaagcaagtgggcaaaaactctttactggcaaaggacaaatgtttcaacaatacagagaatatgagaaagagttagatggtgcatggagccaccccacagagaagccagttcactcaaataggacaactcagagcgatgaaatatatctcaaaggagaatgcggacctgatacactcacagaaatgaaggaaaactatgggcgcatctcagactctagagatccttgtgaccctgagagagaaattgttgagagatctgaacagacatcaaatatcacagtatcaaaggcaacttcaccaatttcagatgaatcttctggcaggcgtccagcaaaacgcctgaaggctgatgctccccgtcttgtcaatgtcaatcaagtagagagtccacaggagcaaaaacctgttgtgaatgagaatcatgtatctggtggtgaaacagtacaatcggaaatcacagaattacctgcaaaaccaccttgcagttcattgggagacattaatgctgagagcaataatatgcttgaacagggtagtgaagatgtacccaacatggatattgttaaggaagaggaattgtcccgtgcaaaaggtgacattgagatgaaagatgctaagactgttgcattggatcatacaccaaaaggggtcaatttaagttcaagacgaaagagaggggcttctatactttatggattaactgctgaggagcttagagatcacatgagtagtctaataaaccggcatacttgtcagagcaaggtgacatctcaagaattcccatcaattgatggattgcctgatcagaacacatgcagtttgtgtgggatggagaagcttctttttgaacctcctccacgattttgtgcgctctgtttcaaaataataaattctgcagggtgctattatgttgaagttgaaaatggaactgagaaatcttctatatgtagcaaatgccaccatcttagcagtttaagagctaaatatcagaagaaatttaattatgcagaaacagatgctgaggctgaatggtgggtccagtgcgacaagtgcaaagcttggcaacatgaaatctgtgctctttttaacagaaagtgtgaaggggcaaaggctgagtatacttgtgcaaaatgttttttgaaggaaaaggatagtggagatattcaggcactggagtcatccactgttcttggggcacaggagttacaaagaaccaagctaagtgatcatattgagcaaagactttcagagaggcttgagcaggacaggcaacagagggcgagcgcctctggaaaagttgctgaagaggtaccaggtgtgaaagggcttacagttagagtagtttcttcagccgaaagattactgcaagtccaaccacgttttcgtggtttttttaaacaaggaaagtatcctggggaatttccatacaaatcgaaggccattctcttgtttcaaaagatcgaaggtgtggatgtttgcctctttgccatgtatgtacaagagtatggctcagattgcccaccaccaaatcaaagacatgtttatcttgcatatattgattctgtcaaatacttccggcctgaaatcaaatctgcaactggagaagctctccgcacctttgtgtatcatgaaattttgattggttatctggactactgcaagaaacgagggtttgtaagctgttcaatatgggcttgcccatctacgaagcgagatgattatgttttatattgccatccaacagtacaaaagatgcccaagtctgacaagcttcgaagctggtaccagaacctgatcaagaaggccattaaggagggtgttgttgtggagcgtaatacactctctgacttcttccttcagcctacaaatgagtgcaaggccaatatttcggcagcatgcttgccatattgtgagaacgatttctggcctggagaagcagagaggctgcttgagaagaaagatgataatgcttcacagaaggaagagacacaggtaggaaggctcttgcgtgttgccaaacgcgacgacagaaaaggaaaccttgatgatattttgcttgtgcataagcttggggaaaggatgcgcacaatgaaagaagacttcattatgctttgtctgcaacagttttgcaagcactgccaccatcctatcctatctggcaaaagttgggtttgcactagctgtaaaaatttccatctatgtgacaagtgtcatgcagaggagcagaatacagcacagaaggacaggcatccggccaccacaaaacagaagcatgcattcgaaagaatggaggtacaacctcttccagagactgatgatggagatccgacaatggaaagtaagtattttgacagcaggatcgatttcttgaagcactgccaagacaatcaattccagtttgataccatccggcgggcaaagcactctacaatgatgattctgtattacctacacaattcaacctgctctgcttgccatcgtgccgtggaccaatgcttggtgtggcggtgcctagagtgcctaggctgcaccttttgtggtcaatgctataaacaaaatggtcaaggcttgcatattcatgaattaaggcagattgacactagagaaacttcacagaagcacactctacaggactacattgatggccttgtgcatgcatcgaggtgctatgatccacgtaactgcacccatccactctgtttaaccctgaagaaactgttcgcccatggtgcacgatgccatgtccgtgcctgcaatagcggcggttgcaaaaagtgtctctttatgtggaaactcctgttccgccactcaaaagattgcaacgacggagactgcgcggttcctagatgcagggatgtaaaggcattcatagctgaaaagatgaagcttaaaatctagtaatggaccccctcccccttctcccccttccttaaccagtcaaattcgttgatgaagatgcaataaactgcggttggccattgctggtggatggaactgcaaggtaaataatgtggtgacttactgcttctggtgtggttgcatgtgctccatgccacagaggatcacccaaccgaagcttacataggcaatctgacattggtttttagtgcccgtacataccttgtacatatagtttttctctccaacacaaataggggtttgttttaatttcttcatcgtcaaagttttgttctccataatgtctgcctcatttttgttcagtgttgcagtgctgcggtggcatccaaatattcaatgaatgggtaactaacaagtcagcgactagatagtttactagggtaaacaagagctaacagggaccagttagtcccatagatcaaacaagacctgacaaccatcctataagcttgttattcaagtggcaatttgcaaggcacggactactaattagtgctataacttgagaagttacacaatgatcttatccagggacccattgcgccgttcattttcttttccattcgaaccattggcttcatagagccgttgtctaaactcacgtatgatagattctagatagctataaaggggtaaataacgtataaaatatttttttataaa

SEQ ID NO: 34894 - DNA, 4402 bp, Zea Mays
gcgagctggacccgccgagtggcccccatggccttgacttatttaccctttccctctccatcctccccttccttctgatcgcctccttcccgttccccgcagccgcccaaaccctagccctagcccctagccccgctgccggcaaggccggagcgcccggagcccccgctggccggccccggagaagacgtcccatgcggctgtatcgcgcaggggaaatttaggtgaatgttacaagcatgatgactcaaaccctgcaagggaaagttatggcctacacaccgagcagttttcctgttcagcaacagattctgccggaggatcttgaaatgcttcagctggataacatggaccagggtacctctccggttcgtgctgtcatcattaaaagaattgaaacatgcctgagaaatagagaagaattttgtaacttgtgcccagattcattactgaaagcttcagaaatcattgacaacctgctatacaaaattgatccgcagccccaatacatggatcttgacacaatagaagccagggtgaatgatttgctgagatcgttcctgtatggaaaccaaagagacccatggatatcttcagcagttccatcaacaaaagatttgaggcagctgcctgggatacaaatgacagactctagtgtatatcataatagagttgtccctggttttactaatttgcctgcacgcccaggaggcataccttcacatgctgtgttcactgctcagagatatgtaccactgaatcacaacatgactgctgccagttttgctctagttgaaaggcctgaaagctttatgagtaccgtagttgctccatctgtgtcaggacttcctaactgtatttctggccctggtgggattgatagttctggattgcaaaatggctattcaaaggaccattttccaggtgatgcttatcatgttgatagtccacaactgtctatgtccgggagtcccagtcctttatcagccttatgtgatccaatcacaagttcgggtgcaatgataagatcatcaatggattttatccctaaagcaagtgggcaaaaactctttactggcaaaggacaaatgtttcaacaatacagagaatatgagaaagagttagatggtgcatggagccaccccacagagaagccagttcactcaaataggacaactcagagcgatgaaatatatctcaaaggagaatgcggacctgatacactcacagaaatgaaggaaaactatgggcgcatctcagactctagagatccttgtgaccctgagagagaaattgttgagagatctgaacagacatcaaatatcacagtatcaaaggcaacttcaccaatttcagatgaatcttctggcaggcgtccagcaaaacgcctgaaggctgatgctccccgtcttgtcaatgtcaatcaagtagagagtccacaggagcaaaaacctgttgtgaatgagaatcatgtatctggtggtgaaacagtacaatcggaaatcacagaattacctgcaaaaccaccttgcagttcattgggagacattaatgctgagagcaataatatgcttgaacagggtagtgaagatgtacccaacatggatattgttaaggaagaggaattgtcccgtgcaaaaggtgacattgagatgaaagatgctaagactgttgcattggatcatacaccaaaaggggtcaatttaagttcaagacgaaagagaggggcttctatactttatggattaactgctgaggagcttagagatcacatgagtagtctaataaaccggcatacttgtcagagcaaggtgacatctcaagaattcccatcaattgatggattgcctgatcagaacacatgcagtttgtgtgggatggagaagcttctttttgaacctcctccacgattttgtgcgctctgtttcaaaataataaattctgcagggtgctattatgttgaagttgaaaatggaactgagaaatcttctatatgtagcaaatgccaccatcttagcagtttaagagctaaatatcagaagaaatttaattatgcagaaacagatgctgaggctgaatggtgggtccagtgcgacaagtgcaaagcttggcaacatgaaatctgtgctctttttaacagaaagtgtgaaggggcaaaggctgagtatacttgtgcaaaatgttttttgaaggaaaaggatagtggagatattcaggcactggagtcatccactgttcttggggcacaggagttacaaagaaccaagctaagtgatcatattgagcaaagactttcagagaggcttgagcaggacaggcaacagagggcgagcgcctctggaaaagttgctgaagaggtaccaggtgtgaaagggcttacagttagagtagtttcttcagccgaaagattactgcaagtccaaccacgttttcgtggtttttttaaacaaggaaagtatcctggggaatttccatacaaatcgaaggccattctcttgtttcaaaagatcgaaggtgtggatgtttgcctctttgccatgtatgtacaagagtatggctcagattgcccaccaccaaatcaaagacatgtttatcttgcatatattgattctgtcaaatacttccggcctgaaatcaaatctgcaactggagaagctctccgcacctttgtgtatcatgaaattttgattggttatctggactactgcaagaaacgagggtttgtaagctgttcaatatgggcttgcccatctacgaagcgagatgattatgttttatattgccatccaacagtacaaaagatgcccaagtctgacaagcttcgaagctggtaccagaacctgatcaagaaggccattaaggagggtgttgttgtggagcgtaatacactctctgacttcttccttcagcctacaaatgagtgcaaggccaatatttcggcagcatgcttgccatattgtgagaacgatttctggcctggagaagcagagaggctgcttgagaagaaagatgataatgcttcacagaaggaagagacacaggtaggaaggctcttgcgtgttgccaaacgcgacgacagaaaaggaaaccttgatgatattttgcttgtgcataagcttggggaaaggatgcgcacaatgaaagaagacttcattatgctttgtctgcaacagttttgcaagcactgccaccatcctatcctatctggcaaaagttgggtttgcactagctgtaaaaatttccatctatgtgacaagtgtcatgcagaggagcagaatacagcacagaaggacaggcatccggccaccacaaaacagaagcatgcattcgaaagaatggaggtacaacctcttccagagactgatgatggagatccgacaatggaaagtaagtattttgacagcaggatcgatttcttgaagcactgccaagacaatcaattccagtttgataccatccggcgggcaaagcactctacaatgatgattctgtattacctacacaattcaacctgctctgcttgccatcgtgccgtggaccaatgcttggtgtggcggtgcctagagtgcctaggctgcaccttttgtggtcaatgctataaacaaaatggtcaaggcttgcatattcatgaattaaggcagattgacactagagaaacttcacagaagcacactctacaggactacattgatggccttgtgcatgcatcgaggtgctatgatccacgtaactgcacccatccactctgtttaaccctgaagaaactgttcgcccatggtgcacgatgccatgtccgtgcctgcaatagcggcggttgcaaaaagtgtctctttatgtggaaactcctgttccgccactcaaaagattgcaacgacggagactgcgcggttcctagatgcagggatgtaaaggcattcatagctgaaaagatgaagcttaaaatctagtaatggaccccctcccccttctcccccttccttaaccagtcaaattcgttgatgaagatgcaataaactgcggttggccattgctggtggatggaactgcaagtgctgcggtggcatccaaatattcaatgaatgggtaactaacaagtcagcgactagatagtttactagggtaaacaagagctaacagggaccagttagtcccatagatcaaacaagacctgacaaccatcctataagcttgttattcaagtggcaatttgcaaggcacggactactaattagtgctataacttgagaagttacacaatgatcttatccagggacccattgcgccgttcattttcttttccattcgaaccattggcttcatagagccgttgtctaaactcacgtatgatagattctagatagctataaaggggtaaataacgtataaaatatttttttataaa

SEQ ID NO: 34895 - DNA, 3785 bp, Zea Mays
cctctccatcctccccttccttctgatcgcctccttcccgttccccgcagccgcccaaaccctagccctagcccctagccccgctgccggcaaggccggagcgcccggagcccccgctggccggccccggagaagacgtcccatgcggctgtatcgcgcaggggaaatttaggtgaatgttacaagcatgatgactcaaaccctgcaagggaaagttatggcctacacaccgagcagttttcctgttcagcaacagattctgccggaggatcttgaaatgcttcagctggataacatggaccagggtacctctccggttcgtgctgtcatcattaaaagaattgaaacatgcctgagaaatagagaagaattttgtaacttgtgcccagattcattactgaaagcttcagaaatcattgacaacctgctatacaaaattgatccgcagccccaatacatggatcttgacacaatagaagccagggtgaatgatttgctgagatcgttcctgtatggaaaccaaagagacccatggatatcttcagcagttccatcaacaaaagatttgaggcagctgcctgggatacaaatgacagactctagtgtatatcataatagagttgtccctggttttactaatttgcctgcacgcccaggaggcataccttcacatgctgtgttcactgctcagagatatgtaccactgaatcacaacatgactgctgccagttttgctctagttgaaaggcctgaaagctttatgagtaccgtagttgctccatctgtgtcaggacttcctaactgtatttctggccctggtgggattgatagttctggattgcaaaatggctattcaaaggaccattttccaggtgatgcttatcatgttgatagtccacaactgtctatgtccgggagtcccagtcctttatcagccttatgtgatccaatcacaagttcgggtgcaatgataagatcatcaatggattttatccctaaagcaagtgggcaaaaactctttactggcaaaggacaaatgtttcaacaatacagagaatatgagaaagagttagatggtgcatggagccaccccacagagaagccagttcactcaaataggacaactcagagcgatgaaatatatctcaaaggagaatgcggacctgatacactcacagaaatgaaggaaaactatgggcgcatctcagactctagagatccttgtgaccctgagagagaaattgttgagagatctgaacagacatcaaatatcacagtatcaaaggcaacttcaccaatttcagatgaatcttctggcaggcgtccagcaaaacgcctgaaggctgatgctccccgtcttgtcaatgtcaatcaagtagagagtccacaggagcaaaaacctgttgtgaatgagaatcatgtatctggtggtgaaacagtacaatcggaaatcacagaattacctgcaaaaccaccttgcagttcattgggagacattaatgctgagagcaataatatgcttgaacagggtagtgaagatgtacccaacatggatattgttaaggaagaggaattgtcccgtgcaaaaggtgacattgagatgaaagatgctaagactgttgcattggatcatacaccaaaaggggtcaatttaagttcaagacgaaagagaggggcttctatactttatggattaactgctgaggagcttagagatcacatgagtagtctaataaaccggcatacttgtcagagcaaggtgacatctcaagaattcccatcaattgatggattgcctgatcagaacacatgcagtttgtgtgggatggagaagcttctttttgaacctcctccacgattttgtgcgctctgtttcaaaataataaattctgcagggtgctattatgttgaagttgaaaatggaactgagaaatcttctatatgtagcaaatgccaccatcttagcagtttaagagctaaatatcagaagaaatttaattatgcagaaacagatgctgaggctgaatggtgggtccagtgcgacaagtgcaaagcttggcaacatgaaatctgtgctctttttaacagaaagtgtgaaggggcaaaggctgagtatacttgtgcaaaatgttttttgaaggaaaaggatagtggagatattcaggcactggagtcatccactgttcttggggcacaggagttacaaagaaccaagctaagtgatcatattgagcaaagactttcagagaggcttgagcaggacaggcaacagagggcgagcgcctctggaaaagttgctgaagaggtaccaggtgtgaaagggcttacagttagagtagtttcttcagccgaaagattactgcaagtccaaccacgttttcgtggtttttttaaacaaggaaagtatcctggggaatttccatacaaatcgaaggccattctcttgtttcaaaagatcgaaggtgtggatgtttgcctctttgccatgtatgtacaagagtatggctcagattgcccaccaccaaatcaaagacatgtttatcttgcatatattgattctgtcaaatacttccggcctgaaatcaaatctgcaactggagaagctctccgcacctttgtgtatcatgaaattttgattggttatctggactactgcaagaaacgagggtttgtaagctgttcaatatgggcttgcccatctacgaagcgagatgattatgttttatattgccatccaacagtacaaaagatgcccaagtctgacaagcttcgaagctggtaccagaacctgatcaagaaggccattaaggagggtgttgttgtggagcgtaatacactctctgacttcttccttcagcctacaaatgagtgcaaggccaatatttcggcagcatgcttgccatattgtgagaacgatttctggcctggagaagcagagaggctgcttgagaagaaagatgataatgcttcacagaaggaagagacacaggtaggaaggctcttgcgtgttgccaaacgcgacgacagaaaaggaaaccttgatgatattttgcttgtgcataagcttggggaaaggatgcgcacaatgaaagaagacttcattatgctttgtctgcaacagttttgcaagcactgccaccatcctatcctatctggcaaaagttgggtttgcactagctgtaaaaatttccatctatgtgacaagtgtcatgcagaggagcagaatacagcacagaaggacaggcatccggccaccacaaaacagaagcatgcattcgaaagaatggaggtacaacctcttccagagactgatgatggagatccgacaatggaaagtaagtattttgacagcaggatcgatttcttgaagcactgccaagacaatcaattccagtttgataccatccggcgggcaaagcactctacaatgatgattctgtattacctacacaattcaacctgctctgcttgccatcgtgccgtggaccaatgcttggtgtggcggtgcctagagtgcctaggctgcaccttttgtggtcaatgctataaacaaaatggtcaaggcttgcatattcatgaattaaggcagattgacactagagaaacttcacagaagcacactctacaggtctcatgtggatcgcaccatcattcttcgaaacaaaactttgctcaaatgatttttatttaagaagttctatgagaaaattgcagttgcatattctatagtgtgtgggtgttcatctttctgtgaattgcttatgttcacaaaaactggatctggt

SEQ ID NO: 34896 - DNA, 3710 bp, Zea Mays
cctctccatcctccccttccttctgatcgcctccttcccgttccccgcagccgcccaaaccctagccctagcccctagccccgctgccggcaaggccggagcgcccggagcccccgctggccggccccggagaagacgtcccatgcggctgtatcgcgcaggggaaatttaggtgaatgttacaagcatgatgactcaaaccctgcaagggaaagttatggcctacacaccgagcagttttcctgttcagcaacagattctgccggaggatcttgaaatgcttcagctggataacatggaccagggtacctctccggttcgtgctgtcatcattaaaagaattgaaacatgcctgagaaatagagaagaattttgtaacttgtgcccagattcattactgaaagcttcagaaatcattgacaacctgctatacaaaattgatccgcagccccaatacatggatcttgacacaatagaagccagggtgaatgatttgctgagatcgttcctgtatggaaaccaaagagacccatggatatcttcagcagttccatcaacaaaagatttgaggcagctgcctgggatacaaatgacagactctagtgtatatcataatagagttgtccctggttttactaatttgcctgcacgcccaggaggcataccttcacatgctgtgttcactgctcagagatatgtaccactgaatcacaacatgactgctgccagttttgctctagttgaaaggcctgaaagctttatgagtaccgtagttgctccatctgtgtcaggacttcctaactgtatttctggccctggtgggattgatagttctggattgcaaaatggctattcaaaggaccattttccaggtgatgcttatcatgttgatagtccacaactgtctatgtccgggagtcccagtcctttatcagccttatgtgatccaatcacaagttcgggtgcaatgataagatcatcaatggattttatccctaaagcaagtgggcaaaaactctttactggcaaaggacaaatgtttcaacaatacagagaatatgagaaagagttagatggtgcatggagccaccccacagagaagccagttcactcaaataggacaactcagagcgatgaaatatatctcaaaggagaatgcggacctgatacactcacagaaatgaaggaaaactatgggcgcatctcagactctagagatccttgtgaccctgagagagaaattgttgagagatctgaacagacatcaaatatcacagtatcaaaggcaacttcaccaatttcagatgaatcttctggcaggcgtccagcaaaacgcctgaaggctgatgctccccgtcttgtcaatgtcaatcaagtagagagtccacaggagcaaaaacctgttgtgaatgagaatcatgtatctggtggtgaaacagtacaatcggaaatcacagaattacctgcaaaaccaccttgcagttcattgggagacattaatgctgagagcaataatatgcttgaacagggtagtgaagatgtacccaacatggatattgttaaggaagaggaattgtcccgtgcaaaaggtgacattgagatgaaagatgctaagactgttgcattggatcatacaccaaaaggggtcaatttaagttcaagacgaaagagaggggcttctatactttatggattaactgctgaggagcttagagatcacatgagtagtctaataaaccggcatacttgtcagagcaaggtgacatctcaagaattcccatcaattgatggattgcctgatcagaacacatgcagtttgtgtgggatggagaagcttctttttgaacctcctccacgattttgtgcgctctgtttcaaaataataaattctgcagggtgctattatgttgaagttgaaaatggaactgagaaatcttctatatgtagcaaatgccaccatcttagcagtttaagagctaaatatcagaagaaatttaattatgcagaaacagatgctgaggctgaatggtgggtccagtgcgacaagtgcaaagcttggcaacatgaaatctgtgctctttttaacagaaagtgtgaaggggcaaaggctgagtatacttgtgcaaaatgttttttgaaggaaaaggatagtggagatattcaggcactggagtcatccactgttcttggggcacaggagttacaaagaaccaagctaagtgatcatattgagcaaagactttcagagaggcttgagcaggacaggcaacagagggcgagcgcctctggaaaagttgctgaagaggtaccaggtgtgaaagggcttacagttagagtagtttcttcagccgaaagattactgcaagtccaaccacgttttcgtggtttttttaaacaaggaaagtatcctggggaatttccatacaaatcgaaggccattctcttgtttcaaaagatcgaaggtgtggatgtttgcctctttgccatgtatgtacaagagtatggctcagattgcccaccaccaaatcaaagacatgtttatcttgcatatattgattctgtcaaatacttccggcctgaaatcaaatctgcaactggagaagctctccgcacctttgtgtatcatgaaattttgattggttatctggactactgcaagaaacgagggtttgtaagctgttcaatatgggcttgcccatctacgaagcgagatgattatgttttatattgccatccaacagtacaaaagatgcccaagtctgacaagcttcgaagctggtaccagaacctgatcaagaaggccattaaggagggtgttgttgtggagcgtaatacactctctgacttcttccttcagcctacaaatgagtgcaaggccaatatttcggcagcatgcttgccatattgtgagaacgatttctggcctggagaagcagagaggctgcttgagaagaaagatgataatgcttcacagaaggaagagacacagcttggggaaaggatgcgcacaatgaaagaagacttcattatgctttgtctgcaacagttttgcaagcactgccaccatcctatcctatctggcaaaagttgggtttgcactagctgtaaaaatttccatctatgtgacaagtgtcatgcagaggagcagaatacagcacagaaggacaggcatccggccaccacaaaacagaagcatgcattcgaaagaatggaggtacaacctcttccagagactgatgatggagatccgacaatggaaagtaagtattttgacagcaggatcgatttcttgaagcactgccaagacaatcaattccagtttgataccatccggcgggcaaagcactctacaatgatgattctgtattacctacacaattcaacctgctctgcttgccatcgtgccgtggaccaatgcttggtgtggcggtgcctagagtgcctaggctgcaccttttgtggtcaatgctataaacaaaatggtcaaggcttgcatattcatgaattaaggcagattgacactagagaaacttcacagaagcacactctacaggtctcatgtggatcgcaccatcattcttcgaaacaaaactttgctcaaatgatttttatttaagaagttctatgagaaaattgcagttgcatattctatagtgtgtgggtgttcatctttctgtgaattgcttatgttcacaaaaactggatctggt

SEQ ID NO: 34897 - DNA, 2606 bp, Zea Mays
agcttgtgaaccatgtgtcaaacaccaccgcaggcgagagtacccatgcccattccattccgcagacctgacatgcagcagatgtttggaattagtcaaaggacaaaacataaaggtttagagcttgtagaaaggttcagaacttgtggactgtgtcaaacaagcacagaacttcaccatgattaatctaaatcctttaataaaatgtcaagagcacaaacttgctgtttgctttaactttctcatgctaaccagggatgacgtgaattcattttgatctaatcaactgcaactgatggttctccattctcacataaatgagtaatttcagtcagattattcaataagcacggaagctgctaaacagaattacagatacaatattaaagaccttgttcgacaagagaatctccataccctaaaaattgaaatccaattttatcaaagcagcatccaatgggaaatgattggtcggcaagttcttcacagaaaatgtggttttgttaaattgacgttgaaggttgagagagcaagaagcactcactaacgactgcaaactacttaaagcagcactcacttgaacatgattagataaatcctccatcaaacacatagctccattcccctgctccccatgttcttactctgaacagaaattagagctactacttaatacatatgtttctcatatgttccagaaacaaataaattttttacttaaaaagtacttatatcttcaaaaatatagctagctagatagatcctttaatcctaccaacctggagtgaccttcctttttcggaaattgtagaaattgcactctcagctcagcgagaaaaagataatgaaaaaatatttaaagaaacaaagctagcttcttaagaacatttttgcaagacttgcatgttttaccagcatgtgctcaagatactactgcatttttgcagctgcaagtcagaaactttgatgaacacaacgcagtgcatcaaccactgaatgaatagatttgttccaccttaagtttcagctacttgttgttgtactagcgcaagataaaagttatcgccatttcactatccaagaataccatcagtagcaaaatacaatatttttcagaaatagatgttggactgaaacaattgagatcacaaccgtcacatcttaccaaaccttactatttgtgcgcctcacgcaaatgaaaatctcaatccaaagggggaggaaaagaaacagaggatgtggatttgtacctcttggcaagacacggggaagtgaggtttgataagttccttgatttcaacaaataagttcgaaacgtggaaaccatgacaatataaattgttcaaacataatagaagttcttaagtaaatacaagattacagtacaagttgttagcagaaacggcaggaaaaacgaagtagatcaaccaacaaatcacagagcacgacacacagatttacgtggaaaacccttcaatgcgaagggaaaaaccacaggcaccagccaggcgaaaccttcactaatatgtggactgtttatagaacgtcgttcgtaaacagcggctttcaagaggagtaaataatgaccatgcacaacaaaccctaattagggtcactaatatataccgctcgccaacacggcctccatatgcagaatttaaatcacaaaccctaactagggctttagctttactacgtgcatcatttttagccactcacaatctcaccgtttcttgtcactcttgagacccaaaccataaggggatttccaactgcttttcaaaagttatttactctcttattattatcgcactgatggtaccaattcggtgaattctattcgctggtcagtcgtagtaatgtcaccacacccttcaagaaatgtcatggaactgagctgcatcccgtgtctctactaaaactaaaatttagttgcaagatacgggtagaacaaatgctcctacttttctttctatccctgagaacactagcacaggttcgtatagggtaccagaaactcttctacgtggcattcatacgcagaatcacaaattcatatttcacaatcaccaatgactcacgagagatgcagaggcagagcagcaggagtagatgcaggacaccaaagcagcggcggcgggcactggcccactgggaaaggcaggggcgctgtcagctcggccacggtgcagctgtgctggaggatggagacgggcggcctagcggagtccagctccggcggcaccgcagcgtggaggcgaaggcgcttgagtggacggcgtcggggtcacggcagatgggccggaatcggcttctcatctgtcagcattgcggcggctcggttgggcaactttatgagtagaagccgccggcgaccgtccgtctgtcaggatcgccgtgcgggcttgcggccgccaaggaagggaagggaatcgacaagggcacacttagagatgtgagatgtcaattgagatttccactggggatcgtgcaggggcacaactaccaggtagactggcggcgtggggcacatataccaggtgttggtggcagcgcagcatgcgggggtagtgcaaccaggcggcggcgcggcacacagagcggcg

SEQ ID NO: 34898 - DNA, 2425 bp, Zea Mays
atcattttgatgagtgttcctattttcaatctggtgcactcaatatcagaatttcagatgcatttcatgttttctgccttttatcaatattctttatgctgccttcaactcttttcaatccgaagctatgtttttgtgctacttggctgactttaattgtccctactagcatgacagcctacctatatctgtactcacatggagaagtgtctcttgcagcatctcaaccagttctcttgtatgctattcttctgatgatcctcctttctcctttcgatatgttttacttatcatcacgcttttactttctgaggacagtctggcgtataatactgcctttacaagcaattacatttcccgatttctttttggctgatatttttacatccatgtcaaaggtgttctcagatctggagcgctcagtttgtcgtatggtgaatcgccaggttgcaacaatcgcttggtttgaagcagattctatttgtggcagtcattcagtagcgattccgcttgttctcatgttaccctacttgtggcgtttattccaatgtctccggcaatacaaggatacaaaggagaagacatgtctcctcaatgctctcaagtactcgacagcaattcctgtgattttcctttctgctctcaagtaccatgtacatcctgatcaatgggttggcttctaccggcccctctggcttatctctagtgttgtaaattcactgtattccttctactgggatataaagcgagattgggatttgagcatcctaaccaggattttcatgttcaaaaacccaagcatatggacatatcttctttacgggcagaactgggtactctactgggtactgggcagcaatttggtcctgcgatgcacatggacgtacaagctctcggcgcatctccggcacaactacctgacagtgttcaccatagcagctctggagatactgagacggtggcagtgggtgttcttccgggtcgagaacgagtggaacaagatgacagccaaacagaacatggagatgtcatccgacatgccttccgaaggagacaggctactggattccagtaaccatacagtatgagttgaacagcagtctcataatttttgcgatacacagattcagcaccattcttttagcgtgacccatttttacgtcgacggtttagattttgtatgtagagctcaaaaggccagggatacgtaacaggtttctatataaaaagttgaaatttgttggcactacggatgtaatcctcttggaggatgtgtacttttgtaacccacttgcatccaacaggaggcatttgttgacacattaaagaaaaatagtaatgctgaaaatcatgagtttttggaaccgtaattatctcttttatcttgttcattatcatattcttggtgagtaccgtatatcagacagactgctcgtgtgggcatgacatttcacgtcaccagtttatcggatggctgagacctgatgaagtaacatacaagaagctgggtctagtggtatatgatttgatgatccaatcattgtatccatccacccacagaatgaagatattttggaaataaaaaaaaggcctgaacccagaacacaaatggaacatttaatacaaacatactttgtctaattactagctagagcatgatccataaaaacattaagacaccaagcacaagcaggtaagcaattatgcagaaatgctagctcccaaaacaatccttgcatatatccatggctccatccttgcagtaacttgcatacatacatctactgcactagcactacatcggcgagattatttaacttgcatctgttcttgacagtctacacaagaagaggcgaactggatcatgttccatgtgcatttgcttaatctgcacaagagactaattctatattacaaaagctacggcgccgagaaggcgtcgtcgagcggccacgggaggtgccgttcggtgccgtccatgccgtccggctcagcggaccgcggcggcgcctgcaccatggagcgcagcgtgtcgtggaggcggtcgtggcgcctccggtggcggatgcggcgcagcacggcgtccctgtccagcgcccccgccccggggcgcaggtacaggcagctcgtcaccggcgcggcctcgacgacgctgccttcgccgtcgccgtacccggccggcggcggcgcgttcttggacaccatggaggacgacatggcaaggcaggtgctggttcctccccctgatgagctagctggagaacagagagagcaggtacgctaatggcgacgtgaggagggagagagtgatgagcgagattgagaggggtgaagtgaaggtggcattgacggagcgtgtatttatagacggcgatggaggtggagggggagctcagcgtaatgaccactctaaccacaattattt

SEQ ID NO: 34899 - DNA, 2974 bp, Zea Mays
cgtccacgtccccgtaccttccgttccctttctcccgttcgcacgccgcctcgtgcactcctcctcctcctcctcctcccagatctcgtgaccattgccattccctccctccgctacacgccgagcgcccccgtccggaccaggcgtctccgcggctcctagtcctcgccccctccctctcccgtggaggactgccgcggggcggcgagggagaggagatccgtcggtgctggctgctggttggtcggctggtcaatccctttccatcgtttgctgattgcgcgagacggtgcttcaggactgccccctggcgcggaggccgcacaggctcggcggcgccggcggcgagatgaagggcgcgaccatcccctcggtcgcgatcatgccctcgccgctcttcctctggcggtttaagtcttccggctccttttcaggttgtgttgtttcttctatggggcttatgttgttgcaagataagttgggactcggttatgagaatgagtgttgatctcagagacttatttctttatgaggctttcttgtactataatcctcttcttcttgtggccttgatgatttggttgtggggagtaaatctatgggtttttgcacaatcatctgtgaattatgcaaaagtgtttgatcttccacaaacacatttatctcaccgagagatatggaggtgtgctacttggctgactttaattgtccctactagcatgacagcctacctatatctgtactcacatggagaagtgtctcttgcagcatctcaaccagttctcttgtatgctattcttctgatgatcctcctttctcctttcgatatgttttacttatcatcacgcttttactttctgaggacagtctggcgtataatactgcctttacaagcaattacatttcccgatttctttttggctgatatttttacatccatgtcaaaggtgttctcagatctggagcgctcagtttgtcgtatggtgaatcgccaggttgcaacaatcgcttggtttgaagcagattctatttgtggcagtcattcagtagcgattccgcttgttctcatgttaccctacttgtggcgtttattccaatgtctccggcaatacaaggatacaaaggagaagacatgtctcctcaatgctctcaagtactcgacagcaattcctgtgattttcctttctgctctcaagtaccatgtacatcctgatcaatgggttggcttctaccggcccctctggcttatctctagtgttgtaaattcactgtattccttctactgggatataaagcgagattgggatttgagcatcctaaccaggattttcatgttcaaaaacccaagcatatggacatatcttctttacgggcagaactgggtactctactgggtactgggcagcaatttggtcctgcgatgcacatggacgtacaagctctcggcgcatctccggcacaactacctgacagtgttcaccatagcagctctggagatactgagacggtggcagtgggtgttcttccgggtcgagaacgagtggaacaagatgacagccaaacagaacatggagatgtcatccgacatgccttccgaaggagacaggctactggattccagtaaccatacagtatgagttgaacagcagtctcataatttttgcgatacacagattcagcaccattcttttagcgtgacccatttttacgtcgacggtttagattttgtatgtagagctcaaaaggccagggatacgtaacaggtttctatataaaaagttgaaatttgttggcactacggatgtaatcctcttggaggatgtgtacttttgtaacccacttgcatccaacaggaggcatttgttgacacattaaagaaaaatagtaatgctgaaaatcatgagtttttggaaccgtaattatctcttttatcttgttcattatcatattcttggtgagtaccgtatatcagacagactgctcgtgtgggcatgacatttcacgtcaccagtttatcggatggctgagacctgatgaagtaacatacaagaagctgggtctagtggtatatgatttgatgatccaatcattgtatccatccacccacagaatgaagatattttggaaataaaaaaaaggcctgaacccagaacacaaatggaacatttaatacaaacatactttgtctaattactagctagagcatgatccataaaaacattaagacaccaagcacaagcaggtaagcaattatgcagaaatgctagctcccaaaacaatccttgcatatatccatggctccatccttgcagtaacttgcatacatacatctactgcactagcactacatcggcgagattatttaacttgcatctgttcttgacagtctacacaagaagaggcgaactggatcatgttccatgtgcatttgcttaatctgcacaagagactaattctatattacaaaagctacggcgccgagaaggcgtcgtcgagcggccacgggaggtgccgttcggtgccgtccatgccgtccggctcagcggaccgcggcggcgcctgcaccatggagcgcagcgtgtcgtggaggcggtcgtggcgcctccggtggcggatgcggcgcagcacggcgtccctgtccagcgcccccgccccggggcgcaggtacaggcagctcgtcaccggcgcggcctcgacgacgctgccttcgccgtcgccgtacccggccggcggcggcgcgttcttggacaccatggaggacgacatggcaaggcaggtgctggttcctccccctgatgagctagctggagaacagagagagcaggtacgctaatggcgacgtgaggagggagagagtgatgagcgagattgagaggggtgaagtgaaggtggcattgacggagcgtgtatttatagacggcgatggaggtggagggggagctcagcgtaatgaccactctaaccacaattattt

SEQ ID NO: 34900 - DNA, 371 bp, Zea Mays
tgcgagatccactacggccacataaacaggctgctcctacacactgtctcctccaccatctgactcatccacttcacttattcaacatcgggacactggagttgtcgctcagcctcgtcgttactggaaccgtggcggcaaacaggagcgaggcggctgggcctgtgcaggggcacgcccgagcggggcagggcggagctcagtgcctcggctgggggcgggttcacgccttcgcgggaggagctcagctgctcagcgtccgcggaggtgaccttggtcatccagagcaggcgggcgacctaggcagatctcgggtcggcggcggctccgcctgggcgcgggcaggtccagacgagggcactgccgcctag

SEQ ID NO: 34901 - DNA, 2967 bp, Zea Mays
agccagcccctcacatatacctccgccgcgcgctcccctcttccccccgctggccgctgctctcttcctccctcctcctcggtccactccaaccccaggcctgccgcggccacagacgggccgcgccgccgccgcagcttccgattccgcttccgccggccgttctgccgcgcgcgcgcctgtggcgcttgagcgggcggatttgttcggcccgttctttggccgccgccgttgcgctgcgccgtgttggcttccaggtgcgcaatccggtcccgtgctctgttcgtgagctgaggatttgagtagtccgccaccctggatcctgatggggccgttcctgtgcagttcccatccaggcgtcttgagattccccggccggagatctgcttaattcgtacctctctctggttctgaggcccctccgaggtggaggaggagctcgtgggtcgacgaaagaacaatcgtttctttgcccactcctgcggctgcttctccgtcccaggctttccagccatggaggaggtggaggtggccaacatggccgcggtggagagctgccaccgggtgctggctctgctctcgcagcagcaggacccagccctgctcaagagcgtagcttcagagacggctgaagcctgcgccaagttcaggaaggtagcggccctcctcggcagtgccagtggcggaggtggctgtggccatgctagaggcaggttctccagacgagtccggcctctggggctcgtcaaccagaagagccccttggggatcgccaccggcagcggcaacccgctggagatgatgcccagcacagctgctgctgctgggtctccatctccacctcagtcgactagctatgcgcaaatgcgcgctcggcttagcagtgcgccagagtcctcacgagggctggatttggcctgctccagcagcaggtgtagccctcatccatttggagcccccaagctggtccagccactgtctgtgcagttccagattgggagtgttgcgcataggtacccgttccaccagcagcagtcgaggcagaagctgcaggccgagatgttcaggaggagcaacagtgggatcagcctcaagttcgatagccctagccccagcggtggtgctgctggcaccatgtcgtctgcgagatcattcatgtcgtcgttgagtatagacaggagcatggcgagcttggatgggaagcggccgttccatttggtaggcaccccggtggcgagcgacccagcagatgcgcaccgtgcgcccaaacggcgatgcacgggtagaggggaggatggaagaggcaagtgtgccaccactggcagatgccattgctcaaagagaaggaaactgcggattaagaggtcgattagagtgccagccattagcaacaaaatcgctgatatccctcctgatgagtactcgtggcgcaagtacgggcagaagccaattaagggttccccacacccgaggtatgaaccgaacaagaaatattcaactaatatgaaaaatgtgtatcaaatcctttgcagtcataatgattgatgcattattccccttgcaccatgggaggtggcatatctgcatcaggctctcagggtgccccttttatctgtagaataattgtctgttgatcctcctccccactttatcttttccttcctcccaagtggttctgcaactaaggcctgtcgataacttagtagctagcacaattgaatatttggttagtggatagtctcagggctcaactctttttgtgcccatttactgacaaaacaatgatctgtcatggtgtgttggggggggggggggaccaaaagtaggtaaattattattgctacaggcgtttgaatgccatgttaggctatctacatcctaatcttgattgcgctcattcccctaccccatatccaactttaagtctgctctggatgataggaaaatgtagctataccatgaaggcaagcacatggggctgattgttcccccctgtgtttcacatattctctttggctttaatcaaatgcaggggttactacaaatgcagcagcgtcaggggctgcccagcaaggaagcacgtcgagcgatgtgtagacgacccggcgatgctaatcgtgacatacgaaggcgagcacagccacacccagctgccagcacagcctgcccagacctagaagatcagtaaatcgtcgctccattctggaagcgcggggagcatgcctttgcacctagatggtcatgtagaatctcaggccttcgattttcgattgcagcagcagcaatgaccatggagagaatcttatgagctgcttggcccccctcctgagtcactctgttacagatgcaagagtggggactgctgccaagttgttcatctttcttgtgagctgtggcatgtatgtataattgaaagatggtgcaggaaggaaggaaaatgcagcgtccgacagcgaccggtgagctttgccggtgagcctgaagggttgaaagcaaagactgacaagaggaagtgaacaaccgcgcattgttgtgagggtggattaggatgggaagatttggcttttagcgtgcacaagttcacttgccatggactagcctctgtatgttgcttttgctttttctgaaatatcgcatcacctcttttgttgacaaaataaaaaagggtggggttgcatcccagtatcaaaggagggagctccgtactgaccccgctgcaagttaggaccatctgggttttccaggtgtaagcattccagaagggaaggtgcaaagctgttgttggtgtgatttgccacccccagtactgttgctcttgtgtaaagcattctgtgtaattaatgatttgtgccatctgcaatcttgaggatgaatggatgctctaactgaaactttgtacgcgggctaaagattatttattttgaaaaatcttctaaaccttttttcgcagcctaaaaataatttatt

SEQ ID NO: 34902 - DNA, 2159 bp, Zea Mays
agccagcccctcacatatacctccgccgcgcgctcccctcttccccccgctggccgctgctctcttcctccctcctcctcggtccactccaaccccaggcctgccgcggccacagacgggccgcgccgccgccgcagcttccgattccgcttccgccggccgttctgccgcgcgcgcgcctgtggcgcttgagcgggcggatttgttcggcccgttctttggccgccgccgttgcgctgcgccgtgttggcttccagttcccatccaggcgtcttgagattccccggccggagatctgcttaattcgtacctctctctggttctgaggcccctccgaggtggaggaggagctcgtgggtcgacgaaagaacaatcgtttctttgcccactcctgcggctgcttctccgtcccaggctttccagccatggaggaggtggaggtggctgtggccatgctagaggcaggttctccagacgagtccggcctctggggctcgtcaaccagaagagccccttggggatcgccaccggcagcggcaacccgctggagatgatgcccagcacagctgctgctgctgggtctccatctccacctcagtcgactagctatgcgcaaatgcgcgctcggcttagcagtgcgccagagtcctcacgagggctggatttggcctgctccagcagcaggtgtagccctcatccatttggagcccccaagctggtccagccactgtctgtgcagttccagattgggagtgttgcgcataggtacccgttccaccagcagcagtcgaggcagaagctgcaggccgagatgttcaggaggagcaacagtgggatcagcctcaagttcgatagccctagccccagcggtggtgctgctggcaccatgtcgtctgcgagatcattcatgtcgtcgttgagtatagacaggagcatggcgagcttggatgggaagcggccgttccatttggtaggcaccccggtggcgagcgacccagcagatgcgcaccgtgcgcccaaacggcgatgcacgggtagaggggaggatggaagaggcaagtgtgccaccactggcagatgccattgctcaaagagaaggaaactgcggattaagaggtcgattagagtgccagccattagcaacaaaatcgctgatatccctcctgatgagtactcgtggcgcaagtacgggcagaagccaattaagggttccccacacccgaggggttactacaaatgcagcagcgtcaggggctgcccagcaaggaagcacgtcgagcgatgtgtagacgacccggcgatgctaatcgtgacatacgaaggcgagcacagccacacccagctgccagcacagcctgcccagacctagaagatcagtaaatcgtcgctccattctggaagcgcggggagcatgcctttgcacctagatggtcatgtagaatctcaggccttcgattttcgattgcagcagcagcaatgaccatggagagaatcttatgagctgcttggcccccctcctgagtcactctgttacagatgcaagagtggggactgctgccaagttgttcatctttcttgtgagctgtggcatgtatgtataattgaaagatggtgcaggaaggaaggaaaatgcagcgtccgacagcgaccggtgagctttgccggtgagcctgaagggttgaaagcaaagactgacaagaggaagtgaacaaccgcgcattgttgtgagggtggattaggatgggaagatttggcttttagcgtgcacaagttcacttgccatggactagcctctgtatgttgcttttgctttttctgaaatatcgcatcacctcttttgttgacaaaataaaaaagggtggggttgcatcccagtatcaaaggagggagctccgtactgaccccgctgcaagttaggaccatctgggttttccaggtgtaagcattccagaagggaaggtgcaaagctgttgttggtgtgatttgccacccccagtactgttgctcttgtgtaaagcattctgtgtaattaatgatttgtgccatctgcaatcttgaggatgaatggatgctctaactgaaactttgtacgcgggctaaagattatttattttgaaaaatcttctaaaccttttttcgcagcctaaaaataatttatt

SEQ ID NO: 34903 - DNA, 2333 bp, Zea Mays
gtagatctaagaaaacagcacagcagcagggcatatagttccaaacacgttggttttattcgtcacacgaaaagcgccgcaaaaggtaaagaaagaaaaaaacaaaagaaaaagaaaaggaatggcgaaataacaaaaccacctctgcacctccataactccattgcctttcgtccttcgtcttctcgttcctcgataagcacgtaataaataaacaaatttcatttttttctcggtcgtcctcctctgcttcgactctcttctccaactccgcctcggcgtcgtcgtgcgcttcgatctttcccatttccaaccggaggggaggcgtcggcgcaataataggaggcgcctttgtttcgcccatcgccggcatggggaactagcttcgtggctgggccccacgccatgcaaaccagtgagaccaccgggaccgcatcgccgccggctgttgagccggaggccgaggacaaggtggaagagggggcgcgggcgaatgaggaggcggcggcgaaggtgggcggcgacgacgaggatgactgggaatcggagcatgaggggaggagaggcaggcggcagcggtgccggcgaggcggtgcggcgggggacagcgccgtggccatggtgaagcgggagctgctcacgcgctgcttgacgtgcccgctctgcgaccacctgctccggcaggccaccaccatctccgagtgcctccatacattttgtagaaagtgtatctataaaaagctcaatgatgaggatctggaccactgtccagtatgtaaaattgatctgggctgcactccagtcgagaagcttagagctgatcataatatacaagatgtgaggtcaaaattttttccattcaaaagaaagaaggttaatgctgaagaagccgaatctcctattatgctgcctgttaaagttaaagagaggtctatctcatcgttggtggtcaatacacctagagtaaccccagcagctttgacagggaggcgaacaagagcggttaccaggaaggctgccgcattgcgtggccttggtcctatcattgtggatcctttaaaaaaggacaacgataacccaaataagcaaactgataattcaagcttgctagatagcttgaacaaaatacctcaaacaagaagacagttattgtcgaatggggacacaacaagtcatctctctgttaaagataaagcaggtgataataaggacctggataagtccgagttctggaaacctttgaattgtcttgtagaagctgcaagcaaaacaaagcccctgacaagtgcaccaaggccagctttgaagggagataagcccagaaaatctccgagtagtgatagcgaacattctagcagaacaaagactagggagcctcttcagaagtccaaagctgaagttgacaaaagcgatcccgggccaatagtgatgcttagaaagagagggcggcctggccggaagaggaaaaatcccctacctgaaacaaatgcagattccactgctacagctatccaggccaggaaggcattgagcccaatatggttttcattgattgcctcgtttgaccagtgtccctcctttgcctcagatacctgcacactatttgagaataaaggatgggagcatacccgcgtcatctattcaaaagtacattgtgcagaagctcagtcttctaagcgaatccgaggtcgaaataagctgctgcgggcagaccgtgaaccctgggcaacctgtgcgcaacttggtggagcggtggctgagggttggcccggcgcgcccgctgcacacggtgatcggctcctccgggggagattatgtgatggtgataagctatgggcggcccaagtccgcgtcctgttaaaaccatatcaccatcgacggcctggcgaggtcgattcctagttcgaacaagggttggtgccgccgccgctgccgccgccggggaagaggccgtcgacagataaactcaagcagcggtagcgggctgctctgccgcagcagctcgtcctctcaccggcgtgttctttaaggatctgttcgttcgttcgttgttgccatacatgcacatgtgatggaagtcgctgtaatttggtagtacttggtaggctgtgagtgagaactgacgtttaggttggaggcgagatcgttaacctgagcttaagtgttgggggcgatgagtccgccgtgtatgggagaggcgctgctggttcagttctttttcctccgttttttttttcacttcttgaagggaaaaacacacacaaatacataatgtactacctccgtttatttgtcctgaactaatatccagccgtgactgattcggatcgtta

SEQ ID NO: 34904 - DNA, 2667 bp, Zea Mays
atcaggtcttatatttatggtacgagagaacgagtcatattattatttgatgatttttttgaaatagaactatattaaagcatattttaggtgctagtcatatatttcaaaatacaagtacaacagaaacaaatttcatgcacgactcacagtagatctaagaaaacagcacagcagcagggcatatagttccaaacacgttggttttattcgtcacacgaaaagcgccgcaaaaggtaaagaaagaaaaaaacaaaagaaaaagaaaaggaatggcgaaataacaaaaccacctctgcacctccataactccattgcctttcgtccttcgtcttctcgttcctcgataagcacgtaataaataaacaaatttcatttttttctcggtcgtcctcctctgcttcgactctcttctccaactccgcctcggcgtcgtcgtgcgcttcgatctttcccatttccaaccggaggggaggcgtcggcgcaataataggaggcgcctttgtttcgcccatcgccggcatggggaactagcttcgtggctgggccccacgccatgcaaaccagtgagaccaccgggaccgcatcgccgccggctgttgagccggaggccgaggacaaggtggaagagggggcgcgggcgaatgaggaggcggcggcgaaggtgggcggcgacgacgaggatgactgggaatcggagcatgaggggaggagaggcaggcggcagcggtgccggcgaggcggtgcggcgggggacagcgccgtggccatggtgaagcgggagctgctcacgcgctgcttgacgtgcccgctctgcgaccacctgctccggcaggccaccaccatctccgagtgcctccatacattttgtagaaagtgtatctataaaaagctcaatgatgaggatctggaccactgtccagtatgtaaaattgatctgggctgcactccagtcgagaagcttagagctgatcataatatacaagatgtgaggtcaaaattttttccattcaaaagaaagaaggttaatgctgaagaagccgaatctcctattatgctgcctgttaaagttaaagagaggtctatctcatcgttggtggtcaatacacctagagtaaccccagcagctttgacagggaggcgaacaagagcggttaccaggaaggctgccgcattgcgtggccttggtcctatcattgtggatcctttaaaaaaggacaacgataacccaaataagcaaactgataattcaagcttgctagatagcttgaacaaaatacctcaaacaagaagacagttattgtcgaatggggacacaacaagtcatctctctgttaaagataaagcaggtgataataaggacctggataagtccgagttctggaaacctttgaattgtcttgtagaagctgcaagcaaaacaaagcccctgacaagtgcaccaaggccagctttgaagggagataagcccagaaaatctccgagtagtgatagcgaacattctagcagaacaaagactagggagcctcttcagaagtccaaagctgaagttgacaaaagcgatcccgggccaatagtgatgcttagaaagagagggcggcctggccggaagaggaaaaatcccctacctgaaacaaatgcagattccactgctacagctatccaggccaggaaggcattgagcccaatatggttttcattgattgcctcgtttgaccagaaaggtgtccctcctttgcctcagatacctgcacactatttgagaataaaggatgggagcatacccgcgtcatctattcaaaagtacattgtgcagaagctcagtcttctaagcgaatccgaggaaattctcaatgagtcggctgagaagtccatacttctcatgttgacacataagaagctccaagctgtcgagtccacttggcaagacttggagatagagaaggccgccagctctgaactggcggacatagtttagaagctgagagaccagctcgaagcaaagtcactcgagcttgaaggtcgaaataagctgctgcgggcagaccgtgaaccctgggcaacctgtgcgcaacttggtggagcggtggctgagggttggcccggcgcgcccgctgcacacggtgatcggctcctccgggggagattatgtgatggtgataagctatgggcggcccaagtccgcgtcctgttaaaaccatatcaccatcgacggcctggcgaggtcgattcctagttcgaacaagggttggtgccgccgccgctgccgccgccggggaagaggccgtcgacagataaactcaagcagcggtagcgggctgctctgccgcagcagctcgtcctctcaccggcgtgttctttaaggatctgttcgttcgttcgttgttgccatacatgcacatgtgatggaagtcgctgtaatttggtagtacttggtaggctgtgagtgagaactgacgtttaggttggaggcgagatcgttaacctgagcttaagtgttgggggcgatgagtccgccgtgtatgggagaggcgctgctggttcagttctttttcctccgttttttttttcacttcttgaagggaaaaacacacacaaatacataatgtactacctccgtttatttgtcctgaactaatatccagccgtgactgattcggatcgtta

SEQ ID NO: 34905 - DNA, 1938 bp, Zea Mays
gtagatctaagaaaacagcacagcagcagggcatatagttccaaacacgttggttttattcgtcacacgaaaagcgccgcaaaaggtaaagaaagaaaaaaacaaaagaaaaagaaaaggaatggcgaaataacaaaaccacctctgcacctccataactccattgcctttcgtccttcgtcttctcgttcctcgataagcacgtaataaataaacaaatttcatttttttctcggtcgtcctcctctgcttcgactctcttctccaactccgcctcggcgtcgtcgtgcgcttcgatctttcccatttccaaccggaggggaggcgtcggcgcaataataggaggcgcctttgtttcgcccatcgccggcatggggaactagcttcgtggctgggccccacgccatgcaaaccagtgagaccaccgggaccgcatcgccgccggctgttgagccggaggccgaggacaaggtggaagagggggcgcgggcgaatgaggaggcggcggcgaaggtgggcggcgacgacgaggatgactgggaatcggagcatgaggggaggagaggcaggcggcagcggtgccggcgaggcggtgcggcgggggacagcgccgtggccatggtgaagcgggagctgctcacgcgctgcttgacgtgcccgctctgcgaccacctgctccggcaggccaccaccatctccgagtgcctccatacattttgtagaaagtgtatctataaaaagctcaatgatgaggatctggaccactgtccagtatgtaaaattgatctgggctgcactccagtcgagaagcttagagctgatcataatatacaagatgtgaggtcaaaattttttccattcaaaagaaagaaggttaatgctgaagaagccgaatctcctattatgctgcctgttaaagttaaagagaggtctatctcatcgttggtggtcaatacacctagagtaaccccagcagctttgacagggaggcgaacaagagcggttaccaggaaggctgccgcattgcgtggccttggtcctatcattgtggatcctttaaaaaaggacaacgataacccaaataagcaaactgataattcaagcttgctagatagcttgaacaaaatacctcaaacaagaagacagttattgtcgaatggggacacaacaagtcatctctctgttaaagataaagcaggtgataataaggacctggataagtccgagttctggaaacctttgaattgtcttgtagaagctgcaagcaaaacaaagcccctgacaagtgcaccaaggccagctttgaagggagataagcccagaaaatctccgagtagtgatagcgaacattctagcagaacaaagactagggagcctcttcagaagtccaaagctgaagttgacaaaagcgatcccgggccaatagtgatgcttagaaagagagggcggcctggccggaagaggaaaaatcccctacctgaaacaaatgcagattccactgctacagctatccaggccaggaaggcattgagcccaatatggttttcattgattgcctcgtttgaccagaaaggtgtccctcctttgcctcagatacctgcacactatttgagaataaaggatgggagcatacccgcgtcatctattcaaaagtacattgtgcagaagctcagtcttctaagcgaatccgaggaaattctcaatgagtcggctgagaagtccatacttctcatgttgacacataagaagctccaagctgtcgagtccacttggcaagacttggagatagagaaggccgccagctctgaactggcggacatagtttagaagctgagagaccagctcgaagcaaagtcactcgagcttgaaggaaagggctgccaaggagatcttggaccaaaagctgaaatttgccatggaggataaagacttggccga

SEQ ID NO: 34906 - DNA, 1661 bp, Zea Mays
gtttttgggctatttaaggcacccactccccaccttttcctttcttcctcctcatccagcgcggctccactcaaagcttgagccttccttttcttttcttgtttttgttttattttcttggtaggggggagtcgtcttctccatctctccttagcctaggagaaggagagatccagaggcaaaagcttcagggtttgtacaaattctagatctaaccggactaaccagaaaacaaaacaaaaaaagacgaaagcatgagccacttcgccgccgccatgaagagcccccttgcggtcgccgtcgccgcgcccgccggcgccgccgacgctaagagcccgctcttctgccccaagccgcggcgccccgcggcgccgctgcggtgccatcagagcggcggcttctccgacgccggcacggatctgctcgacctcctcctctcgaagggcgacgagagcggcctgtcgtcggcgtccccgcagccgccgctgttctgcggctcgccgccgcggcgagcgtcgaacccggtggtccacgacagcaggttcggcgcggactgcccgcccatgcccgtgccagggctgcccgtgcaccggccaagcccgcgcccgtcgacggcggcgccgtccatgtcgccgcgcgggtgtgcccgcgcgcggttcgcgttccagcccgccgcggtccgcgtcgagggttttgactgcctcgaccgcggccgcggcggccgtggccatggcatcaccgccatggcctagactgtgcacatacaacagccagcaccctgagaccctcctcccccgcccttccatccatggcacgcaagagccacgagcaccttgttggaggtagaagaagaggagggggtaggggaggaattgagagggatcggtttgtcctaaatcttacccccctaaaaagtaaaaaaaaactagtacttttatataaacccgtcccatccttccacccccaacaattacagcgagtttaggtagtatgtcctagttcgccaattaatgatgctttcttttttggtttttgatggggaattgttttttctttgttgtccgtccgtccatgcaaccaagaaatttcatggagaatctgtacaaaagagtggctagctactacacgagagtccgttctgagagaagcaacacgaggtcagtcagtggatgagtttagagtgagacattcacacgctgagagggttgataatttgtgatattttcctcttttttttttcttcctgattttgtatattgtaatatcctgctggattttccaatgaatgagtgaatgaaccaatcaatctttataatagtagtagtattgttaggcatgctatacgaatgatttgatatcttcagctgctaccagcagcagcgccctgggattcaggctgtgctgatgtgattatggtggttgaatggtcccatgcccggccctcacctcacatggtttccatgtgccgaagcaacacggaggcgataacgacggtgacgtgtcagtggctcactgactcctgctatagaaaattaatttttattgttgcgttgaggactccgtcaggaaccgagccggatctcttgtggtctcagtgtgccgtctctcgtcgtgaaggtgcgtgccaactgccatccgtaaagagggacataatatactta

SEQ ID NO: 34907 - DNA, 1031 bp, Zea Mays
gaaccatcggttgaagtatatatatatgccttgtttgatggattattccacatcaagtttgttagctatcttttgaggaagctgtgggtctcaagggatgaacggcatgaacgagagcaagctggtggatctgctcaacggctccgagtacgtgccgacctacgaggacaaggacggggactggatgctcgtcggcgatgtgccgtgggagatgttcgtcgaatcatgcaagcgccttcggatcatgaaaggatcagaagccattggcctggcgccaagggccatggagaaatgcaagaacagaagctgaggagaagacggacggacggaagcttgcatctcagcaccaccaggggtggatggatgcaagaagaacaaatctccatggcttttgcagctctgctcgtctctgtatcatactcgtcgtccctgcccttcaggcctctgtatctccctgatcaatgaagtcgttttggtgtgtcaactgttctctccgtgcccagcttgtcagtgaaagagtcagtcagtgtccatcaagtctcatcttgtcctatacagaagagagaagccatgcatgaacatgtacctgtcctataacaatgtctttttttgctacctgtttttttttctctctctctctttttttggcacaagatgcaaaggcaccctgctcctgatcaaagggccttttgcatcataagctgtttgattataattaccatggtgtgtcagtggaacaaataactgttgcaaggtgttaaaaaaaagttgtattgtaatatgatcacctctcttccttgttgttttcattgtctttggtattagctgttccatggaacaggattatatatataagctcagtgatgaaatatactgagctgctctgttgtgtgttgggttgcatagacgttgcactgctgtgcatacctgtctctgtgttttttttaacatgtggagccaagccaacttggagacagccagacagaaatacaggatccttcagaaaaaaaaaaaaacatggagacagaagc

SEQ ID NO: 34908 - DNA, 1015 bp, Zea Mays
tagagctagaaataagaaaaggcctgctgtcgttcgttgctcagcaactgccatggatttggaagctgtgggtctcaagggatgaacggcatgaacgagagcaagctggtggatctgctcaacggctccgagtacgtgccgacctacgaggacaaggacggggactggatgctcgtcggcgatgtgccgtgggagatgttcgtcgaatcatgcaagcgccttcggatcatgaaaggatcagaagccattggcctggcgccaagggccatggagaaatgcaagaacagaagctgaggagaagacggacggacggaagcttgcatctcagcaccaccaggggtggatggatgcaagaagaacaaatctccatggcttttgcagctctgctcgtctctgtatcatactcgtcgtccctgcccttcaggcctctgtatctccctgatcaatgaagtcgttttggtgtgtcaactgttctctccgtgcccagcttgtcagtgaaagagtcagtcagtgtccatcaagtctcatcttgtcctatacagaagagagaagccatgcatgaacatgtacctgtcctataacaatgtctttttttgctacctgtttttttttctctctctctctttttttggcacaagatgcaaaggcaccctgctcctgatcaaagggccttttgcatcataagctgtttgattataattaccatggtgtgtcagtggaacaaataactgttgcaaggtgttaaaaaaaagttgtattgtaatatgatcacctctcttccttgttgttttcattgtctttggtattagctgttccatggaacaggattatatatataagctcagtgatgaaatatactgagctgctctgttgtgtgttgggttgcatagacgttgcactgctgtgcatacctgtctctgtgttttttttaacatgtggagccaagccaacttggagacagccagacagaaatacaggatccttcagaaaaaaaaaaaaacatggagacagaagc

SEQ ID NO: 34909 - DNA, 983 bp, Zea Mays
ataatttttacgggctgaggattaattgggaagctgtgggtctcaagggatgaacggcatgaacgagagcaagctggtggatctgctcaacggctccgagtacgtgccgacctacgaggacaaggacggggactggatgctcgtcggcgatgtgccgtgggagatgttcgtcgaatcatgcaagcgccttcggatcatgaaaggatcagaagccattggcctggcgccaagggccatggagaaatgcaagaacagaagctgaggagaagacggacggacggaagcttgcatctcagcaccaccaggggtggatggatgcaagaagaacaaatctccatggcttttgcagctctgctcgtctctgtatcatactcgtcgtccctgcccttcaggcctctgtatctccctgatcaatgaagtcgttttggtgtgtcaactgttctctccgtgcccagcttgtcagtgaaagagtcagtcagtgtccatcaagtctcatcttgtcctatacagaagagagaagccatgcatgaacatgtacctgtcctataacaatgtctttttttgctacctgtttttttttctctctctctctttttttggcacaagatgcaaaggcaccctgctcctgatcaaagggccttttgcatcataagctgtttgattataattaccatggtgtgtcagtggaacaaataactgttgcaaggtgttaaaaaaaagttgtattgtaatatgatcacctctcttccttgttgttttcattgtctttggtattagctgttccatggaacaggattatatatataagctcagtgatgaaatatactgagctgctctgttgtgtgttgggttgcatagacgttgcactgctgtgcatacctgtctctgtgttttttttaacatgtggagccaagccaacttggagacagccagacagaaatacaggatccttcagaaaaaaaaaaaaacatggagacagaagc

SEQ ID NO: 34910 - DNA, 1453 bp, Zea Mays
ctctctcttttttattatttgggcccctgttctgtttcccatactgccaaagactatactatagacgcccatgcactgcgccatggtcgtaagctacattgggttcaccgttcatggatcgccattctagatctgctgtcccccggcctagctaagctagccctcctccatattactatcgacttttttctcataaaaaaacacattttgcacatgcctacgacgtgtatgttttgggcaagaaataaaacaagggctcaggtggtgggatggccaccggtccggtcgttccggaagaacatcatgtccgtgcagtccgacaagggcgccgccgccgccaacggcgacaagtcctcgccggcggcaggcggcggtgccgcgttcgtgaaggtgagcttggacggcgcgccctacctgcgcaaagtggacctcaagatgtacaggagctaccagcagctgtccaaggcgctcgagaacatgttcagctccttcaccatcggaagctgtgggtctcaagggatgaacggcatgaacgagagcaagctggtggatctgctcaacggctccgagtacgtgccgacctacgaggacaaggacggggactggatgctcgtcggcgatgtgccgtgggagatgttcgtcgaatcatgcaagcgccttcggatcatgaaaggatcagaagccattggcctggcgccaagggccatggagaaatgcaagaacagaagctgaggagaagacggacggacggaagcttgcatctcagcaccaccaggggtggatggatgcaagaagaacaaatctccatggcttttgcagctctgctcgtctctgtatcatactcgtcgtccctgcccttcaggcctctgtatctccctgatcaatgaagtcgttttggtgtgtcaactgttctctccgtgcccagcttgtcagtgaaagagtcagtcagtgtccatcaagtctcatcttgtcctatacagaagagagaagccatgcatgaacatgtacctgtcctataacaatgtctttttttgctacctgtttttttttctctctctctctttttttggcacaagatgcaaaggcaccctgctcctgatcaaagggccttttgcatcataagctgtttgattataattaccatggtgtgtcagtggaacaaataactgttgcaaggtgttaaaaaaaagttgtattgtaatatgatcacctctcttccttgttgttttcattgtctttggtattagctgttccatggaacaggattatatatataagctcagtgatgaaatatactgagctgctctgttgtgtgttgggttgcatagacgttgcactgctgtgcatacctgtctctgtgttttttttaacatgtggagccaagccaacttggagacagccagacagaaatacaggatccttcagaaaaaaaaaaaaacatggagacagaagc

SEQ ID NO: 34911 - DNA, 1724 bp, Zea Mays
gacattattgccccctcttcccttcccaacccaacccattgcatttgcaagcccttttacattgcagagcgccagagcctcgctcgctctcggaacagagctaggcagctaacagacgaagaagaagcaagccaagcagaattgagagagaggcgaggacgtggcgacgacggcagccgcgatggcgacgacgacggacctggggttcgaggcgacggagctccgcctgggcctgcccggcgggggaggtggaggggagccggcgctgggcggcgaggggaggagctcttcctccgcctccggcaagaggggcttcgccgagaccatcgacctgaagctgaagctggagccagcggccgtcgtggaggcggaggaggaggaggaggaccacggcgttgctgttgcccttgagaaggaggaggaggccgggaagatgaagcggtccccgagccagagcagcgtcgccgccgccgccgccgccgtgctggctgaccccgccgagaagccgcgcgccgccaaggctcaggtggtgggatggccaccggtccggtcgttccggaagaacatcatgtccgtgcagtccgacaagggcgccgccgccgccaacggcgacaagtcctcgccggcggcaggcggcggtgccgcgttcgtgaaggtgagcttggacggcgcgccctacctgcgcaaagtggacctcaagatgtacaggagctaccagcagctgtccaaggcgctcgagaacatgttcagctccttcaccatcggttcaggaagctgtgggtctcaagggatgaacggcatgaacgagagcaagctggtggatctgctcaacggctccgagtacgtgccgacctacgaggacaaggacggggactggatgctcgtcggcgatgtgccgtgggagatgttcgtcgaatcatgcaagcgccttcggatcatgaaaggatcagaagccattggcctggcgccaagggccatggagaaatgcaagaacagaagctgaggagaagacggacggacggaagcttgcatctcagcaccaccaggggtggatggatgcaagaagaacaaatctccatggcttttgcagctctgctcgtctctgtatcatactcgtcgtccctgcccttcaggcctctgtatctccctgatcaatgaagtcgttttggtgtgtcaactgttctctccgtgcccagcttgtcagtgaaagagtcagtcagtgtccatcaagtctcatcttgtcctatacagaagagagaagccatgcatgaacatgtacctgtcctataacaatgtctttttttgctacctgtttttttttctctctctctctttttttggcacaagatgcaaaggcaccctgctcctgatcaaagggccttttgcatcataagctgtttgattataattaccatggtgtgtcagtggaacaaataactgttgcaaggtgttaaaaaaaagttgtattgtaatatgatcacctctcttccttgttgttttcattgtctttggtattagctgttccatggaacaggattatatatataagctcagtgatgaaatatactgagctgctctgttgtgtgttgggttgcatagacgttgcactgctgtgcatacctgtctctgtgttttttttaacatgtggagccaagccaacttggagacagccagacagaaatacaggatccttcagaaaaaaaaaaaaacatggagacagaagc

SEQ ID NO: 34912 - DNA, 2009 bp, Zea Mays
tgcttaccctctaatatttgtcaatccgtctggctttattttgtttcctcttgttgtgcattcatttgatttggtggtgtcatcagtcggaattctctcaatcagaggaacacgtgactctgggctcatttcccctatcgaagatcccatggcaattatgcaaaaaggctactctgttactattatgcttgctgttcttacatttggagtgtctactcgttggctcctgtacacggaacaagcaccttctgcatggctaaattttgcattgtgtggcttggtggggatcatcacagcatatgcttttgtttggatttcgaagtattacacggattataaacacgagccggtccgccttttagctctttcaagttctacaggacatggaactaatattattgctggagtaagtttggggatggaatcaacagccctaccagttctagtgataagtgttgccattatatcatcctattggctggggcagacctctggcttggtggacgagtctggcaacccaactggtggtctttttgggacagctgtagcgacaatggggatgcttagcacagcagggtatgttctcaccatggacatgtttggtcctatagctgacaatgctggtggtattgttgagatgagccagcagcatgaaagtgtgagagaaatcacagatgttctagatgctgtgggcaacacaactaaagctactacaaaaggatttgccataggatcagcagcactggcatcattcctcctgtttagtgcatacatggacgaagtagcttcttttgctcaaatgccgttcaaggaggttgacatagcagtcccggagatttttgttggtggtttattaggctcgatgcttatattcctgtttagtgcatgggcttgttcagcagttggcaaaactgcacaggaagttgttaatgaggtcaggagacaatttatcgagaggcctggtattatggactacaaagagaagcccgattatggacgctgtgtcgcaattgtggcctctgcatccttaagagaaatgataaaacctggggctctagcaattatatcacccatggccgttggcgttgtcttccggattttgggccactccactggtcagcctcttcttggagctaaagttgtagcctccatgcttatgtttgcgacggttgctggtattcttatggcactcttcttgaacactgctggcggcgcctgggataatgcaaagaagtacattgagactggtgcccttggtggcaaaggcagtgagtcccataaggctgcggttacaggcgacacggttggagacccattcaaagacactgcaggaccatcgctgcacgttcttatcaagatgctcgccacgatcacactggtcatggctcccatattcttgtgattaaccaaccagatttatcaagcttgccattaaccctgcggagatgtatctatgcgacttgtagatgaggtgtttacctgcatgtgatgtaatgatccaatcggttttagtgtgactacatgttgtacccaaagaaagaaagaaagaaagcagcgatctgtacccaggttttaatggtccaatcggttttagtgtgactatatgttgtacccaaagaaagaaagaaatcagcgatctgtacccaggtttgacggtagatattattctgaatttctgacgggtagtgatggtgcaaatgccatattttgtgacggacgtcactgaactagtagcccaagtgttttgtatttgtttattgctgggaacattatgacatccgttgagcttagctgtaagaaaggaacgatccacgatggattttaggatcgtgactgggtctacaccttacctttgactcttcacattaacaaagaaactgatgttatgtaatggtgttaatatgaccgattgtgagcacttctaagaggattaatatttaatagcttccagcacagaaaacatgcgcagataacaaaagaaacttcatatcaatctcaacagaagctgc

SEQ ID NO: 34913 - DNA, 2117 bp, Zea Mays
atgttctcaagttggtgacaatgttggagattgtgctgcccgaggcgctgatctttttgagagcatagcagcagaaattatcagtgcaatgatacttggaggaacaatggcacagcgctgtaaaattgaggatccgtctggctttattttgtttcctcttgttgtgcattcatttgatttggtggtgtcatcagtcggaattctctcaatcagaggaacacgtgactctgggctcatttcccctatcgaagatcccatggcaattatgcaaaaaggctactctgttactattatgcttgctgttcttacatttggagtgtctactcgttggctcctgtacacggaacaagcaccttctgcatggctaaattttgcattgtgtggcttggtggggatcatcacagcatatgcttttgtttggatttcgaagtattacacggattataaacacgagccggtccgccttttagctctttcaagttctacaggacatggaactaatattattgctggagtaagtttggggatggaatcaacagccctaccagttctagtgataagtgttgccattatatcatcctattggctggggcagacctctggcttggtggacgagtctggcaacccaactggtggtctttttgggacagctgtagcgacaatggggatgcttagcacagcagggtatgttctcaccatggacatgtttggtcctatagctgacaatgctggtggtattgttgagatgagccagcagcatgaaagtgtgagagaaatcacagatgttctagatgctgtgggcaacacaactaaagctactacaaaaggatttgccataggatcagcagcactggcatcattcctcctgtttagtgcatacatggacgaagtagcttcttttgctcaaatgccgttcaaggaggttgacatagcagtcccggagatttttgttggtggtttattaggctcgatgcttatattcctgtttagtgcatgggcttgttcagcagttggcaaaactgcacaggaagttgttaatgaggtcaggagacaatttatcgagaggcctggtattatggactacaaagagaagcccgattatggacgctgtgtcgcaattgtggcctctgcatccttaagagaaatgataaaacctggggctctagcaattatatcacccatggccgttggcgttgtcttccggattttgggccactccactggtcagcctcttcttggagctaaagttgtagcctccatgcttatgtttgcgacggttgctggtattcttatggcactcttcttgaacactgctggcggcgcctgggataatgcaaagaagtacattgagactggtgcccttggtggcaaaggcagtgagtcccataaggctgcggttacaggcgacacggttggagacccattcaaagacactgcaggaccatcgctgcacgttcttatcaagatgctcgccacgatcacactggtcatggctcccatattcttgtgattaaccaaccagatttatcaagcttgccattaaccctgcggagatgtatctatgcgacttgtagatgaggtgtttacctgcatgtgatgtaatgatccaatcggttttagtgtgactacatgttgtacccaaagaaagaaagaaagaaagcagcgatctgtacccaggttttaatggtccaatcggttttagtgtgactatatgttgtacccaaagaaagaaagaaatcagcgatctgtacccaggtttgacggtagatattattctgaatttctgacgggtagtgatggtgcaaatgccatattttgtgacggacgtcactgaactagtagcccaagtgttttgtatttgtttattgctgggaacattatgacatccgttgagcttagctgtaagaaaggaacgatccacgatggattttaggatcgtgactgggtctacaccttacctttgactcttcacattaacaaagaaactgatgttatgtaatggtgttaatatgaccgattgtgagcacttctaagaggattaatatttaatagcttccagcacagaaaacatgcgcagataacaaaagaaacttcatatcaatctcaacagaagctgc

SEQ ID NO: 34914 - DNA, 2775 bp, Zea Mays
tttttttccctctcaaacacacaggagagttgtgtatcattatattaatgagaaggagaaagatatctgatgccataagagatggcgctgaaggtttttttaggacacaatatggaactatttctaaaatggcatttattctggcctttgtcatccttggcatttatattttccgcactaccaccccacagcaggaggcatctggcttgggaagggcaacattagcctatattacagttgcctcttttctccttggagcgttatgttctggaatagctggttttgttggaatgtgggtgtccgtacgtgcaaatgtacgagtttcaagtgctgctcgtcgctctgcaagggaatcattgcagattgccgtccgtgctggtggtttctcagccattgtggttgtttgcatggctgtatttggcgtggcaatactgtactcaacattttatgtttggcttggagtagattcacctgggtcaatgaaggttaccgacttgcctcttctccttgtgggatatggttttggtgcctcttttgttgccctttttgctcagttgggtggtggaatatacacgaaagctgctgatgttggagctgatctggttggaaaagttgagcagggaataccagaagatgatcctcgtaacccagctgtcattgctgacttggttggtgacaatgttggagattgtgctgcccgaggcgctgatctttttgagagcatagcagcagaaattatcagtgcaatgatacttggaggaacaatggcacagcgctgtaaaattgaggatccgtctggctttattttgtttcctcttgttgtgcattcatttgatttggtggtgtcatcagtcggaattctctcaatcagaggaacacgtgactctgggctcatttcccctatcgaagatcccatggcaattatgcaaaaaggctactctgttactattatgcttgctgttcttacatttggagtgtctactcgttggctcctgtacacggaacaagcaccttctgcatggctaaattttgcattgtgtggcttggtggggatcatcacagcatatgcttttgtttggatttcgaagtattacacggattataaacacgagccggtccgccttttagctctttcaagttctacaggacatggaactaatattattgctggagtaagtttggggatggaatcaacagccctaccagttctagtgataagtgttgccattatatcatcctattggctggggcagacctctggcttggtggacgagtctggcaacccaactggtggtctttttgggacagctgtagcgacaatggggatgcttagcacagcagggtatgttctcaccatggacatgtttggtcctatagctgacaatgctggtggtattgttgagatgagccagcagcatgaaagtgtgagagaaatcacagatgttctagatgctgtgggcaacacaactaaagctactacaaaaggatttgccataggatcagcagcactggcatcattcctcctgtttagtgcatacatggacgaagtagcttcttttgctcaaatgccgttcaaggaggttgacatagcagtcccggagatttttgttggtggtttattaggctcgatgcttatattcctgtttagtgcatgggcttgttcagcagttggcaaaactgcacaggaagttgttaatgaggtcaggagacaatttatcgagaggcctggtattatggactacaaagagaagcccgattatggacgctgtgtcgcaattgtggcctctgcatccttaagagaaatgataaaacctggggctctagcaattatatcacccatggccgttggcgttgtcttccggattttgggccactccactggtcagcctcttcttggagctaaagttgtagcctccatgcttatgtttgcgacggttgctggtattcttatggcactcttcttgaacactgctggcggcgcctgggataatgcaaagaagtacattgagactggtgcccttggtggcaaaggcagtgagtcccataaggctgcggttacaggcgacacggttggagacccattcaaagacactgcaggaccatcgctgcacgttcttatcaagatgctcgccacgatcacactggtcatggctcccatattcttgtgattaaccaaccagatttatcaagcttgccattaaccctgcggagatgtatctatgcgacttgtagatgaggtgtttacctgcatgtgatgtaatgatccaatcggttttagtgtgactacatgttgtacccaaagaaagaaagaaagaaagcagcgatctgtacccaggttttaatggtccaatcggttttagtgtgactatatgttgtacccaaagaaagaaagaaatcagcgatctgtacccaggtttgacggtagatattattctgaatttctgacgggtagtgatggtgcaaatgccatattttgtgacggacgtcactgaactagtagcccaagtgttttgtatttgtttattgctgggaacattatgacatccgttgagcttagctgtaagaaaggaacgatccacgatggattttaggatcgtgactgggtctacaccttacctttgactcttcacattaacaaagaaactgatgttatgtaatggtgttaatatgaccgattgtgagcacttctaagaggattaatatttaatagcttccagcacagaaaacatgcgcagataacaaaagaaacttcatatcaatctcaacagaagctgc

SEQ ID NO: 34915 - DNA, 2746 bp, Zea Mays
gtcattttagactgtttgagacttgagaaagagttggctcacagcagttccaatgatttagtggaacatgtcccgtcggggcagaaattccatgctatgctctacaatatctgatgccataagagatggcgctgaaggtttttttaggacacaatatggaactatttctaaaatggcatttattctggcctttgtcatccttggcatttatattttccgcactaccaccccacagcaggaggcatctggcttgggaagggcaacattagcctatattacagttgcctcttttctccttggagcgttatgttctggaatagctggttttgttggaatgtgggtgtccgtacgtgcaaatgtacgagtttcaagtgctgctcgtcgctctgcaagggaatcattgcagattgccgtccgtgctggtggtttctcagccattgtggttgtttgcatggctgtatttggcgtggcaatactgtactcaacattttatgtttggcttggagtagattcacctgggtcaatgaaggttaccgacttgcctcttctccttgtgggatatggttttggtgcctcttttgttgccctttttgctcagttgggtggtggaatatacacgaaagctgctgatgttggagctgatctggttggaaaagttgagcagggaataccagaagatgatcctcgtaacccagctgtcattgctgacttggttggtgacaatgttggagattgtgctgcccgaggcgctgatctttttgagagcatagcagcagaaattatcagtgcaatgatacttggaggaacaatggcacagcgctgtaaaattgaggatccgtctggctttattttgtttcctcttgttgtgcattcatttgatttggtggtgtcatcagtcggaattctctcaatcagaggaacacgtgactctgggctcatttcccctatcgaagatcccatggcaattatgcaaaaaggctactctgttactattatgcttgctgttcttacatttggagtgtctactcgttggctcctgtacacggaacaagcaccttctgcatggctaaattttgcattgtgtggcttggtggggatcatcacagcatatgcttttgtttggatttcgaagtattacacggattataaacacgagccggtccgccttttagctctttcaagttctacaggacatggaactaatattattgctggagtaagtttggggatggaatcaacagccctaccagttctagtgataagtgttgccattatatcatcctattggctggggcagacctctggcttggtggacgagtctggcaacccaactggtggtctttttgggacagctgtagcgacaatggggatgcttagcacagcaggcatgaaagtgtgagagaaatcacagatgttctagatgctgtgggcaacacaactaaagctactacaaaaggatttgccataggatcagcagcactggcatcattcctcctgtttagtgcatacatggacgaagtagcttcttttgctcaaatgccgttcaaggaggttgacatagcagtcccggagatttttgttggtggtttattaggctcgatgcttatattcctgtttagtgcatgggcttgttcagcagttggcaaaactgcacaggaagttgttaatgaggtcaggagacaatttatcgagaggcctggtattatggactacaaagagaagcccgattatggacgctgtgtcgcaattgtggcctctgcatccttaagagaaatgataaaacctggggctctagcaattatatcacccatggccgttggcgttgtcttccggattttgggccactccactggtcagcctcttcttggagctaaagttgtagcctccatgcttatgtttgcgacggttgctggtattcttatggcactcttcttgaacactgctggcggcgcctgggataatgcaaagaagtacattgagactggtgcccttggtggcaaaggcagtgagtcccataaggctgcggttacaggcgacacggttggagacccattcaaagacactgcaggaccatcgctgcacgttcttatcaagatgctcgccacgatcacactggtcatggctcccatattcttgtgattaaccaaccagatttatcaagcttgccattaaccctgcggagatgtatctatgcgacttgtagatgaggtgtttacctgcatgtgatgtaatgatccaatcggttttagtgtgactacatgttgtacccaaagaaagaaagaaagaaagcagcgatctgtacccaggttttaatggtccaatcggttttagtgtgactatatgttgtacccaaagaaagaaagaaatcagcgatctgtacccaggtttgacggtagatattattctgaatttctgacgggtagtgatggtgcaaatgccatattttgtgacggacgtcactgaactagtagcccaagtgttttgtatttgtttattgctgggaacattatgacatccgttgagcttagctgtaagaaaggaacgatccacgatggattttaggatcgtgactgggtctacaccttacctttgactcttcacattaacaaagaaactgatgttatgtaatggtgttaatatgaccgattgtgagcacttctaagaggattaatatttaatagcttccagcacagaaaacatgcgcagataacaaaagaaacttcatatcaatctcaacagaagctgc

SEQ ID NO: 34916 - DNA, 3039 bp, Zea Mays
ccctctcccgtagccatgtcagacttgacggcaaaaggaccctttgaatcaaagagaagttcgtcactgaggctgaagaaaatctggatgtgtttacctttcagggcttactaattttgagaggtgtctgacatagactaaaaaaaaatcagcgccagggctcagggagcgacctaccccaaggtggggagttggttccttttccagtaataatgagggcaaattcatatcccatcatgatggaagaggacatggaaaatggaaggtcgtatcaagaaagaccaagggctttttcaacagtacgaagcaaatcatctgtaccgctgatatctgatgccataagagatggcgctgaaggtttttttaggacacaatatggaactatttctaaaatggcatttattctggcctttgtcatccttggcatttatattttccgcactaccaccccacagcaggaggcatctggcttgggaagggcaacattagcctatattacagttgcctcttttctccttggagcgttatgttctggaatagctggttttgttggaatgtgggtgtccgtacgtgcaaatgtacgagtttcaagtgctgctcgtcgctctgcaagggaatcattgcagattgccgtccgtgctggtggtttctcagccattgtggttgtttgcatggctgtatttggcgtggcaatactgtactcaacattttatgtttggcttggagtagattcacctgggtcaatgaaggttaccgacttgcctcttctccttgtgggatatggttttggtgcctcttttgttgccctttttgctcagttgggtggtggaatatacacgaaagctgctgatgttggagctgatctggttggaaaagttgagcagggaataccagaagatgatcctcgtaacccagctgtcattgctgacttggttggtgacaatgttggagattgtgctgcccgaggcgctgatctttttgagagcatagcagcagaaattatcagtgcaatgatacttggaggaacaatggcacagcgctgtaaaattgaggatccgtctggctttattttgtttcctcttgttgtgcattcatttgatttggtggtgtcatcagtcggaattctctcaatcagaggaacacgtgactctgggctcatttcccctatcgaagatcccatggcaattatgcaaaaaggctactctgttactattatgcttgctgttcttacatttggagtgtctactcgttggctcctgtacacggaacaagcaccttctgcatggctaaattttgcattgtgtggcttggtggggatcatcacagcatatgcttttgtttggatttcgaagtattacacggattataaacacgagccggtccgccttttagctctttcaagttctacaggacatggaactaatattattgctggagtaagtttggggatggaatcaacagccctaccagttctagtgataagtgttgccattatatcatcctattggctggggcagacctctggcttggtggacgagtctggcaacccaactggtggtctttttgggacagctgtagcgacaatggggatgcttagcacagcagggtatgttctcaccatggacatgtttggtcctatagctgacaatgctggtggtattgttgagatgagccagcagcatgaaagtgtgagagaaatcacagatgttctagatgctgtgggcaacacaactaaagctactacaaaaggatttgccataggatcagcagcactggcatcattcctcctgtttagtgcatacatggacgaagtagcttcttttgctcaaatgccgttcaaggaggttgacatagcagtcccggagatttttgttggtggtttattaggctcgatgcttatattcctgtttagtgcatgggcttgttcagcagttggcaaaactgcacaggaagttgttaatgaggtcaggagacaatttatcgagaggcctggtattatggactacaaagagaagcccgattatggacgctgtgtcgcaattgtggcctctgcatccttaagagaaatgataaaacctggggctctagcaattatatcacccatggccgttggcgttgtcttccggattttgggccactccactggtcagcctcttcttggagctaaagttgtagcctccatgcttatgtttgcgacggttgctggtattcttatggcactcttcttgaacactgctggcggcgcctgggataatgcaaagaagtacattgagactggtgcccttggtggcaaaggcagtgagtcccataaggctgcggttacaggcgacacggttggagacccattcaaagacactgcaggaccatcgctgcacgttcttatcaagatgctcgccacgatcacactggtcatggctcccatattcttgtgattaaccaaccagatttatcaagcttgccattaaccctgcggagatgtatctatgcgacttgtagatgaggtgtttacctgcatgtgatgtaatgatccaatcggttttagtgtgactacatgttgtacccaaagaaagaaagaaagaaagcagcgatctgtacccaggttttaatggtccaatcggttttagtgtgactatatgttgtacccaaagaaagaaagaaatcagcgatctgtacccaggtttgacggtagatattattctgaatttctgacgggtagtgatggtgcaaatgccatattttgtgacggacgtcactgaactagtagcccaagtgttttgtatttgtttattgctgggaacattatgacatccgttgagcttagctgtaagaaaggaacgatccacgatggattttaggatcgtgactgggtctacaccttacctttgactcttcacattaacaaagaaactgatgttatgtaatggtgttaatatgaccgattgtgagcacttctaagaggattaatatttaatagcttccagcacagaaaacatgcgcagataacaaaagaaacttcatatcaatctcaacagaagctgc

SEQ ID NO: 34917 - DNA, 3166 bp, Zea Mays
ctgctccctctcccgtagccatgtcagggcttactaattttgagaggtgtctgacatagactaaaaaaaaatcagcgccagggctcagggagcgacctaccccaaggtggggagttggttccttttccagtaataatgagggcaaattcatatcccatcatgatggaagaggacatggaaaatggaaggtcgtatcaagaaagaccaagggctttttcaacagtacgaagcaaatcatctgtaccgctggccttccgtttgttgatgagggtaaatccccgtgccgtgattattctttctcttttggtcttcagtggtgttttgtatgtgggagctagtacatcaccaattctggtctttgtgttctgtatatgtactctcagtctattcttctctgtctaccttacaaagtgggttcttgctaaggacgaaggacctccagaaatgtccgagatatctgatgccataagagatggcgctgaaggtttttttaggacacaatatggaactatttctaaaatggcatttattctggcctttgtcatccttggcatttatattttccgcactaccaccccacagcaggaggcatctggcttgggaagggcaacattagcctatattacagttgcctcttttctccttggagcgttatgttctggaatagctggttttgttggaatgtgggtgtccgtacgtgcaaatgtacgagtttcaagtgctgctcgtcgctctgcaagggaatcattgcagattgccgtccgtgctggtggtttctcagccattgtggttgtttgcatggctgtatttggcgtggcaatactgtactcaacattttatgtttggcttggagtagattcacctgggtcaatgaaggttaccgacttgcctcttctccttgtgggatatggttttggtgcctcttttgttgccctttttgctcagttgggtggtggaatatacacgaaagctgctgatgttggagctgatctggttggaaaagttgagcagggaataccagaagatgatcctcgtaacccagctgtcattgctgacttggttggtgacaatgttggagattgtgctgcccgaggcgctgatctttttgagagcatagcagcagaaattatcagtgcaatgatacttggaggaacaatggcacagcgctgtaaaattgaggatccgtctggctttattttgtttcctcttgttgtgcattcatttgatttggtggtgtcatcagtcggaattctctcaatcagaggaacacgtgactctgggctcatttcccctatcgaagatcccatggcaattatgcaaaaaggctactctgttactattatgcttgctgttcttacatttggagtgtctactcgttggctcctgtacacggaacaagcaccttctgcatggctaaattttgcattgtgtggcttggtggggatcatcacagcatatgcttttgtttggatttcgaagtattacacggattataaacacgagccggtccgccttttagctctttcaagttctacaggacatggaactaatattattgctggagtaagtttggggatggaatcaacagccctaccagttctagtgataagtgttgccattatatcatcctattggctggggcagacctctggcttggtggacgagtctggcaacccaactggtggtctttttgggacagctgtagcgacaatggggatgcttagcacagcagggtatgttctcaccatggacatgtttggtcctatagctgacaatgctggtggtattgttgagatgagccagcagcatgaaagtgtgagagaaatcacagatgttctagatgctgtgggcaacacaactaaagctactacaaaaggatttgccataggatcagcagcactggcatcattcctcctgtttagtgcatacatggacgaagtagcttcttttgctcaaatgccgttcaaggaggttgacatagcagtcccggagatttttgttggtggtttattaggctcgatgcttatattcctgtttagtgcatgggcttgttcagcagttggcaaaactgcacaggaagttgttaatgaggtcaggagacaatttatcgagaggcctggtattatggactacaaagagaagcccgattatggacgctgtgtcgcaattgtggcctctgcatccttaagagaaatgataaaacctggggctctagcaattatatcacccatggccgttggcgttgtcttccggattttgggccactccactggtcagcctcttcttggagctaaagttgtagcctccatgcttatgtttgcgacggttgctggtattcttatggcactcttcttgaacactgctggcggcgcctgggataatgcaaagaagtacattgagactggtgcccttggtggcaaaggcagtgagtcccataaggctgcggttacaggcgacacggttggagacccattcaaagacactgcaggaccatcgctgcacgttcttatcaagatgctcgccacgatcacactggtcatggctcccatattcttgtgattaaccaaccagatttatcaagcttgccattaaccctgcggagatgtatctatgcgacttgtagatgaggtgtttacctgcatgtgatgtaatgatccaatcggttttagtgtgactacatgttgtacccaaagaaagaaagaaagaaagcagcgatctgtacccaggttttaatggtccaatcggttttagtgtgactatatgttgtacccaaagaaagaaagaaatcagcgatctgtacccaggtttgacggtagatattattctgaatttctgacgggtagtgatggtgcaaatgccatattttgtgacggacgtcactgaactagtagcccaagtgttttgtatttgtttattgctgggaacattatgacatccgttgagcttagctgtaagaaaggaacgatccacgatggattttaggatcgtgactgggtctacaccttacctttgactcttcacattaacaaagaaactgatgttatgtaatggtgttaatatgaccgattgtgagcacttctaagaggattaatatttaatagcttccagcacagaaaacatgcgcagataacaaaagaaacttcatatcaatctcaacagaagctgc

SEQ ID NO: 34918 - DNA, 3249 bp, Zea Mays
cctgctccctctcccgtagccatgtcagacttgacggcaaaaggaccctttgaatcaaagagaagttcgtcactgaggctgaagaaaatctggatgtgtttacctttcagggcttactaattttgagaggtgtctgacatagactaaaaaaaaatcagcgccagggctcagggagcgacctaccccaaggtggggagttggttccttttccagtaataatgagggcaaattcatatcccatcatgatggaagaggacatggaaaatggaaggtcgtatcaagaaagaccaagggctttttcaacagtacgaagcaaatcatctgtaccgctggccttccgtttgttgatgagggtaaatccccgtgccgtgattattctttctcttttggtcttcagtggtgttttgtatgtgggagctagtacatcaccaattctggtctttgtgttctgtatatgtactctcagtctattcttctctgtctaccttacaaagtgggttcttgctaaggacgaaggacctccagaaatgtccgagatatctgatgccataagagatggcgctgaaggtttttttaggacacaatatggaactatttctaaaatggcatttattctggcctttgtcatccttggcatttatattttccgcactaccaccccacagcaggaggcatctggcttgggaagggcaacattagcctatattacagttgcctcttttctccttggagcgttatgttctggaatagctggttttgttggaatgtgggtgtccgtacgtgcaaatgtacgagtttcaagtgctgctcgtcgctctgcaagggaatcattgcagattgccgtccgtgctggtggtttctcagccattgtggttgtttgcatggctgtatttggcgtggcaatactgtactcaacattttatgtttggcttggagtagattcacctgggtcaatgaaggttaccgacttgcctcttctccttgtgggatatggttttggtgcctcttttgttgccctttttgctcagttgggtggtggaatatacacgaaagctgctgatgttggagctgatctggttggaaaagttgagcagggaataccagaagatgatcctcgtaacccagctgtcattgctgacttggttggtgacaatgttggagattgtgctgcccgaggcgctgatctttttgagagcatagcagcagaaattatcagtgcaatgatacttggaggaacaatggcacagcgctgtaaaattgaggatccgtctggctttattttgtttcctcttgttgtgcattcatttgatttggtggtgtcatcagtcggaattctctcaatcagaggaacacgtgactctgggctcatttcccctatcgaagatcccatggcaattatgcaaaaaggctactctgttactattatgcttgctgttcttacatttggagtgtctactcgttggctcctgtacacggaacaagcaccttctgcatggctaaattttgcattgtgtggcttggtggggatcatcacagcatatgcttttgtttggatttcgaagtattacacggattataaacacgagccggtccgccttttagctctttcaagttctacaggacatggaactaatattattgctggagtaagtttggggatggaatcaacagccctaccagttctagtgataagtgttgccattatatcatcctattggctggggcagacctctggcttggtggacgagtctggcaacccaactggtggtctttttgggacagctgtagcgacaatggggatgcttagcacagcagggtatgttctcaccatggacatgtttggtcctatagctgacaatgctggtggtattgttgagatgagccagcagcatgaaagtgtgagagaaatcacagatgttctagatgctgtgggcaacacaactaaagctactacaaaaggatttgccataggatcagcagcactggcatcattcctcctgtttagtgcatacatggacgaagtagcttcttttgctcaaatgccgttcaaggaggttgacatagcagtcccggagatttttgttggtggtttattaggctcgatgcttatattcctgtttagtgcatgggcttgttcagcagttggcaaaactgcacaggaagttgttaatgaggtcaggagacaatttatcgagaggcctggtattatggactacaaagagaagcccgattatggacgctgtgtcgcaattgtggcctctgcatccttaagagaaatgataaaacctggggctctagcaattatatcacccatggccgttggcgttgtcttccggattttgggccactccactggtcagcctcttcttggagctaaagttgtagcctccatgcttatgtttgcgacggttgctggtattcttatggcactcttcttgaacactgctggcggcgcctgggataatgcaaagaagtacattgagactggtgcccttggtggcaaaggcagtgagtcccataaggctgcggttacaggcgacacggttggagacccattcaaagacactgcaggaccatcgctgcacgttcttatcaagatgctcgccacgatcacactggtcatggctcccatattcttgtgattaaccaaccagatttatcaagcttgccattaaccctgcggagatgtatctatgcgacttgtagatgaggtgtttacctgcatgtgatgtaatgatccaatcggttttagtgtgactacatgttgtacccaaagaaagaaagaaagaaagcagcgatctgtacccaggttttaatggtccaatcggttttagtgtgactatatgttgtacccaaagaaagaaagaaatcagcgatctgtacccaggtttgacggtagatattattctgaatttctgacgggtagtgatggtgcaaatgccatattttgtgacggacgtcactgaactagtagcccaagtgttttgtatttgtttattgctgggaacattatgacatccgttgagcttagctgtaagaaaggaacgatccacgatggattttaggatcgtgactgggtctacaccttacctttgactcttcacattaacaaagaaactgatgttatgtaatggtgttaatatgaccgattgtgagcacttctaagaggattaatatttaatagcttccagcacagaaaacatgcgcagataacaaaagaaacttcatatcaatctcaacagaagctgc

SEQ ID NO: 34919 - DNA, 3483 bp, Zea Mays
tctccctcgcctcgcagatccgcggcctgctttgttgctgctttgccagcaagctgccgcgctcatcctcgcgcgacgccagcggcggggtggcccctctccagtgacccggcgactgctcccgtcggtgccgccgccgcctcctcctccgagatccattcccgtgcccgcggcaaggaccagatccatcaccgcgccacgagctacagcaggcgacatccgccccggggtcgcacgccgcctgctagccgcggacgtcccgggagccccgttcgcagacgcctgcacgcgcgcggcgcgcaacgagctccgccacctgccgtcgtgaagcagcgacttgacggcaaaaggaccctttgaatcaaagagaagttcgtcactgaggctgaagaaaatctggatgtgtttacctttcagggcttactaattttgagaggtgtctgacatagactaaaaaaaaatcagcgccagggctcagggagcgacctaccccaaggtggggagttggttccttttccagtaataatgagggcaaattcatatcccatcatgatggaagaggacatggaaaatggaaggtcgtatcaagaaagaccaagggctttttcaacagtacgaagcaaatcatctgtaccgctggccttccgtttgttgatgagggtaaatccccgtgccgtgattattctttctcttttggtcttcagtggtgttttgtatgtgggagctagtacatcaccaattctggtctttgtgttctgtatatgtactctcagtctattcttctctgtctaccttacaaagtgggttcttgctaaggacgaaggacctccagaaatgtccgagatatctgatgccataagagatggcgctgaaggtttttttaggacacaatatggaactatttctaaaatggcatttattctggcctttgtcatccttggcatttatattttccgcactaccaccccacagcaggaggcatctggcttgggaagggcaacattagcctatattacagttgcctcttttctccttggagcgttatgttctggaatagctggttttgttggaatgtgggtgtccgtacgtgcaaatgtacgagtttcaagtgctgctcgtcgctctgcaagggaatcattgcagattgccgtccgtgctggtggtttctcagccattgtggttgtttgcatggctgtatttggcgtggcaatactgtactcaacattttatgtttggcttggagtagattcacctgggtcaatgaaggttaccgacttgcctcttctccttgtgggatatggttttggtgcctcttttgttgccctttttgctcagttgggtggtggaatatacacgaaagctgctgatgttggagctgatctggttggaaaagttgagcagggaataccagaagatgatcctcgtaacccagctgtcattgctgacttggttggtgacaatgttggagattgtgctgcccgaggcgctgatctttttgagagcatagcagcagaaattatcagtgcaatgatacttggaggaacaatggcacagcgctgtaaaattgaggatccgtctggctttattttgtttcctcttgttgtgcattcatttgatttggtggtgtcatcagtcggaattctctcaatcagaggaacacgtgactctgggctcatttcccctatcgaagatcccatggcaattatgcaaaaaggctactctgttactattatgcttgctgttcttacatttggagtgtctactcgttggctcctgtacacggaacaagcaccttctgcatggctaaattttgcattgtgtggcttggtggggatcatcacagcatatgcttttgtttggatttcgaagtattacacggattataaacacgagccggtccgccttttagctctttcaagttctacaggacatggaactaatattattgctggagtaagtttggggatggaatcaacagccctaccagttctagtgataagtgttgccattatatcatcctattggctggggcagacctctggcttggtggacgagtctggcaacccaactggtggtctttttgggacagctgtagcgacaatggggatgcttagcacagcaggcatgaaagtgtgagagaaatcacagatgttctagatgctgtgggcaacacaactaaagctactacaaaaggatttgccataggatcagcagcactggcatcattcctcctgtttagtgcatacatggacgaagtagcttcttttgctcaaatgccgttcaaggaggttgacatagcagtcccggagatttttgttggtggtttattaggctcgatgcttatattcctgtttagtgcatgggcttgttcagcagttggcaaaactgcacaggaagttgttaatgaggtcaggagacaatttatcgagaggcctggtattatggactacaaagagaagcccgattatggacgctgtgtcgcaattgtggcctctgcatccttaagagaaatgataaaacctggggctctagcaattatatcacccatggccgttggcgttgtcttccggattttgggccactccactggtcagcctcttcttggagctaaagttgtagcctccatgcttatgtttgcgacggttgctggtattcttatggcactcttcttgaacactgctggcggcgcctgggataatgcaaagaagtacattgagactggtgcccttggtggcaaaggcagtgagtcccataaggctgcggttacaggcgacacggttggagacccattcaaagacactgcaggaccatcgctgcacgttcttatcaagatgctcgccacgatcacactggtcatggctcccatattcttgtgattaaccaaccagatttatcaagcttgccattaaccctgcggagatgtatctatgcgacttgtagatgaggtgtttacctgcatgtgatgtaatgatccaatcggttttagtgtgactacatgttgtacccaaagaaagaaagaaagaaagcagcgatctgtacccaggttttaatggtccaatcggttttagtgtgactatatgttgtacccaaagaaagaaagaaatcagcgatctgtacccaggtttgacggtagatattattctgaatttctgacgggtagtgatggtgcaaatgccatattttgtgacggacgtcactgaactagtagcccaagtgttttgtatttgtttattgctgggaacattatgacatccgttgagcttagctgtaagaaaggaacgatccacgatggattttaggatcgtgactgggtctacaccttacctttgactcttcacattaacaaagaaactgatgttatgtaatggtgttaatatgaccgattgtgagcacttctaagaggattaatatttaatagcttccagcacagaaaacatgcgcagataacaaaagaaacttcatatcaatctcaacagaagctgc

SEQ ID NO: 34920 - DNA, 3493 bp, Zea Mays
tctccctcgcctcgcagatccgcggcctgctttgttgctgctttgccagcaagctgccgcgctcatcctcgcgcgacgccagcggcggggtggcccctctccagtgacccggcgactgctcccgtcggtgccgccgccgcctcctcctccgagatccattcccgtgcccgcggcaaggaccagatccatcaccgcgccacgagctacagcaggcgacatccgccccggggtcgcacgccgcctgctagccgcggacgtcccgggagccccgttcgcagacgcctgcacgcgcgcggcgcgcaacgagctccgccacctgccgtcgtgaagcagcgacttgacggcaaaaggaccctttgaatcaaagagaagttcgtcactgaggctgaagaaaatctggatgtgtttacctttcagggcttactaattttgagaggtgtctgacatagactaaaaaaaaatcagcgccagggctcagggagcgacctaccccaaggtggggagttggttccttttccagtaataatgagggcaaattcatatcccatcatgatggaagaggacatggaaaatggaaggtcgtatcaagaaagaccaagggctttttcaacagtacgaagcaaatcatctgtaccgctggccttccgtttgttgatgagggtaaatccccgtgccgtgattattctttctcttttggtcttcagtggtgttttgtatgtgggagctagtacatcaccaattctggtctttgtgttctgtatatgtactctcagtctattcttctctgtctaccttacaaagtgggttcttgctaaggacgaaggacctccagaaatgtccgagatatctgatgccataagagatggcgctgaaggtttttttaggacacaatatggaactatttctaaaatggcatttattctggcctttgtcatccttggcatttatattttccgcactaccaccccacagcaggaggcatctggcttgggaagggcaacattagcctatattacagttgcctcttttctccttggagcgttatgttctggaatagctggttttgttggaatgtgggtgtccgtacgtgcaaatgtacgagtttcaagtgctgctcgtcgctctgcaagggaatcattgcagattgccgtccgtgctggtggtttctcagccattgtggttgtttgcatggctgtatttggcgtggcaatactgtactcaacattttatgtttggcttggagtagattcacctgggtcaatgaaggttaccgacttgcctcttctccttgtgggatatggttttggtgcctcttttgttgccctttttgctcagttgggtggtggaatatacacgaaagctgctgatgttggagctgatctggttggaaaagttgagcagggaataccagaagatgatcctcgtaacccagctgtcattgctgacttggttggtgacaatgttggagattgtgctgcccgaggcgctgatctttttgagagcatagcagcagaaattatcagtgcaatgatacttggaggaacaatggcacagcgctgtaaaattgaggtcggaattctctcaatcagaggaacacgtgactctgggctcatttcccctatcgaagatcccatggcaattatgcaaaaaggctactctgttactattatgcttgctgttcttacatttggagtgtctactcgttggctcctgtacacggaacaagcaccttctgcatggctaaattttgcattgtgtggcttggtggggatcatcacagcatatgcttttgtttggatttcgaagtattacacggattataaacacgagccggtccgccttttagctctttcaagttctacaggacatggaactaatattattgctggagtaagtttggggatggaatcaacagccctaccagttctagtgataagtgttgccattatatcatcctattggctggggcagacctctggcttggtggacgagtctggcaacccaactggtggtctttttgggacagctgtagcgacaatggggatgcttagcacagcagggtatgttctcaccatggacatgtttggtcctatagctgacaatgctggtggtattgttgagatgagccagcagcatgaaagtgtgagagaaatcacagatgttctagatgctgtgggcaacacaactaaagctactacaaaaggatttgccataggatcagcagcactggcatcattcctcctgtttagtgcatacatggacgaagtagcttcttttgctcaaatgccgttcaaggaggttgacatagcagtcccggagatttttgttggtggtttattaggctcgatgcttatattcctgtttagtgcatgggcttgttcagcagttggcaaaactgcacaggaagttgttaatgaggtcaggagacaatttatcgagaggcctggtattatggactacaaagagaagcccgattatggacgctgtgtcgcaattgtggcctctgcatccttaagagaaatgataaaacctggggctctagcaattatatcacccatggccgttggcgttgtcttccggattttgggccactccactggtcagcctcttcttggagctaaagttgtagcctccatgcttatgtttgcgacggttgctggtattcttatggcactcttcttgaacactgctggcggcgcctgggataatgcaaagaagtacattgagactggtgcccttggtggcaaaggcagtgagtcccataaggctgcggttacaggcgacacggttggagacccattcaaagacactgcaggaccatcgctgcacgttcttatcaagatgctcgccacgatcacactggtcatggctcccatattcttgtgattaaccaaccagatttatcaagcttgccattaaccctgcggagatgtatctatgcgacttgtagatgaggtgtttacctgcatgtgatgtaatgatccaatcggttttagtgtgactacatgttgtacccaaagaaagaaagaaagaaagcagcgatctgtacccaggttttaatggtccaatcggttttagtgtgactatatgttgtacccaaagaaagaaagaaatcagcgatctgtacccaggtttgacggtagatattattctgaatttctgacgggtagtgatggtgcaaatgccatattttgtgacggacgtcactgaactagtagcccaagtgttttgtatttgtttattgctgggaacattatgacatccgttgagcttagctgtaagaaaggaacgatccacgatggattttaggatcgtgactgggtctacaccttacctttgactcttcacattaacaaagaaactgatgttatgtaatggtgttaatatgaccgattgtgagcacttctaagaggattaatatttaatagcttccagcacagaaaacatgcgcagataacaaaagaaacttcatatcaatctcaacagaagctgc

SEQ ID NO: 34921 - DNA, 3584 bp, Zea Mays
tctgtttgtgtgcgtgtctcggagaagctctccctcgcctcgcagatccgcggcctgctttgttgctgctttgccagcaagctgccgcgctcatcctcgcgcgacgccagcggcggggtggcccctctccagtgacccggcgactgctcccgtcggtgccgccgccgcctcctcctccgagatccattcccgtgcccgcggcaaggaccagatccatcaccgcgccacgagctacagcaggcgacatccgccccggggtcgcacgccgcctgctagccgcggacgtcccgggagccccgttcgcagacgcctgcacgcgcgcggcgcgcaacgagctccgccacctgccgtcgtgaagcagcgacttgacggcaaaaggaccctttgaatcaaagagaagttcgtcactgaggctgaagaaaatctggatgtgtttacctttcagggcttactaattttgagaggtgtctgacatagactaaaaaaaaatcagcgccagggctcagggagcgacctaccccaaggtggggagttggttccttttccagtaataatgagggcaaattcatatcccatcatgatggaagaggacatggaaaatggaaggtcgtatcaagaaagaccaagggctttttcaacagtacgaagcaaatcatctgtaccgctggccttccgtttgttgatgagggtaaatccccgtgccgtgattattctttctcttttggtcttcagtggtgttttgtatgtgggagctagtacatcaccaattctggtctttgtgttctgtatatgtactctcagtctattcttctctgtctaccttacaaagtgggttcttgctaaggacgaaggacctccagaaatgtccgagatatctgatgccataagagatggcgctgaaggtttttttaggacacaatatggaactatttctaaaatggcatttattctggcctttgtcatccttggcatttatattttccgcactaccaccccacagcaggaggcatctggcttgggaagggcaacattagcctatattacagttgcctcttttctccttggagcgttatgttctggaatagctggttttgttggaatgtgggtgtccgtacgtgcaaatgtacgagtttcaagtgctgctcgtcgctctgcaagggaatcattgcagattgccgtccgtgctggtggtttctcagccattgtggttgtttgcatggctgtatttggcgtggcaatactgtactcaacattttatgtttggcttggagtagattcacctgggtcaatgaaggttaccgacttgcctcttctccttgtgggatatggttttggtgcctcttttgttgccctttttgctcagttgggtggtggaatatacacgaaagctgctgatgttggagctgatctggttggaaaagttgagcagggaataccagaagatgatcctcgtaacccagctgtcattgctgacttggttggtgacaatgttggagattgtgctgcccgaggcgctgatctttttgagagcatagcagcagaaattatcagtgcaatgatacttggaggaacaatggcacagcgctgtaaaattgaggatccgtctggctttattttgtttcctcttgttgtgcattcatttgatttggtggtgtcatcagtcggaattctctcaatcagaggaacacgtgactctgggctcatttcccctatcgaagatcccatggcaattatgcaaaaaggctactctgttactattatgcttgctgttcttacatttggagtgtctactcgttggctcctgtacacggaacaagcaccttctgcatggctaaattttgcattgtgtggcttggtggggatcatcacagcatatgcttttgtttggatttcgaagtattacacggattataaacacgagccggtccgccttttagctctttcaagttctacaggacatggaactaatattattgctggagtaagtttggggatggaatcaacagccctaccagttctagtgataagtgttgccattatatcatcctattggctggggcagacctctggcttggtggacgagtctggcaacccaactggtggtctttttgggacagctgtagcgacaatggggatgcttagcacagcagggtatgttctcaccatggacatgtttggtcctatagctgacaatgctggtggtattgttgagatgagccagcagcatgaaagtgtgagagaaatcacagatgttctagatgctgtgggcaacacaactaaagctactacaaaaggatttgccataggatcagcagcactggcatcattcctcctgtttagtgcatacatggacgaagtagcttcttttgctcaaatgccgttcaaggaggttgacatagcagtcccggagatttttgttggtggtttattaggctcgatgcttatattcctgtttagtgcatgggcttgttcagcagttggcaaaactgcacaggaagttgttaatgaggtcaggagacaatttatcgagaggcctggtattatggactacaaagagaagcccgattatggacgctgtgtcgcaattgtggcctctgcatccttaagagaaatgataaaacctggggctctagcaattatatcacccatggccgttggcgttgtcttccggattttgggccactccactggtcagcctcttcttggagctaaagttgtagcctccatgcttatgtttgcgacggttgctggtattcttatggcactcttcttgaacactgctggcggcgcctgggataatgcaaagaagtacattgagactggtgcccttggtggcaaaggcagtgagtcccataaggctgcggttacaggcgacacggttggagacccattcaaagacactgcaggaccatcgctgcacgttcttatcaagatgctcgccacgatcacactggtcatggctcccatattcttgtgattaaccaaccagatttatcaagcttgccattaaccctgcggagatgtatctatgcgacttgtagatgaggtgtttacctgcatgtgatgtaatgatccaatcggttttagtgtgactacatgttgtacccaaagaaagaaagaaagaaagcagcgatctgtacccaggttttaatggtccaatcggttttagtgtgactatatgttgtacccaaagaaagaaagaaatcagcgatctgtacccaggtttgacggtagatattattctgaatttctgacgggtagtgatggtgcaaatgccatattttgtgacggacgtcactgaactagtagcccaagtgttttgtatttgtttattgctgggaacattatgacatccgttgagcttagctgtaagaaaggaacgatccacgatggattttaggatcgtgactgggtctacaccttacctttgactcttcacattaacaaagaaactgatgttatgtaatggtgttaatatgaccgattgtgagcacttctaagaggattaatatttaatagcttccagcacagaaaacatgcgcagataacaaaagaaacttcatatcaatctcaacagaagctgc

SEQ ID NO: 34922 - DNA, 3505 bp, Zea Mays
gtttctgtttgtgtgcgtgtctcggagaagctctccctcgcctcgcagatccgcggcctgctttgttgctgctttgccagcaagctgccgcgctcatcctcgcgcgacgccagcggcggggtggcccctctccagtgacccggcgactgctcccgtcggtgccgccgccgcctcctcctccgagatccattcccgtgcccgcggcaaggaccagatccatcaccgcgccacgagctacagcaggcgacatccgccccggggtcgcacgccgcctgctagccgcggacgtcccgggagccccgttcgcagacgcctgcacgcgcgcggcgcgcaacgagctccgccacctgccgtcgtgaagcagcgggcttactaattttgagaggtgtctgacatagactaaaaaaaaatcagcgccagggctcagggagcgacctaccccaaggtggggagttggttccttttccagtaataatgagggcaaattcatatcccatcatgatggaagaggacatggaaaatggaaggtcgtatcaagaaagaccaagggctttttcaacagtacgaagcaaatcatctgtaccgctggccttccgtttgttgatgagggtaaatccccgtgccgtgattattctttctcttttggtcttcagtggtgttttgtatgtgggagctagtacatcaccaattctggtctttgtgttctgtatatgtactctcagtctattcttctctgtctaccttacaaagtgggttcttgctaaggacgaaggacctccagaaatgtccgagatatctgatgccataagagatggcgctgaaggtttttttaggacacaatatggaactatttctaaaatggcatttattctggcctttgtcatccttggcatttatattttccgcactaccaccccacagcaggaggcatctggcttgggaagggcaacattagcctatattacagttgcctcttttctccttggagcgttatgttctggaatagctggttttgttggaatgtgggtgtccgtacgtgcaaatgtacgagtttcaagtgctgctcgtcgctctgcaagggaatcattgcagattgccgtccgtgctggtggtttctcagccattgtggttgtttgcatggctgtatttggcgtggcaatactgtactcaacattttatgtttggcttggagtagattcacctgggtcaatgaaggttaccgacttgcctcttctccttgtgggatatggttttggtgcctcttttgttgccctttttgctcagttgggtggtggaatatacacgaaagctgctgatgttggagctgatctggttggaaaagttgagcagggaataccagaagatgatcctcgtaacccagctgtcattgctgacttggttggtgacaatgttggagattgtgctgcccgaggcgctgatctttttgagagcatagcagcagaaattatcagtgcaatgatacttggaggaacaatggcacagcgctgtaaaattgaggatccgtctggctttattttgtttcctcttgttgtgcattcatttgatttggtggtgtcatcagtcggaattctctcaatcagaggaacacgtgactctgggctcatttcccctatcgaagatcccatggcaattatgcaaaaaggctactctgttactattatgcttgctgttcttacatttggagtgtctactcgttggctcctgtacacggaacaagcaccttctgcatggctaaattttgcattgtgtggcttggtggggatcatcacagcatatgcttttgtttggatttcgaagtattacacggattataaacacgagccggtccgccttttagctctttcaagttctacaggacatggaactaatattattgctggagtaagtttggggatggaatcaacagccctaccagttctagtgataagtgttgccattatatcatcctattggctggggcagacctctggcttggtggacgagtctggcaacccaactggtggtctttttgggacagctgtagcgacaatggggatgcttagcacagcagggtatgttctcaccatggacatgtttggtcctatagctgacaatgctggtggtattgttgagatgagccagcagcatgaaagtgtgagagaaatcacagatgttctagatgctgtgggcaacacaactaaagctactacaaaaggatttgccataggatcagcagcactggcatcattcctcctgtttagtgcatacatggacgaagtagcttcttttgctcaaatgccgttcaaggaggttgacatagcagtcccggagatttttgttggtggtttattaggctcgatgcttatattcctgtttagtgcatgggcttgttcagcagttggcaaaactgcacaggaagttgttaatgaggtcaggagacaatttatcgagaggcctggtattatggactacaaagagaagcccgattatggacgctgtgtcgcaattgtggcctctgcatccttaagagaaatgataaaacctggggctctagcaattatatcacccatggccgttggcgttgtcttccggattttgggccactccactggtcagcctcttcttggagctaaagttgtagcctccatgcttatgtttgcgacggttgctggtattcttatggcactcttcttgaacactgctggcggcgcctgggataatgcaaagaagtacattgagactggtgcccttggtggcaaaggcagtgagtcccataaggctgcggttacaggcgacacggttggagacccattcaaagacactgcaggaccatcgctgcacgttcttatcaagatgctcgccacgatcacactggtcatggctcccatattcttgtgattaaccaaccagatttatcaagcttgccattaaccctgcggagatgtatctatgcgacttgtagatgaggtgtttacctgcatgtgatgtaatgatccaatcggttttagtgtgactacatgttgtacccaaagaaagaaagaaagaaagcagcgatctgtacccaggttttaatggtccaatcggttttagtgtgactatatgttgtacccaaagaaagaaagaaatcagcgatctgtacccaggtttgacggtagatattattctgaatttctgacgggtagtgatggtgcaaatgccatattttgtgacggacgtcactgaactagtagcccaagtgttttgtatttgtttattgctgggaacattatgacatccgttgagcttagctgtaagaaaggaacgatccacgatggattttaggatcgtgactgggtctacaccttacctttgactcttcacattaacaaagaaactgatgttatgtaatggtgttaatatgaccgattgtgagcacttctaagaggattaatatttaatagcttccagcacagaaaacatgcgcagataacaaaagaaacttcatatcaatctcaacagaagctgc

SEQ ID NO: 34923 - DNA, 3594 bp, Zea Mays
tggagatgcctgctgcctccgtttctgtttgtgtgcgtgtctcggagaagctctccctcgcctcgcagatccgcggcctgctttgttgctgctttgccagcaagctgccgcgctcatcctcgcgcgacgccagcggcggggtggcccctctccagtgacccggcgactgctcccgtcggtgccgccgccgcctcctcctccgagatccattcccgtgcccgcggcaaggaccagatccatcaccgcgccacgagctacagcaggcgacatccgccccggggtcgcacgccgcctgctagccgcggacgtcccgggagccccgttcgcagacgcctgcacgcgcgcggcgcgcaacgagctccgccacctgccgtccttcgtgctaatatcatcttgtagacttgacggcaaaaggaccctttgaatcaaagagaagttcgtcactgaggctgaagaaaatctggatgtgtttacctttcagggcttactaattttgagaggtgtctgacatagactaaaaaaaaatcagcgccagggctcagggagcgacctaccccaaggtggggagttggttccttttccagtaataatgagggcaaattcatatcccatcatgatggaagaggacatggaaaatggaaggtcgtatcaagaaagaccaagggctttttcaacagtacgaagcaaatcatctgtaccgctggccttccgtttgttgatgagggtaaatccccgtgccgtgattattctttctcttttggtcttcagtggtgttttgtatgtgggagctagtacatcaccaattctggtctttgtgttctgtatatgtactctcagtctattcttctctgtctaccttacaaagtgggttcttgctaaggacgaaggacctccagaaatgtccgagatatctgatgccataagagatggcgctgaaggtttttttaggacacaatatggaactatttctaaaatggcatttattctggcctttgtcatccttggcatttatattttccgcactaccaccccacagcaggaggcatctggcttgggaagggcaacattagcctatattacagttgcctcttttctccttggagcgttatgttctggaatagctggttttgttggaatgtgggtgtccgtacgtgcaaatgtacgagtttcaagtgctgctcgtcgctctgcaagggaatcattgcagattgccgtccgtgctggtggtttctcagccattgtggttgtttgcatggctgtatttggcgtggcaatactgtactcaacattttatgtttggcttggagtagattcacctgggtcaatgaaggttaccgacttgcctcttctccttgtgggatatggttttggtgcctcttttgttgccctttttgctcagttgggtggtggaatatacacgaaagctgctgatgttggagctgatctggttggaaaagttgagcagggaataccagaagatgatcctcgttggtgacaatgttggagattgtgctgcccgaggcgctgatctttttgagagcatagcagcagaaattatcagtgcaatgatacttggaggaacaatggcacagcgctgtaaaattgaggatccgtctggctttattttgtttcctcttgttgtgcattcatttgatttggtggtgtcatcagtcggaattctctcaatcagaggaacacgtgactctgggctcatttcccctatcgaagatcccatggcaattatgcaaaaaggctactctgttactattatgcttgctgttcttacatttggagtgtctactcgttggctcctgtacacggaacaagcaccttctgcatggctaaattttgcattgtgtggcttggtggggatcatcacagcatatgcttttgtttggatttcgaagtattacacggattataaacacgagccggtccgccttttagctctttcaagttctacaggacatggaactaatattattgctggagtaagtttggggatggaatcaacagccctaccagttctagtgataagtgttgccattatatcatcctattggctggggcagacctctggcttggtggacgagtctggcaacccaactggtggtctttttgggacagctgtagcgacaatggggatgcttagcacagcagggtatgttctcaccatggacatgtttggtcctatagctgacaatgctggtggtattgttgagatgagccagcagcatgaaagtgtgagagaaatcacagatgttctagatgctgtgggcaacacaactaaagctactacaaaaggatttgccataggatcagcagcactggcatcattcctcctgtttagtgcatacatggacgaagtagcttcttttgctcaaatgccgttcaaggaggttgacatagcagtcccggagatttttgttggtggtttattaggctcgatgcttatattcctgtttagtgcatgggcttgttcagcagttggcaaaactgcacaggaagttgttaatgaggtcaggagacaatttatcgagaggcctggtattatggactacaaagagaagcccgattatggacgctgtgtcgcaattgtggcctctgcatccttaagagaaatgataaaacctggggctctagcaattatatcacccatggccgttggcgttgtcttccggattttgggccactccactggtcagcctcttcttggagctaaagttgtagcctccatgcttatgtttgcgacggttgctggtattcttatggcactcttcttgaacactgctggcggcgcctgggataatgcaaagaagtacattgagactggtgcccttggtggcaaaggcagtgagtcccataaggctgcggttacaggcgacacggttggagacccattcaaagacactgcaggaccatcgctgcacgttcttatcaagatgctcgccacgatcacactggtcatggctcccatattcttgtgattaaccaaccagatttatcaagcttgccattaaccctgcggagatgtatctatgcgacttgtagatgaggtgtttacctgcatgtgatgtaatgatccaatcggttttagtgtgactacatgttgtacccaaagaaagaaagaaagaaagcagcgatctgtacccaggttttaatggtccaatcggttttagtgtgactatatgttgtacccaaagaaagaaagaaatcagcgatctgtacccaggtttgacggtagatattattctgaatttctgacgggtagtgatggtgcaaatgccatattttgtgacggacgtcactgaactagtagcccaagtgttttgtatttgtttattgctgggaacattatgacatccgttgagcttagctgtaagaaaggaacgatccacgatggattttaggatcgtgactgggtctacaccttacctttgactcttcacattaacaaagaaactgatgttatgtaatggtgttaatatgaccgattgtgagcacttctaagaggattaatatttaatagcttccagcacagaaaacatgcgcagataacaaaagaaacttcatatcaatctcaacagaagctgc

SEQ ID NO: 34924 - DNA, 4313 bp, Zea Mays
gtggcccatgaatcttccaagggaccatggcatcgcatgaggggagtggtggtggttaggcatgccaacaaaaacctgcaactaattccagagagaaagagagaagagatggacagagatcgagaggtcttttatttatttgcaagaaaaaaatgtcaagaagtacataggaaaaaagaagaagacctcatcaacaagatactattttgggtttggtttagtttgagttgtatgtggagcatatggatgggagagtgaatatatccagcccacagccggccgatcatgcatgcaagcaagcaagaggcggccatgaaaagatggacagcagttccacccttgaagcaaaattaagacccaaccattcggcactcgtgttgtagccacagcatacatatcttgcaagcaatgcaagcaacaagttctcagctgtctaatcatcggattcgcacctgcaagttcactagtgctatatacatataggagtatgcatgctttgatcgaacaaaaaaagagagaggagtgatcataattcagaactactacttgccttgctacatggtagatgacgcatgtgttggtcacttgtgtttttggctcctaaaggtcatgttcagttctacccaatccatatatattgaggggttttaatacttagtaagtcaaaatctctttcgatccatatcaatctccttcaatccatatggattggaaataaccgaacaagctctaaaggggcaccaggacaaggcaacacaactaaatcgagctttatattcatcctatagttcttccttttggaagaaaacattgattaaaggatgaaaatgtaaaaaccggatgaaggaaaagtagaggatattaaggacaaattatgcataatgtgaaagtaaagcacacggtttaaaccttataagatgttgtttcctccttccttcttattatttaacaaaagattatatatataccttcgacttcgtgaagttacaggatgaaggtagagatataataatacagcttcgtaggcatatatagcgatttatttctctccatctcaagaacgtgtgtccaacgaacgcatggtactatttagctatttataatcgtgagttacagcttcttcgtcaaaattacaatcgtacactcgaacgcacatacaattgagctagcaaatatattaggatactgcagtcaatttctatagctgtcttgttgacctctcatggttttggcttgttcacccctcatgtgcacatgctgttactccgaagcttgcgcttttgtattcgttgttgcattgcaaccatccccgccgaaggtgagccgaaggtaatcttgggtattctacctgcaacacttattaattcaagctacaaaacagttgtcgagttagttttttttttaccttcgaaaagaagacttccggcaatgcacaacttcccatctgcattatcgtgagcaggattgtaggcacacagtgatgacgaagacagagacagcaatatacacaaccgaaccaagagagaagcaaaggcataataataaaaaaagagagaggaaactagatcgacaaggccattattatcacggataattaatcaacgtcgtcaacggcggaaataagctagcttgactggtggtctctggcgagtgcagcatggatatgaattgcaggagggtgagctagctagggttttcgatgtgcggccaccagcagatgaaactacagcatgacctggtcctggtgctcattaattaccctctctctctctcccttcccctctcatcttggattcgtcgatccatatatgacagtcagggacgggggagagagagagagtgacaggggccggtagtagtatagattacatccatcttacatataccaccaccatcataaccagatcatgctggcagcttcaccaactcgtggtgcaccactacataccctctcgtctgatccaaacggaggaaggaggaagaagagctagctatccgagagagagggagagggtagagagatggagagagcgaggaatgaattgaagaaccgagggatagctatagctatatatatatgggatggggaggccaacgtctcgctcactcgcagcgtattttgatgcccttttttatttgttgcatttcgatccattttcttttgtcctgcgcctttttcgtacgatgtttgttgcaaggataagcctttcggagctggaggtgacgctgttgctggactggagtggactggagccgtgcggctgacggattgcactagtacgtacaaggaaacaagatgaggagtggcacgctaacgcatccgatgaactagtagtgcagtccgccgcccgtgcgtagagcgtagaattatcaactgtgtctcctatttcaaatttcggagttttgcacaaccacatatataatatttgcacgaccatatacacgatttgctatctgctctctcgtcccatactttaaaactccactatatggaaaaacagtgttttgcacaataatatgcacgatttgatctccagccaattactcattctatctcttctatcttatctcccattttaaactaaactatgtaaacataacgtctgcattataaatagtgttctctacgaactgtattcacaattcacaatctgctggagagcattattacggtgttcaaataacgctgaatccacacagcatacgtaccgagatctgaaattctggcgcccgtccacactgatgtttactacagttaataacgaacagcaactgtggcacatgagccagccagccagcctacatcaacagtggcctggttttggaagtaagaaagtgacaagaccaccgctctggactgcctacctatagcttgggcttggaaactggattttttttattgtccaccgggggagggccgggtcccccacctgcaattaggttctatgcactgcatctgttatctgtgtagcccttttgtgtatatatatatatatgcagatcgattaatatgtttgttatcccaactggttatgaacataagaccctacactagacgacttggggttcgaatttgaaaatgcaattttttttcttgcatgagtaagtggtaaccgtatgcagtcaagtggttccgttggacttgtaatcaaacatcctatcagtgtcttcgaagagacagctagctaacgtactgtagcccactttggtagagacagacagataggtagggacgatatgatcagacgatcagtattctatacatgtcttttcgatcttctctgtcgaactccaaccaagaattaatggctatcagtacttgaggtttactacctgcaatatatttaattggcagacatggtcgtcatgagaagaacgtctaggctatttgcctatttcattgtacatgtgatagtatgctacgtacatggaaacttagcgatgaataatcctcacccatgcatgcaaccagtaggcttaattaagatgacatgctgtagcagagatcgagaacaaaacgtactgcgtgcctccatcctcctcgatcgtctcacgtactgtgtgcaggggtccgtcgacggttctcacaagtcagatccaaaatctgcagcacacaaccatacaccatagcagcggaaaaaagcatgcagatggatctatctttctcaaagttgcagcaaaaaaacaagaaggcgcagcgtcatcagcaatacatgccccagaattgtgaaggaatgaggctgtcatgcatgatctaacaacgatttgcaggcacaaagcgagacacagaccagacgagagcgcgcgaggccactctagtctagctgtgcgtggacgcctgctaatatggtgccaaccaaatcagagctagatcatgctggcagcttcactcattcgcaagagcatttgtgttttcatccaggatgaatcaaactagctaacatctctctctctctctctctctatctgtccatcccttcgtcttctccatactcctctcaagaaaattaacctcaggtagccttcacttgatttcaaaatcctagcatctactggaaattaaagacaccagtgcaaaaaaaacaaagattcttgcaatgtggtagaagtgagatatatcgagctggaagaagaacagcaaattaacacacaagaccaagaagaaagatgggacaaggaaaagaaaaaaaggcaagatgaagcgatatatttgaactctccccttgcaggaccttagctttgccttggacgatggacatgggactgtatttatagaggaaagaggacgcatccacggcaggctaaacttggcg

SEQ ID NO: 34925 - DNA, 1645 bp, Zea Mays
gtcgcattgactcgccgttctctcgtagactcgttcatcacttcgtcctctggtcctcccaaaatcccaaatcccattctccctgctcgtgcagttgagcagtccagcaaccggcactccagctgctcgagcagcaagcgtgcgagcgactgcgggcagactgtagagccatcgagcaggacaataggccggcaggcgggtgggcaagggcgcaacttcgcaaggcagtagaccagctagcagtccagcagtaggctgcaagcgtgcgcgtgaagggctgccggctgcaccgctcgccatcgcaggtctctcgctagtcagcagatctccaggtttgattttttgagaccgtcggcactagagatgacttcaccctcactaccccagagctctgacaggaaggtaagaactaagaacataaatcattgtctgatccctctccatatttactatggatctaattgtatattgtagtccttgtgtttgtttgtggtcttccatggaccatatcttcattgttgagtgactaacgctaacccaattcgacggtcctcacgaagggacgcctcgaacaagaatcagccaccacatgctaccagtgatgttacagccgcaaccccatctgctactcccataattattgttggaacctctgtcacatcatgtgatagtgcaggaaccgctatcggaaccactaccaaaatcattgcagtgccgtgtgctgcgcccccacaaccacgttcgaaaaagactaatggcaagaaaagaagtcgtcttgctattcaagggcctccttctgctccaactactccagatcaagatgtgtcaaccttcactggcaagcagctattaaaaccattggggttcaatttcaagcacgctaacctcttatttgttcttgttattacagttcacttaattttatggttgcacatgtatatgttgaatatattatatatttatatgcaaaagatggatgtacatgtatattgcatatttgtatgttttatatggtcgtgtgtgtagatatgttaatatatatttatttctcaactcagatttagtggcagccagcaagaaacactgtcacaaccacaacaagagtctattaatgatttagagccaatacaaatagatgatgatgagccacaactagaggatgtggactttggcactaagcggaagcttacttctgttgtttggaaagatttcaaaaaagtcaaagtccgtgatgatgtcaaggctcaatgtctacattgccacaagcaacttggtgagaagagcattaatgggacaaaacatctgcatgaccatttgaaaatatccacagtaagaaggatcaagctgatgggacagaacaaagcacttgcacaatcatctttaaggttaaattcacaaggagggaaaatatctgtggaaaattacacctttgatcctgaagttgctaggagagagcttgcttccatgattacattacatgagtatcctttatctattgttgaccatactggtttttgacggtttgtgagtggacttcagccattatttaagatggtgactcgaaacacaattaggaatgacatcatggatgcatacaatgacatcggccgagctccaccgaggacaatgagcagcccgtggttcc

SEQ ID NO: 34926 - DNA, 935 bp, Zea Mays
cattgactcgccgttctctcgtagactcgttcatcacttcgtcctctggtcctcccaaaatcccaaatcccattctccctgctcgtgcagttgagcagtccagcaaccggcactccagctgctcgagcagcaagcgtgcgagcgactgcgggcagactgtagagccatcgagcaggacaataggccggcaggcgggtgggcaagggcgcaacttcgcaaggcagtagaccagctagcagtccagcagtaggctgcaagcgtgcgcgtgaagggctgccggctgcaccgctcgccatcgcaggtctctcgctagtcagcagatctccaggtttgattttttgagaccgtcggcactagagatgacttcaccctcactaccccagagctctgacaggaagatttagtggcagccagcaagaaacactgtcacaaccacaacaagagtctattaatgatttagagccaatacaaatagatgatgatgagccacaactagaggatgtggactttggcactaagcggaagcttacttctgttgtttggaaagatttcaaaaaagtcaaagtccgtgatgatgtcaaggctcaatgtctacattgccacaagcaacttggtgagaagagcattaatgggacaaaacatctgcatgaccatttgaaaatatccacagtaagaaggatcaagctgatgggacagaacaaagcacttgcacaatcatctttaaggttaaattcacaaggagggaaaatatctgtggaaaattacacctttgatcctgaagttgctaggagagagcttgcttccatgattacattacatgagtatcctttatctattgttgaccatactggtttttgacggtttgtgagtggacttcagccattatttaagatggtgactcgaaacacaattaggaatgacatcatggatgcata

SEQ ID NO: 34927 - DNA, 1020 bp, Zea Mays
tggtcagtctcagcagatattgacagcaaataactgaatgtggatcgtagggtcattttttctagcacacattgaacaaaaccctagagtagctcctctatggttctgccttctatacacacatatgtataaatgctgaaaaatgacgtcaggtaccaactgtccgtctatggattgtccctccttggcttgcaaaaactaaagggttgcaacataagggtcctggattatttctctcttggtaactactgaagcatgatgaaaatcactacacatatatgcgtggagatagctaggggacaacagaaggtccatgaatcctcaataccttgtgtacttttaatgccagtctctacaccaccatggctgatggatcacactatcgagtcagcgatggtggactggttctcaggcgcagctgcccctggtcttggcttctgatcctcgccaacgtgcctaggggacgatacggcagacgaggaggacgacgacggcgacgaggaggaagacgctaccttgcgcgggcttgacggcatgtgcagcctccgcagctcgctcatggggcttctcgggctcaggagcagcggcggcggctgcatctgtggctgtaggggttctgctacctgagggtgctgctggtgagggtgccggtgctcatcctgctgctcggctgccactttgttcaccaggttctgtatcgtcggcaggagcttcgctgacacagagattatcccaggaacctgcacaccacaacatcagtttatttgagcttagctcaaaatggacagagcctgaggcaactcaaggactgatataacatccttattcaataagaaacaagcaacggcgatgattacttttgcaaggcatgtcagtacccagggtattactaatccacacagagcagtataatcaggatgtatagttctttttagagcagcttgtaattgttttctaggctagcttgttacccgagaagccccatgagcgagcagccgttagatcactaccagggttaac

SEQ ID NO: 34928 - DNA, 1401 bp, Zea Mays
cttaacactccatatgcttatgaggacatgcaagctcttattagcaagatcacaaagtcgatagtatcaccattgcccacgagatattctggttcctttaggggacttatcaagagcatgctacggaaaagtccagaacaccgaccaagcgctgcagaactgctaaagcatgtgcaccttcagccttatgtgcttcaggtccagttgaagtccagtccctctcgcaacatgtctccaatctatcaagctctgacagacaaagttaagaagatgacatttcctagtgatataactgattccgccagaagagtggcaagaagaaactcgcttggaaatgagaggactgtaacattctgcaaaccctctcctgagcggaactctattagctctacacggagcatcaaagaatatacaactacccagagtgtcaaagagctatctgttgacagcagtcaaattgatgatgaggttacaagtaaagccattagaacaaagacaacaggcattctaaggacgcccaagagtaccccagccaagacattgactactagaaatcggttggatcctccaaaaacttcttacagcagaacaaaccatagtgagttgacctcaagaacacctctgaacaagagtgctgtgacagcaagaagagcatcgctcccgctgccgacatacagagcacccaacagccgtgccgccagcgtccttgaccaactggactccccagacgtgtccgtcaacgcgcctcggatcgacaggatcgcagaattccctctagcttcatccgaggaccccctggcgcccatgaagaagaacctgtcctcggcgcccggccacgacggctcatgctccacgcctcccttcatcaaccggtccatcacgaaggacaagtacacggtgcaggtgctgcacaggggcgacggggacaacgcgagcgactcgtcggggcgcaacgccaccgccgcgtcgagcggggggtccaacgactcgaggcagcagcggttcgacacctcgtcgtaccagcagcgcgccgaggccctggagggcctgctggagttcagcgcgcagctgctgcagcaggagcggtacgaggagctgggcatcctgctgaagccgttcggccccgagaaggcgtcgccgagagagactgccatctggctcaccaagagcttcaaggagacggcgtcatagcggagggagggagggagggagtcatagcggagggagggagggagggagtcatagcggagggagggagacgtagctgccagttttgtaacgtgcaatgtagttcaggtagtttaagctatgttaggaccccccaggtgtaggtgctggaaggaaggcaacaccagctcagtgttgccctaacttaaaagaagttcccatgttgtttagcca

SEQ ID NO: 34929 - DNA, 2050 bp, Zea Mays
gaatagtcttgactcttgagctagggcaagtagaaggaaaaggaaacaagcttgctgcgtgtgacctgcagaccccaagaggatggatcagtatgaggtgctggagcagattggaaaaggagcatttggttctgcgcttttggtgaggcacaaggtcgagaagaagaagtatgtgctcaagaagatacggctcgcacggcaaaccgaccgcacacgccggtctgcccaccaggagatgcagctcatcgcgactgtccggaatccattcattgtggagtacaaagattcatgggtggaaaagggctgctacgtttgcattgttattggctactgtgagggaggagacatggctgaggttatcaaaagagccaatggaaaccatttctctgaggagaaactttgcaagtggctcgtgcaacttctcatggctcttgattatctacatgcaaatcacattcttcatcgagacgtgaagtgctctaatatatttattgccagagatcaaagcatacgccttggtgactttggccttgcaaagatattgacatcagatgaccttgcctcatctgtggtagggactccaagttatatgtgcccagaacttcttgctgatataccatatggatgttgcatttatgaaatgactgctctcaggcctgcatttaaagcttttgacatgcaagctcttattagcaagatcacaaagtcgatagtatcaccattgcccacgagatattctggttcctttaggggacttatcaagagcatgctacggaaaagtccagaacaccgaccaagcgctgcagaactgctaaagcatgtgcaccttcagccttatgtgcttcaggtccagttgaagtccagtccctctcgcaacatgtctccaatctatcaagctctgacagacaaagttaagaagatgacatttcctagtgatataactgattccgccagaagagtggcaagaagaaactcgcttggaaatgagaggactgtaacattctgcaaaccctctcctgagcggaactctattagctctacacggagcatcaaagaatatacaactacccagagtgtcaaagagctatctgttgacagcagtcaaattgatgatgaggttacaagtaaagccattagaacaaagacaacaggcattctaaggacgcccaagagtaccccagccaagacattgactactagaaatcggttggatcctccaaaaacttcttacagcagaacaaaccatagtgagttgacctcaagaacacctctgaacaagagtgctgtgacagcaagaagagcatcgctcccgctgccgacatacagagcacccaacagccgtgccgccagcgtccttgaccaactggactccccagacgtgtccgtcaacgcgcctcggatcgacaggatcgcagaattccctctagcttcatccgaggaccccctggcgcccatgaagaagaacctgtcctcggcgcccggccacgacggctcatgctccacgcctcccttcatcaaccggtccatcacgaaggacaagtacacggtgcaggtgctgcacaggggcgacggggacaacgcgagcgactcgtcggggcgcaacgccaccgccgcgtcgagcggggggtccaacgactcgaggcagcagcggttcgacacctcgtcgtaccagcagcgcgccgaggccctggagggcctgctggagttcagcgcgcagctgctgcagcaggagcggtacgaggagctgggcatcctgctgaagccgttcggccccgagaaggcgtcgccgagagagactgccatctggctcaccaagagcttcaaggagacggcgtcatagcggagggagggagggagggagtcatagcggagggagggagggagggagtcatagcggagggagggagacgtagctgccagttttgtaacgtgcaatgtagttcaggtagtttaagctatgttaggaccccccaggtgtaggtgctggaaggaaggcaacaccagctcagtgttgccctaacttaaaagaagttcccatgttgtttagcca

SEQ ID NO: 34930 - DNA, 2202 bp, Zea Mays
gttttcgaacccacaccttttccattctattttcctcgcagagtagttttttttcctcactgcaagtgtaccggaaccatggtttttaatggatgatgatgatgctgctgctgcttgcgtcctcagaatagtcttgactcttgagctagggcaagtagaaggaaaaggaaacaagcttgctgcgtgtgacctgcagaccccaagaggatggatcagtatgaggtgctggagcagattggaaaaggagcatttggttctgcgcttttggtgaggcacaaggtcgagaagaagaagtatgtgctcaagaagatacggctcgcacggcaaaccgaccgcacacgccggtctgcccaccaggagatgcagctcatcgcgactgtccggaatccattcattgtggagtacaaagattcatgggtggaaaagggctgctacgtttgcattgttattggctactgtgagggaggagacatggctgaggttatcaaaagagccaatggaaaccatttctctgaggagaaactttgcaagtggctcgtgcaacttctcatggctcttgattatctacatgcaaatcacattcttcatcgagacgtgaagtgctctaatatatttattgccagagatcaaagcatacgccttggtgactttggccttgcaaagatattgacatcagatgaccttgcctcatctgtggtagggactccaagttatatgtgcccagaacttcttgctgatataccatatggtactaaatccgatatttggtctctaggatgttgcatttatgaaatgactgctctcaggcctgcatttaaagcttttgacatgcaagctcttattagcaagatcacaaagtcgatagtatcaccattgcccacgagatattctggttcctttaggggacttatcaagagcatgctacggaaaagtccagaacaccgaccaagcgctgcagaactgctaaagcatgtgcaccttcagccttatgtgcttcaggtccagttgaagtccagtccctctcgcaacatgtctccaatctatcaagctctgacagacaaagttaagaagatgacatttcctagtgatataactgattccgccagaagagtggcaagaagaaactcgcttggaaatgagaggactgtaacattctgcaaaccctctcctgagcggaactctattagctctacacggagcatcaaagaatatacaactacccagagtgtcaaagagctatctgttgacagcagtcaaattgatgatgaggttacaagtaaagccattagaacaaagacaacaggcattctaaggacgcccaagagtaccccagccaagacattgactactagaaatcggttggatcctccaaaaacttcttacagcagaacaaaccatagtgagttgacctcaagaacacctctgaacaagagtgctgtgacagcaagaagagcatcgctcccgctgccgacatacagagcacccaacagccgtgccgccagcgtccttgaccaactggactccccagacgtgtccgtcaacgcgcctcggatcgacaggatcgcagaattccctctagcttcatccgaggaccccctggcgcccatgaagaagaacctgtcctcggcgcccggccacgacggctcatgctccacgcctcccttcatcaaccggtccatcacgaaggacaagtacacggtgcaggtgctgcacaggggcgacggggacaacgcgagcgactcgtcggggcgcaacgccaccgccgcgtcgagcggggggtccaacgactcgaggcagcagcggttcgacacctcgtcgtaccagcagcgcgccgaggccctggagggcctgctggagttcagcgcgcagctgctgcagcaggagcggtacgaggagctgggcatcctgctgaagccgttcggccccgagaaggcgtcgccgagagagactgccatctggctcaccaagagcttcaaggagacggcgtcatagcggagggagggagggagggagtcatagcggagggagggagggagggagtcatagcggagggagggagacgtagctgccagttttgtaacgtgcaatgtagttcaggtagtttaagctatgttaggaccccccaggtgtaggtgctggaaggaaggcaacaccagctcagtgttgccctaacttaaaagaagttcccatgttgtttagcca

SEQ ID NO: 34931 - DNA, 2409 bp, Zea Mays
ctctcctcactgatcactcttcttcttcagactcagagccatcgcgccgcggcatcctccctccgttcctgccccctctttctctagcgagctccttttctctctcctagagaggcttctcccttcctcctcgcttgcccccattgcctttgggctatatagagcgggattggattggaaacggagcccccggcgagtttgaaacccaaccaaaacccccacctttctcgcctcgtactcgcgcgctccccaccgcctgccaccgacgccgcgtctggtctagaaccaaatgccgtgagatctgcgcgcgtgacgccttcccccgccggagactccctccgagctccgggccacggagcgcttcgtcccggatccctctggtggctcagggcaagtagaaggaaaaggaaacaagcttgctgcgtgtgacctgcagaccccaagaggatggatcagtatgaggtgctggagcagattggaaaaggagcatttggttctgcgcttttggtgaggcacaaggtcgagaagaagaagtatgtgctcaagaagatacggctcgcacggcaaaccgaccgcacacgccggtctgcccaccaggagatgcagctcatcgcgactgtccggaatccattcattgtggagtacaaagattcatgggtggaaaagggctgctacgtttgcattgttattggctactgtgagggaggagacatggctgaggttatcaaaagagccaatggaaaccatttctctgaggagaaactttgcaagtggctcgtgcaacttctcatggctcttgattatctacatgcaaatcacattcttcatcgagacgtgaagtgctctaatatatttattgccagagatcaaagcatacgccttggtgactttggccttgcaaagatattgacatcagatgaccttgcctcatctgtggtagggactccaagttatatgtgcccagaacttcttgctgatataccatatggatgttgcatttatgaaatgactgctctcaggcctgcatttaaagcttttgacatgcaagctcttattagcaagatcacaaagtcgatagtatcaccattgcccacgagatattctggttccttattgttttactctaataaaaacatttcgcataactggcatatgcaggctgcagaactgctaaagcatgtgcaccttcagccttatgtgcttcaggtccagttgaagtccagtccctctcgcaacatgtctccaatctatcaagctctgacagacaaagttaagaagatgacatttcctagtgatataactgattccgccagaagagtggcaagaagaaactcgcttggaaatgagaggactgtaacattctgcaaaccctctcctgagcggaactctattagctctacacggagcatcaaagaatatacaactacccagagtgtcaaagagctatctgttgacagcagtcaaattgatgatgaggttacaagtaaagccattagaacaaagacaacaggcattctaaggacgcccaagagtaccccagccaagacattgactactagaaatcggttggatcctccaaaaacttcttacagcagaacaaaccatagtgagttgacctcaagaacacctctgaacaagagtgctgtgacagcaagaagagcatcgctcccgctgccgacatacagagcacccaacagccgtgccgccagcgtccttgaccaactggactccccagacgtgtccgtcaacgcgcctcggatcgacaggatcgcagaattccctctagcttcatccgaggaccccctggcgcccatgaagaagaacctgtcctcggcgcccggccacgacggctcatgctccacgcctcccttcatcaaccggtccatcacgaaggacaagtacacggtgcaggtgctgcacaggggcgacggggacaacgcgagcgactcgtcggggcgcaacgccaccgccgcgtcgagcggggggtccaacgactcgaggcagcagcggttcgacacctcgtcgtaccagcagcgcgccgaggccctggagggcctgctggagttcagcgcgcagctgctgcagcaggagcggtacgaggagctgggcatcctgctgaagccgttcggccccgagaaggcgtcgccgagagagactgccatctggctcaccaagagcttcaaggagacggcgtcatagcggagggagggagggagggagtcatagcggagggagggagggagggagtcatagcggagggagggagacgtagctgccagttttgtaacgtgcaatgtagttcaggtagtttaagctatgttaggaccccccaggtgtaggtgctggaaggaaggcaacaccagctcagtgttgccctaacttaaaagaagttcccatgttgtttagcca

SEQ ID NO: 34932 - DNA, 2440 bp, Zea Mays
cgtgggtcccgcaaaacccctgtctctctcctcactgatcactcttcttcttcagactcagagccatcgcgccgcggcatcctccctccgttcctgccccctctttctctagcgagctccttttctctctcctagagaggcttctcccttcctcctcgcttgcccccattgcctttgggctatatagagcgggattggattggaaacggagcccccggcgagtttgaaacccaaccaaaacccccacctttctcgcctcgtactcgcgcgctccccaccgcctgccaccgacgccgcgtctggtctagaaccaaatgccgtgagatctgcgcgcgtgacgccttcccccgccggagactccctccgagctccgggccacggagcgcttcgtcccggatccctctggtggctcagggcaagtagaaggaaaaggaaacaagcttgctgcgtgtgacctgcagaccccaagaggatggatcagtatgaggtgctggagcagattggaaaaggagcatttggttctgcgcttttggtgaggcacaaggtcgagaagaagaagtatgtgctcaagaagatacggctcgcacggcaaaccgaccgcacacgccggtctgcccaccaggagatgcagctcatcgcgactgtccggaatccattcattgtggagtacaaagattcatgggtggaaaagggctgctacgtttgcattgttattggctactgtgagggaggagacatggctgaggttatcaaaagagccaatggaaaccatttctctgaggagaaactttgcaagtggctcgtgcaacttctcatggctcttgattatctacatgcaaatcacattcttcatcgagacgtgaagtgctctaatatatttattgccagagatcaaagcatacgccttggtgactttggccttgcaaagatattgacatcagatgaccttgcctcatctgtggtagggactccaagttatatgtgcccagaacttcttgctgatataccatatggatgttgcatttatgaaatgactgctctcaggcctgcatttaaagcttttgacatgcaagctcttattagcaagatcacaaagtcgatagtatcaccattgcccacgagatattctggttcctttaggggacttatcaagagcatgctacggaaaagtccagaacaccgaccaagcgctgcagaactgctaaagcatgtgcaccttcagccttatgtgcttcaggtccagttgaagtccagtccctctcgcaacatgtctccaatctatcaagctctgacagacaaagttaagaagatgacatttcctagtgatataactgattccgccagaagagtggcaagaagaaactcgcttggaaatgagaggactgtaacattctgcaaaccctctcctgagcggaactctattagctctacacggagcatcaaagaatatacaactacccagagtgtcaaagagctatctgttgacagcagtcaaattgatgatgaggttacaagtaaagccattagaacaaagacaacaggcattctaaggacgcccaagagtaccccagccaagacattgactactagaaatcggttggatcctccaaaaacttcttacagcagaacaaaccatagtgagttgacctcaagaacacctctgaacaagagtgctgtgacagcaagaagagcatcgctcccgctgccgacatacagagcacccaacagccgtgccgccagcgtccttgaccaactggactccccagacgtgtccgtcaacgcgcctcggatcgacaggatcgcagaattccctctagcttcatccgaggaccccctggcgcccatgaagaagaacctgtcctcggcgcccggccacgacggctcatgctccacgcctcccttcatcaaccggtccatcacgaaggacaagtacacggtgcaggtgctgcacaggggcgacggggacaacgcgagcgactcgtcggggcgcaacgccaccgccgcgtcgagcggggggtccaacgactcgaggcagcagcggttcgacacctcgtcgtaccagcagcgcgccgaggccctggagggcctgctggagttcagcgcgcagctgctgcagcaggagcggtacgaggagctgggcatcctgctgaagccgttcggccccgagaaggcgtcgccgagagagactgccatctggctcaccaagagcttcaaggagacggcgtcatagcggagggagggagggagggagtcatagcggagggagggagggagggagtcatagcggagggagggagacgtagctgccagttttgtaacgtgcaatgtagttcaggtagtttaagctatgttaggaccccccaggtgtaggtgctggaaggaaggcaacaccagctcagtgttgccctaacttaaaagaagttcccatgttgtttagcca

SEQ ID NO: 34933 - DNA, 2461 bp, Zea Mays
cgtgggtcccgcaaaacccctgtctctctcctcactgatcactcttcttcttcagactcagagccatcgcgccgcggcatcctccctccgttcctgccccctctttctctagcgagctccttttctctctcctagagaggcttctcccttcctcctcgcttgcccccattgcctttgggctatatagagcgggattggattggaaacggagcccccggcgagtttgaaacccaaccaaaacccccacctttctcgcctcgtactcgcgcgctccccaccgcctgccaccgacgccgcgtctggtctagaaccaaatgccgtgagatctgcgcgcgtgacgccttcccccgccggagactccctccgagctccgggccacggagcgcttcgtcccggatccctctggtggctcagggcaagtagaaggaaaaggaaacaagcttgctgcgtgtgacctgcagaccccaagaggatggatcagtatgaggtgctggagcagattggaaaaggagcatttggttctgcgcttttggtgaggcacaaggtcgagaagaagaagtatgtgctcaagaagatacggctcgcacggcaaaccgaccgcacacgccggtctgcccaccaggagatgcagctcatcgcgactgtccggaatccattcattgtggagtacaaagattcatgggtggaaaagggctgctacgtttgcattgttattggctactgtgagggaggagacatggctgaggttatcaaaagagccaatggaaaccatttctctgaggagaaactttgcaagtggctcgtgcaacttctcatggctcttgattatctacatgcaaatcacattcttcatcgagacgtgaagtgctctaatatatttattgccagagatcaaagcatacgccttggtgactttggccttgcaaagatattgacatcagatgaccttgcctcatctgtggtagggactccaagttatatgtgcccagaacttcttgctgatataccatatggtactaaatccgatatttggtctctaggatgttgcatttatgaaatgactgctctcaggcctgcatttaaagcttttgacatgcaagctcttattagcaagatcacaaagtcgatagtatcaccattgcccacgagatattctggttccttattgttttactctaataaaaacatttcgcataactggcatatgcaggctgcagaactgctaaagcatgtgcaccttcagccttatgtgcttcaggtccagttgaagtccagtccctctcgcaacatgtctccaatctatcaagctctgacagacaaagttaagaagatgacatttcctagtgatataactgattccgccagaagagtggcaagaagaaactcgcttggaaatgagaggactgtaacattctgcaaaccctctcctgagcggaactctattagctctacacggagcatcaaagaatatacaactacccagagtgtcaaagagctatctgttgacagcagtcaaattgatgatgaggttacaagtaaagccattagaacaaagacaacaggcattctaaggacgcccaagagtaccccagccaagacattgactactagaaatcggttggatcctccaaaaacttcttacagcagaacaaaccatagtgagttgacctcaagaacacctctgaacaagagtgctgtgacagcaagaagagcatcgctcccgctgccgacatacagagcacccaacagccgtgccgccagcgtccttgaccaactggactccccagacgtgtccgtcaacgcgcctcggatcgacaggatcgcagaattccctctagcttcatccgaggaccccctggcgcccatgaagaagaacctgtcctcggcgcccggccacgacggctcatgctccacgcctcccttcatcaaccggtccatcacgaaggacaagtacacggtgcaggtgctgcacaggggcgacggggacaacgcgagcgactcgtcggggcgcaacgccaccgccgcgtcgagcggggggtccaacgactcgaggcagcagcggttcgacacctcgtcgtaccagcagcgcgccgaggccctggagggcctgctggagttcagcgcgcagctgctgcagcaggagcggtacgaggagctgggcatcctgctgaagccgttcggccccgagaaggcgtcgccgagagagactgccatctggctcaccaagagcttcaaggagacggcgtcatagcggagggagggagggagggagtcatagcggagggagggagggagggagtcatagcggagggagggagacgtagctgccagttttgtaacgtgcaatgtagttcaggtagtttaagctatgttaggaccccccaggtgtaggtgctggaaggaaggcaacaccagctcagtgttgccctaacttaaaagaagttcccatgttgtttagcca

SEQ ID NO: 34934 - DNA, 226 bp, Zea Mays
cccagatccaaatcacgcagaagctgtcgtccctgcacatggcggttctcggttgcctttggtgcaatctatgctcaggtagagaagaaggcgtcgaggcggatatccaggagttccaggactttgacgagttctaggcgtgggctagcggcaacccccagtcggctgcctgtgaaggccgcgtttatatacgtttcgtttttgcactttgattattgtaaagact

SEQ ID NO: 34935 - DNA, 157 bp, Zea Mays
ccagatccaaatcacgcagaagctgtcgtccctgcacatggcggttctcgactgtgatccatttccgagcttcgaggaatcgacagtcaagcttcggcgaccaagagactgaactctccgagttctacgaggctgaagatcctaagcatatgtttgg

SEQ ID NO: 34936 - DNA, 459 bp, Zea Mays
cccagatccaaatcacgcagaagctgtcgtccctgcacatggcggttctcggttgcctttggtgcaatctatgctcaggtagagaagaaggcgtcgaggcggatctccaggagttccaggactttgacgagttctaggcgtgggttagcggcaacccctagtcggttgcctgtgaaggccgcgtttatctacgtttcgttttcgcactttgattattgtaaagactatatggatgtcttagacatatgatgtaatcgactattattcccctttttaatactatttgagcactgtgtgatgatgtccatgttatgtaactgttgtgtacgtgaactgctgatcctggcacgtacatggttcgcattcggtttgccttctaaaaccgggtgtgacataagtgatatcaaagccgtgctgactgtaggaccgctaacctagagtagcattggccgttttaag

SEQ ID NO: 34937 - DNA, 1563 bp, Zea Mays
ataacctctagtctccttccccagatccaaatcacgcagaagctgtcgtccctgcacatggcggttctcgactgtgatccatttccgagcttcgaggaatcgacagtcaagcttcagtgaccaagagactgaactctccgagttctacgaggctgaagatcctgagcatctgtttggtgaaggcaagtgtcctctgacctattatgtcacatttactgtataattcatcaacccacataccatgatcaacctaaggattgactagcttttgttgtccatgtccttgtttacctatttgggttggattattattgtgtagctttatgctattgctcaactttaatcaatgaacatgatgagaattatcaatgagacgatgtttccccctcctctattatgatgttatacttgtggtattcaagggggctcgagcggtttctcgagtgcctctccgtaaggacctgttcgttggatgaccgcccgggaaaacagtgcaaccatgagggtggaatgggatgcccttagctgaataattagaggaaccggggtgtagttcgcttagccgtcgtgccgttaatggggctcggtgtatgcggctcgctctgccaagcttgggttcgcccccttggggaggagtgcagtgcatttaggaaacctaacgggcggctacagacccgaggaatctttgtaaaggctacgtagtgagaccctgcctactcaccttggtagtgtttaagggtttgatcggcccgaggcaagagggaatcacagcttgtgggtaaagtgcgcaacctctgcagagtgttatgaaactgatatatcagtcgtgctcgcggttatgagaggccaagggagctccattgattagtgatacttgattagagatgttcagcttacaggtggcaatgagaatgatggttttggtattgactctggtgatggtaagtggtattctttccgtttggaaagggtacattcgggttaataacgtgggttaatactaaaacttggctctctctctactagtaataataatatgaccaactaaaagcaactgcttgacttaaccccacataaagctagtccactacagccaaacgggacatttgctgagtacgttgatgtgttctaaccctttctttcacaaaacaccaggttgcctttggtgcaatctatgctcaggtagagaagaaggcgtcgaggcggatctccaggagttccaggactttgacgagttctaggcgtgggttagcggcaacccctagtcggttgcctgtgaaggccgcgtttatctacgtttcgttttcgcactttgattattgtaaagactatatggatgtcttagacatatgatgtaatcgactattattcccctttttaatactatttgagcactgtgtgatgatgtccatgttatgtaactgttgtgtacgtgaactgctgatcctggcacgtacatggttcgcattcggtttgccttctaaaaccgggtgtgacataagtgatatcaaagccgtgctgactgtaggaccgctaacctagagtagcattggccgttttaag

SEQ ID NO: 34938 - DNA, 1351 bp, Zea Mays
tgcacttgcacggcggaagaacaggctgctgcatttcccggtgtgtccgtgatctgcctatttggatgtaatgctgtgtaccgctcgtcctgtggagggagctaagtttgctgatgagggttccacataaatgcaattatggcaataaagttattgcgtgtgctatgcttccgggtcacattgtactgaattatgtggatgcgaaccttgtcataacaagccacctcaaggtgctccatggactgcaccagttttacctctgaaacctgtccaaacattggaggctggtcaagaaatagtggaacaactcataaggtcccctatggatcttattagaagaaaatgcacctgcaagaagtcaggctgccttaagaagtactgtgactgctaccagggaggggcaggatgctctatcaactgtaagtgcgatgattgtagaaacccatttgggagaaaagtcggcgttattttggatggtaaaagcagcggtcttcccgcgcccgtacatgtgcatgaaagaaacgggactgaagctgactcgagcggcgacgacgaggaagacgacgacttgtacatgaaccgacagctctccccgtctccggtgtcaagggagtcgtcgttccagcaggagactctggtcggcgtggaagtccagacgatgaacgggcacctgtacccgaagccgctgacccaggtgcgtcccgagccgtcctcctggcagctctccgccgccaggaggccggccgaggaaccgcgcggagaggtgtggcgcttctcggggaggcccggcgaggacggggcctccgacgccgtggaagcagcgcgtgccgtcgcggtcgctcccccgagggagagcaggagaccggggacccgcggtggggacaggctcaggttcagcatcccgcggtgcgtcgaggcgatgagcgccatggcggagctgtcgcccgtggagaagtcgcttgcgcccgacgtgttcttggacgagagcaaccgcgagatcttcctctcgctgagcgtagatgttaggcccatctggctgaggcgtaagatgaagagccttgtctagctctagttttttttaaatttttaattgtacccagtgctaatttatggtgcatgttatattttcgagtcctgcatatcgttagcagtaataagttggttacgatttcagctagaagaagaggagaaattgtctctgccccttgagtaaacgtgcgacaagacgatgtgtccagtgtccccctgaacagtggcagcaacgtggtgtggcaacaacgaaaacagacagctcaggcgacggggacagcactgcacgggacgggatgccaatccggcatttgcatgtcct

SEQ ID NO: 34939 - DNA, 1388 bp, Zea Mays
atggacgcggatgtgggggcgggggcgacgaatcaaccgtggccggagcccgacgacgcgcacctctccccgcctccgcctccgcctccgcctcccgcctccgccccgactccagccgccgaggctgccgcgcccaccgcctccgcggccgtatcgccgccagcgccggcggaggcgaacggcaactccgacaggaagaggaggaggaaggcggacgacggggacgggtgcaaggcctgcagctgcaagaagtccagccacctcaaggtgctccatggactgcaccagttttacctctgaaacctgtccaaacattggaggctggtcaagaaatagtggaacaactcataaggtcccctatggatcttattagaagaaaatgcacctgcaagaagtcaggctgccttaagaagtactgtgactgctaccagggaggggcaggatgctctatcaactgtaagtgcgatgattgtagaaacccatttgggagaaaagtcggcgttattttggatggtaaaagcagcggtcttcccgcgcccgtacatgtgcatgaaagaaacgggactgaagctgactcgagcggcgacgacgaggaagacgacgacttgtacatgaaccgacagctctccccgtctccggtgtcaagggagtcgtcgttccagcaggagactctggtcggcgtggaagtccagacgatgaacgggcacctgtacccgaagccgctgacccaggtgcgtcccgagccgtcctcctggcagctctccgccgccaggaggccggccgaggaaccgcgcggagaggtgtggcgcttctcggggaggcccggcgaggacggggcctccgacgccgtggaagcagcgcgtgccgtcgcggtcgctcccccgagggagagcaggagaccggggacccgcggtggggacaggctcaggttcagcatcccgcggtgcgtcgaggcgatgagcgccatggcggagctgtcgcccgtggagaagtcgcttgcgcccgacgtgttcttggacgagagcaaccgcgagatcttcctctcgctgagcgtagatgttaggcccatctggctgaggcgtaagatgaagagccttgtctagctctagttttttttaaatttttaattgtacccagtgctaatttatggtgcatgttatattttcgagtcctgcatatcgttagcagtaataagttggttacgatttcagctagaagaagaggagaaattgtctctgccccttgagtaaacgtgcgacaagacgatgtgtccagtgtccccctgaacagtggcagcaacgtggtgtggcaacaacgaaaacagacagctcaggcgacggggacagcactgcacgggacgggatgccaatccggcatttgcatgtcct

SEQ ID NO: 34940 - DNA, 1519 bp, Zea Mays
cccctctcgagttccgactcccgcagtccgcacctctcgcgctcgccttcgctttgtcgccacggcgagccccacgccgccgatcggggcgccgcaagcggcggcgcccgttccgatggacgcggatgtgggggcgggggcgacgaatcaaccgtggccggagcccgacgacgcgcacctctccccgcctccgcctccgcctccgcctcccgcctccgccccgactccagccgccgaggctgccgcgcccaccgcctccgcggccgtatcgccgccagcgccggcggaggcgaacggcaactccgacaggaagaggagttattgcgtgtgctatgcttccgggtcacattgtactgaattatgtggatgcgaaccttgtcataacaagccacctcaaggtgctccatggactgcaccagttttacctctgaaacctgtccaaacattggaggctggtcaagaaatagtggaacaactcataaggtcccctatggatcttattagaagaaaatgcacctgcaagaagtcaggctgccttaagaagtactgtgactgctaccagggaggggcaggatgctctatcaactgtaagtgcgatgattgtagaaacccatttgggagaaaagtcggcgttattttggatggtaaaagcagcggtcttcccgcgcccgtacatgtgcatgaaagaaacgggactgaagctgactcgagcggcgacgacgaggaagacgacgacttgtacatgaaccgacagctctccccgtctccggtgtcaagggagtcgtcgttccagcaggagactctggtcggcgtggaagtccagacgatgaacgggcacctgtacccgaagccgctgacccaggtgcgtcccgagccgtcctcctggcagctctccgccgccaggaggccggccgaggaaccgcgcggagaggtgtggcgcttctcggggaggcccggcgaggacggggcctccgacgccgtggaagcagcgcgtgccgtcgcggtcgctcccccgagggagagcaggagaccggggacccgcggtggggacaggctcaggttcagcatcccgcggtgcgtcgaggcgatgagcgccatggcggagctgtcgcccgtggagaagtcgcttgcgcccgacgtgttcttggacgagagcaaccgcgagatcttcctctcgctgagcgtagatgttaggcccatctggctgaggcgtaagatgaagagccttgtctagctctagttttttttaaatttttaattgtacccagtgctaatttatggtgcatgttatattttcgagtcctgcatatcgttagcagtaataagttggttacgatttcagctagaagaagaggagaaattgtctctgccccttgagtaaacgtgcgacaagacgatgtgtccagtgtccccctgaacagtggcagcaacgtggtgtggcaacaacgaaaacagacagctcaggcgacggggacagcactgcacgggacgggatgccaatccggcatttgcatgtcct

SEQ ID NO: 34941 - DNA, 1566 bp, Zea Mays
cccctctcgagttccgactcccgcagtccgcacctctcgcgctcgccttcgctttgtcgccacggcgagccccacgccgccgatcggggcgccgcaagcggcggcgcccgttccgatggacgcggatgtgggggcgggggcgacgaatcaaccgtggccggagcccgacgacgcgcacctctccccgcctccgcctccgcctccgcctcccgcctccgccccgactccagccgccgaggctgccgcgcccaccgcctccgcggccgtatcgccgccagcgccggcggaggcgaacggcaactccgacaggaagaggaggaggaaggcggacgacggggacgggtgcaaggcctgcagctgcaagaagtccaggtgcctcaagctttattgcgtgtgctatgcttccgggtcacattgtactgaattatgtggatgcgaaccttgtcataacaagccacctcaaggtgctccatggactgcaccagttttacctctgaaacctgtccaaacattggaggctggtcaagaaatagtggaacaactcataaggtcccctatggatcttattagaagaaaatgcacctgcaagaagtcaggctgccttaagaaggaggggcaggatgctctatcaactgtaagtgcgatgattgtagaaacccatttgggagaaaagtcggcgttattttggatggtaaaagcagcggtcttcccgcgcccgtacatgtgcatgaaagaaacgggactgaagctgactcgagcggcgacgacgaggaagacgacgacttgtacatgaaccgacagctctccccgtctccggtgtcaagggagtcgtcgttccagcaggagactctggtcggcgtggaagtccagacgatgaacgggcacctgtacccgaagccgctgacccaggtgcgtcccgagccgtcctcctggcagctctccgccgccaggaggccggccgaggaaccgcgcggagaggtgtggcgcttctcggggaggcccggcgaggacggggcctccgacgccgtggaagcagcgcgtgccgtcgcggtcgctcccccgagggagagcaggagaccggggacccgcggtggggacaggctcaggttcagcatcccgcggtgcgtcgaggcgatgagcgccatggcggagctgtcgcccgtggagaagtcgcttgcgcccgacgtgttcttggacgagagcaaccgcgagatcttcctctcgctgagcgtagatgttaggcccatctggctgaggcgtaagatgaagagccttgtctagctctagttttttttaaatttttaattgtacccagtgctaatttatggtgcatgttatattttcgagtcctgcatatcgttagcagtaataagttggttacgatttcagctagaagaagaggagaaattgtctctgccccttgagtaaacgtgcgacaagacgatgtgtccagtgtccccctgaacagtggcagcaacgtggtgtggcaacaacgaaaacagacagctcaggcgacggggacagcactgcacgggacgggatgccaatccggcatttgcatgtcct

SEQ ID NO: 34942 - DNA, 2115 bp, Zea Mays
cagagctgctctgctccagagtttaaattgttgtctcataaccagtgacagtagcgggctttgtcacagcatttacgtggcatgcgtaggcgcagccttttcaatgaaaaggctgggcttagtaataaaggtgtagacaaagcttcagatcatcatcctgtaaattcaactacccccaaatgcaaaaccatttctggtgacaactcaaagactctaagaacccccccatgtgcattgcctggtattggcttgcacttgaatgcccttgccgcaactgcaacacctaaagagaaaatagtccctcaagacattcagtctactataaatgaatcaagtaacttgataggccctgctggatcttctccggcaccttctgagcaaaacattataaatgatgatttcactcaaacaactgatgttgcaaccgctgaagcttctagtcagggtagtcccaagaagaaaaggcataagtttgatagtggtgatggcacttcatgcaagcgttgtagttgtaagaagtccaaatgcctgaaactttactgtgagtgttttgctgctggagtctattgttctgagccttgttcgtgtatcggctgtatgaacaaccagagtcatacggaaactgttctatctacgcggcaacagattgaatctcgcaatccattagcatttgctcctaaagtaattcatacatctgagcctggtctggaactaagggacttctccaataaaactcctgcttcagctcgtcacaaaaggggatgcaattgcaagaagtcgtcatgtctaaaaaaatactgtgaatgttttcagggtggtgtgggatgctccataagttgcagatgcgagggctgtaagaatgcttttggaaaacgggagggggctgccgtgttaagcatagaggaacctaagcagggattggaagaaaaggatgtttgtgtgaaagaagagaaaagtgaaatcgagaaacagcttgttgtctaccaaactcctgatgatgctcctgctgaaaatgtactgaccacaccttccatggtgcagtgcagacccttggcttgtcgtccacccccaagctccaagaaaagctccaaaaaaccacgatcttcaacaaaactcactggacatccttcgcggttgtgcaacttacaagctcctccgaagaccgacactatgctctccccattcgaaaactacgcggaaatggtccttggtgatagcacatcggatatcctcaagggaaattcatctcctcaaacttctgttaaagtggtgtcaccaaacaagaagcgaatctctcccctgcgaatgggtaccgggctatctccaatctgtaggagtggcaggaagctgattttaaagtccattccttctttcccttcccttggcggtgatgtaaacaatgaggatccagaaaccaagttgccagccccttgaatttaccatattttgtcactggtttatttctaccataccatctgatagtggacagccaagcgactttcctttcatcatttctatctctctcgatcaatgattatttatgtactgctataataatctgccgcgtgctggcaaaattctgcctccctagaacaaccaatggcatttggtttgctggtaaattatctcttggctccgtgtgttccctgtggctgtctgtctataatttatgttcattattttgttccggagaccgaagaatctgaggacttgtatgtatctgggatcaagatgtgaatctcgcatgtaccagatgacagaactgttaagacttatatttgtctgaggttaaactgcaagacttttatttaagctagaactttgatcactataggatatggcatgatatagcagggctcttgagatgcattctcttgtgcgtgcttggtaactgtagtcgtgcaactgttgacggcgtttgttcagaacaagtggttgatgaatttgaagatggtttagggagtgggaatgattttgtttgtgtgcgtgcgaacttgtaaaatctccgtgtatgaactggcaatgcttttatggtattgatcatctgcggtgtgttaactgagtgcaaaatatggtatttgtgaattgtgatgtgcgatgcaaattcagaagaac

SEQ ID NO: 34943 - DNA, 2947 bp, Zea Mays
gctggtcctctgtccatgcgaagtgattctcctgtgttcaatttcatcaacaatctctcgcctataccaccacctaaacctttagactcagcacataatgtgcagctattcaagtcatcagatttggcacctgtttcttcgatctttgcctcaccacatgttaatccaacaaagggaactaaagttctgatcagggacgaatctgttcagcttcctcatgaattgcactcacctagcagtgtcagaactcggataggcacctcaggctcttttagaatgatcagatgcaaagacattgtgccagagaattgtaatatcacttgtcaactaaacgaggcatctattgattcttcagatcatacatcaagctctacaggccaattgactcaatccataaaagatgctgctggcagtatggaaagcgataaggatcaatgcgctggtggtaaaatagaccttaccatgtcccaggagtgcacaggcctagaaggtatgaaccttgatgagagtagcccagacagaatggattcatcacattctgggatagttgttcatgaaaaccagctatctgaacaaaacaatgatgaacctgcggcatataatggggtttacatgattacacaccaatcaagtagtgatatgctgactttagccgtaccatctggaacagaagcacaaccaatgaatgatacacaaaaggctgataatccctacccttgtgaatccttgttggatgttcagtcaagtggaaattgcacccaaaattctgtgcatgaaccccatctgtactggaacggggcagttgaaggggctgcagtagcttatactccccaagcacttcctggtgctttgcaaagtcagttgatgccatgtaacaagctcaatgagccaaaagattacatgcctactgagcaaaatgctttgtcacagcatttacgtggcatgcgtaggcgcagccttttcaatgaaaaggctgggcttagtaataaaggtgtagacaaagcttcagatcatcatcctgtaaattcaactacccccaaatgcaaaaccatttctggtgacaactcaaagactctaagaacccccccatgtgcattgcctggtattggcttgcacttgaatgcccttgccgcaactgcaacacctaaagagaaaatagtccctcaagacattcagtctactataaatgaatcaagtaacttgataggccctgctggatcttctccggcaccttctgagcaaaacattataaatgatgatttcactcaaacaactgatgttgcaaccgctgaagcttctagtcagggtagtcccaagaagaaaaggcataagtttgatagtggtgatggcacttcatgcaagcgttgtagttgtaagaagtccaaatgcctgaaactttactgtgagtgttttgctgctggagtctattgttctgagccttgttcgtgtatcggctgtatgaacaaccagagtcatacggaaactgttctatctacgcggcaacagattgaatctcgcaatccattagcatttgctcctaaagtaattcatacatctgagcctggtctggaactaagggacttctccaataaaactcctgcttcagctcgtcacaaaaggggatgcaattgcaagaagtcgtcatgtctaaaaaaatactgtgaatgttttcagatgcgagggctgtaagaatgcttttggaaaacgggagggggctgccgtgttaagcatagaggaacctaagcagggattggaagaaaaggatgtttgtgtgaaagaagagaaaagtgaaatcgagaaacagcttgttgtctaccaaactcctgatgatgctcctgctgaaaatgtactgaccacaccttccatggtgcagtgcagacccttggcttgtcgtccacccccaagctccaagaaaagctccaaaaaaccacgatcttcaacaaaactcactggacatccttcgcggttgtgcaacttacaagctcctccgaagaccgacactatgctctccccattcgaaaactacgcggaaatggtccttggtgatagcacatcggatatcctcaagggaaattcatctcctcaaacttctgttaaagtggtgtcaccaaacaagaagcgaatctctcccctgcgaatgggtaccgggctatctccaatctgtaggagtggcaggaagctgattttaaagtccattccttctttcccttcccttggcggtgatgtaaacaatgaggatccagaaaccaagttgccagccccttgaatttaccatattttgtcactggtttatttctaccataccatctgatagtggacagccaagcgactttcctttcatcatttctatctctctcgatcaatgattatttatgtactgctataataatctgccgcgtgctggcaaaattctgcctccctagaacaaccaatggcatttggtttgctggtaaattatctcttggctccgtgtgttccctgtggctgtctgtctataatttatgttcattattttgttccggagaccgaagaatctgaggacttgtatgtatctgggatcaagatgtgaatctcgcatgtaccagatgacagaactgttaagacttatatttgtctgaggttaaactgcaagacttttatttaagctagaactttgatcactataggatatggcatgatatagcagggctcttgagatgcattctcttgtgcgtgcttggtaactgtagtcgtgcaactgttgacggcgtttgttcagaacaagtggttgatgaatttgaagatggtttagggagtgggaatgattttgtttgtgtgcgtgcgaacttgtaaaatctccgtgtatgaactggcaatgcttttatggtattgatcatctgcggtgtgttaactgagtgcaaaatatggtatttgtgaattgtgatgtgcgatgcaaattcagaagaac

SEQ ID NO: 34944 - DNA, 2649 bp, Zea Mays
cttagattcatacgtttgctggtcctctgtccatgcgaagtgattctcctgtgttcaatttcatcaacaatctctcgcctataccaccacctaaacctttagactcagcacataatgtgcagctattcaagtcatcagatttggcacctgtttcttcgatctttgcctcaccacatgttaatccaacaaagggaactaaagttctgatcagggacgaatctgttcagcttcctcatgaattgcactcacctagcagtgtcagaactcggataggcacctcaggctcttttagaatgatcagatgcaaagacattgtgccagagaattgtaatatcacttgtcaactaaacgaggcatctattgattcttcagatcatacatcaagctctacaggccaattgactcaatccataaaagatgctgctggcagtatggaaagcgataaggatcaatgcgctggtggtaaaatagaccttaccatgtcccaggagtgcacaggcctagaaggtatgaaccttgatgagagtagcccagacagaatggattcatcacattctgggatagttgttcatgaaaaccagctatctgaacaaaacaatgatgaacctgcggcatataatggggtttacatgattacacaccaatcaagtagtgatatgctgactttagccgtaccatctggaacagaagcacaaccaatgaatgatacacaaaaggctgataatccctacccttgtgaatccttgttggatgttcagtcaagtggaaattgcacccaaaattctgtgcatgaaccccatctgtactggaacggggcagttgaaggggctgcagtagcttatactccccaagcacttcctggtgctttgcaaagtcagttgatgccatgtaacaagctcaatgagccaaaagattacatgcctactgagcaaaatgctttgtcacagcatttacgtggcatgcgtaggcgcagccttttcaatgaaaaggctgggcttagtaataaaggtgtagacaaagcttcagatcatcatcctgtaaattcaactacccccaaatgcaaaaccatttctggtgacaactcaaagactctaagaacccccccatgtgcattgcctggtattggcttgcacttgaatgcccttgccgcaactgcaacacctaaagagaaaatagtccctcaagacattcagtctactataaatgaatcaagtaacttgataggccctgctggatcttctccggcaccttctgagcaaaacattataaatgatgatttcactcaaacaactgatgttgcaaccgctgaagcttctagtcagggtagtcccaagaagaaaaggcataagtttgatagtggtgatggcacttcatgcaagcgttgtagttgtaagaagtccaaatgcctgaaactgggctgccgtgttaagcatagaggaacctaagcagggattggaagaaaaggatgtttgtgtgaaagaagagaaaagtgaaatcgagaaacagcttgttgtctaccaaactcctgatgatgctcctgctgaaaatgtactgaccacaccttccatggtgcagtgcagacccttggcttgtcgtccacccccaagctccaagaaaagctccaaaaaaccacgatcttcaacaaaactcactggacatccttcgcggttgtgcaacttacaagctcctccgaagaccgacactatgctctccccattcgaaaactacgcggaaatggtccttggtgatagcacatcggatatcctcaagggaaattcatctcctcaaacttctgttaaagtggtgtcaccaaacaagaagcgaatctctcccctgcgaatgggtaccgggctatctccaatctgtaggagtggcaggaagctgattttaaagtccattccttctttcccttcccttggcggtgatgtaaacaatgaggatccagaaaccaagttgccagccccttgaatttaccatattttgtcactggtttatttctaccataccatctgatagtggacagccaagcgactttcctttcatcatttctatctctctcgatcaatgattatttatgtactgctataataatctgccgcgtgctggcaaaattctgcctccctagaacaaccaatggcatttggtttgctggtaaattatctcttggctccgtgtgttccctgtggctgtctgtctataatttatgttcattattttgttccggagaccgaagaatctgaggacttgtatgtatctgggatcaagatgtgaatctcgcatgtaccagatgacagaactgttaagacttatatttgtctgaggttaaactgcaagacttttatttaagctagaactttgatcactataggatatggcatgatatagcagggctcttgagatgcattctcttgtgcgtgcttggtaactgtagtcgtgcaactgttgacggcgtttgttcagaacaagtggttgatgaatttgaagatggtttagggagtgggaatgattttgtttgtgtgcgtgcgaacttgtaaaatctccgtgtatgaactggcaatgcttttatggtattgatcatctgcggtgtgttaactgagtgcaaaatatggtatttgtgaattgtgatgtgcgatgcaaattcagaagaac

SEQ ID NO: 34945 - DNA, 2978 bp, Zea Mays
ctcaaggcgactactactgtcaatcaggctactgctgctagtttcattagatcaaccatccctactagatggaccaattggcttgctgattctgattctcctgtgttcaatttcatcaacaatctctcgcctataccaccacctaaacctttagactcagcacataatgtgcagctattcaagtcatcagatttggcacctgtttcttcgatctttgcctcaccacatgttaatccaacaaagggaactaaagttctgatcagggacgaatctgttcagcttcctcatgaattgcactcacctagcagtgtcagaactcggataggcacctcaggctcttttagaatgatcagatgcaaagacattgtgccagagaattgtaatatcacttgtcaactaaacgaggcatctattgattcttcagatcatacatcaagctctacaggccaattgactcaatccataaaagatgctgctggcagtatggaaagcgataaggatcaatgcgctggtggtaaaatagaccttaccatgtcccaggagtgcacaggcctagaaggtatgaaccttgatgagagtagcccagacagaatggattcatcacattctgggatagttgttcatgaaaaccagctatctgaacaaaacaatgatgaacctgcggcatataatggggtttacatgattacacaccaatcaagtagtgatatgctgactttagccgtaccatctggaacagaagcacaaccaatgaatgatacacaaaaggctgataatccctacccttgtgaatccttgttggatgttcagtcaagtggaaattgcacccaaaattctgtgcatgaaccccatctgtactggaacggggcagttgaaggggctgcagtagcttatactccccaagcacttcctggtgctttgcaaagtcagttgatgccatgtaacaagctcaatgagccaaaagattacatgcctactgagcaaaatgctttgtcacagcatttacgtggcatgcgtaggcgcagccttttcaatgaaaaggctgggcttagtaataaaggtgtagacaaagcttcagatcatcatcctgtaaattcaactacccccaaatgcaaaaccatttctggtgacaactcaaagactctaagaacccccccatgtgcattgcctggtattggcttgcacttgaatgcccttgccgcaactgcaacacctaaagagaaaatagtccctcaagacattcagtctactataaatgaatcaagtaacttgataggccctgctggatcttctccggcaccttctgagcaaaacattataaatgatgatttcactcaaacaactgatgttgcaaccgctgaagcttctagtcagggtagtcccaagaagaaaaggcataagtttgatagtggtgatggcacttcatgcaagcgttgtagttgtaagaagtccaaatgcctgaaactttactgtgagtgttttgctgctggagtctattgttctgagccttgttcgtgtatcggctgtatgaacaaccagagtcatacggaaactgttctatctacgcggcaacagattgaatctcgcaatccattagcatttgctcctaaagtaattcatacatctgagcctggtctggaactaagggacttctccaataaaactcctgcttcagctcgtcacaaaaggggatgcaattgcaagaagtcgtcatgtctaaaaaaatactgtgaatgttttcaggggctgccgtgttaagcatagaggaacctaagcagggattggaagaaaaggatgtttgtgtgaaagaagagaaaagtgaaatcgagaaacagcttgttgtctaccaaactcctgatgatgctcctgctgaaaatgtactgaccacaccttccatggtgcagtgcagacccttggcttgtcgtccacccccaagctccaagaaaagctccaaaaaaccacgatcttcaacaaaactcactggacatccttcgcggttgtgcaacttacaagctcctccgaagaccgacactatgctctccccattcgaaaactacgcggaaatggtccttggtgatagcacatcggatatcctcaagggaaattcatctcctcaaacttctgttaaagtggtgtcaccaaacaagaagcgaatctctcccctgcgaatgggtaccgggctatctccaatctgtaggagtggcaggaagctgattttaaagtccattccttctttcccttcccttggcggtgatgtaaacaatgaggatccagaaaccaagttgccagccccttgaatttaccatattttgtcactggtttatttctaccataccatctgatagtggacagccaagcgactttcctttcatcatttctatctctctcgatcaatgattatttatgtactgctataataatctgccgcgtgctggcaaaattctgcctccctagaacaaccaatggcatttggtttgctggtaaattatctcttggctccgtgtgttccctgtggctgtctgtctataatttatgttcattattttgttccggagaccgaagaatctgaggacttgtatgtatctgggatcaagatgtgaatctcgcatgtaccagatgacagaactgttaagacttatatttgtctgaggttaaactgcaagacttttatttaagctagaactttgatcactataggatatggcatgatatagcagggctcttgagatgcattctcttgtgcgtgcttggtaactgtagtcgtgcaactgttgacggcgtttgttcagaacaagtggttgatgaatttgaagatggtttagggagtgggaatgattttgtttgtgtgcgtgcgaacttgtaaaatctccgtgtatgaactggcaatgcttttatggtattgatcatctgcggtgtgttaactgagtgcaaaatatggtatttgtgaattgtgatgtgcgatgcaaattcagaagaac

SEQ ID NO: 34946 - DNA, 3127 bp, Zea Mays
ccgatgttggagttggatttgaggtcttcaactcttcacgagttttctctgcgagtgagaggtggggatttggggggccttactcaaggcgactactactgtcaatcaggctactgctgctagtttcattagatcaaccatccctactagatggaccaattggcttgctgattctgattctcctgtgttcaatttcatcaacaatctctcgcctataccaccacctaaacctttagactcagcacataatgtgcagctattcaagtcatcagatttggcacctgtttcttcgatctttgcctcaccacatgttaatccaacaaagggaactaaagttctgatcagggacgaatctgttcagcttcctcatgaattgcactcacctagcagtgtcagaactcggataggcacctcaggctcttttagaatgatcagatgcaaagacattgtgccagagaattgtaatatcacttgtcaactaaacgaggcatctattgattcttcagatcatacatcaagctctacaggccaattgactcaatccataaaagatgctgctggcagtatggaaagcgataaggatcaatgcgctggtggtaaaatagaccttaccatgtcccaggagtgcacaggcctagaaggtatgaaccttgatgagagtagcccagacagaatggattcatcacattctgggatagttgttcatgaaaaccagctatctgaacaaaacaatgatgaacctgcggcatataatggggtttacatgattacacaccaatcaagtagtgatatgctgactttagccgtaccatctggaacagaagcacaaccaatgaatgatacacaaaaggctgataatccctacccttgtgaatccttgttggatgttcagtcaagtggaaattgcacccaaaattctgtgcatgaaccccatctgtactggaacggggcagttgaaggggctgcagtagcttatactccccaagcacttcctggtgctttgcaaagtcagttgatgccatgtaacaagctcaatgagccaaaagattacatgcctactgagcaaaatgctttgtcacagcatttacgtggcatgcgtaggcgcagccttttcaatgaaaaggctgggcttagtaataaaggtgtagacaaagcttcagatcatcatcctgtaaattcaactacccccaaatgcaaaaccatttctggtgacaactcaaagactctaagaacccccccatgtgcattgcctggtattggcttgcacttgaatgcccttgccgcaactgcaacacctaaagagaaaatagtccctcaagacattcagtctactataaatgaatcaagtaacttgataggccctgctggatcttctccggcaccttctgagcaaaacattataaatgatgatttcactcaaacaactgatgttgcaaccgctgaagcttctagtcagggtagtcccaagaagaaaaggcataagtttgatagtggtgatggcacttcatgcaagcgttgtagttgtaagaagtccaaatgcctgaaactttactgtgagtgttttgctgctggagtctattgttctgagccttgttcgtgtatcggctgtatgaacaaccagagtcatacggaaactgttctatctacgcggcaacagattgaatctcgcaatccattagcatttgctcctaaagtaattcatacatctgagcctggtctggaactaagggacttctccaataaaactcctgcttcagctcgtcacaaaaggggatgcaattgcaagaagtcgtcatgtctaaaaaaatactgtgaatgttttcagggtggtgtgggatgctccataagttgcagatgcgagggctgtaagaatgcttttggaaaacgggagggggctgccgtgttaagcatagaggaacctaagcagggattggaagaaaaggatgtttgtgtgaaagaagagaaaagtgaaatcgagaaacagcttgttgtctaccaaactcctgatgatgctcctgctgaaaatgtactgaccacaccttccatggtgcagtgcagacccttggcttgtcgtccacccccaagctccaagaaaagctccaaaaaaccacgatcttcaacaaaactcactggacatccttcgcggttgtgcaacttacaagctcctccgaagaccgacactatgctctccccattcgaaaactacgcggaaatggtccttggtgatagcacatcggatatcctcaagggaaattcatctcctcaaacttctgttaaagtggtgtcaccaaacaagaagcgaatctctcccctgcgaatgggtaccgggctatctccaatctgtaggagtggcaggaagctgattttaaagtccattccttctttcccttcccttggcggtgatgtaaacaatgaggatccagaaaccaagttgccagccccttgaatttaccatattttgtcactggtttatttctaccataccatctgatagtggacagccaagcgactttcctttcatcatttctatctctctcgatcaatgattatttatgtactgctataataatctgccgcgtgctggcaaaattctgcctccctagaacaaccaatggcatttggtttgctggtaaattatctcttggctccgtgtgttccctgtggctgtctgtctataatttatgttcattattttgttccggagaccgaagaatctgaggacttgtatgtatctgggatcaagatgtgaatctcgcatgtaccagatgacagaactgttaagacttatatttgtctgaggttaaactgcaagacttttatttaagctagaactttgatcactataggatatggcatgatatagcagggctcttgagatgcattctcttgtgcgtgcttggtaactgtagtcgtgcaactgttgacggcgtttgttcagaacaagtggttgatgaatttgaagatggtttagggagtgggaatgattttgtttgtgtgcgtgcgaacttgtaaaatctccgtgtatgaactggcaatgcttttatggtattgatcatctgcggtgtgttaactgagtgcaaaatatggtatttgtgaattgtgatgtgcgatgcaaattcagaagaac

SEQ ID NO: 34947 - DNA, 2998 bp, Zea Mays
atcaaacgcacgcatccgagccaagccgaggccgaccgactgcaaggattctcctgtgttcaatttcatcaacaatctctcgcctataccaccacctaaacctttagactcagcacataatgtgcagctattcaagtcatcagatttggcacctgtttcttcgatctttgcctcaccacatgttaatccaacaaagggaactaaagttctgatcagggacgaatctgttcagcttcctcatgaattgcactcacctagcagtgtcagaactcggataggcacctcaggctcttttagaatgatcagatgcaaagacattgtgccagagaattgtaatatcacttgtcaactaaacgaggcatctattgattcttcagatcatacatcaagctctacaggccaattgactcaatccataaaagatgctgctggcagtatggaaagcgataaggatcaatgcgctggtggtaaaatagaccttaccatgtcccaggagtgcacaggcctagaaggtatgaaccttgatgagagtagcccagacagaatggattcatcacattctgggatagttgttcatgaaaaccagctatctgaacaaaacaatgatgaacctgcggcatataatggggtttacatgattacacaccaatcaagtagtgatatgctgactttagccgtaccatctggaacagaagcacaaccaatgaatgatacacaaaaggctgataatccctacccttgtgaatccttgttggatgttcagtcaagtggaaattgcacccaaaattctgtgcatgaaccccatctgtactggaacggggcagttgaaggggctgcagtagcttatactccccaagcacttcctggtgctttgcaaagtcagttgatgccatgtaacaagctcaatgagccaaaagattacatgcctactgagcaaaatgctttgtcacagcatttacgtggcatgcgtaggcgcagccttttcaatgaaaaggctgggcttagtaataaaggtgtagacaaagcttcagatcatcatcctgtaaattcaactacccccaaatgcaaaaccatttctggtgacaactcaaagactctaagaacccccccatgtgcattgcctggtattggcttgcacttgaatgcccttgccgcaactgcaacacctaaagagaaaatagtccctcaagacattcagtctactataaatgaatcaagtaacttgataggccctgctggatcttctccggcaccttctgagcaaaacattataaatgatgatttcactcaaacaactgatgttgcaaccgctgaagcttctagtcagggtagtcccaagaagaaaaggcataagtttgatagtggtgatggcacttcatgcaagcgttgtagttgtaagaagtccaaatgcctgaaactttactgtgagtgttttgctgctggagtctattgttctgagccttgttcgtgtatcggctgtatgaacaaccagagtcatacggaaactgttctatctacgcggcaacagattgaatctcgcaatccattagcatttgctcctaaagtaattcatacatctgagcctggtctggaactaagggacttctccaataaaactcctgcttcagctcgtcacaaaaggggatgcaattgcaagaagtcgtcatgtctaaaaaaatactgtgaatgttttcagggtggtgtgggatgctccataagttgcagatgcgagggctgtaagaatgcttttggaaaacgggagggggctgccgtgttaagcatagaggaacctaagcagggattggaagaaaaggatgtttgtgtgaaagaagagaaaagtgaaatcgagaaacagcttgttgtctaccaaactcctgatgatgctcctgctgaaaatgtactgaccacaccttccatggtgcagtgcagacccttggcttgtcgtccacccccaagctccaagaaaagctccaaaaaaccacgatcttcaacaaaactcactggacatccttcgcggttgtgcaacttacaagctcctccgaagaccgacactatgctctccccattcgaaaactacgcggaaatggtccttggtgatagcacatcggatatcctcaagggaaattcatctcctcaaacttctgttaaagtggtgtcaccaaacaagaagcgaatctctcccctgcgaatgggtaccgggctatctccaatctgtaggagtggcaggaagctgattttaaagtccattccttctttcccttcccttggcggtgatgtaaacaatgaggatccagaaaccaagttgccagccccttgaatttaccatattttgtcactggtttatttctaccataccatctgatagtggacagccaagcgactttcctttcatcatttctatctctctcgatcaatgattatttatgtactgctataataatctgccgcgtgctggcaaaattctgcctccctagaacaaccaatggcatttggtttgctggtaaattatctcttggctccgtgtgttccctgtggctgtctgtctataatttatgttcattattttgttccggagaccgaagaatctgaggacttgtatgtatctgggatcaagatgtgaatctcgcatgtaccagatgacagaactgttaagacttatatttgtctgaggttaaactgcaagacttttatttaagctagaactttgatcactataggatatggcatgatatagcagggctcttgagatgcattctcttgtgcgtgcttggtaactgtagtcgtgcaactgttgacggcgtttgttcagaacaagtggttgatgaatttgaagatggtttagggagtgggaatgattttgtttgtgtgcgtgcgaacttgtaaaatctccgtgtatgaactggcaatgcttttatggtattgatcatctgcggtgtgttaactgagtgcaaaatatggtatttgtgaattgtgatgtgcgatgcaaattcagaagaac

SEQ ID NO: 34948 - DNA, 3577 bp, Zea Mays
cccacgcggttttcgtgtttgctgccgccgcggtttccattgcttctcccgtcgctagggcgttcgtgaatacgtgatccatcgtctccatctccgtctggtgtggtgtgttggtttgagagactcgaggtgtgggcgtcgcttcgtctggaatcggctctcccatttgttagatagatccttcatatctccccacgtctgggcgtcgcttcgtcggctgcgacctgcgagacgccggcgccgccggcgacggtggacgaaggcgatcaaggattaggcgatccgatccgatccgaaccaattctccattcttcgattccttccttgggtgggcggctcccctcagattccttccacatggctcgttccccgccgccgccacccccttccccggcgcaagggaacgggaacgggagtgggagcgggagcctcaccgccagagacgccctcgcctacatcaaggccatcaaggacaacttccaggataagcggcacatgtacgaacagttcctccaggtcatgcgtgattttaagagcaacaggctcgacagcgccggcgtgatcgcccgtgtcaagaccctcttccacggctacccggacctagtcctcggcatcagcgccttcctgcccaaggggcatgccatcaggcctcaggacctcagcgaggacaaggagcccgtcgattatcccagggccatcaaccttgtcaacaggattaagatacgattccagcaggaggaacatgtctacaagtcattcctgggaatcctcagtatgtaccgcatggataacaaacccattcaagatgtttacgacgaggtcaccttgctgttccacggccatccagatttactcgaggagttcactcatttcttgcctgatacgcccatacctcctccggaggcaggcactacctctaaagttaggaatgatgacaagaatgctataacgcattctgccatgagagctcagacagttcagagggagagagctcttccatcagctgctgattcggactccagtgttgattgccttgatcttgagcatgatattcaaaaagagtgtattgagaaggacaaagtccataatgcctgccatgatcagcatagaggagattataaaaggaacaggaagaatgacgaatatgaaaacgaagatttggattcagaacaatctggtctcaaatctcaaagaaaggtggagggtactggtgatgatacaccagggattgctaccatgtcctcattcaattgtaatgagggggacaacgatcctgaggaagagtctaaagttaggaatgatgacaagaatgctataatgcattctgccatgagagctcagacagttcagagggagagagctcttccatcagctgctgattcggactccagtgttgatcgccttgatcttgagcatgatattcaaaaagggtgtattgagaaggacaaagtccgtaatgcctgccatggtcagcatagaagatattataaaaggaataggaagaatgacaaatatgaaaacgaagatttggatgcagaacaatctgttcccaaatctcaaagaaaggtggagggtaccggtgatgatacaccaggggttgctaccatgtcgtcattcaattgtaacgagggggacagcgatcctgagaaagagtctaaagttaggaatgatgacaagaatgctataatgcattctgccatgagagctcagacagttcagagggatagagctcttccatcagctgctgattcagactccagtgttgatcgccttgatcttgagcatgatattcaaaaagggtgtattgagaaggacaaagtccgtaatgcctgccacggtcagcatagaagggattataaaagaaataggaagaatgacgaatatgaaaatgaagatttggatgcagaacgatctggtcccaaatctcaaagaaaggtggagggtactggtgatgattcaccggggattgctgccatgtcctcattcaattgtaacgagggggacagcgatcctgagaaagagagatataatgaaagggaaaaatttgaaagagtattgaccttcaattctaaggaaggagcagctcatgaagctagtacattccctagcaaagagaagtataacttatgcaaaccaatatcagagcttgatctgtcaaattgtcagtggtgcactccaagttaccgacttttgcctaaaaactatccagtaccttctgcaagcaaaaggactgacattgaagcttcagtgctgaatgatttctgtgtattggtgacctcaggaagtggagcgtttaagcatatgcgcaaaaatcagtatgaagaaatcttgtttatatgtgaagatgacatgtttgagctggacgtgctgttggaatctgttagtgttacaattaagcgtgttggggagttggtggaaagtatggaaggcaactcactgaaacctgatagctctatccacctcaatgaacatttgactagtttgaatatgaggtgcattgagtggctatatggtgaccatggacttgatgttgtggatgttcttcaaaaaaatgctggtgtgacattaccagttattttaaccaggctgaaacaaaagcaggaggagtggtcaatgtgccagtcagattttaataaagtttgggctgaagtatattcaaaaaattatcgcaagtctcttgactatcgcagtttctattccaaacaacaagacacaagaatctgaacacaaaagattaacgaaatcagtgagaagaatagaaaggggatgatgtgttacttgctattgctgctgggaataggtggccactagtaggcaagaagcagaggactgctggaaagcgttgggctctgaagaagcacaggcacccgcccgcctgggctaccgccgcccttgcttgtgtcgagggcctccaagaaccgcaccacctcgtccatgtcagggcgcttctccgggctcgcgtcccagcacttgtgcatgatgttcgccatcgggcaggcttgggcagcagcgagaggccgcaggttctgcacacacagaatgtcacacatcagtatgtggacgattaccagcagtgaatccaggagaagagtagaaagtgggatgatgtgttacttgctattgctgctgggaataggtagccagtagtaggcaaggaggtctcgtcctctgttctgatttctcgtttgaaggtctcgtccttgacatggatccgccggcacccatgctgtcacttcaagttgttaagtcttcatcgcaacaacttttactcaaggattcatcacaacagattacaccgatgcctccttcatttgcagttgttgcatcatcacatctgctgccagccatgcctcctacaacagatgctgtttctttagcaccccacccaggacaatcaagagacttgtcaaaaagattactctgaagaagaagatgaatgccaagtcaggctgatttgagcggtgttccagttgcagttgcttattgtatctgttaagcaacagatgttgctattgtactcttctaatctaactaggtctgtacccgtgcgttgccacgggagtaaaaatttagcgtg

SEQ ID NO: 34949 - DNA, 2576 bp, Zea Mays
cccacgcggttttcgtgtttgctgccgccgcggtttccattgcttctcccgtcgctagggcgttcgtgaatacgtgatccatcgtctccatctccgtctggtgtggtgtgttggtttgagagactcgaggtgtgggcgtcgcttcgtctggaatcggctctcccatttgttagatagatccttcatatctccccacgtctgggcgtcgcttcgtcggctgcgacctgcgagacgccggcgccgccggcgacggtggacgaaggcgatcaaggattaggcgatccgatccgatccgaaccaattctccattcttcgattccttccttgggtgggcggctcccctcagattccttccacatggctcgttccccgccgccgccacccccttccccggcgcaagggaacgggaacgggagtgggagcgggagcctcaccgccagagacgccctcgcctacatcaaggccatcaaggacaacttccaggataagcggcacatgtacgaacagttcctccaggtcatgcgtgattttaagagcaacaggctcgacagcgccggcgtgatcgcccgtgtcaagaccctcttccacggctacccggacctagtcctcggcatcagcgccttcctgcccaaggggcatgccatcaggcctcaggacctcagcgaggacaaggagcccgtcgattatcccagggccatcaaccttgtcaacaggattaagatacgattccagcaggaggaacatgtctacaagtcattcctgggaatcctcagtatgtaccgcatggataacaaacccattcaagatgtttacgacgaggtcaccttgctgttccacggccatccagatttactcgaggagttcactcatttcttgcctgatacgcccatacctcctccggaggcaggcactacctctaaagttaggaatgatgacaagaatgctataacgcattctgccatgagagctcagacagttcagagggagagagctcttccatcagctgctgattcggactccagtgttgatcgccttgatcttgagcatgatattcaaaaagggtgtattgagaaggacaaagtccgtaatgcctgccatggtcagcatagaagatattataaaaggaataggaagaatgacaaatatgaaaacgaagatttggatgcagaacaatctgttcccaaatctcaaagaaaggtggagggtaccggtgatgatacaccaggggttgctaccatgtcgtcattcaattgtaacgagggggacagcgatcctgagaaagagtctaaagttaggaatgatgacaagaatgctataatgcattctgccatgagagctcagacagttcaggtttgagctggacgtgctgttggaatctgttagtgttacaattaagcgtgttggggagttggtggaaagtatggaaggcaactcactgaaacctgatagctctatccacctcaatgaacatttgactagtttgaatatgaggtgcattgagtggctatatggtgaccatggacttgatgttgtggatgttcttcaaaaaaatgctggtgtgacattaccagttattttaaccaggctgaaacaaaagcaggaggagtggtcaatgtgccagtcagattttaataaagtttgggctgaagtatattcaaaaaattatcgcaagtctcttgactatcgcagtttctattccaaacaacaagacacaagaatctgaacacaaaagattaacgaaatcagtgagaagaatagaaaggggatgatgtgttacttgctattgctgctgggaataggtggccactagtaggcaagaagcagaggactgctggaaagcgttgggctctgaagaagcacaggcacccgcccgcctgggctaccgccgcccttgcttgtgtcgagggcctccaagaaccgcaccacctcgtccatgtcagggcgcttctccgggctcgcgtcccagcacttgtgcatgatgttcgccatcgggcaggcttgggcagcagcgagaggccgcaggttctgcacacacagaatgtcacacatcagtatgtggacgattaccagcagtgaatccaggagaagagtagaaagtgggatgatgtgttacttgctattgctgctgggaataggtagccagtagtaggcaaggaggtctcgtcctctgttctgatttctcgtttgaaggtctcgtccttgacatggatccgccggcacccatgctgtcacttcaagttgttaagtcttcatcgcaacaacttttactcaaggattcatcacaacagattacaccgatgcctccttcatttgcagttgttgcatcatcacatctgctgccagccatgcctcctacaacagatgctgtttctttagcaccccacccaggacaatcaagagacttgtcaaaaagattactctgaagaagaagatgaatgccaagtcaggctgatttgagcggtgttccagttgcagttgcttattgtatctgttaagcaacagatgttgctattgtactcttctaatctaactaggtctgtacccgtgcgttgccacgggagtaaaaatttagcgtg

SEQ ID NO: 34950 - DNA, 3212 bp, Zea Mays
cccacgcggttttcgtgtttgctgccgccgcggtttccattgcttctcccgtcgctagggcgttcgtgaatacgtgatccatcgtctccatctccgtctggtgtggtgtgttggtttgagagactcgaggtgtgggcgtcgcttcgtctggaatcggctctcccatttgttagatagatccttcatatctccccacgtctgggcgtcgcttcgtcggctgcgacctgcgagacgccggcgccgccggcgacggtggacgaaggcgatcaaggattaggcgatccgatccgatccgaaccaattctccattcttcgattccttccttgggtgggcggctcccctcagattccttccacatggctcgttccccgccgccgccacccccttccccggcgcaagggaacgggaacgggagtgggagcgggagcctcaccgccagagacgccctcgcctacatcaaggccatcaaggacaacttccaggataagcggcacatgtacgaacagttcctccaggtcatgcgtgattttaagagcaacaggctcgacagcgccggcgtgatcgcccgtgtcaagaccctcttccacggctacccggacctagtcctcggcatcagcgccttcctgcccaaggggcatgccatcaggcctcaggacctcagcgaggacaaggagcccgtcgattatcccagggccatcaaccttgtcaacaggattaagatacgattccagcaggaggaacatgtctacaagtcattcctgggaatcctcagtatgtaccgcatggataacaaacccattcaagatgtttacgacgaggtcaccttgctgttccacggccatccagatttactcgaggagttcactcatttcttgcctgatacgcccatacctcctccggaggcaggcactacctctaaagttaggaatgatgacaagaatgctataacgcattctgccatgagagctcagacagttcaggtgaatcaacaaattatagaattttcaattctagttgattcttcaattgctataatttatactctcctccaacaatgtaggccatatcatttttaggacagtctccacaattgcgataacactaagttaatcttaaatttcctttgtatgtgaatctattgatgacacttttgtacactgaactggtaaataggttggcaaattgttgttcaaatgttacatactttgacttattcaaataaaatatttgttacttttttgaacagagtgatttgttcctgcatttacctttaaacttcaagatgctatgttcttatcttctctatatctccagagggagagagctcttccatcagctgctgattcggactccagtgttgattgccttgatcttgagcatgatattcaaaaagagtgtattgagaaggacaaagtccataatgcctgccatgatcagcatagaggagattataaaaggaacaggaagaatgacgaatatgaaaacgaagatttggattcagaacaatctggtctcaaatctcaaagaaaggtggagggtactggtgatgatacaccagggattgctaccatgtcctcattcaattgtaatgagggggacaacgatcctgaggaagagtctaaagttaggaatgatgacaagaatgctataatgcattctgccatgagagctcagacagttcagagggagagagctcttccatcagctgctgattcggactccagtgttgatcgccttgatcttgagcatgatattcaaaaagggtgtattgagaaggacaaagtccgtaatgcctgccatggtcagcatagaagatattataaaaggaataggaagaatgacaaatatgaaaacgaagatttggatgcagaacaatctgttcccaaatctcaaagaaaggtggagggtaccggtgatgatacaccaggggttgctaccatgtcgtcattcaattgtaacgagggggacagcgatcctgagaaagagtctaaagttaggaatgatgacaagaatgctataatgcattctgccatgagagctcagacagttcaggtttgagctggacgtgctgttggaatctgttagtgttacaattaagcgtgttggggagttggtggaaagtatggaaggcaactcactgaaacctgatagctctatccacctcaatgaacatttgactagtttgaatatgaggtgcattgagtggctatatggtgaccatggacttgatgttgtggatgttcttcaaaaaaatgctggtgtgacattaccagttattttaaccaggctgaaacaaaagcaggaggagtggtcaatgtgccagtcagattttaataaagtttgggctgaagtatattcaaaaaattatcgcaagtctcttgactatcgcagtttctattccaaacaacaagacacaagaatctgaacacaaaaggtggccactagtaggcaagaagcagaggactgctggaaagcgttgggctctgaagaagcacaggcacccgcccgcctgggctaccgccgcccttgcttgtgtcgagggcctccaagaaccgcaccacctcgtccatgtcagggcgcttctccgggctcgcgtcccagcacttgtgcatgatgttcgccatcgggcaggcttgggcagcagcgagaggccgcaggttctgcacacacagaatgtcacacatcagtatgtggacgattaccagcagtgaatccaggagaagagtagaaagtgggatgatgtgttacttgctattgctgctgggaataggtagccagtagtaggcaaggaggtctcgtcctctgttctgatttctcgtttgaaggtctcgtccttgacatggatccgccggcacccatgctgtcacttcaagttgttaagtcttcatcgcaacaacttttactcaaggattcatcacaacagattacaccgatgcctccttcatttgcagttgttgcatcatcacatctgctgccagccatgcctcctacaacagatgctgtttctttagcaccccacccaggacaatcaagagacttgtcaaaaagattactctgaagaagaagatgaatgccaagtcaggctgatttgagcggtgttccagttgcagttgcttattgtatctgttaagcaacagatgttgctattgtactcttctaatctaactaggtctgtacccgtgcgttgccacgggagtaaaaatttagcgtg

SEQ ID NO: 34951 - DNA, 2747 bp, Zea Mays
cccacgcggttttcgtgtttgctgccgccgcggtttccattgcttctcccgtcgctagggcgttcgtgaatacgtgatccatcgtctccatctccgtctggtgtggtgtgttggtttgagagactcgaggtgtgggcgtcgcttcgtctggaatcggctctcccatttgttagatagatccttcatatctccccacgtctgggcgtcgcttcgtcggctgcgacctgcgagacgccggcgccgccggcgacggtggacgaaggcgatcaaggattaggcgatccgatccgatccgaaccaattctccattcttcgattccttccttgggtgggcggctcccctcagattccttccacatggctcgttccccgccgccgccacccccttccccggcgcaagggaacgggaacgggagtgggagcgggagcctcaccgccagagacgccctcgcctacatcaaggccatcaaggacaacttccaggataagcggcacatgtacgaacagttcctccaggtcatgcgtgattttaagagcaacaggctcgacagcgccggcgtgatcgcccgtgtcaagaccctcttccacggctacccggacctagtcctcggcatcagcgccttcctgcccaaggggcatgccatcaggcctcaggacctcagcgaggacaaggagcccgtcgattatcccagggccatcaaccttgtcaacaggattaagatacgattccagcaggaggaacatgtctacaagtcattcctgggaatcctcagtatgtaccgcatggataacaaacccattcaagatgtttacgacgaggtcaccttgctgttccacggccatccagatttactcgaggagttcactcatttcttgcctgatacgcccatacctcctccggaggcaggcactacctctaaagttaggaatgatgacaagaatgctataacgcattctgccatgagagctcagacagttcaggtgaatcaacaaattatagaattttcaattctagttgattcttcaattgctataatttatactctcctccaacaatgtaggccatatcatttttaggacagtctccacaattgcgataacactaagttaatcttaaatttcctttgtatgtgaatctattgatgacacttttgtacactgaactggtaaataggttggcaaattgttgttcaaatgttacatactttgacttattcaaataaaatatttgttacttttttgaacagagagattataaaaggaacaggaagaatgacgaatatgaaaacgaagatttggattcagaacaatctggtctcaaatctcaaagaaaggtggagggtactggtgatgatacaccagggattgctaccatgtcctcattcaattgtaatgagggggacaacgatcctgaggaagagtctaaagttaggaatgatgacaagaatgctataatgcattctgccatgagagctcagacagttcagagggagagagctcttccatcagctgctgattcggactccagtgttgatcgccttgatcttgagcatgatattcaaaaagggtgtattgagaaggacaaagtccgtaatgcctgccatggtcagcatagaagatattataaaaggaataggaagaatgacaaatatgaaaacgaagatttggatgcagaacaatctgttcccaaatctcaaagaaaggtggagggtaccggtgatgatacaccaggggttgctaccatgtcgtcattcaattgtaacgagggggacagcgatcctgagaaagagtctaaagttaggaatgatgacaagaatgctataatgcattctgccatgagagctcagacagttcagagggatagagctcttccatcagctgctgattcagactccagtgttgatcgccttgatcttgagcatgatattcaaaaagggtgtattgagaaggacaaagtccgtaatgcctgccacggtcagcatagaagggattataaaagaaataggaagaatgacgaatatgaaaatgaagatttggatgcagaacgatctggtcccaaatctcaaagaaaggtggagggtactggtgatgattcaccggggattgctgccatgtcctcattcaattgtaacgagggggacagcgatcctgagaaagagagatataatgaaagggaaaaatttgaaagagtattgaccttcaattctaaggaaggagcagctcatgaagctagtacattccctagcaaagagaagtataacttatgcaaaccaatatcagagcttgatctgtcaaattgtcagtggtgcactccaagttaccgacttttgcctaaaaactatccagtaccttctgcaagcaaaaggactgtgtcaaggacctggaatccccgacttgccggaccacggctacgtagctcgtagccgtcggccgtcctctccggttggggttatgcccccctaaccgcaggcttgtgaggctggaggtggaagaagagacaaattccttattgctataaccgtgcagcatagctgggtatatatggccgtcggccacctacaaatggagcaagtctccttgattttctctagcctgattgattgcttctttcctattcttatccctctttcctaatctcagcccctgctatctgtggctgatttgcagcacctgattttagccctctttcctaatctcagccacttgccattggtggctgatttgcagcatgcgctgctgcctgctct

SEQ ID NO: 34952 - DNA, 1815 bp, Zea Mays
cccacgcggttttcgtgtttgctgccgccgcggtttccattgcttctcccgtcgctagggcgttcgtgaatacgtgatccatcgtctccatctccgtctggtgtggtgtgttggtttgagagactcgaggtgtgggcgtcgcttcgtctggaatcggctctcccatttgttagatagatccttcatatctccccacgtctgggcgtcgcttcgtcggctgcgacctgcgagacgccggcgccgccggcgacggtggacgaaggcgatcaaggattaggcgatccgatccgatccgaaccaattctccattcttcgattccttccttgggtgggcggctcccctcagattccttccacatggctcgttccccgccgccgccacccccttccccggcgcaagggaacgggaacgggagtgggagcgggagcctcaccgccagagacgccctcgcctacatcaaggccatcaaggacaacttccaggataagcggcacatgtacgaacagttcctccaggtcatgcgtgattttaagagcaacaggctcgacagcgccggcgtgatcgcccgtgtcaagaccctcttccacggctacccggacctagtcctcggcatcagcgccttcctgcccaaggggcatgccatcaggcctcaggacctcagcgaggacaaggagcccgtcgattatcccagggccatcaaccttgtcaacaggattaagatacgattccagcaggaggaacatgtctacaagtcattcctgggaatcctcagtatgtaccgcatggataacaaacccattcaagatgtttacgacgaggtcaccttgctgttccacggccatccagatttactcgaggagttcactcatttcttgcctgatacgcccatacctcctccggaggcaggcactacctctaaagttaggaatgatgacaagaatgctataacgcattctgccatgagagctcagacagttcagagtgatttgttcctgcatttacctttaaacttcaagatgctatgttcttatcttctctatatctccagagggagagagctcttccatcagctgctgattcggactccagtgttgattgccttgatcttgagcatgatattcaaaaagagtgtattgagaaggacaaagtccataatgcctgccatgatcagcatagaggagattataaaaggaacaggaagaatgacgaatatgaaaacgaagatttggattcagaacaatctggtctcaaatctcaaagaaaggtggagggtactggtgatgatacaccagggattgctaccatgtcctcattcaattgtaatgagggggacaacgatcctgaggaagagtctaaagttaggaatgatgacaagaatgctataatgcattctgccatgagagctcagacagttcagagggagagagctcttccatcagctgctgattcggactccagtgttgatcgccttgatcttgagcatgatattcaaaaagggtgtattgagaaggacaaagtccgtaatgcctgccatggtcagcatagaagatattataaaaggaataggaagaatgacaaatatgaaaacgaagatttggatgcagaacaatctgttcccaaatctcaaagaaaggtggagggtaccggtgatgatacaccaggggttgctaccatgtcgtcattcaattgtaacgagggggacagcgatcctgagaaagagtctaaagttaggaatgatgacaagaatgctataatgcattctgccatgagagctcagacagttcagagtgatttgttcctgcatttacctttaa

SEQ ID NO: 34953 - DNA, 2408 bp, Zea Mays
attctgtgttgattacaggaagttgaatgagatgactataaagaacatatttccaatgcctctggtggatgagattttggatgaattggctggagctcagttcttcataagtctagacatgacaataggctaccaccatattagaatgggggttgaatatgaatacaagactgctttcaaaacacaccatggccattatcagtttagggtgatgccatttggtctcactaatgcaccagccagttttcaatgtgccatgaactcagttttggagagttttctaaggaagttgtgatgttttttctagatgacattctcatatatagtcccaacctagaaacatgtatttaccatatcaagttggttttagctaagctgagggagcatcagttttacttaaagttgaagaagtgttcctttgtgaagcatgagttgaagtatttgggccctgtgatttctagggagggtggcaacagattccagtaaaactgcagtcatgttgtcttggccacaacccagaaatgttacggaactcaggggatttttgggtctaactatatactatagaaagtttgtcaaaggttatggactcttggcaaagcctctcacaaaactgttgcctattcctcaagggatgtgaccatggactttattgaaggattgccaagatctgaagggtttgatactatacttgtggtggtggacagattttctaagtacattcatttttcctctgaagcatccattcactgccgaagtggttgctcaaattttcctggacaatgtgatcaagctgcatggggtgcctaaatctatagtgtctgatcgtgacaaagtcttcaccagcagtttctggaagcatttttccagctcatggaggtgaagctcttactttctattgtgtaccatccacaaactgatggctaaagcgagagggtaaatcagtgtgtggagatgtacctcaggtgtgctgtctacaatcagccccaccaatggaaaaaatggttggccttagttgagtattggtatacctctaacaaccattcggtgttgggtttcactccctccagagcactgtatggctatgaagcaccactcctagtcacccctcgactcattggaattgaggataaggaggctactgactagattactgagaggtcagctttctcagccatgttgaaggagcaattggctcgggcttaacttcgtatgaagcagtatgctaataagggcagaactccaagagagtttcaagtgggagacctagttctactcaaattacaaccttatgcatagaagactgtggtgaaccaaccttgtctgaagctggcgtttaaattctttgggccattcaagggcttggctaggattggaccagtcgcttatagacttgcattgcctgcagatgcccaagttcatcatgtttttcatgtgtctcaactcaagtcgttccttccttgctactcgcctgtgtttacaacattaccaatggtgtctgatctatctcaaggggagattgtgcctgaacaggtgttggatcaaagaatggtgcataagggcaatcattctattacttaggaattggtgaagtggactgggctacctgaggcaactgctacatgggaagattactctattgttaaggcacgttttccaacagcaaacacttggggtcaagtgtcatttgaggtctggggagatgtgaggactgcagaagggaccagtgaggtgtgaaggagtagctggggcgtggtcagataccatggttgagttcgtttctgcttcttttgtattctcagttgtaagggagtctgtattctggtgattgggccgtataaaccaaattagctctgtaatgggccgtactaggggaattagcacatgtaagggtggatataaataatgtaccagacaacttgagagaattatgaatgaaatagaagagaatctaaatagttcaaccacttgcctggtttgttggcgtcctctggcaccgctcacgtcgtggtgatccttcaccgtcggcgaggggttgtcacacattcgcgttagcgaagacgaggaacaaccaatcagggtcgggggcgagacgcgagcgcgtacgattgcccacgagcgtcgaacgaaccgaagggatggcgatgctcgtgcgaggagggggaggcagtgttaggatcaggcttggcggtggcggcgaggatgaggagtctgtccttggcctcgtcgtggttgcggttgtcgtcatcatccgtggagaggttgatgcaggagcagcgctcgagggaggcgaagaaggcagagttagcatgagcaaggtcgaggcgttgtatgagctgttcacgaagatcaataatgttgtgattgatgatgggctgatcaacaagggttgtatttggcttatttaa

SEQ ID NO: 34954 - DNA, 1030 bp, Zea Mays
tcgaatcgggtcggtcttgtcgtgcgtcgtggctgcgcgagcgactcgactgcacccaacccccctcctcccagtccccacacactgcgcgccgccgccggatcctcctagggtttcgccgcaatgtcgctccggccgagcgagcgggagcagatgcggaagggcaactacaagcagacggtggacgcggaggagagtcgctgccgctgcgagggccagatgatggacatgcgcaaggccaagcgcgaggaaagtttccaaaagaagcgctgcgatgggtttcccgcctccgccgccggtgtgccgccgatgggccactccaccgcgctccagcagaagggtatgggtgacgtggtggcactcgatctgctgggttcggatctgattttcttggtgacgggatggcttgccggcgatggtgcaggccgtccactccaacgacccctccgtgcagcttgaggccaccacacagttcaggaagctactttctatagtcccccaatcgaagaggtgatcagcacaggagtggtgccgcgattcattgagtttcttacacgtgaggaccatccccaactccagtttgaggctgcatgggcactcaccaacattgcatcaggcacatcagagaacactaaggtggtggttgagagtggtgctgtgcccatctttgtcaagctactcaactccctcaagcgaggatgttcgtgaatagacatgcactaaattacaagagatgtgtcatattatgaccagaggtggatccagaatttttctatgaccccagccaaatctaccaaattttcttctctttattttatcttaactattttataccatattaaatagagacttatatagagttacatggatcaagccctgggccacagatcgggtggcctggggtgtagatccgccactgattatgactatggatgagacttttgtgatgtaattgatgagactatggatttaaatattgttatgtgattgtgtgtgagatgttttatgtgaaaatatgttgtgttatata

SEQ ID NO: 34955 - DNA, 1657 bp, Zea Mays
tcgaatcgggtcggtcttgtcgtgcgtcgtggctgcgcgagcgactcgactgcacccaacccccctcctcccagtccccacacactgcgcgccgccgccggatcctcctagggtttcgccgcaatgtcgctccggccgagcgagcgggagcagatgcggaagggcaactacaagcagacggtggacgcggaggagagtcgctgccgctgcgagggccagatgatggacatgcgcaaggccaagcgcgaggaaagtttccaaaagaagcgctgcgatgggtttcccgcctccgccgccggtgtgccgccgatgggccactccaccgcgctccagcagaaggccgtccactccaacgacccctccgtgcagcttgaggccaccacacagttcaggaagctactttctataggtgagattggaatcttatgtgcagttagcattccggatggatagagtttaggggttgagattttggccatgctcgaggtattaggccatacccaaacgtgagggtatggtcagttgtagctgtttcgggtaattgttgtatacaggacttgacttgtggattgcgagctatcaaaattagtcgttgcaccctctcattttcagattacttaatttactgtctcctcagaaaaaaaacaaaccctatcctatggcctttgcaacatgcatatgaccatgtatgcccaaaagttctgaaaaaagttatactcttgaaagcatttgatttcatgaaccactattctttttttccagtagtgttctgcttgcagctggggcaattatcattgcatccatgtgtgtgtttgcgcgtgcgtgtgtgtgttatacattgttctattgtcttaaaatggtatgcagactatgtgtgtgtttgcgcattagtgtgtgtgttatacattgttttattgtcttaaaaagatcatggagagtctgtgtacctcttttcatattcttgtacatcgtagatagcagctttgatatcttgtgggattcttgtatttgttggtgaatccagatgagtgcacggtacttctttcttaattcccactacaactttatgtgaaagttaagtagtaacttgctgattgagtttccataaatttctctcgtagtcccccaatcgaagaggtgatcagcacaggagtggtgccgcgattcattgagtttcttacacgtgaggaccatccccaactccagtttgaggctgcatgggcactcaccaacattgcatcaggcacatcagagaacactaaggtggtggttgagagtggtgctgtgcccatctttgtcaagctactcaactccctcaagcgaggatgttcgtgaatagacatgcactaaattacaagagatgtgtcatattatgaccagaggtggatccagaatttttctatgaccccagccaaatctaccaaattttcttctctttattttatcttaactattttataccatattaaatagagacttatatagagttacatggatcaagccctgggccacagatcgggtggcctggggtgtagatccgccactgattatgactatggatgagacttttgtgatgtaattgatgagactatggatttaaatattgttatgtgattgtgtgtgagatgttttatgtgaaaatatgttgtgttatata

SEQ ID NO: 34956 - DNA, 1401 bp, Zea Mays
ctgaagttgtagagtattttgtgtagatactgctagagtatttgtttgatatcaccgctgttttaattttaaagatacaaaattaacaaacagtgttgctgctgtatggcatatggttcagggtgggagtctttccactgggtcttggtttcaagtgtaggagtgttttgttgattgatggcaaatgtttgtgaaatatttgtactaagtttcatgctcgctagcaggtggctacactccagatcatgtctagtagatttattattcttcgatgaaggcaagtgaatgtagcggtggttgcttccgttctgacctgttatttctattgcctacactctaatattcagaagtattggattctttcataattggactctacggtgatgctttacttgcttgcattatactgatgctcaatcatatattgatgatgattatgattcgagtatgattcatgagattaattcacacccctgaaggtaaatgaagtattatttgaggtttgtattgtatctgaaggtaaatgaagtattatttgaggttggtattgtatgtgaaggtaaataaagtattatttgaggtttgtattatatctgaaggaagtgaaggttattgataaatgcagcatgccatatacattgcatgactcatttgcatctgaagttttgtcgtgacctatggtccgaccgtaccggtacaatttagcatcgtacgttgcccgaggaggggtacgatgcggcttcatacccttaggggtatgaaggcagaggacatatgcattgaattcatatgcattcattgaagtgatatttgcagatgatgtggttttatactctcagaggtatgaagatagagtacctacacattgcattcctatgcatacattgaagtgatatttgcaggtattgttaacgcagggaagtgttatagaacctattgtggttgttcgaggaaatgagatggtattggttatagtgggactactgagttccatatccacaagtatttctgattttaattgtgactcttttaaaatgttgatgaattcaatttgtggtttaaatatctcgtcaaaattattcgcttgctgagatgtttcatctcactcttgcattactcaatgcaggtgcttgttgctcatcaagggaagtgggaagtagcagcacattcaccttcactcttattataacgctgcttaggcgcagtcatgatttaactagaagcttcttgtcaaaggatgtttgtttctaactagttgtgcgcactggataatttagctcatgccgttatggttgtcttcccattgctagcagactattaatgtctattatgttttcttatcatgatatctatttatactttgttgcttgcccgtttatgccattttcaaaggagatgctg

SEQ ID NO: 34957 - DNA, 1252 bp, Zea Mays
aaaattaattgttgaagttggtaagggttgtgcttagtgcatattaccccttcataaaagagtgttgtcttaagacattgatgttgatgtatagttgcatccaaattcgatggtgtgaaattgtagtattgattgcatctatgacttgctttgagcttcattgcatgttgtttcatgcttgatgtcaggtcgtgtagtttccttaaacaattagtccaaggtagaagttcttgtgttaattaagaccaataatggacccatgttttgaatggtggtgctatatggggtaccttggatgttttggttggagtggttgaattcgaggacgaattctttttaaggggggtagagtgtaatatcccaaaaaaatgttgacccaaaagttgatcttcggtgagtggatatgggaaaaagggttgtgggccgttggatgctgcatcagaagtcatctgagacgtcacttcttttctcccacaaaataaaccctaggtggccaccctcttccccttcttggccgccaccccttcccctttcttggccgcctcacttttcccccttggctggtcgccccctctccccccattgcagcagccctccaatactttttcctccctagatctccccccacgcaacaacgatcgagaagaggaggaacaagatggattgaagaggaagagaggatcaaggagatgtgctacccccatctcttgcagatttttcttagggaaaaccctaggtaaggatgggatccttgtttctccctataattatgtgcttttggaggttgtggatcatgtggattgaaggattagaggttggattaggtgtggggttaggttttgatttcgaatttaatttctgcagaatggcagattcgacagtttctgttcataccagttttccgtgatcttagtggcctcaaaaaaataaaaagtctatatatgagtcgtagataatttgtagatctttccgtggccgcgaagaacacctcaatcggacatcagaacagaaagttatgacagtttgattatagcagtttttcagtctcataattctgtgcagaatctgttctcttaagagttaggcaattttatcaacagaattaaactgtgggttggtaaaagaagttgtagataatttcataagctttccagattgttaaagagtgcatttatatgatttgtgaaactccagttatgtttgttttactgtggctgttcctgtttgcctgacaaaaatgagtgggtctatt

SEQ ID NO: 34958 - DNA, 803 bp, Zea Mays
gtcagcttaaccccgtcaatcgcagctccgagcatggcgagccacgtctcggattcttcgccacgcgtagaccacctctacctagctacaaaggcgggccgaattctcccgcacctcctcttctctagccatccgtgagccacagtcaaccaggggcgcgagattaagttgtgaccaagtaaagagagtcactgccgtaggcaatcctgcttgcttctcgccgtcgcatccttgggggtcgtgcccaggggtttcgctgggtctcgtggatgcgttccatggcctcgccggcgggaatcgtcgtgcagtgaggggggaattgctcaccgtcgtgctacaaccgctgcggatccgcgggtcgtgtggacggcatcagctgcgccatcgaggagaagagcatgtggttcaagaggagccacacaacgaggagtttgatctgatctaggtggcgtctccgagttgactttcttgcgctaaggatggattttaattcgatctatatttatattttattttgtaagacttccgctatgtaataagtactctgattatattgtgacatttatctctatacactctgttattatatatgttgtcttctttggcgcatgtatgagatgcacccgactttgtcccttaaatccaggtgtgacacactgactgacatgggtccttgctttagtgccaaaaattcctctttcttcactatcatcagaccttatggaacatgacatcgacgaaagttatctctgaattctttccaagtaatggcttcgaggtcggtgtgggtggcgagataggac

SEQ ID NO: 34959 - DNA, 386 bp, Zea Mays
cacgtctcggattcttcgccacgcgtagaccacctctacctagctacaaaggcgggccgaattctcccgcacctcctcttctctagccatccgtgagccacagtcaaccaggggcgcgagattaagttgtgaccaagtaaagagagtcactgccgtaggcaatcctgcttgcttctcgccgtcgcatccttgggggtcgtgcccaggggtttcgctgggtctcgtggatgcgttccatggcctcgccggcgggaatcgtcgtgcagtgaggggggaattgctcaccgtcgtgctacaaccgctgcggatccgcgggtcgtgtggacggcatcagctgcgccatcgagcgtgaggccgcaaggatctgaaagatcatcttggtacct

SEQ ID NO: 34960 - DNA, 1191 bp, Zea Mays
gctaatttcactagcaattttttagccaactaactattagctctagtgcattcaaacagtccttaagtccaaatatccaatatatctcagctatatgttgtgtgttgagtgtcaagtgtgtgcaggtattgatatcacatagtttaggctaggatgaccagtggaagagggatgatctctgccttgtaactaataatgtctgatatcttgcatgcaatggagatggctcgacttatatgtggtggctgccagacattattgatgtatgctcgcagtgcaacaactgtaagatgctcatgttgtgacacagtcaatcttgtcagaccagtgagtagcatagctcatgtgaactgtggccagtgccaaacagtgttgatgtatccatacggagcaccgtctgtcaaatgtgctgtttgcaacttcattacaaatgttggcggggtgactcccatgatacctttgccaccaccagcactaactgcatcaagtggaacttcatatatcatcccgtcaatttccgtgccgacgaatcaaccgcggaatgtaactgttgtcgttgaaaacccaatgacagtagatgacaagggaaaattggtgagcaatgttgtagtaggggttacgagcggcgggaaaaagtgacggcatatcacaacccgtatagctttgtccaaactatctaaaaagggtttaagaatacataccttgtatcatactgctgtttggcgatcggctgctcgacggaggaatccccctccctggagagcgtagtggcaaggcagcgctgctttcgccactgcgatcgtgctagaacgagccaaaaaaaaaaacgaagtgcgggtgtgcatactcagagtatatctgtagcttgttaccccttgattcttttgtatgtaatatgggctctgcctgactttcactgtgtgatcaaatttccaagcccgtgggcgctgttgctgcgtgccttgttattagtgaataacaaacattgcaaatggctcttgaaatacagtgtgtgtgtgttttaatctctctgcatttatgttaatcagcaggtgccaccatttgctgttccagactgataatgcagagtttgtatccacgttctttggagaaaacatttgaggctcatacgctgtttcatgtcccatgtgtatattttctctattttcatgctgcttgcacgaatgtgtt

SEQ ID NO: 34961 - DNA, 1786 bp, Zea Mays
cccgtccgttctcacttcaggccccctcgtccgttcgatcgactcctcggaaagagggcgctcatgtggttgcgtattccgcgctgggacacgtatggcaggcgtgcgcttcctacgggtcgtcctcaacctctcgtccggccgtgttgacctgaccgaataaccacccgtctgccgctgtgccgcaccccgcacgagacccgtccttgaggggcacgtcctagatcggtggcgcctgcctctcgccgccgatacggtgcctctcgcggtctcgctccccctcgcagtaatccggcttctttctatgttccgatgtcttgctggttggatgaggagggtacgacgctctgtggagagatctaatcgcgctggtaaactggggcgatcggtgtgggggaatcggatagcgtggatgggatttgggattggaagagaagctggaggatgccttttttcccctgtccccaagctttctgtggatgacggtgataatcgtggacgagctaagctcattgagtgtctggctgatgtgggattgggtggcatatgctggattgctaactgttccatctggtgcaccaagaattggactgcactggggttgggattgggattgggatgggattgctttgcctttgattgtgtatatgcttattatgtgctcatccgctgtggctttggccggaactttgcagacatgcagagccagatagtgtgccacgggtgcaggacccttctgttctacccaagaggtgctccgagcgtgtgttgtgcggtatgccatgtggtcaccaatgtgccgcctccagcaatggagatggctcgacttatatgtggtggctgccagacattattgatgtatgctcgcagtgcaacaactgtaagatgctcatgttgtgacacagtcaatcttgtcagaccagtgagtagcatagctcatgtgaactgtggccagtgccaaacagtgttgatgtatccatacggagcaccgtctgtcaaatgtgctgtttgcaacttcattacaaatgttggcggggtgactcccatgatacctttgccaccaccagcactaactgcatcaagtggaacttcatatatcatcccgtcaatttccgtgccgacgaatcaaccgcggaatgtaactgttgtcgttgaaaacccaatgacagtagatgacaagggaaaattggtgagcaatgttgtagtaggggttacgagcggcgggaaaaagtgacggcatatcacaacccgtatagctttgtccaaactatctaaaaagggtttaagaatacataccttgtatcatactgctgtttggcgatcggctgctcgacggaggaatccccctccctggagagcgtagtggcaaggcagcgctgctttcgccactgcgatcgtgctagaacgagccaaaaaaaaaaacgaagtgcgggtgtgcatactcagagtatatctgtagcttgttaccccttgattcttttgtatgtaatatgggctctgcctgactttcactgtgtgatcaaatttccaagcccgtgggcgctgttgctgcgtgccttgttattagtgaataacaaacattgcaaatggctcttgaaatacagtgtgtgtgtgttttaatctctctgcatttatgttaatcagcaggtgccaccatttgctgttccagactgataatgcagagtttgtatccacgttctttggagaaaacatttgaggctcatacgctgtttcatgtcccatgtgtatattttctctattttcatgctgcttgcacgaatgtgtt

SEQ ID NO: 34962 - DNA, 1581 bp, Zea Mays
cccgtccgttctcacttcaggccccctcgtccgttcgatcgactcctcggaaagagggcgctcatgtggttgcgtattccgcgctgggacacgtatggcaggcgtgcgcttcctacgggtcgtcctcaacctctcgtccggccgtgttgacctgaccgaataaccacccgtctgccgctgtgccgcaccccgcacgagacccgtccttgaggggcacgtcctagatcggtggcgcctgcctctcgccgccgatacggtgcctctcgcggtctcgctccccctcgcaggtcttttggtttttttagttcctccctttgcttcttggaggtgtttgttgccgtctcacccgcagttcttgagcaatggagatggctcgacttatatgtggtggctgccagacattattgatgtatgctcgcagtgcaacaactgtaagatgctcatgttgtgacacagtcaatcttgtcagaccaggtactgatgtatgtgtaaacttatcttgcagatccataagcttttgattttccatctatgaacatgtttaaatttcaattttcaagagtaggatgcatgttctatgcaggcagaagagttgttttggcattaagttcccgagcaccgtatttgatactgtattgtgctagtagtttatctactcctagtgtacttaaatcaggataagcttctagcatgttgacgatttttgttcatcctgcagtgagtagcatagctcatgtgaactgtggccagtgccaaacagtgttgatgtatccatacggagcaccgtctgtcaaatgtgctgtttgcaacttcattacaaatgttggcggggtgactcccatgatacctttgccaccaccagcactaactgcatcaagtggaacttcatatatcatcccgtcaatttccgtgccgacgaatcaaccgcggaatgtaactgttgtcgttgaaaacccaatgacagtagatgacaagggaaaattggtgagcaatgttgtagtaggggttacgagcggcgggaaaaagtgacggcatatcacaacccgtatagctttgtccaaactatctaaaaagggtttaagaatacataccttgtatcatactgctgtttggcgatcggctgctcgacggaggaatccccctccctggagagcgtagtggcaaggcagcgctgctttcgccactgcgatcgtgctagaacgagccaaaaaaaaaaacgaagtgcgggtgtgcatactcagagtatatctgtagcttgttaccccttgattcttttgtatgtaatatgggctctgcctgactttcactgtgtgatcaaatttccaagcccgtgggcgctgttgctgcgtgccttgttattagtgaataacaaacattgcaaatggctcttgaaatacagtgtgtgtgtgttttaatctctctgcatttatgttaatcagcaggtgccaccatttgctgttccagactgataatgcagagtttgtatccacgttctttggagaaaacatttgaggctcatacgctgtttcatgtcccatgtgtatattttctctattttcatgctgcttgcacgaatgtgtt

SEQ ID NO: 34963 - DNA, 1852 bp, Zea Mays
ctcacgcattttaactaaaccgggatcttatattaggaactccttaagatgtgaacagaaacgctgcagcttcacaaaccacagtcaacagctccatagcatccacacctgtcaaacttggcatcttctgatccttacttttatggttccagccttgtgaccagtgagcaagtcctccttactgtaccctgtcactgtactctctaaggtcagaagagaactagcctgatcagtcccagtggggtccttgcctggattgccatgtatttatggcacaaccatgctggtcttctccttctgccactgcaggtcttgcagaaacatgtctcttctctatcttctctaactaccttccgagaatttcttgctgggcgctcgatgctcttggaccctttatgcagacttcatcccgtgacaagtcttccactgatcagtttaatctgcagataccagcatctcttttccatatctgaaggcctgaattccaaacaagagagctcgaaacaacagtaatgggttgcttccctgtgttctggaggaagaagaattccagaagccagattgtgcaacatgaccaagacatcccaatcacgggcaatgtgaaaatctactcgtcaaaggagctgagaaaagccacaagaaatttctgcccgggaaacatgcttggagagggttctttcggccgggtctacctgggaaagttgaacaagggcgagaaagtggccatcaaggtgctctcctcagagtcgaggcaaggaacaaaggagttcctgaacgagttgagtgtcatatccaacataactcaccacaacctagtcaagctgcatggctgctgcgtcgacggaggccaaaagatgctggtctacaattacgtggagaacaacagccttgcacagacccttctcggtaattcccgcagtggcatcagatttggctggagaacgagggtggatatctgcatcggtgtcgctgacgggctcacctaccttcacgaacaagtccgcccacggatcgtccaccgcgacatcaaagccagcaacatccttctcgacagaaacctgaggcccaagatagcagactttgggctggccaagttcttcccgggcaacatgacacacatcagcaccagggttgcggggacgctaggatatcttgcaccagagtacgccatccgagggcagctgaccagaaaggccgacgtctatagctttggtgtgctgctgctggagattgtcagtggcagatgccacactgatcccagattacgccttgacgagcagttcctcctagaaaaggtctggacactttacgagtccgacgatctcgagagcatcattgacaggacactgaagcgcgatttcgacaccgaggaagcacgccggttgctgaagataggtcttctgtgcatccaggatagccccaagatcaggccctccatgtcaacggtcgccaagatgctgaagggtgagtgcgctgtgagtgacaggatcatgaggcccggcctgatcacggacgtcatggacctgaaagtcagaacagtagagccggttcagttcagcttatccccgtcgatgtctcctgcaccgagcagctcactggtgtccacggttgcattagctggtggtagcactgttgtagagagcccctgacggagctagttgaaggaccaggtgtctaccaaaaaaactgggctgtaaaattgcaagcaacatgaattattgcttttgttcatgttttagtacattgttgtaacatagattatgtgttctccgaattgttgtaagtcaagattgtgcgctgccgaggcagttgtcgagttatcgcttgacctctttgtgatgctgttctttag

SEQ ID NO: 34964 - DNA, 2222 bp, Zea Mays
gtggttccactcctcgccggcgtggcttggtttccgggataccacagagttggcggcgcgcgcggagttcgctgcggaggaaggtttgttctatgaggacgacagtagggcgccggccggcggcccggcggctgaggggctcgagattgccaagctcgggatctcgtccaagatcgtcgaaaggctcgccagcaagggcatcaccaagctgttccctatccagatcattacctatttcatagtgagttttgccttctgtttcactatacagagggctgtccttgagccagtaatgcaaggaagggacatggttggtcgtgccaaaacggggactggtaaaactttggcatttggaatccccataatggatgcaattattcgtcacaacgagaagtacaagcctggtaagtttccattggctattgtcttggcgccaacaagagaacttgcaaaacaggttgagagggagttccttgattcctcccctttggaaacgctgtgtgtatatggagggactccaattatgcagcaaataaaacaacttaattatggtgttgatgtggtcattgggacacctggacgtgtgattgatctgctaaaaaggggtgctcttagtttggcagagatccggtttgttgttctcgatgaagcagatcagatgttgtccgtcgggttcgataaagacgttgaaacaattttggagagagtgcccccgcaacatcaaacattgatgttctctgcgacaatgccaacatggatacggaagctcacacagaagttcctcaacagtcctgttacagtggaccttgttggtgaggatgaccaaaagctggctgaaggaattagtctgctctctgtctcttcggaaaaccgtgaaaaaccagctgttcttgggaaattgattaaggaacatgcaaaaggtggcaagtgcattgtttttacacaaacaaaaagggatgcagatagattgtcacacaatatgagtcgaagtttccaatgtgaggcgcttcatggggatatctctcaatctgaaagagagaggacactggcaggatttcgggatgggcggtttaatatattgattgctactgatgtcgcttctcgtggattggatatcccaaatgtagatctggtgatacatttcgaattgccaaattcgtcagagatattcgttcacagatctggccgaactggccgtgctgggaagaagggcactgcaattgtgatgtacaactatgaacaaagtagagctgtgcgggtcattgaacgtgacgtaggatgcaagtttacggagcttccaaaaattaatgttgagggatccgacttgctgggtggtggatttgactccttcgggggtggaggtggtgggtatggtggctcaaactatgggcgctcacgagggggctttggtggacgtggcggtggtggtggttttggccgatcaggcggtggaggatttggcaattctgggtttggccgctcaagtggtggatttggtgactcgggatttggccgctccgggggtggagggtttggtgactcaggatttggcaggtcaggtggtggcggaggattcagtgactcaggatttggccggtctggtggcagcggtggaggattcagtgattctggttcaggtcgtttcggtggcggttttggtagttctcgctcaggtagttttggtggctttggcgacaaggactcacgatagacctataactaataacagctatagaattatggacatcctgagccagattcagcttggtcatgcggtatatcacaaaggagatcgagattgttgcggaccctatccatgaacacctcggagagggcataaggctgggtgaggcgggtccttcgataggcaaaaataatcacgtgccttgtttattagtgttcttttctgttcgttttttcatttgcttctgcaagttctagctctagatcatacctgtaaaatatgcagaggtcttttgcggatgatattcttatatcgtttttggtagtcgcgctgtactgtaccgtgtgatgattatggagctgctttgtaggccgtttttaacctgatatgatgatcttgattattggccattttagctcccttgcatgtttccattgccctaggcgagtaccgctgctaccaccctttggttcaagcctcttaagacctgttttgctgatataaatgaaaaaaataaacctcatttatgttggggcca

SEQ ID NO: 34965 - DNA, 2172 bp, Zea Mays
ccgctcccggcggccgcgtggttccactcctcgccggcgtggcttggtttccgggataccacagagttggcggcgcgcgcggagttcgctgcggaggaaggtttgttctatgaggacgacagtagggcgccggccggcggcccggcggctgaggggctcgagattgccaagctcgggatctcgtccaagatcgtcgaaaggctcgccagcaagggcatcaccaagctgttccctatccagtaatgcaaggaagggacatggttggtcgtgccaaaacggggactggtaaaactttggcatttggaatccccataatggatgcaattattcgtcacaacgagaagtacaagcctggtaagtttccattggctattgtcttggcgccaacaagagaacttgcaaaacaggttgagagggagttccttgattcctcccctttggaaacgctgtgtgtatatggagggactccaattatgcagcaaataaaacaacttaattatggtgttgatgtggtcattgggacacctggacgtgtgattgatctgctaaaaaggggtgctcttagtttggcagagatccggtttgttgttctcgatgaagcagatcagatgttgtccgtcgggttcgataaagacgttgaaacaattttggagagagtgcccccgcaacatcaaacattgatgttctctgcgacaatgccaacatggatacggaagctcacacagaagttcctcaacagtcctgttacagtggaccttgttggtgaggatgaccaaaagctggctgaaggaattagtctgctctctgtctcttcggaaaaccgtgaaaaaccagctgttcttgggaaattgattaaggaacatgcaaaaggtggcaagtgcattgtttttacacaaacaaaaagggatgcagatagattgtcacacaatatgagtcgaagtttccaatgtgaggcgcttcatggggatatctctcaatctgaaagagagaggacactggcaggatttcgggatgggcggtttaatatattgattgctactgatgtcgcttctcgtggattggatatcccaaatgtagatctggtgatacatttcgaattgccaaattcgtcagagatattcgttcacagatctggccgaactggccgtgctgggaagaagggcactgcaattgtgatgtacaactatgaacaaagtagagctgtgcgggtcattgaacgtgacgtaggatgcaagtttacggagcttccaaaaattaatgttgagggatccgacttgctgggtggtggatttgactccttcgggggtggaggtggtgggtatggtggctcaaactatgggcgctcacgagggggctttggtggacgtggcggtggtggtggttttggccgatcaggcggtggaggatttggcaattctgggtttggccgctcaagtggtggatttggtgactcgggatttggccgctccgggggtggagggtttggtgactcaggatttggcaggtcaggtggtggcggaggattcagtgactcaggatttggccggtctggtggcagcggtggaggattcagtgattctggttcaggtcgtttcggtggcggttttggtagttctcgctcaggtagttttggtggctttggcgacaaggactcacgatagacctataactaataacagctatagaattatggacatcctgagccagattcagcttggtcatgcggtatatcacaaaggagatcgagattgttgcggaccctatccatgaacacctcggagagggcataaggctgggtgaggcgggtccttcgataggcaaaaataatcacgtgccttgtttattagtgttcttttctgttcgttttttcatttgcttctgcaagttctagctctagatcatacctgtaaaatatgcagaggtcttttgcggatgatattcttatatcgtttttggtagtcgcgctgtactgtaccgtgtgatgattatggagctgctttgtaggccgtttttaacctgatatgatgatcttgattattggccattttagctcccttgcatgtttccattgccctaggcgagtaccgctgctaccaccctttggttcaagcctcttaagacctgttttgctgatataaatgaaaaaaataaacctcatttatgttggggcca

SEQ ID NO: 34966 - DNA, 2177 bp, Zea Mays
atacgacagccaccctcacaaaaccctaaaccctagccgccgccgccgccgccgccgacgccgaagcggtacagccatgtacgccgtcctccgccgcgcggcgcccctcaggcggcgtgccgtgtccgcgctcgccgccgcgctgctccagcagcagccggcggcgctgggagctgtagccccgcgggcgccgacgccgctcccggcggccgcgtggttccactcctcgccggcgtggcttggtttccgggataccacagagttggcggcgcgcgcggagttcgctgcggaggaaggtttgttctatgaggacgacagtagggcgccggccggcggcccggcggctgaggggctcgagattgccaagctcgggatctcgtccaagatcgtcgaaaggctcgccagcaagggcatcaccaagctgttccctatccagagggctgtccttgagccagtaatgcaaggaagggacatggttggtcgtgccaaaacggggactggtaaaactttggcatttggaatccccataatggatgcaattattcgtcacaacgagaagtacaagcctggtaagtttccattggctattgtcttggcgccaacaagagaacttgcaaaacaggttgagagggagttccttgattcctcccctttggaaacgctgtgtgtatatggagggactccaattatgcagcaaataaaacaacttaattatggtgttgatgtggtcattgggacacctggacgtgtgattgatctgctaaaaaggggtgctcttagtttggcagagatccggtttgttgttctcgatgaagcagatcagatgttgtccgtcgggttcgataaagacgttgaaacaattttggagagagtgcccccgcaacatcaaacattgatgttctctgcgacaatgccaacatggatacggaagctcacacagaagttcctcaacagtcctgttacagtggaccttgttggtgaggatgaccaaaagctggctgaaggaattagtctgctctctgtctcttcggaaaaccgtgaaaaaccagctgttcttgggaaattgattaaggaacatgcaaaaggtggcaagtgcattgtttttacacaaacaaaaagggatgcagatagattgtcacacaatatgagtcgaagtttccaatgtgaggcgcttcatggggatatctctcaatctgaaagagagaggacactggcaggatttcgggatgggcggtttaatatattgattgctactgatgtcgcttctcgtggattggatatcccaaatgtagatctggtgatacatttcgaattgccaaattcgtcagagatattcgttcacagatctggccgaactggccgtgctgggaagaagggcactgcaattgtgatgtacaactatgaacaaagtagagctgtgcgggtcattgaacgtgacgtaggatgcaagtttacggagcttccaaaaattaatgttgagggatccgacttgctgggtggtggatttgactccttcgggggtggaggattcagtgactcaggatttggccggtctggtggcagcggtggaggattcagtgattctggttcaggtcgtttcggtggcggttttggtagttctcgctcaggtagttttggtggctttggcgacaaggactcacgatagacctataactaataacagctatagaattatggacatcctgagccagattcagcttggtcatgcggtatatcacaaaggagatcgagattgttgcggaccctatccatgaacacctcggagagggcataaggctgggtgaggcgggtccttcgataggcaaaaataatcacgtgccttgtttattagtgttcttttctgttcgttttttcatttgcttctgcaagttctagctctagatcatacctgtaaaatatgcagaggtcttttgcggatgatattcttatatcgtttttggtagtcgcgctgtactgtaccgtgtgatgattatggagctgctttgtaggccgtttttaacctgatatgatgatcttgattattggccattttagctcccttgcatgtttccattgccctaggcgagtaccgctgctaccaccctttggttcaagcctcttaagacctgttttgctgatataaatgaaaaaaataaacctcatttatgttggggcca

SEQ ID NO: 34967 - DNA, 1571 bp, Zea Mays
aaactaccggacactcctccgtctcgtgatattttctctcttccatatctccacggaagccgctggacatctcctagataatcttcagccgttacttccgctcgtccgtgccatgcttacattggtgatcaagacgcctaggtcttcaccaccatcgcttagctgttcgcctctgcgtcagctcaccggacctgcagtccgtcaggccactgtctacgctgtgctcaaggtcctactcaccgttcttctcgtcgacagcgccagtcgtgtctcccgctacaccgacactttttctccatcgctcgactccgtgctcagcgctctcaccatcattactgttcctctcctcgccggagttcgccgggcttacgctcaaccccgccaccgtgagatttacctcgcctccaaaccgtgttcgccgcagcccagccatcgtctaccatcacgctcggctccagctagttgcgctcctcgcgccaaccctgattccaagcgccgccacaacctcgtcctagattcgaggcatcacatcgtcgctctgctgcataggcgcccatgtcgtcgccttcctgccgtctttgctcatgtgccagaacacctagaagaagtggcattgaagaagaagcctgccccaagtactgttgatctagtggtggagttccatctaactaattgtcgtgattgaagggttttggatcttctcctgcaaaaaggcaagccccggtgcatttgccaccttccttgtatttacaaaattttatcacttatatgatgcattaggtgataggggttgaatgattaaacacttgatgcattaccattccttgaaaaaaaattgattaccataccttgtcacctgatttataaaagctagagatgcttaatcatgcagatagattaaaaaaaatgtttttgatctacgactcataatttccaaaagaaaattggcttgggataatgaaggcatcatctgctgtgagaaattcattatccaggcatggcccctctgtcaggcgccaaatgttttgagaaatagtataaataaacttgaggccgggcggttgacttgcaccagaacggagtctggttgtagtgtctccgtctgtgtcgattaaggaccgtaccgattgtaggcctgttgatctaggaccttttagctggccacatacctcgtcatgggtaagcttgaacccggctattccatacgtgaaatgacaaccgcgcactgggtatgggagatggtgggagtagcagttatcctcctggcaagaggctggatggtagggtaatgtgctcccgggtagcgcggaccagttcatgtagtgaaggatccgtggggatggttgacatatgcaagggttaagtgctacatatgtcgtgtggttggagatccccagctgggcattaatcgattcggatcgccgttacttctcggatatgaagactggatcgctgcccttcatcgtagataacaagtgaaacaaaaatttggattttaaaagcaacctagtgtaggtcaagtgaatgatctagattaggaaattgctagattcaggctagaagattcaggt

SEQ ID NO: 34968 - DNA, 2906 bp, Zea Mays
tctctctctctctcccaccagggaggcagggaccggtctccacagtccacacacacacagaggaaccaagtcacgaagacgaagagacaagggagcggttgcccggcgctggtttccctttccccgattcccagttaagcgcagcgatttggcgtctgatgattgcgcaatcgagcagcggcgcggggaggcaacaggacgcaccgaaaagggggcgcctttacaggacacgggcctcgcctttcccttgaatctcgccgcgccgcgcctcctttcgttttcccgcccgtcgcgacctttgcaactgcaaccacagcgagcgagccacggagggggcagagcggagccagaggtctctgacgcggcgcaggatcgcggcggcggaggggagcaagcagaggaggccaagaggtccgagggcctcgccgaagcgcgtgcggcgtagtccgcctctgtccgtccgggtccggcaacggcggcgagatggaggcggccgccgacctgctggagtacgagctgcagagggagatctccggcatcttgattcagaactacgtctgcggtttgcgccaggagtatgagatgaagttgtgggagcaccggaactgcatcagcgctctgaacaggaactgggcggaaaaggtttctgagatcacggcgctgcgagacgagcttcgcgatgttctctgtacttctgaacctgctactcatcatcaccatcaccgctcccacgggagtctagaagacgagacgatcattgcgaagacggaaggtgacagtgagcctccggtaacagagaaatcttctgagtctacgctcgagatcccagatttttccctcctgaagcacatgcacggcgaagaaatcacgagttttctcaggacagaatggctaaagctgcgaaggcagcacgagtccgagcttcacgagaagacagaggagctgttcagggtgaaaagggaacacgcaaaggagaaagcttcgttgcctcttaagaaagagcgggagcttgagctccacaggtcgaagctgctacagaccatcgctaggctgggcgagatagcctccaggaaagaggaatcttgctctgactgcaacgaggatgaggagatgtgcagattgaaggacaggatcggcgtgctactacaagaaaacaatcgtctccgaggcttgctggctgataagaagcaggaggttaaacatctctctttgcaagtgtcagattcaaggagcaaaatagcccagtactcactgccagagtcaaaactgtcgaataattgtgagaagcttagggctgaacttgaagattttaagatagagaggcacttgaacgatttattggactcatctgtattcagggaagtttgtcacaattatgaggatcagatatgtgatttgaatcaggagggatccttcctcagagacctgcttgatgaaaaagaagaccagctaagtatcatgtacgaagatagacagaagctcaagcatgaaaacgatcaactcgtatcgattgcagggtcaattatacagcatcatgaccaagccaacttggttcatgacgagcttatgatatataaggagaaattgtgcgagcaagaacttttgatattggagtcaaagggcgaatataactccatgaaaagaatgcctcacttgacgccacaatccgagagatgaagaaaacaccagggcaaagcattggcagtcattgggggcaaactggggaatttgatcttaccagtatggagaagttatcaaagacatgtagtgacttcgaaagcagattagtagaaacaatgaaaagaaatgaaaccaggttgactagtatagtttgtcagtttagcccactggtgcagcaagttgctctcttaaggaaaaaagaattctggtataagcaaatactcgagattaaatgctcaaatctttggaaagcagaagccgaggttgatgtacttggtgatgaggttgacacccttctaagtgtgctgggaaaaatttatattgcactcgaccattattcgccagttttgaagcattaccctggggtaaggttacagagattttgatgcttgtgcagaaggtgttgaaaggagaaagcgtttaacaccgaaccactatgtgaaaatcttgacagatttcatgtccatattacaaacagtagcgcaagaccctaagaagagttagggcaatgtgctgtgggagaatatttacacgtacttactgcaaaggagcttcctagattagatttttttttttacgaacagtcgaagtactgaagtagccatgggtccaattaaatggtgtagagtaaccggttttcagcttgctagctagctttatttgtattacctccgttctcgaatatttgtcgctggctagctcatttttaaactaaaacacgacaaataaaaaagaacagaggtagtattagtgtgcagttatagttgaattcagactaggaattcaaaaggttggtttaacgatggtagctttacagtattagtgtttgggtagtataaatgtgtatgtaacggttgtaggtttaggttggatgatgctctggtgattattatttcaaggagcatagcttcttgtagtcatatggagtattgtatgcttgcagtgggtagggaagatggacttgtaacagctgcgtcccattcgttgcagttaaaatatacatgcagattctttgtgttgacaggaggtattgaaatgaacatgcttgactgatacattgcaaatgtctacggtatcatggatattccttcactgctaactcagcgcaaattcatggtctatttttgctcattaactatttggtatgaagtagcgcatggtttagcttgaggaaattaagaggcataataacagcatttttagcaaatatattaattaaaaaggca

SEQ ID NO: 34969 - DNA, 3027 bp, Zea Mays
aaagcagagcaaccacctctctctctctctcccaccagggaggcagggaccggtctccacagtccacacacacacagaggaaccaagtcacgaagacgaagagacaagggagcggttgcccggcgctggtttccctttccccgattcccagttaagcgcagcgatttggcgtctgatgattgcgcaatcgagcagcggcgcggggaggcaacaggacgcaccgaaaagggggcgcctttacaggacacgggcctcgcctttcccttgaatctcgccgcgccgcgcctcctttcgttttcccgcccgtcgcgacctttgcaactgcaaccacagcgagcgagccacggagggggcagagcggagccagaggtctctgacgcggcgcaggatcgcggcggcggaggggagcaagcagaggaggccaagaggtccgagggcctcgccgaagcgcgtgcggcgtagtccgcctctgtccgtccgggtccggcaacggcggcgagatggaggcggccgccgacctgctggagtacgagctgcagagggagatctccggcatcttgattcagaactacgtctgcggtttgcgccaggagtatgagatgaagttgtgggagcaccggaactgcatcagcgctctgaacaggaactgggcggaaaaggtttctgagatcacggcgctgcgagacgagcttcgcgatgttctctgtacttctgaacctgctactcatcatcaccatcaccgctcccacgggagtctagaagacgagacgatcattgcgaagacggaaggtgacagtgagcctccggtaacagagaaatcttctgagtctacgctcgagatcccagatttttccctcctgaagcacatgcacggcgaagaaatcacgagttttctcaggacagaatggctaaagctgcgaaggcagcacgagtccgagcttcacgagaagacagaggagctgttcagggtgaaaagggaacacgcaaaggagaaagcttcgttgcctcttaagaaagagcgggagcttgagctccacaggtcgaagctgctacagaccatcgctaggctgggcgagatagcctccaggaaagaggaatcttgctctgactgcaacgaggatgaggagatgtgcagattgaaggacaggatcggcgtgctactacaagaaaacaatcgtctccgaggcttgctggctgataagaagcaggaggttaaacatctctctttgcaagtgtcagattcaaggagcaaaatagcccagtactcactgccagagtcaaaactgtcgaataattgtgagaagcttagggctgaacttgaagattttaagatagagaggcacttgaacgatttattggactcatctgtattcagggaagtttgtcacaattatgaggatcagatatgtgatttgaatcaggagggatccttcctcagagacctgcttgatgaaaaagaagaccagctaagtatcatgtacgaagatagacagaagctcaagcatgaaaacgatcaactcgtatcgattgcagggtcaattatacagcatcatgaccaagccaacttggttcatgacgagcttatgatatataaggagaaattgtgcgagcaagaacttttgatattggagtcaaagggcgaatataactccatgaaaaggtgcctgtatgaggctatgcagcaaatccaggtatgcaagcaagaaattctaggcctgactgagaatttaacttctatgtctattgctttggagaaagccaaggaacagaatgcctcacttgacgccacaatccgagagatgaagaaaacaccagggcaaagcattggcagtcattgggggcaaactggggaatttgatcttaccagtatggagaagttatcaaagacatgtagtgacttcgaaagcagattagtagaaacaatgaaaagaaatgaaaccaggttgactagtatagtttgtcagtttagcccactggtgcagcaagttgctctcttaaggaaaaaagaattctggtataagcaaatactcgagattaaatgctcaaatctttggaaagcagaagccgaggttgatgtacttggtgatgaggttgacacccttctaagtgtgctgggaaaaatttatattgcactcgaccattattcgccagttttgaagcattaccctggggttacagagattttgatgcttgtgcagaaggtgttgaaaggagaaagcgtttaacaccgaaccactatgtgaaaatcttgacagatttcatgtccatattacaaacagtagcgcaagaccctaagaagagttagggcaatgtgctgtgggagaatatttacacgtacttactgcaaaggagcttcctagattagatttttttttttacgaacagtcgaagtactgaagtagccatgggtccaattaaatggtgtagagtaaccggttttcagcttgctagctagctttatttgtattacctccgttctcgaatatttgtcgctggctagctcatttttaaactaaaacacgacaaataaaaaagaacagaggtagtattagtgtgcagttatagttgaattcagactaggaattcaaaaggttggtttaacgatggtagctttacagtattagtgtttgggtagtataaatgtgtatgtaacggttgtaggtttaggttggatgatgctctggtgattattatttcaaggagcatagcttcttgtagtcatatggagtattgtatgcttgcagtgggtagggaagatggacttgtaacagctgcgtcccattcgttgcagttaaaatatacatgcagattctttgtgttgacaggaggtattgaaatgaacatgcttgactgatacattgcaaatgtctacggtatcatggatattccttcactgctaactcagcgcaaattcatggtctatttttgctcattaactatttggtatgaagtagcgcatggtttagcttgaggaaattaagaggcataataacagcatttttagcaaatatattaattaaaaaggca

SEQ ID NO: 34970 - DNA, 2767 bp, Zea Mays
ctccactcgcactattcccaagctacagccctaatcctgtctctcctcatcttttctccctctgccctctttcgcaagatctctccttcgtattctcttttcgcttttaactccacggcagtccctcttctgtcacgagccaagccgagcgcagccagcaaaagagagcgacgccgcctgcaccaaagctcggattcccgtctattttacccccgcccccgccgactcaccgtcgcaagatccatccgcaggtgtcggcggcccgcggcccgtgcgaaagatggtgcctttcctaggctccccagtgttctgtcatcgtttcttggcccctatctaaagcggcggtttccagggagctgccgtccccgcccaattcagctgaggtggcggcaagtgggtttagggctcgattcagtgtgttgggtcgtgtctgactctgacccggtggggagcggtggttcttggctagttcttgagctggttgcggcgcttatccctcttcctggagttgttggattggcttgggggaagcagattcttgccaccgagggtccagcctagcgagctgctgcttcggttatcgtagaggagttttccttttgtgttcggttggggggagagagatggtgctcttgcgttctctggattgagcattccgattggatttcggcgtttcgtgcggcttccagtccatggaggatttggggctgtggaaccaggcgtggatgtgggtgctgtcccagaagcacatcctggcgtgggcgcacacggcggcgtgcggcagcagggagcgcctcgccttcttggtcgatcgccactggccggccgtgtcccggggctgcgccacctcctcgcgcctcacgctcgccgcactgcggcaatggcgtgggtgtatggcgcgcggggtgctggcggtggcgagcctcggccctgccgccgtcttcgtcatcctctggagcttcttcgtgtgcatgacctcgccggcgtgcgccctctacgcgcttcttagcctgggtgctgctgctgcagttgttcactatatgggctatacacctggccttctcattgttgggctgtttggcatattgattatgtggatgtatggctacttctggattacaggaatgcttctagttgctggaggttgtatgtgctctttgaaacatgctcgatatgtgacacctgttttgacgtcatatgctatttattgtgtggctgttcgtgttgggtggctcggagtcttcttgacattcaacctttctttcttgacaaatgatcttcttaataagttggcgcaaggatacgaaggaagcactgaagaaagccagtttgaagacatgaaggattctgatccagttatggatgagttctatcgtagttgtgaattcccatcggttcctgacagtgaacctgagaccgtgtcttctgcgaaaccatactgctcagcgcccatccaagatgtgttacatgtacaaaaagaagaacctcctagtaaaatagtgaaatctgattctagttcatcggatgagattaagaggataatggatggttcaaaccattatgaagttttgggtgtgcctcgtaatagaagcattgaccaaaaggccctgaaaaaagaatatcacagaatggtcctgcttgtacatcctgataaaaatatgggaaatccattggcttgtgaatctttcaaaaagcttcagtcagcttatgaggtcctctctgatttcacaaagaaaaacagctatgatcagcaactgaggaaagaagaatcacagaaaatgaccccaagatcacgtgctgtctcgcaacagagtggtgtagagtttctctcagaagagtccagacgcatacagtgcactaagtgtggtaatttccatatatggatatgcacgaagagaagcaaaacaaaagcaagattctgtcagggctgcgatcagtttcatcaagccaaggatggagatggatgggttgaaaccagattttcatcctccatcaagatggaaataccacgagcctttgtttgtgccgagagcaaaatatttgatgtgtctgagtgggctacctgccagggaatggagtgtaagcctaacactcacggtccaacttttatggtaaacatggtcggcgcagataggatgcctcagagatcctacagttcccggtatcccttcagcttggacgcagagatgatccccgacgatgaattcgagatgtggcttcagcaggcactggcgtcaggcgtcttcgctgacagcccgaagcgcaggaaaagctggagcccgttcaaactgcctcaaaagggaattaaaagttggcgaaggtcgtcatgagggtgtggcattatgcagcagctggggtctaggcggctacaggattggaaagaaggtgataatacaaggcttcaagggtgtaaatagactgaccaacaatttgcctggatggataactaatttttgttccgaaggagaaagaaggtgaaaaagaaacactctgaacgaacaggtataaccccatgagttgaacttggttccctctgcagcatcccacgagtttagctgtgaaccagtgtgctgttcgtcctatgatcaaaataccggtggatctttggtgtattagtttcagtagtttaggaatctgacctcgaagatttgccgaaacatcgttcctaagacggttgagatatgaagggatgaaaagtagtatttctagcattgtcattctgtaggagggaagggaagaaggtgaaaaagaaacactctgaacgaac

SEQ ID NO: 34971 - DNA, 2622 bp, Zea Mays
aaatccatcagcagttcaccactgagcagtagcacccgtctcctctcctctgcccagtgcccatgcttcccccgttccattgaaagtagcaatcaacactgtctcctctcatctctccactcgcactattcccaagctacagccctaatcctgtctctcctcatcttttctccctctgccctctttcgcaagatctctccttcgtattctcttttcgcttttaactccacggcagtccctcttctgtcacgagccaagccgagcgcagccagcaaaagagagcgacgccgcctgcaccaaagctcggattcccgtctattttacccccgcccccgccgactcaccgtcgcaagatccatccgcaggtgtcggcggcccgcggcccgtgcgaaagatggtgcctttcctaggctccccagtgttctgtcatcgtttcttggcccctatctaaagcggcggtttccagggagctgccgtccccgcccaattcagctgaggtggcggcaagtgggtttagggctcgattcagtgtgttgggtcgtgtctgactctgacccggtggggagcggtggttcttggctagttcttgagctggttgcggcgcttatccctcttcctggagttgttggattggcttgggggaagcagattcttgccaccgagggtccagcctagcgagctgctgcttcggttatcgtagaggagttttccttttgtgttcggttggggggagagagatggtgctcttgcgttctctggattgagcattccgattggatttcggcgtttcgtgcggcttccagtccatggaggatttggggctgtggaaccaggcgtggatgtgggtgctgtcccagaagcacatcctggcgtgggcgcacacggcggcgtgcggcagcagggagcgcctcgccttcttggtcgatcgccactggccggccgtgtcccggggctgcgccacctcctcgcgcctcacgctcgccgcactgcggcaatggcgtgggtgtatggcgcgcggggtgctggcggtggcgagcctcggccctgccgccgtcttcgtcatcctctggagcttcttcgtgtgcatgacctcgccggcgtgcgccctctacgcgcttcttagcctgggtgctgctgctgcagttgttcactatatgggctatacacctggccttctcattgttgggctgtttggcatattgattatgtggatgtatggctacttctggattacaggaatgcttctagttgctggaggttgtatgtgctctttgaaacatgctcgatatgtgacacctgttttgacgtcatatgctatttattgtgtggctgttcgtgttgggtggctcggagtcttcttgacattcaacctttctttcttgacaaatgatcttcttaataagttggcgcaaggatacgaaggaagcactgaagaaagccagtttgaagacatgaaggattctgatccagttatggatgagttctatcgtagttgtgaattcccatcggttcctgacagtgaacctgagaccgtgtcttctgcgaaaccatactgctcagcgcccatccaagatgtgttacatgtacaaaaagaagaacctcctagtaaaatagtgaaatctgattctagttcatcggatgagattaagaggataatggatggttcaaaccattatgaagttttgggtgtgcctcgtaatagaagcattgaccaaaaggccctgaaaaaagaatatcacagaatggtcctgcttgtacatcctgataaaaatatgggaaatccattggcttgtgaatctttcaaaaagcttcagtcagcttatgaggtcctctctgatttcacaaagaaaaacagctatgatcagcaactgaggaaagaagaatcacagaaaatgaccccaagatcacgtgctgtctcgcaacagagtggtgtagagtttctctcagaagagtccagacgcatacagtgcactaagtgtggtaatttccatatatggatatgcacgaagagaagcaaaacaaaagcaagattctgtcagggctgcgatcagtttcatcaagccaaggatggagatggatgggttgaaaccagattttcatcctccatcaagatggaaataccacgagcctttgtttgtgccgagagcaaaatatttgatgtgtctgagtgggctacctgccagggaatggagtgtaagcctaacactcacggtccaacttttatggtaaacatggtcggcgcagataggatgcctcagagatcctacagttcccggtatcccttcagcttggacgcagagatgatccccgacgatgaattcgagatgtggcttcagcaggcactggcgtcaggcgtcttcgctgacagcccgaagcgcaggaaaagctggagcccgttcaaactgcctcaaaagggaattaaaagttggcgaaggtcgtcatgagggtgtggcattatgcagcagctggggtctaggcggctacaggattggaaagaaggtgataatacaaggcttcaagggtgtaaatagactgaccaacaatttgcctggatggataactaatttttgttccgaaggagaaagaaggtgataatacaaggcttcaagggtgtaaatagac

SEQ ID NO: 34972 - DNA, 2319 bp, Zea Mays
aagaatctttcatgcaccctgggggcttaggaagatgccgggagaagcagcgcaaggagtcctctcgtctacaaaccgtgaaccggaagctgagtgcgatgaacaagctgttgatggaggagaatgaccggctgcagaagcaggtttcccgtctcgtctttgacaacgggtatatgaagaatcgactccacagtccttctgtagccaccaccgacacaagctgtgagtctgtggtgacaagtggtcagcacaaccaacagcaaaacccagcagttctgcatcctccacaaagggatgcgaacaacccagcaggtctactcgctattgctgaggagacattggcagagttcatgtccaaggcgactggaactgctgtcaactgggtgcaaatggttgggatgaagcctggtccggattccgttggaatcatcgctgtttcgcacaactgcagcggcgtagcagcacgagcttgcggccttgtgagccttgagcccacaaaggttgctgagatccttaaggatcgtgcatcgtggtatcgcgattgtcggcatgttgatgtcctccatgttatccctacgggtaacggtggaacgattgagctgatctatatgcagacttatgcactgacaactctcgcggaaccacgagacttttggacgctccgatacactagtggtcttgacgatggcagtcttgtgatctgcgaaaggtcattgactcagtccactggaggtccttctggacctaacactccaaattttatcagagctgaggtgcttcctagtggttatctgattcgaccctgtgatgggggaggttccatgatttacattgtggatcatgttaatctgaatgcttgtagtgtgcctgaggttcttcggccactctatgaatcccctaagatactggcacagaagatgactgcggcggcgttgcgacacattaggcaaattgcacatgagtcaagtggtgaaatgccctatggtgctgggcgacagccggctgttctcagaactttcagtcaaaggctcagcagaggcttcaatgatgctgtgagtggctttccagatgatggctggtcttgtttgttgaacaccgatggtgctgaggatattacagttacaatcaactcatctccaaataaacttgttgggtctcatgtcagcgcttccccattattttctgctatggggggtggaatcatgtgcgcaaaagcatcgatgctgctgcagaatgtgccacctgctctacttgtgcgatttttgagggagcatcggtctgaatgggctgatcctggcatcgatgcttattctgtcgcctctttgagggccaacccatacactgttccaggtttaagggctggtgggtttatgggcaaccaggttatactgccccttgcacgcaccttggagcatgaagagtccttggaggttattaggcttgaaggacatggctttagccatgaggaggtgcttatgtcccgggatatgtttcttctacagctgtgcagtggcgtcgacgaggatgcacctggtgcgtgtgcacagcttgtctttgctcctattgatgaatcttttgccgacgatgcaccgttgctgccctcaggcttccgtgtgataccgcttgatgctaagacgggcgcacactggaacggagatccgctggtcggacaccgaaggcgcggactctccactgatgctgttctggaagcacagcgacgcgatactctgctgctctctgaagccgccggctttcacgctcaagttcgccaacagcgccggcttcgacatcctggagacgacgatggtgaacatccaggacctgccgctggaggcggtcctcgacgaggagggccagaaggccctgtccgcgcagctccccgcgatcatgcagcagggcctggcgtacctccccggtggcgtgtgcaggtcgagcatggggcggcaggcgtcgtacgagcaggcagtggcgtggaaggtggtgggtgacgacggcgccccgcagtgcctggcgctcatgctcgccaactggaccttcatctgaggctcgcaacatcgctcggcagcgccagaccggatgccgccttttgccctactacgtatcattagttgcttttccgttgtgccgcctgtgttaagaatttgtgtactgtgtggatgatcgagaactgactctgtttgtgtgtgtgcgtgacaaacaactacaacagctgtatgcgtgcctggtcgtggtctcgtctccccggcttgtcgccggcgacattgatcactgttgcaggttgcagtattactatttgctagttctgcttgctcgatcagt

SEQ ID NO: 34973 - DNA, 2817 bp, Zea Mays
ctgaacatcacctcgtaggctatgtcactttgccttcttttccagcggattaaaagttgggtaacagttttgttcttggtggtgcctcactgccactgtggaagaatcaagaatgaggataacggcaccttttgagtaaaaagcttggagaagggtaaaaggagtcaagaatctttcatgcaccctgggggcttaggaagatgccgggagaagcagcgcaaggagtcctctcgtctacaaaccgtgaaccggaagctgagtgcgatgaacaagctgttgatggaggagaatgaccggctgcagaagcaggtttcccgtctcgtctttgacaacgggtatatgaagaatcgactccacagtccttctgtagccaccaccgacacaagctgtgagtctgtggtgacaagtggtcagcacaaccaacagcaaaacccagcagttctgcatcctccacaaagggatgcgaacaacccagcaggtctactcgctattgctgaggagacattggcagagttcatgtccaaggcgactggaactgctgtcaactgggtgcaaatggttgggatgaagcctggtccggattccgttggaatcatcgctgtttcgcacaactgcagcggcgtagcagcacgagcttgcggccttgtgagccttgagcccacaaaggttgctgagatccttaaggatcgtgcatcgtggtatcgcgattgtcggcatgttgatgtcctccatgttatccctacgggtaacggtggaacgattgagctgatctatatgcagacttatgcactgacaactctcgcggaaccacgagacttttggacgctccgatacactagtggtcttgacgatggcagtcttgtgatctgcgaaaggtcattgactcagtccactggaggtccttctggacctaacactccaaattttatcagagctgaggtgcttcctagtggttatctgattcgaccctgtgatgggggaggttccatgatttacattgtggatcatgttaatctgaatgcttgtagtgtgcctgaggttcttcggccactctatgaatcccctaagatactggcacagaagatgactgcggcggcgttgcgacacattaggcaaattgcacatgagtcaagtggtgaaatgccctatggtgctgggcgacagccggctgttctcagaactttcagtcaaaggctcagcagaggcttcaatgatgctgtgagtggctttccagatgatggctggtcttgtttgttgaacaccgatggtgctgaggatattacagttacaatcaactcatctccaaataaacttgttgggtctcatgtcagcgcttccccattattttctgctatggggggtggaatcatgtgcgcaaaagcatcgatgctgctgcagaatgtgccacctgctctacttgtgcgatttttgagggagcatcggtctgaatgggctgatcctggcatcgatgcttattctgtcgcctctttgagggccaacccatacactgttccaggtttaagggctggtgggtttatgggcaaccaggttatactgccccttgcacgcaccttggagcatgaagagtccttggaggttattaggcttgaaggacatggctttagccatgaggaggtgcttatgtcccgggatatgtttcttctacagctgtgcagtggcgtcgacgaggatgcacctggtgcgtgtgcacagcttgtctttgctcctattgatgaatcttttgccgacgatgcaccgttgctgccctcaggcttccgtgtgataccgcttgatgctaagacggatgtgccaacggccaccacacgcacgcttgaccttgcctctgcgctcgaggttggatcaggtggaagcggcatgcgcgcttcatgcgatggttccggcacgtgcgccacgagatcggtcctgaccatcgccttccagttctcgttcgagaaccaccttcgcgagagcgtggcggcaatggccaagcagtacgtcaggggcgtgatggcctccgtgcagagggtggccatggcgatcgctccttctcgcctcggttcgcgtatcgaactgaagcatccgccgggctctcccgaggcacttgcactagctacgtggattggcaggagctacagggcgcacactggaacggagatccgctggtcggacaccgaaggcgcggactctccactgatgctgttctggaagcacagcgacgcgatactctgctgctctctgaagccgccggctttcacgctcaagttcgccaacagcgccggcttcgacatcctggagacgacgatggtgaacatccaggacctgccgctggaggcggtcctcgacgaggagggccagaaggccctgtccgcgcagctccccgcgatcatgcagcagggcctggcgtacctccccggtggcgtgtgcaggtcgagcatggggcggcaggcgtcgtacgagcaggcagtggcgtggaaggtggtgggtgacgacggcgccccgcagtgcctggcgctcatgctcgccaactggaccttcatctgaggctcgcaacatcgctcggcagcgccagaccggatgccgccttttgccctactacgtatcattagttgcttttccgttgtgccgcctgtgttaagaatttgtgtactgtgtggatgatcgagaactgactctgtttgtgtgtgtgcgtgacaaacaactacaacagctgtatgcgtgcctggtcgtggtctcgtctccccggcttgtcgccggcgacattgatcactgttgcaggttgcagtattactatttgctagttctgcttgctcgatcagt

SEQ ID NO: 34974 - DNA, 3094 bp, Zea Mays
tgttgcagctgtttggactgctgcagctgcaatccatagagagaaaaatactgtagaagccgcagccgcagccggattgcagccgcagcaagccgcagcgaacaagccaatagaaaaaaacccgaaggtttcataaaagttataaaaaaaccggatgaaagagagagagagagtgaccagaaaacatctattgctgctgcagagcagcagtactgtactgctattaaacaagcccagagctctgctgctactgtcctctcctcctcctcactccaccactgcccactcccatcccacgcgagcacaaccaccacctactccctactccctacactactccccccgcaagcacgcccagcgccatggccatggcggcagcgcgcacgggggcctgctactccgcctccgcttcctctcctctcctgcactactagcgggtccgctggcgacgatggcggcggtggcgagcagggagaggctctccccgggcgccgcgccgcaggtggacgcgggcaagtacgtgcggtacacgccggagcaggtggaggcactggagcgcgtctacagcgagtgccccaagcccagctcgctgcgccggcagcacctcatcagggactgccccatcctccgcaacatcgagcccaagcagatcaaggtctggttccagaaccgcagatgccgggagaagcagcgcaaggagtcctctcgtctacaaaccgtgaaccggaagctgagtgcgatgaacaagctgttgatggaggagaatgaccggctgcagaagcaggtttcccgtctcgtctttgacaacgggtatatgaagaatcgactccacagtccttctgtagccaccaccgacacaagctgtgagtctgtggtgacaagtggtcagcacaaccaacagcaaaacccagcagttctgcatcctccacaaagggatgcgaacaacccagcaggtctactcgctattgctgaggagacattggcagagttcatgtccaaggcgactggaactgctgtcaactgggtgcaaatggttgggatgaagcctggtccggattccgttggaatcatcgctgtttcgcacaactgcagcggcgtagcagcacgagcttgcggccttgtgagccttgagcccacaaagatctgcgaaaggtcattgactcagtccactggaggtccttctggacctaacactccaaattttatcagagctgaggtgcttcctagtggttatctgattcgaccctgtgatgggggaggttccatgatttacattgtggatcatgttaatctgaatgcttgtagtgtgcctgaggttcttcggccactctatgaatcccctaagatactggcacagaagatgactgcggcggcgttgcgacacattaggcaaattgcacatgagtcaagtggtgaaatgccctatggtgctgggcgacagccggctgttctcagaactttcagtcaaaggctcagcagaggcttcaatgatgctgtgagtggctttccagatgatggctggtcttgtttgttgaacaccgatggtgctgaggatattacagttacaatcaactcatctccaaataaacttgttgggtctcatgtcagcgcttccccattattttctgctatggggggtggaatcatgtgcgcaaaagcatcgatgctgctgcagaatgtgccacctgctctacttgtgcgatttttgagggagcatcggtctgaatgggctgatcctggcatcgatgcttattctgtcgcctctttgagggccaacccatacactgttccaggtttaagggctggtgggtttatgggcaaccaggttatactgccccttgcacgcaccttggagcatgaagagtccttggaggttattaggcttgaaggacatggctttagccatgaggaggtgcttatgtcccgggatatgtttcttctacagctgtgcagtggcgtcgacgaggatgcacctggtgcgtgtgcacagcttgtctttgctcctattgatgaatcttttgccgacgatgcaccgttgctgccctcaggcttccgtgtgataccgcttgatgctaagacggatgtgccaacggccaccacacgcacgcttgaccttgcctctgcgctcgaggttggatcaggtggaagcggcatgcgcgcttcatgcgatggttccggcacgtgcgccacgagatcggtcctgaccatcgccttccagttctcgttcgagaaccaccttcgcgagagcgtggcggcaatggccaagcagtacgtcaggggcgtgatggcctccgtgcagagggtggccatggcgatcgctccttctcgcctcggttcgcgtatcgaactgaagcatccgccgggctctcccgaggcacttgcactagctacgtggattggcaggagctacagggcgcacactggaacggagatccgctggtcggacaccgaaggcgcggactctccactgatgctgttctggaagcacagcgacgcgatactctgctgctctctgaagccgccggctttcacgctcaagttcgccaacagcgccggcttcgacatcctggagacgacgatggtgaacatccaggacctgccgctggaggcggtcctcgacgaggagggccagaaggccctgtccgcgcagctccccgcgatcatgcagcagggcctggcgtacctccccggtggcgtgtgcaggtcgagcatggggcggcaggcgtcgtacgagcaggcagtggcgtggaaggtggtgggtgacgacggcgccccgcagtgcctggcgctcatgctcgccaactggaccttcatctgaggctcgcaacatcgctcggcagcgccagaccggatgccgccttttgccctactacgtatcattagttgcttttccgttgtgccgcctgtgttaagaatttgtgtactgtgtggatgatcgagaactgactctgtttgtgtgtgtgcgtgacaaacaactacaacagctgtatgcgtgcctggtcgtggtctcgtctccccggcttgtcgccggcgacattgatcactgttgcaggttgcagtattactatttgctagttctgcttgctcgatcagt

SEQ ID NO: 34975 - DNA, 1959 bp, Zea Mays
ctttccccctcttgagatccggtgtctaatccatttttcaagttttacaatggatatgagtactagagatcgcattagaaaaaggagggatgatgatgatctcatgcttttaattctccctactctacatctcttgggctatattggagatagtgaaaaaaaagttgcgacatacatcaacgctaactggagaggaaaaggttagggagctacttgaaggccacatcaagaattgtaggacatcatttaggatggaaccttacatctttaaagccttggtcaattatcttataagcgaagggttggttaaagacactagaagaatcaaggtcgaggagaagcttggtttctttttatatatgattagtcacaatgcgtcatttgaggatctccaagtattctttggtcacagcaatgatacattccatcgtgtgatcaaacatttctttgacatagttatccctgccctcagcatgcggttccttaaacctccctccaatcaagtacatgcaaaagatcgcgaagataaccgattttacccttactttaagataagatgtttagaggttctcctaagatagtagctttatctaaagctgctcaaaagaaggcttctcctaaagctgcaaaatcaaaaaaatgtggcggtggtattgagagagctgcatggaatgttgaattagagaagagtcttgttgacttgttgtttgaacacaatatgcctccacatagggctcaaaatggatggagtccagatgcttggaataaaatagtttctgaattccacgagaagcatgaatatgttacattcaacaagatccaaattcaagaaaaggagagagaattaaaaagggaatacaagatattgaaggaggtaagaaaacaaagtggagtttcttggaatgaaaaaagatgcatgatcattgctgaaccaacgatatgggacaacattatcactacatttcctagagctaagaagttccgcaagaagtcttttcctctctttgatgccttgggtgaattatatgatggtcacattgcacaagggacttggaacattacatctactcaaccactacaaaattctgatgaaggagagaaatttaaaaccatagaagtggaagatgaagatactaatgaaccacaagtagatgcgagaatagaacaagatgaagatatagtaattgttgaaagggttgaacagaggttacctaaaaggtcaggtgcaccaactgtcaatcaagagaaggagacaaagagagtgaggaaagatgcactagaagggctgatagggaggtaccttgatgtgaaaacaaagcaagttgcagatgaggccgcacaatcaacaaaagagaaggaagttgctcaaggtaatgatttttctatcaagaggtgtatttctgttcttaagactatggatatcacaagagatgagaagatcaaagcagcgggggtgtttaacacaccaaattacagagaaacatttatttgttttaatgatgatgagccagaagtcgctctcctttggctaagggggaagatggataaactctaaagggtccaaggataaatatattatcaacatctctagaggaagagaaagtcaagtcacatcttcagtctgtgcaggctgtttattcagtttcagtcaataaggcttagcttgtagtgtgtgtggtctgaagcttgcatgtgcatgtagagactgtttcttcggtctgtgcaggctgtgcagttttcagcttgtttcttcagtcgtttcagactgtgcatacatgtgctcgtctctactttgtcaaaaaaaaatagtgttattcagactgcagttttcagcttgtttgttgattgagtttattcagttttcagtttgtagatagcgttattcagttttcagatagcgctattcagtttccattttttagattgttctatatggaataaacgaacaaatatttgttg

SEQ ID NO: 34976 - DNA, 1499 bp, Zea Mays
cgccaccactctgatgcaggtcaccagcgataggccccaccggccaccacccagcctcttcccctccacccctgctctcaaatttgagacccaaactatcccgtcgtcgccagtcgccacgccgtcggccacgccccgacgaccaacacctgctccctccgccgccgcccgtgtcctcccgctccgtccgcgcgccgccctcatacctccaagcgcggttggatctgctctgggtccaagtccgctcgatcctcctctcgtcggaaactttatgtgtgccttcatccacgaagagctgaagatatcacatgactagttgcagttagtgtggcttttctccctgcttggtcctgattgtgtgctttgccttgcaaaggaaggaatcatgacctctgttgttcagagcgtttcagatgcatccaacattagtcggaatgcatccggctggcttacctttgcctaccgatgcaattgaagagccagtgtatgtaaatgcaaagcaatacaatgccatattaagacggcgtcaatctcgggctaaagctgaatcagaacggaagcttgtcaagggccgcaagagcaaataaccaagcgaatttctccaatctaccttccccacttccacttcaagatcgatctgcatcacattgtcctccctatctccatgagtcacggcatcagcatgccttgaaaagggccaggggagctggaggtcggtttctcaattcgaagtcagatgacaaggaagagaactccgactcaagtcaaaaagagattcagaacggagttgcgccccaaaagggtggccaaccgtcaacccctccgtctcccaacggtgcgtcgtcagcttatcaggcgcctagtcgtgaatgatgattcggaactcacaactgaagagattttagtccctgacgctagttgtggcagcagctttgtacagtaagtgctagcgggcagcagcgaaatggtgtcatagaaaaacgttgacgagtcagacaggttttggagtcttggttttttttcctctgtttattttacctgtctgcaattttagtagctttgtgtcccttcccctggatagttttttggtcagcgcttaagaaagtttaagggctgatttgttgatcggggatcccgaggggatccatgggagaaaaatcgtcttgctattcaaaattgtattgtaaggggattcctcgcctatggatcctctcgagatccctaaccaccaaatcagccctaagtgtgtagcatattggtctattgtttgcttttgctttgacttggagatttgggagtggagttcataaccttaccggagatttgggagtttaatgatgtgtttggtttgtggagtcactatacgcttgattggttacctggtcagacgcgctcaggtccagtctgtgcgttgactgtatttaggcttatgaatggttacctgcatggcatgagttcaacctgtatgcacgcgtgcagtctaggtgtttttttatccg

SEQ ID NO: 34977 - DNA, 1649 bp, Zea Mays
cgccaccactctgatgcaggtcaccagcgataggccccaccggccaccacccagcctcttcccctccacccctgctctcaaatttgagacccaaactatcccgtcgtcgccagtcgccacgccgtcggccacgccccgacgaccaacacctgctccctccgccgccgcccgtgtcctcccgctccgtccgcgcgccgccctcatacctccaagcgcggttggatctgctctgggtccaagtccgctcgatcctcctctcgtcggaaactttatgtgtgccttcatccacgaagagctgaagatatcacatgactagttgcagttagtgtggcttttctccctgcttggtcctgattgtgtgctttgccttgcaaaggaaggaatcatgacctctgttgttcagagcgtttcagggctgaggatcaaagtcatcagaagaagcaaactgaacctggggaccagcaagaagccccagttactagttcagatagccaaccaacagtgggcacaccatcaacagattatgtggcaccctatgcccctcatgacatgagccatgcaatgggtcaatatgcttatccaaatattgatccatactatggaagtctttatgcggcggcttatggtggacatccattgatgcatccaacattagtcggaatgcatccggctggcttacctttgcctaccgatgcaattgaagagccagtgtatgtaaatgcaaagcaatacaatgccatattaagacggcgtcaatctcgggctaaagctgaatcagaacggaagcttgtcaagggccgcaagccctatctccatgagtcacggcatcagcatgccttgaaaagggccaggggagctggaggtcggtttctcaattcgaagtcagatgacaaggaagagaactccgactcaagtcaaaaagagattcagaacggagttgcgccccaaaagggtggccaaccgtcaacccctccgtctcccaacggtgcgtcgtcagcttatcaggcgcctagtcgtgaatgatgattcggaactcacaactgaagagattttagtccctgacgctagttgtggcagcagctttgtacagtaagtgctagcgggcagcagcgaaatggtgtcatagaaaaacgttgacgagtcagacaggttttggagtcttggttttttttcctctgtttattttacctgtctgcaattttagtagctttgtgtcccttcccctggatagttttttggtcagcgcttaagaaagtttaagggctgatttgttgatcggggatcccgaggggatccatgggagaaaaatcgtcttgctattcaaaattgtattgtaaggggattcctcgcctatggatcctctcgagatccctaaccaccaaatcagccctaagtgtgtagcatattggtctattgtttgcttttgctttgacttggagatttgggagtggagttcataaccttaccggagatttgggagtttaatgatgtgtttggtttgtggagtcactatacgcttgattggttacctggtcagacgcgctcaggtccagtctgtgcgttgactgtatttaggcttatgaatggttacctgcatggcatgagttcaacctgtatgcacgcgtgcagtctaggtgtttttttatccg

SEQ ID NO: 34978 - DNA, 1643 bp, Zea Mays
cgccaccactctgatgcaggtcaccagcgataggccccaccggccaccacccagcctcttcccctccacccctgctctcaaatttgagacccaaactatcccgtcgtcgccagtcgccacgccgtcggccacgccccgacgaccaacacctgctccctccgccgccgcccgtgtcctcccgctccgtccgcgcgccgccctcatacctccaagcgcggttggatctgctctgggtccaagtccgctcgatcctcctctcgtcggaaactttatgtgtgccttcatccacgaagagctgaagatatcacatgactagttgcagttagtgtggcttttctccctgcttggtcctgattgtgtgctttgccttgcaaaggaaggaatcatgacctctgttgttcagagcgtttcaggtgaccacagggctgaggatcaaagtcatcagaagaagcaaactgaacctggggaccagcaagaagccccagttactagttcagatagccaaccaacagtgggcacaccatcaacagattatgtggcaccctatgcccctcatgacatgagccatgcaatgggtcaatatgcttatccaaatattgatccatactatggaagtctttatgcggcggcttatggtggacatccattgtcggaatgcatccggctggcttacctttgcctaccgatgcaattgaagagccagtgtatgtaaatgcaaagcaatacaatgccatattaagacggcgtcaatctcgggctaaagctgaatcagaacggaagcttgtcaagggccgcaagccctatctccatgagtcacggcatcagcatgccttgaaaagggccaggggagctggaggtcggtttctcaattcgaagtcagatgacaaggaagagaactccgactcaagtcaaaaagagattcagaacggagttgcgccccaaaagggtggccaaccgtcaacccctccgtctcccaacggtgcgtcgtcagcttatcaggcgcctagtcgtgaatgatgattcggaactcacaactgaagagattttagtccctgacgctagttgtggcagcagctttgtacagtaagtgctagcgggcagcagcgaaatggtgtcatagaaaaacgttgacgagtcagacaggttttggagtcttggttttttttcctctgtttattttacctgtctgcaattttagtagctttgtgtcccttcccctggatagttttttggtcagcgcttaagaaagtttaagggctgatttgttgatcggggatcccgaggggatccatgggagaaaaatcgtcttgctattcaaaattgtattgtaaggggattcctcgcctatggatcctctcgagatccctaaccaccaaatcagccctaagtgtgtagcatattggtctattgtttgcttttgctttgacttggagatttgggagtggagttcataaccttaccggagatttgggagtttaatgatgtgtttggtttgtggagtcactatacgcttgattggttacctggtcagacgcgctcaggtccagtctgtgcgttgactgtatttaggcttatgaatggttacctgcatggcatgagttcaacctgtatgcacgcgtgcagtctaggtgtttttttatccg

SEQ ID NO: 34979 - DNA, 1747 bp, Zea Mays
cgccaccactctgatgcaggtcaccagcgataggccccaccggccaccacccagcctcttcccctccacccctgctctcaaatttgagacccaaactatcccgtcgtcgccagtcgccacgccgtcggccacgccccgacgaccaacacctgctccctccgccgccgcccgtgtcctcccgctccgtccgcgcgccgccctcatacctccaagcgcggttggatctgctctgggtccaagtccgctcgatcctcctctcgtcggaaactttatgtgtgccttcatccacgaagagctgaagatatcacatgactagttgcagttagtgtggcttttctccctgcttggtcctgattgtgtgctttgccttgcaaaggaaggaatcatgacctctgttgttcagagcgtttcaggtgaccacagggctgaggatcaaagtcatcagaagaagcaaactgaacctggggaccagcaagaagccccagttactagttcagatagccaaccaacagtgggcacaccatcaacagattatgtggcaccctatgcccctcatgacatgagccatgcaatgggtcaatatgcttatccaaatattgatccatactatggaagtctttatgcggcggcttatggtggacatccattgatgcatccaacattagtcggaatgcatccggctggcttacctttgcctaccgatgcaattgaagagccagtgtatgtaaatgcaaagcaatacaatgccatattaagacggcgtcaatctcgggctaaagctgaatcagaacggaagcttgtcaagggccgcaagagcaaataaccaagcgaatttctccaatctaccttccccacttccacttcaagatcgatctgcatcacattgtcctgtaaatctgctgccctatctccatgagtcacggcatcagcatgccttgaaaagggccaggggagctggaggtcggtttctcaattcgaagtcagatgacaaggaagagaactccgactcaagtcaaaaagagattcagaacggagttgcgccccaaaagggtggccaaccgtcaacccctccgtctcccaacggtgcgtcgtcagcttatcaggcgcctagtcgtgaatgatgattcggaactcacaactgaagagattttagtccctgacgctagttgtggcagcagctttgtacagtaagtgctagcgggcagcagcgaaatggtgtcatagaaaaacgttgacgagtcagacaggttttggagtcttggttttttttcctctgtttattttacctgtctgcaattttagtagctttgtgtcccttcccctggatagttttttggtcagcgcttaagaaagtttaagggctgatttgttgatcggggatcccgaggggatccatgggagaaaaatcgtcttgctattcaaaattgtattgtaaggggattcctcgcctatggatcctctcgagatccctaaccaccaaatcagccctaagtgtgtagcatattggtctattgtttgcttttgctttgacttggagatttgggagtggagttcataaccttaccggagatttgggagtttaatgatgtgtttggtttgtggagtcactatacgcttgattggttacctggtcagacgcgctcaggtccagtctgtgcgttgactgtatttaggcttatgaatggttacctgcatggcatgagttcaacctgtatgcacgcgtgcagtctaggtgtttttttatccg

SEQ ID NO: 34980 - DNA, 1878 bp, Zea Mays
cgccaccactctgatgcaggtcaccagcgataggccccaccggccaccacccagcctcttcccctccacccctgctctcaaatttgagacccaaactatcccgtcgtcgccagtcgccacgccgtcggccacgccccgacgaccaacacctgctccctccgccgccgcccgtgtcctcccgctccgtccgcgcgccgccctcatacctccaagcgcggttggatctgctctgggtccaagtccgctcgatcctcctctcgtcggaaactttatgtgtgccttcatccacgaagagctgaagatatcacatgactagttgcagttagtgtggcttttctccctgcttggtcctgattgtgtgctttgccttgcaaaggaaggaatcatgacctctgttgttcagagcgtttcaggtgaccacagggctgaggatcaaagtcatcagaagaagcaaactgaacctggggaccagcaagaagccccagttactagttcagatagccaaccaacagtgggcacaccatcaacagattatgtggcaccctatgcccctcatgacatgagccatgcaatgggtcaatatgcttatccaaatattgatccatactatggaagtctttatgcggcggcttatggtggacatccattgatgcatccaacattagtcggaatgcatccggctggcttacctttgcctaccgatgcaattgaagagccagtgtatgtaaatgcaaagcaatacaatgccatattaagacggcgtcaatctcgggctaaagctgaatcagaacggaagcttgtcaagggccgcaaggtaaatctttgtaaccatatcctgcattgccatatgaaggaatttttaatgagccttttctgcccatgatgctagagcaaataaccaagcgaatttctccaatctaccttccccacttccacttcaagatcgatctgcatcacattgtcctgtaaatctgctgtaaaggatctaggaatgtaatttgggtaccacacattgacgaagttgcaacatcgaccctatctccatgagtcacggcatcagcatgccttgaaaagggccaggggagctggaggtcggtttctcaattcgaagtcagatgacaaggaagagaactccgactcaagtcaaaaagagattcagaacggagttgcgccccaaaagggtggccaaccgtcaacccctccgtctcccaacggtgcgtcgtcagcttatcaggcgcctagtcgtgaatgatgattcggaactcacaactgaagagattttagtccctgacgctagttgtggcagcagctttgtacagtaagtgctagcgggcagcagcgaaatggtgtcatagaaaaacgttgacgagtcagacaggttttggagtcttggttttttttcctctgtttattttacctgtctgcaattttagtagctttgtgtcccttcccctggatagttttttggtcagcgcttaagaaagtttaagggctgatttgttgatcggggatcccgaggggatccatgggagaaaaatcgtcttgctattcaaaattgtattgtaaggggattcctcgcctatggatcctctcgagatccctaaccaccaaatcagccctaagtgtgtagcatattggtctattgtttgcttttgctttgacttggagatttgggagtggagttcataaccttaccggagatttgggagtttaatgatgtgtttggtttgtggagtcactatacgcttgattggttacctggtcagacgcgctcaggtccagtctgtgcgttgactgtatttaggcttatgaatggttacctgcatggcatgagttcaacctgtatgcacgcgtgcagtctaggtgtttttttatccg

SEQ ID NO: 34981 - DNA, 1965 bp, Zea Mays
cgccaccactctgatgcaggtcaccagcgataggccccaccggccaccacccagcctcttcccctccacccctgctctcaaatttgagacccaaactatcccgtcgtcgccagtcgccacgccgtcggccacgccccgacgaccaacacctgctccctccgccgccgcccgtgtcctcccgctccgtccgcgcgccgccctcatacctccaagcgcggttggatctgctctgggtccaagtccgctcgatcctcctctcgtcggaaactttatgtgtgccttcatccacgaagagctgaagatatcacatgactagttgcagttagtgtggcttttctccctgcttggtcctgattgtgtgctttgccttgcaaaggaaggaatcatgacctctgttgttcagagcgtttcagggctgaggatcaaagtcatcagaagaagcaaactgaacctggggaccagcaagaagccccagttactagttcagatagccaaccaacagtgggcacaccatcaacagattatgtggcaccctatgcccctcatgacatgagccatgcaatgggtcaatatgcttatccaaatattgatccatactatggaagtctttatgcggcggcttatggtggacatccattgatgcatccaacattagtcggaatgcatccggctggcttacctttgcctaccgatgcaattgaagagccagtgtatgtaaatgcaaagcaatacaatgccatattaagacggcgtcaatctcgggctaaagctgaatcagaacggaagcttgtcaagggccgcaaggtaaatctttgtaaccatatcctgcattgccatatgaaggaatttttaatgagccttttctgcccatgatgctagagcaaataaccaagcgaatttctccaatctaccttccccacttccacttcaagatcgatctgcatcacattgtcctgtaaatctgctggtgaatattattttaatttcaatgttctctgatatctgaaatttcaacatgccacattttttaatgccttcacgggtgttgcttatcacaaaagcagtaaaggatctaggaatgtaatttgggtaccacacattgacgaagttgcaacatcgaccctatctccatgagtcacggcatcagcatgccttgaaaagggccaggggagctggaggtcggtttctcaattcgaagtcagatgacaaggaagagaactccgactcaagtcaaaaagagattcagaacggagttgcgccccaaaagggtggccaaccgtcaacccctccgtctcccaacggtgcgtcgtcagcttatcaggcgcctagtcgtgaatgatgattcggaactcacaactgaagagattttagtccctgacgctagttgtggcagcagctttgtacagtaagtgctagcgggcagcagcgaaatggtgtcatagaaaaacgttgacgagtcagacaggttttggagtcttggttttttttcctctgtttattttacctgtctgcaattttagtagctttgtgtcccttcccctggatagttttttggtcagcgcttaagaaagtttaagggctgatttgttgatcggggatcccgaggggatccatgggagaaaaatcgtcttgctattcaaaattgtattgtaaggggattcctcgcctatggatcctctcgagatccctaaccaccaaatcagccctaagtgtgtagcatattggtctattgtttgcttttgctttgacttggagatttgggagtggagttcataaccttaccggagatttgggagtttaatgatgtgtttggtttgtggagtcactatacgcttgattggttacctggtcagacgcgctcaggtccagtctgtgcgttgactgtatttaggcttatgaatggttacctgcatggcatgagttcaacctgtatgcacgcgtgcagtctaggtgtttttttatccg

SEQ ID NO: 34982 - DNA, 1735 bp, Zea Mays
cgccaccactctgatgcaggtcaccagcgataggccccaccggccaccacccagcctcttcccctccacccctgctctcaaatttgagacccaaactatcccgtcgtcgccagtcgccacgccgtcggccacgccccgacgaccaacacctgctccctccgccgccgcccgtgtcctcccgctccgtccgcgcgccgccctcatacctccaagcgcggttggatctgctctgggtccaagtccgctcgatcctcctctcgtcggaaactttatgtgtgccttcatccacgaagagctgaagatatcacatgactagttgcagttagtgtggcttttctccctgcttggtcctgattgtgtgctttgccttgcaaaggaaggaatcatgacctctgttgttcagagcgtttcaggtgaccacagggctgaggatcaaagtcatcagaagaagcaaactgaacctggggaccagcaagaagccccagttactagttcagatagccaaccaacagtgggcacaccatcaacagattatgtggcaccctatgcccctcatgacatgagccatgcaatgggtcaatatgcttatccaaatattgatccatactatggaagtctttatgcggcggcttatggtggacatccattgatgcatccaacattagtcggaatgcatccggctggcttacctttgcctaccgatgcaattgaagagccagtgtatgtaaatgcaaagcaatacaatgccatattaagacggcgtcaatctcgggctaaagctgaatcagaacggaagcttgtcaagggccgcaagagcaaataaccaagcgaatttctccaatctaccttccccacttccacttcaagatcgatctgcatcacattgtcctccctatctccatgagtcacggcatcagcatgccttgaaaagggccaggggagctggaggtcggtttctcaattcgaagtcagatgacaaggaagagaactccgactcaagtcaaaaagagattcagaacggagttgcgccccaaaagggtggccaaccgtcaacccctccgtctcccaacggtgcgtcgtcagcttatcaggcgcctagtcgtgaatgatgattcggaactcacaactgaagagattttagtccctgacgctagttgtggcagcagctttgtacagtaagtgctagcgggcagcagcgaaatggtgtcatagaaaaacgttgacgagtcagacaggttttggagtcttggttttttttcctctgtttattttacctgtctgcaattttagtagctttgtgtcccttcccctggatagttttttggtcagcgcttaagaaagtttaagggctgatttgttgatcggggatcccgaggggatccatgggagaaaaatcgtcttgctattcaaaattgtattgtaaggggattcctcgcctatggatcctctcgagatccctaaccaccaaatcagccctaagtgtgtagcatattggtctattgtttgcttttgctttgacttggagatttgggagtggagttcataaccttaccggagatttgggagtttaatgatgtgtttggtttgtggagtcactatacgcttgattggttacctggtcagacgcgctcaggtccagtctgtgcgttgactgtatttaggcttatgaatggttacctgcatggcatgagttcaacctgtatgcacgcgtgcagtctaggtgtttttttatccg

SEQ ID NO: 34983 - DNA, 3394 bp, Zea Mays
atttgctcaaaaagaaaaggttcatgcattgctcggcttcactcatggttcacatgttctagtattattggggaacaaaggtgtctgaactcggagctatggcatgcatgcgcagggccccttgtgtcccttcctgtggttgggagccgggtcgtctactttccccagggccatagtgagcaggttgctgcatcaactaataaagaagttgacgctcagatcccaaactacccaaacctacctccacaattaatctgccagcttcataatgtcacaatgcatgctgatgcagagactggagaggtttatgcccagatgacactgcaaccattgagcccggaagagcaaaaggaaccttttcttccaattgaattgggtgctggtagcaaccagccaactaattacttctgcaagacgttgactgcaagtgatacgagtacccatggcgggttctctgttccacgccgagcagctgagaaagtcttccccccattggatttttcacaacaccctccagtgcaagagctggttgcaagagatctgcatgataatgagtggaaattccgccacatttttcgtggtcagccaaaaaggcatctactgacgactggttggagtgtttttgtaagcgcaaaaagactagtagcaggggattctatcatatttatctggaatgataataaccagcttctattgggaattcgtcgagcaaatcgtccacagactgttatgccctcttccgtgctatcaagcgatagcatgcacattggtctccttgctgcagcagctcatgctgcagccacaaacagtcgtttcactattttctacaacccccggtatgatcatactttattgtacttggtcttgtttgtgcactgaagtaacatgaccatcctttgtcagggccagcccttctgagtttgtgattccactggctaagtatgtgaaagctgtctaccacacacgtgtgtctgttggaatgcggtttcggatgctttttgagacagaggaatcaagcgtcagacgatacatgggtacgatcacatgcataagtgatctggactcagagcgttggccaaattcacactggcgttctgtgaaggttggttgggatgagtctacagctggtgataaacagccaagagtttcactctgggagattgaaccactgatggcctttccgatgtacccaactgcctttccattaaggctaaagcgtccgtgggcttcagggctacctatgttcaatggtgggaggagtgatgagttcgctcgttattcttctctcatgtggctccgagatggaaacagaggggctcaatcactgaacttccagggacttggagcatcaccatggcttcaaccaagaatagattatccattattaggtctgaagctagatacttaccagcagatggctgctgctgcactggaagaaattagagctggggatcatttgaagcagatatcttctctcctgccagtgcaacagccacaaaatttgagtggtggattagatcctttatatggaaatcctgttctgcagcagatgcagttccaatctcagcagtcatccttgcaagttgtgcagcaaggttatggtccaaatgcaagcgactctgggttccttcaaaatcagctgcagctgcaaaagcagcaggagccactaccacagcagcagcagcaagctctgcaacaacaatcgcatcaggaaatgcaacatcacctctcagctagctgtcatgatattgctaatgtagcttctggtgtgtctgagtctggatctgcttctcaaacagaatcttctttgctttctgggtcatcgtaccaacagatctatgatggaaacagtggtccaggtctgcatctgcacaacggtttccacaactgttcaagccaagagtcctccaaccttcttaatctctcaagaagtggacaattcatggcatcagagggatggcctttgaagaggttggctgtggaatctctttctggtcatgagctccaacctgtgcagcacaagtttgagaaagtgaatcaccaaagtaatgtgtctcacatttctagcaccttgcccccactgtcagcaagagacagttatagtgcccaggctagtggtacaaatgatcagagtcacctgctttcatcatcatttgcaatccatgatggcttgacagccgtcaggagtggtggtgttggcagtggaactgatgcgataaccatagcttcgttgagatataatgatatgaatttgctacctgaaaaccccatcgcaacttccagttgtttgggcgaatcaggaaccttcaattctctcgacgatgtgtgtggtgtaaacccatcacaaggtggaacctttgtgaaggtttacaaatcagggtcccctgggagatcgctcgacatcaccaggttcagcagctactacgagttacgtagcgagctcgagcggttatttggtcttgaaggccaactggaggaccctgtaagatcaggctggcagcttgtattcgttgaccgggaaaacgatattcttctcgtcggcgatgacccgtggcaggagtttgtgaatagtgtatggtgcataaagatcctctcgccgcaagacgtgcagcagatggtccgcggcggaggcgaccttctgtctacaactggagtgaggacactgcagggcagtgtctgcgatgattattctgcaggccacgacatgcagaatctcaccggcagcatcgcacctgtggtgcctctggactactgagaccgagatgaagaccagaaactgaagttctgaaccaaaaccggcaattcagcaccgcaggattgccgtccacgagtcttttcggttcctatgatctatcttctctcaagttgtgttggtcagaaataacctagtcgttaatatagctagatccattgtatcattatggtaatggacatgttgtacgatagctgttgtagctacgtgtagccatagcctaagctctaaatggcaggcaagaattggtctatgaaagtatggatgcaggcactcactgtagaggtgacctagccctgtagttctctatatcttctcatatctaaaagctgacggttccatgtggcgcctaaactattgaaccctgtcacctttgtcatatttttttcacctcaattcgcggttgtttgatcttgttgcatgccatacaagtcaaatttttttgtcctgtttgtagttcagtaggctgtaccctgtaggcttttgcctgttaatccccgggtttcatgtcaaccaaaccatgatttccatggaatcagggtgtagcatagattaggggtttcactgattctttcctccgacatttatgtgggggtagaaagtttatttggcactgtaaggaacctaataggcactcagggg

SEQ ID NO: 34984 - DNA, 4657 bp, Zea Mays
ctccaaaaagtaatccacatggttcttgctcttgaaggagtcagtcaaaacccaaaaccttccgagccacaatacagatttttctaataattaaaagatataaagggaagaaataaatctacctttttttactgtctccgagaagatctctctctgctgttcttccttccccataaaccaaaagagaggggaaaaaagaagaaagaaagcaaggagcaccgcaccactccactccacttccctcctcgatccagccatggcggcctaggccccctagggttccctgtcagcccccacccaggcgcctcctgccgcttcctccgctcccacccggtggtcgcgctgcccgattcggccgccggcgtcgaatgggaggcgacccgatgctcgaagccggccgttgccgcgcgctgccgacggagattccctgagctcggcggcgggttcccgtgctcgccgagcgatgactctcggcgccggcgctgcccaaggcactgggtctagggcgcgtggctggttgggagcgcgccgtgcgtgcaatgggggatttaaggcggttctgtagagtcgccgcggcggtcttggttctgcgagcgcgtggcctgcgctcgtgaaggtagggctgtctagctgctccttcgtctgatgagctcagcttctgcgtcccgcctcgttttgtgcccgcgtttgctccggcggctgcccaaagcccagcggatcgggccctgctcatttcggcgcttctcttcggttctttgtggaaagggaggagctgtgaggtgttgcttggcgagggtgcgcagctgaggattccgggcatgaggtcagcaatgacgcgcatttgtcgcgacaggccggaattcgagtagcggtttcttgaagtggattggctgctgctgcgtgggaagggggaagcggcggcatcaacagccgcagaggaaggcttactctgaagcggaggggaagcaggctggcattgctactgggagcatggcgaggtgctaaggacgtgcaggttccgcaatcaccgcatcttggtgttcttgtttcaggtcgtagtgggagatgaacctctcaccgcccaggatgtcggagccatcgcttgaaagtgacggggaacaaaggtgtctgaactcggagctatggcatgcatgcgcagggccccttgtgtcccttcctgtggttgggagccgggtcgtctactttccccagggccatagtgagcaggttgctgcatcaactaataaagaagttgacgctcagatcccaaactacccaaacctacctccacaattaatctgccagcttcataatgtcacaatgcatgctgatgcagagactggagaggtttatgcccagatgacactgcaaccattgagcccggaagagcaaaaggaaccttttcttccaattgaattgggtgctggtagcaaccagccaactaattacttctgcaagacgttgactgcaagtgatacgagtacccatggcgggttctctgttccacgccgagcagctgagaaagtcttccccccattggatttttcacaacaccctccagtgcaagagctggttgcaagagatctgcatgataatgagtggaaattccgccacatttttcgtgccaaaaaggcatctactgacgactggttggagtgtttttgtaagcgcaaaaagactagtagcaggggattctatcatatttatctggaatgataataaccagcttctattgggaattcgtcgagcaaatcgtccacagactgttatgccctcttccgtgctatcaagcgatagcatgcacattggtctccttgctgcagcagctcatgctgcagccacaaacagtcgtttcactattttctacaacccccggtatgatcatactttattgtacttggtcttgtttgtgcactgaagtaacatgaccatcctttgtcagggccagcccttctgagtttgtgattccactggctaagtatgtgaaagctgtctaccacacacgtgtgtctgttggaatgcggtttcggatgctttttgagacagaggaatcaagcgtcagacgatacatgggtacgatcacatgcataagtgatctggactcagagcgttggccaaattcacactggcgttctgtgaaggttggttgggatgagtctacagctggtgataaacagccaagagtttcactctgggagattgaaccactgatggcctttccgatgtacccaactgcctttccattaaggctaaagcgtccgtgggcttcagggctacctatgttcaatggtgggaggagtgatgagttcgctcgttattcttctctcatgtggctccgagatggaaacagaggggctcaatcactgaacttccagggacttggagcatcaccatggcttcaaccaagaatagattatccattattaggtctgaagctagatacttaccagcagatggctgctgctgcactggaagaaattagagctggggatcatttgaagcagatatcttctctcctgccagtgcaacagccacaaaatttgagtggtggattagatcctttatatggaaatcctgttctgcagcagatgcagttccaatctcagcagtcatccttgcaagttgtgcagcaaggttatggtccaaatgcaagcgactctgggttccttcaaaatcagctgcagctgcaaaagcagcaggagccactaccacagcagcagcagcaagctctgcaacaacaatcgcatcaggaaatgcaacatcacctctcagctagctgtcatgatattgctaatgtagcttctggtgtgtctgagtctggatctgcttctcaaacagaatcttctttgctttctgggtcatcgtaccaacagatctatgatggaaacagtggtccaggtctgcatctgcacaacggtttccacaactgttcaagccaagagtcctccaaccttcttaatctctcaagaagtggacaattcatggcatcagagggatggcctttgaagaggttggctgtggaatctctttctggtcatgagctccaacctgtgcagcacaagtttgagaaagtgaatcaccaaagtaatgtgtctcacatttctagcaccttgcccccactgtcagcaagagacagttatagtgcccaggctagtggtacaaatgatcagagtcacctgctttcatcatcatttgcaatccatgatggcttgacagccgtcaggagtggtggtgttggcagtggaactgatgcgataaccatagcttcgttgagatataatgatatgaatttgctacctgaaaaccccatcgcaacttccagttgtttgggcgaatcaggaaccttcaattctctcgacgatgtgtgtggtgtaaacccatcacaaggtggaacctttgtgaaggtatgtaatctcacttatgctgtatgctccttattcatcaaatggcatgtgaagttgccaagttggtaactgcaagagcacttcattttgtggaaggtaaaaaggtccattttggtgggtgggtgttgggttgacggttcagaaagcagtcaattaaatcttcaagttggtaactgcatcacatcgttttaacgccttatgttccctttttgtatcaccactaggtttacaaatcagggtcccctgggagatcgctcgacatcaccaggttcagcagctactacgagttacgtagcgagctcgagcggttatttggtcttgaaggccaactggaggaccctgtaagatcaggctggcagcttgtattcgttgaccgggaaaacgatattcttctcgtcggcgatgacccgtggcaggagtttgtgaatagtgtatggtgcataaagatcctctcgccgcaagacgtgcagcagatggtccgcggcggaggcgaccttctgtctacaactggagtgaggacactgcagggcagtgtctgcgatgattattctgcaggccacgacatgcagaatctcaccggcagcatcgcacctgtggtgcctctggactactgagaccgagatgaagaccagaaactgaagttctgaaccaaaaccggcaattcagcaccgcaggattgccgtccacgagtcttttcggttcctatgatctatcttctctcaagttgtgttggtcagaaataacctagtcgttaatatagctagatccattgtatcattatggtaatggacatgttgtacgatagctgttgtagctacgtgtagccatagcctaagctctaaatggcaggcaagaattggtctatgaaagtatggatgcaggcactcactgtagaggtgacctagccctgtagttctctatatcttctcatatctaaaagctgacggttccatgtggcgcctaaactattgaaccctgtcacctttgtcatatttttttcacctcaattcgcggttgtttgatcttgttgcatgccatacaagtcaaatttttttgtcctgtttgtagttcagtaggctgtaccctgtaggcttttgcctgttaatccccgggtttcatgtcaaccaaaccatgatttccatggaatcagggtgtagcatagattaggggtttcactgattctttcctccgacatttatgtgggggtagaaagtttatttggcactgtaaggaacctaataggcactcagggg

SEQ ID NO: 34985 - DNA, 4227 bp, Zea Mays
attttctccaaaaagtaatccacatggttcttgctcttgaaggagtcagtcaaaacccaaaaccttccgagccacaatacagatttttctaataattaaaagatataaagggaagaaataaatctacctttttttactgtctccgagaagatctctctctgctgttcttccttccccataaaccaaaagagaggggaaaaaagaagaaagaaagcaaggagcaccgcaccactccactccacttccctcctcgatccagccatggcggcctaggccccctagggttccctgtcagcccccacccaggcgcctcctgccgcttcctccgctcccacccggtggtcgcgctgcccgattcggccgccggcgtcgaatgggaggcgacccgatgctcgaagccggccgttgccgcgcgctgccgacggagattccctgagctcggcggcgggttcccgtgctcgccgagcgatgactctcggcgccggcgctgcccaaggcactgggtctagggcgcgtggctggttgggagcgcgccgtgcgtgcaatgggggatttaaggcggttctgtagagtcgccgcggcggtcttggttctgcgagcgcgtggcctgcgctcgtgaagggaggagctgtgaggtgttgcttggcgagggtgcgcagctgaggattccgggcatgaggtcagcaatgacgcgcatttgtcgcgacaggccggaattcgagtagcggtttcttgaagtggattggctgctgctgcgtgggaagggggaagcggcggcatcaacagccgcagaggaaggcttactctgaagcggaggggaagcaggctggcattgctactgggagcatggcgaggtgctaaggacgtgcaggttccgcaatcaccgcatcttggtgttcttgtttcaggtcgtagtgggagatgaacctctcaccgcccaggatgtcggagccatcgcttgaaagtgacggggaacaaaggtgtctgaactcggagctatggcatgcatgcgcagggccccttgtgtcccttcctgtggttgggagccgggtcgtctactttccccagggccatagtgagcaggttgctgcatcaactaataaagaagttgacgctcagatcccaaactacccaaacctacctccacaattaatctgccagcttcataatgtcacaatgcatgctgatgcagagactggagaggtttatgcccagatgacactgcaaccattgagcccggaagagcaaaaggaaccttttcttccaattgaattgggtgctggtagcaaccagccaactaattacttctgcaagacgttgactgcaagtgatacgagtacccatggcgggttctctgttccacgccgagcagctgagaaagtcttccccccattggatttttcacaacaccctccagtgcaagagctggttgcaagagatctgcatgataatgagtggaaattccgccacatttttcgtggtcagccaaaaaggcatctactgacgactggttggagtgtttttgtaagcgcaaaaagactagtagcaggggattctatcatatttatctggaatgataataaccagcttctattgggaattcgtcgagcaaatcgtccacagactgttatgccctcttccgtgctatcaagcgatagcatgcacattggtctccttgctgcagcagctcatgctgcagccacaaacagtcgtttcactattttctacaacccccgggccagcccttctgagtttgtgattccactggctaagtatgtgaaagctgtctaccacacacgtgtgtctgttggaatgcggtttcggatgctttttgagacagaggaatcaagcgtcagacgatacatgggtacgatcacatgcataagtgatctggactcagagcgttggccaaattcacactggcgttctgtgaaggttggttgggatgagtctacagctggtgataaacagccaagagtttcactctgggagattgaaccactgatggcctttccgatgtacccaactgcctttccattaaggctaaagcgtccgtgggcttcagggctacctatgttcaatggtgggaggagtgatgagttcgctcgttattcttctctcatgtggctccgagatggaaacagaggggctcaatcactgaacttccagggacttggagcatcaccatggcttcaaccaagaatagattatccattattaggtctgaagctagatacttaccagcagatggctgctgctgcactggaagaaattagagctggggatcatttgaagcagatatcttctctcctgccagtgcaacagccacaaaatttgagtggtggattagatcctttatatggaaatcctgttctgcagcagatgcagttccaatctcagcagtcatccttgcaagttgtgcagcaaggttatggtccaaatgcaagcgactctgggttccttcaaaatcagctgcagctgcaaaagcagcaggagccactaccacagcagcagcagcaagctctgcaacaacaatcgcatcaggaaatgcaacatcacctctcagctagctgtcatgatattgctaatgtagcttctggtgtgtctgagtctggatctgcttctcaaacagaatcttctttgctttctgggtcatcgtaccaacagatctatgatggaaacagtggtccaggtctgcatctgcacaacggtttccacaactgttcaagccaagagtcctccaaccttcttaatctctcaagaagtggacaattcatggcatcagagggatggcctttgaagaggttggctgtggaatctctttctggtcatgagctccaacctgtgcagcacaagtttgagaaagtgaatcaccaaagtaatgtgtctcacatttctagcaccttgcccccactgtcagcaagagacagttatagtgcccaggctagtggtacaaatgatcagagtcacctgctttcatcatcatttgcaatccatgatggcttgacagccgtcaggagtggtggtgttggcagtggaactgatgcgataaccatagcttcgttgagatataatgatatgaatttgctacctgaaaaccccatcgcaacttccagttgtttgggcgaatcaggaaccttcaattctctcgacgatgtgtgtggtgtaaacccatcacaaggtggaacctttgtgaaggtttacaaatcagggtcccctgggagatcgctcgacatcaccaggttcagcagctactacgagttacgtagcgagctcgagcggttatttggtcttgaaggccaactggaggaccctgtaagatcaggctggcagcttgtattcgttgaccgggaaaacgatattcttctcgtcggcgatgacccgtggcaggagtttgtgaatagtgtatggtgcataaagatcctctcgccgcaagacgtgcagcagatggtccgcggcggaggcgaccttctgtctacaactggagtgaggacactgcagggcagtgtctgcgatgattattctgcaggccacgacatgcagaatctcaccggcagcatcgcacctgtggtgcctctggactactgagaccgagatgaagaccagaaactgaagttctgaaccaaaaccggcaattcagcaccgcaggattgccgtccacgagtcttttcggttcctatgatctatcttctctcaagttgtgttggtcagaaataacctagtcgttaatatagctagatccattgtatcattatggtaatggacatgttgtacgatagctgttgtagctacgtgtagccatagcctaagctctaaatggcaggcaagaattggtctatgaaagtatggatgcaggcactcactgtagaggtgacctagccctgtagttctctatatcttctcatatctaaaagctgacggttccatgtggcgcctaaactattgaaccctgtcacctttgtcatatttttttcacctcaattcgcggttgtttgatcttgttgcatgccatacaagtcaaatttttttgtcctgtttgtagttcagtaggctgtaccctgtaggcttttgcctgttaatccccgggtttcatgtcaaccaaaccatgatttccatggaatcagggtgtagcatagattaggggtttcactgattctttcctccgacatttatgtgggggtagaaagtttatttggcactgtaaggaacctaataggcactcagggg

SEQ ID NO: 34986 - DNA, 4499 bp, Zea Mays
cgacgtgtaagcaacattttctccaaaaagtaatccacatggttcttgctcttgaaggagtcagtcaaaacccaaaaccttccgagccacaatacagatttttctaataattaaaagatataaagggaagaaataaatctacctttttttactgtctccgagaagatctctctctgctgttcttccttccccataaaccaaaagagaggggaaaaaagaagaaagaaagcaaggagcaccgcaccactccactccacttccctcctcgatccagccatggcggcctaggccccctagggttccctgtcagcccccacccaggcgcctcctgccgcttcctccgctcccacccggtggtcgcgctgcccgattcggccgccggcgtcgaatgggaggcgacccgatgctcgaagccggccgttgccgcgcgctgccgacggagattccctgagctcggcggcgggttcccgtgctcgccgagcgatgactctcggcgccggcgctgcccaaggcactgggtctagggcgcgtggctggttgggagcgcgccgtgcgtgcaatgggggatttaaggcggttctgtagagtcgccgcggcggtcttggttctgcgagcgcgtggcctgcgctcgtgaaggtagggctgtctagctgctccttcgtctgatgagctcagcttctgcgtcccgcctcgttttgtgcccgcgtttgctccggcggctgcccaaagcccagcggatcgggccctgctcatttcggcgcttctcttcggttctttgtggaaagggaggagctgtgaggtgttgcttggcgagggtgcgcagctgaggattccgggcatgaggtcagcaatgacgcgcatttgtcgcgacaggccggaattcgagtagcggtttcttgaagtggattggctgctgctgcgtgggaagggggaagcggcggcatcaacagccgcagaggaaggcttactctgaagcggaggggaagcaggctggcattgctactgggagcatggcgaggtgctaaggacgtgcaggttccgcaatcaccgcatcttggtgttcttgtttcaggtcgtagtgggagatgaacctctcaccgcccaggatgtcggagccatcgcttgaaagtgacggggaacaaaggtgtctgaactcggagctatggcatgcatgcgcagggccccttgtgtcccttcctgtggttgggagccgggtcgtctactttccccagggccatagtgagcaggttgctgcatcaactaataaagaagttgacgctcagatcccaaactacccaaacctacctccacaattaatctgccagcttcataatgtcacaatgcatgctgatgcagagactggagaggtttatgcccagatgacactgcaaccattgagcccggaagagcaaaaggaaccttttcttccaattgaattgggtgctggtagcaaccagccaactaattacttctgcaagacgttgactgcaagtgatacgagtacccatggcgggttctctgttccacgccgagcagctgagaaagtcttccccccattggatttttcacaacaccctccagtgcaagagctggttgcaagagatctgcatgataatgagtggaaattccgccacatttttcgtggtcagccaaaaaggcatctactgacgactggttggagtgtttttgtaagcgcaaaaagactagtagcaggggattctatcatatttatctggaatgataataaccagcttctattgggaattcgtcgagcaaatcgtccacagactgttatgccctcttccgtgctatcaagcgatagcatgcacattggtctccttgctgcagcagctcatgctgcagccacaaacagtcgtttcactattttctacaacccccgcccttctgagtttgtgattccactggctaagtatgtgaaagctgtctaccacacacgtgtgtctgttggaatgcggtttcggatgctttttgagacagaggaatcaagcgtcagacgatacatgggtacgatcacatgcataagtgatctggactcagagcgttggccaaattcacactggcgttctgtgaaggttggttgggatgagtctacagctggtgataaacagccaagagtttcactctgggagattgaaccactgatggcctttccgatgtacccaactgcctttccattaaggctaaagcgtccgtgggcttcagggctacctatgttcaatggtgggaggagtgatgagttcgctcgttattcttctctcatgtggctccgagatggaaacagaggggctcaatcactgaacttccagggacttggagcatcaccatggcttcaaccaagaatagattatccattattaggtctgaagctagatacttaccagcagatggctgctgctgcactggaagaaattagagctggggatcatttgaagcagatatcttctctcctgccagtgcaacagccacaaaatttgagtggtggattagatcctttatatggaaatcctgttctgcagcagatgcagttccaatctcagcagtcatccttgcaagttgtgcagcaaggttatggtccaaatgcaagcgactctgggttccttcaaaatcagctgcagctgcaaaagcagcaggagccactaccacagcagcagcagcaagctctgcaacaacaatcgcatcaggaaatgcaacatcacctctcagctagctgtcatgatattgctaatgtagcttctggtgtgtctgagtctggatctgcttctcaaacagaatcttctttgctttctgggtcatcgtaccaacagatctatgatggaaacagtggtccaggtctgcatctgcacaacggtttccacaactgttcaagccaagagtcctccaaccttcttaatctctcaagaagtggacaattcatggcatcagagggatggcctttgaagaggttggctgtggaatctctttctggtcatgagctccaacctgtgcagcacaagtttgagaaagtgaatcaccaaagtaatgtgtctcacatttctagcaccttgcccccactgtcagcaagagacagttatagtgcccaggctagtggtacaaatgatcagagtcacctgctttcatcatcatttgcaatccatgatggcttgacagccgtcaggagtggtggtgttggcagtggaactgatgcgataaccatagcttcgttgagatataatgatatgaatttgctacctgaaaaccccatcgcaacttccagttgtttgggcgaatcaggaaccttcaattctctcgacgatgtgtgtggtgtaaacccatcacaaggtggaacctttgtgaaggtatgtaatctcacttatgctgtatgctccttattcatcaaatggcatgtgaagttgccaagttggtaactgcaagagcacttcattttgtggaaggtaaaaaggtccattttggtttacaaatcagggtcccctgggagatcgctcgacatcaccaggttcagcagctactacgagttacgtagcgagctcgagcggttatttggtcttgaaggccaactggaggaccctgtaagatcaggctggcagcttgtattcgttgaccgggaaaacgatattcttctcgtcggcgatgacccgtggcaggagtttgtgaatagtgtatggtgcataaagatcctctcgccgcaagacgtgcagcagatggtccgcggcggaggcgaccttctgtctacaactggagtgaggacactgcagggcagtgtctgcgatgattattctgcaggccacgacatgcagaatctcaccggcagcatcgcacctgtggtgcctctggactactgagaccgagatgaagaccagaaactgaagttctgaaccaaaaccggcaattcagcaccgcaggattgccgtccacgagtcttttcggttcctatgatctatcttctctcaagttgtgttggtcagaaataacctagtcgttaatatagctagatccattgtatcattatggtaatggacatgttgtacgatagctgttgtagctacgtgtagccatagcctaagctctaaatggcaggcaagaattggtctatgaaagtatggatgcaggcactcactgtagaggtgacctagccctgtagttctctatatcttctcatatctaaaagctgacggttccatgtggcgcctaaactattgaaccctgtcacctttgtcatatttttttcacctcaattcgcggttgtttgatcttgttgcatgccatacaagtcaaatttttttgtcctgtttgtagttcagtaggctgtaccctgtaggcttttgcctgttaatccccgggtttcatgtcaaccaaaccatgatttccatggaatcagggtgtagcatagattaggggtttcactgattctttcctccgacatttatgtgggggtagaaagtttatttggcactgtaaggaacctaataggcactcagggg

SEQ ID NO: 34987 - DNA, 150 bp, Zea Mays
cttgcttgggtaacactatgttagtgtttgttagacgacgtccacttgacgatcatccttgtcctaacacttgatcagacaggttcgttcatcagcatctccatgcggagtagcccgcgcttggggtcgacttgagtcatcttccgcatt

SEQ ID NO: 34988 - DNA, 313 bp, Zea Mays
cgaccgcgcgctgccgtcttcccctgcacaacgcccatcccgtgcatgtcgcgtaatcagccacgagcttcggagccgttcagccgccagcacccctcctcgcctacaagtatcgggccccacgacctcgccgctctcgctcccatcttctcgccaccaaatctctgagccattcatcgcgccgtcgtggaacactctgtcgccgtggagtcaagcgcgggcgccgctgtcatcgaccacgattctcttcatcactgacgagcaagctactgaggatactggtgtttagcagatagaagttgctgagtaggag

SEQ ID NO: 34989 - DNA, 2076 bp, Zea Mays
gaagttgcatcatatgatatcaattatcaagaaatgaaggtcaggaaagtccgatgcagctgcatagagagttgacccactactccagtaaagttcttttttacaagttccatgatactaccatggaacatgttgatcctataagtctgggcccttggatcccgtctctgcgcccaacaccatttcagggttctggaagcatgaggttatggtctctctttctcttgcctctgctctgtctacctgcgcgggttcgatcagaggattacgcggatgcaactgtcattgttcgaggctctgagacgattgcttcgaccagtgatgagtttgtttgcgccaccattgattggtggcctccagagaagtgtaactacgaccagtgtccatgggaaagggcttctgtcttaaatctggacttgactaatcctttgctggctaaagctatccaagccttcagtccgctgcgcatcagagttggaggctccttacaagatcaagtgttatatggcacaccaaatttaggattgccatgcgacccatttacaaaggtttcaagtggcctttttgggttttctcaaggatgcataacattggaaagatgggatgatattaatgatatgttcctgaaaactggtgcagttgttacattcggtctcaacgcgcttcgaggaagacagcagacaagaaaaggtgtctggggtggtccctggaattctagcaatgctcgagaattcattgaatataccgttttaaagaactatcctatcgattcttgggaatttgggaatgaattgagcggaagtggagttggtgcgagtgtgtcagctgaacaatatggaaaagatctagttgaactccaaaccatcatcagcgagctatacggagattccaacaaaccactggttgtagccccaggaggattttatgaccagaaatggtttgctcagctcctcgatgtctccgggccaaatgttctcaacgcaatgactcatcatatttacaatcttggtgctggtaatgatccacaggttccaaacagaattttgaacccgcagtatctgagccggacttccgacacattcagaagtctccaactcaccatacagcgccatggaccatggtctgctccatgggttggtgaatctggtggtgcatataacagtggcagccggctcgtgtccaatacttttctcaatagcttctggtatcttgatcagctgggtcagtcagcaaagtatgacaccaaggtctactgcagacagacgctgattggtggcaattacggccttcttgacaccgagactttcgtaccaaacccggattactacagctcatggggacaggagttctttctgtagacatcagtggttcttcgtacttgcgcgcctacgtgcattgcgccaagcaaaagggtggcgtcactcttctcttgctgaacctgcaccgaacgatgggcttcatggtctcagtcaggaacgacctaaatgtcaacctcgcagaagggcaagggatcaggagggacagtgcctttgtccatggcctgaagaggacggtttcttgggtcgggagcaaagcctccgatgggttttccaagagggaagagtaccatctctcgtcgaaagatgggaacccttttgcccggaccatgctgctgaatggagcccctcttgagctcactgaagatggtggcatcccttcattgtatccagtggaagtttcagttaactcgccaatctatgttgctcctctgaccattgcgtttgtcgtcttccctgactttgaggctgaagcttgtggccgatgatcaactgtacatagaatatcacctttttttgctataaggcatctaaagaacaaaggtcattgtaatgtaaagacgtgttcgttttctgatctgtgccccaatcgggccatctacgttttcccaacgaatagtctccaggtgatgtcatactgatcaatgcctcgtcattgtactttgtacatacagttcatcatctcagaaaaaaaatgttcagcatcaaccaaattccagaggaatttgtcctatcgaacttgatggtgtgcaagtcaatt

SEQ ID NO: 34990 - DNA, 2174 bp, Zea Mays
gaagttgcatcatatgatatcaattatcaagaaatgaaggtcaggaaagtccgatgcagctgcatagagagttgacccactactccagtaaagttcttttttacaagttccatgatactaccatggaacatgttgatcctataagtctgggcccttggatcccgtctctgcgcccaacaccatttcagggttctggaagcatgaggttatggtctctctttctcttgcctctgctctgtctacctgcgcgggttcgatcagaggattacgcggatgcaactgtcattgttcgaggctctgagacgattgcttcgaccagtgatgagtttgtttgcgccaccattgattggtggcctccagagaagtgtaactacgaccagtgtccatgggaaagggcttctgtcttaaatctggacttgactaatcctttgctggctaaagctatccaagccttcagtccgctgcgcatcagagttggaggctccttacaagatcaagtgttatatggcacaccaaatttaggattgccatgcgacccatttacaaaggtttcaagtggcctttttgggttttctcaaggatgcataacattggaaagatgggatgatattaatgatatgttcctgaaaactggttgttacattcggtctcaacgcgcttcgaggaagacagcagacaagaaaaggtgtctggggtggtccctggaattctagcaatgctcgagaattcattgaatataccgttttaaagaactatcctatcgattcttgggaatttgggaatgaattgagcggaagtggagttggtgcgagtgtgtcagctgaacaatatggaaaagatctagttgaactccaaaccatcatcagcgagctatacggagattccaacaaaccactggttgtagccccaggaggattttatgaccagaaatggtttgctcagctcctcgatgtctccgggccaaatgttctcaacgcaatgactcatcatatttacaatcttggtgctggtaatgatccacaggttccaaacagaattttgaacccgcagtatctgagccggacttccgacacattcagaagtctccaactcaccatacagcgccatggaccatggtctgctccatgggttggtgaatctggtggtgcatataacagtggcagccggctcgtgtccaatacttttctcaatagcttctggtatcttgatcagctgggtcagtcagcaaagtatgacaccaaggtctactgcagacagacgctgattggtggcaattacggccttcttgacaccgagactttcgtaccaaacccggattactacaggcaagcctatgtaccaaatatgccgctacaaacttgatttgctacctccatatgcaatggcactaaaccacggtatatattcagtgccttgttgtggcatcagctcatggggacaggagttctttctgtagacatcagtggttcttcgtacttgcgcgcctacgtgcattgcgccaagcaaaagggtggcgtcactcttctcttgctgaacctgcaccgaacgatgggcttcatggtctcagtcaggaacgacctaaatgtcaacctcgcagaagggcaagggatcaggagggacagtgcctttgtccatggcctgaagaggacggtttcttgggtcgggagcaaagcctccgatgggttttccaagagggaagagtaccatctctcgtcgaaagatgggaacccttttgcccggaccatgctgctgaatggagcccctcttgagctcactgaagatggtggcatcccttcattgtatccagtggaagtttcagttaactcgccaatctatgttgctcctctgaccattgcgtttgtcgtcttccctgactttgaggctgaagcttgtggccgatgatcaactgtacatagaatatcacctttttttgctataaggcatctaaagaacaaaggtcattgtaatgtaaagacgtgttcgttttctgatctgtgccccaatcgggccatctacgttttcccaacgaatagtctccaggtgatgtcatactgatcaatgcctcgtcattgtactttgtacatacagttcatcatctcagaaaaaaaatgttcagcatcaaccaaattccagaggaatttgtcctatcgaacttgatggtgtgcaagtcaatt

SEQ ID NO: 34991 - DNA, 1032 bp, Zea Mays
gtacatattctttatcattatttaagcattgtgcgatgatatgatatttatgtaatcgttgtatacgtgatctaagtcctaacatgtacataattcacattcggtttgtcttctaaaaccggtcgtgacattaactcatcaagatcaatggtgtgatcttgatgcaagttagtccgaagcaaaaaaaacatcatgggtgaaaacctgacccgcctcacataatctcataataaagtttttcctctatggttcctagcatgaacatgaaacagagctgtgttggcatcgccctcacccagccagctgatcctagagcggctcctcgcaatacgcttgagaggagagggcaaggcaatgtttcttgatattattgtgcagccatgcttcctcgttggacaaagtccgagagtcttgagcaatttccagtagatgaagaaactctgtggctccaattctgaagctttcttgcagtggatttgagtttcctggacaaaacatcaaaagggcaggaggatcctagaaccgagttccaagcttcctcaacagtatgcatgaagccttcgatttttggccaaaaggattcgaagtgaaatcgaggttttccaggcttaatatcatccagcccgagcaacagaagacagtggtcagagtcctccgaggctgcactctgcagaaggcagtttggaaacagctgctcccactcaactgtcaagccttaccaacaccggatcagcttgcagatttgaccaagtgaaactccgaccctgtaaaggaatgtccctcaaggctaaatcattaataaactttcgaaatctgcccatcattcttgtcttcatctttgtatataaggttgatggtgatcttggtgatttatctgcattcccattttttgactttacaggagttttgtcctgagttgcctccttttcagcttctttctgggctttcttcttctcagcctcaatttgcttgaggttctcatcatgggctttccgaaacaaccccacaaaggtcagaagagttgtagcaact

SEQ ID NO: 34992 - DNA, 4362 bp, Zea Mays
cttccttgtgcatgctgcatcagcttacggtgccaccatgattctatggccccattctagtttcgttcgagctatgcttctcaaaaagaaggtattcgattgttgcttctcaacagaaaccatggaccaatacagatacaagaattacctggacaacattattttgcagctccgtgaacagtttgcagattcttcattgatggtacttaactttagagatgaaggaaaaagtcttatttcaggcattttctccaagtacaatattacagccaaagactacccttgcaagtatctaggatgcccgttacttcctttggatatcattctccacttcctaaggctgagtgaaaggtggcttatgcttgaagggcagcaaaatattttactaatgcactgtgagaaagatggatggccagtgttggcatttatgcttgcaggtcttcttctgtacaggaaacaatataatggggagcaaagaactctagatatggtgtacaagcaagccccaaaggagcttcttcagatgctaaccacattgaatccacaaccgtctcatcttcggtatcttgggtacatatgcagaatggatgacggcataggatggcctacacaacctattcctttcaccttggattgtgtaattcttagagaaattccaaattttgatggagtcggtggttgtcggccaattgttcgagtatatgggcaggatattccaacaactgacagaagtcatagtgtcatttcaccaccatcaaaggccaagaaacatattaggcgttacagacaggcagataatgcgccagtgaagttaaatgtaggatcctgcgtccaaggtgatgtcgtccttgaatgtctgcatgtggatgatggccaaggaaatgaaaggttaatgtttagggtgatgttcaatacctttttcatccagtctcacattttaccgttgaactttgaggacatcgatgtcccttgggatgccgatcaccagttcacaaagaacttcaaagcagaggtactcttttcagagtttgatgctgagtctgatgcgtcaactgaagtagcacctgattatgattatgattatgactatgataatgatatggatgttgcctctgctgatgagttctttgaagcagaagaaatcttcagtaatgctgaatctcaagatggaaataaggatgcggatactctttctatggtctctacagattatattcgaactccaagtgccgaatgttggaaaaactctccattttccaactttgatctgaatattgacattgatggatcacaagacaataaagccgataacttgggcttgttgttagaaacagtaaatgatggaaagacatgcacatccactgaagccaatattttgctcaacaatgagactgcagttgtgaagtcaacttttaccgctacaatagcatgcacatccactgaagccaatattttgctcaacgatgagactgcagttgtgaagtcaacttttacagctacaatagatggagacacagatagcggcatctcaagttctacctataaagaggatgggtgcatgtttgaaaagggtagttccaagcaggatataaggatgggttccaatcaagacttgagccagattgataatgtattggttaaggaggtgattatattagaaactaatagtactgatgacatacagatgatcaaagaggtcatcatatctgaagttacaactcccaaacaagtggtagaggggaatatgatggaaactgaattagatgaggcagtccacagttcagaaagcactgcactgggagaagacgaggacacaaaacgacctaatacttttttcaaaaaagatgagggacagagtgcacgagatgaatatgctgcttatgacaatggcatagtgattgaacgggaagaaagtcgcaacaaagaaaaatttaccatcacaggcacagattcactagtggctgagcccaaagatttaccacatcttgacagctcaaacacttctttggaactaagttcagccaatgaaaatattgatcagcttcgtgcttgcagtagtaatgtcactgcagagcgaagagcaggaattgacacatcattttccagctccaggagtcagtcttctaatatctcttgtgcgaacattctaccagaagaatctaacttgataataaaccatgcttcaacttctgtgaatgcaaatacagatacaaccgattcatctcgactggtgctaaagaaaaaaccttttctaccattggcgacatctagtcttttttctccatcatctcccagacgcaatctgcttcgtgctgcatccacagatttgtcctttttttctccatcacaaacagaatctaagcagaactccgttacttctacaagtggaaggggtgattcagatacatcttctgtgcttccaccatttcagctctacacatccctgggatcatcatccaaaatgtctctagtacatcctactctgcgaccaataagaacgatttcatctctaccatcattatcatttggcacattcatagagatgtcaatggcttcttcaagatcacccaaacaccaagagcatgttagatctccctcaataccacaagatcaacatcttcacccaccaatgacagaggaaaatgatctacattcaggtagcttaactttgcctgcttccaaccaatatggccctcaaaccccacacccacctccactaccacccccacatgattcttgcacccaaagttattcgagcaccataatatatgaacctgaacaaataagagctgatggatcttgttcctatagtccagattatagacaaagtgttctcaacttaggtgattcctcactaacttcactctctaatagtagtatagctgcaactgaatgtcccttaggagcctctgattttgtagatgaggaagtaacaagtagacctaatatagtaactgccatggatgtcccatttaccaatgaagatacaaattctttgttgcacatgacttgttcttcacctcccaaaacattacaacgtgctgaaccaccaacgctgccgccaccacctttgcctctagtaccaccaccatcacaactaccactgccaactatatgcagtgatagtggatcagttccactggtatactcaaatccgtcttcagattgtccatataaagaaccaacaatgctaccagaacacaaatctgatgttccagctacttctctcgaaggacatgaagcaagtgaagttcaatttctgcaatctgatactgctgtcgaattatctccatcagagcattctgagtataaagttcagcatgtggttggaagcgctgaagatacaatttcaaccatgctgaattcgatgtaaatgaactagagtctctgtttaccattgctccaaaggcaaaagctggctcaaaatcagaaggccgtggaaaatcccttggaacaaaatctgataaagttcaactgatcgatctaagacgggccaataacacagagatcatgttgacaaaaatcaaaatgccgctccctgatatgatgagtgctgctctagctttggacgattcagttttggatgctgaccagattgaaaatctaataaaattttgcccaacaaaagaggagatggaacttctaaagaactacagtggggacaaggaagctcttggcaagtgtgagcatttctttctagagttaatgaaggtgccaagggttgaatctaagcttaagatatttgctttcaagattcagtttcagtctcagattagggatgtcagaaagaatttgcagactgtatcatctgcttgtgaggagctcagaagctctgagaagttgaaggttatcatgaagaacattctgttaattgggaatacattgaatcaaggcacaccaagaggccaggctgttggttttcgcttggacagcctcctaaaacttatagagacccgtgccactagtggtagaatgacattaatgcattttctatgtaagtcccttgcagagaagtcaccagaagtaatggattttcatgaggatcttgtccacttggaagcttcttcaaagttgcaactaaaagcattggcggaggagcagctggcagtggtaaaggggctggagaaagttgaacaggagctaactgcttcagaaagtgatgggccggtttctgatgttttccgtaagactttaaaggagttcattgattgttcgagtgctgatgtatgctccttgtcagcattctattctgaagtaggtaaaagcgcagatgcacttgctctttattttggagaagaccctgctaaatttccttttgagcaaggtaatattcatgcctatagacccatggaaatggtttaa

SEQ ID NO: 34993 - DNA, 6361 bp, Zea Mays
gccttccttgtgcatgctgcatcagcttacggtgccaccatgattctatggccccattctagtttcgttcgagctatgcttctcaaaaagaaggtattcgattgttgcttctcaacagaaaccatggaccaatacagatacaagaattacctggacaacattattttgcagctccgtgaacagtttgcagattcttcattgatggtacttaactttagagatgaaggaaaaagtcttatttcaggcattttctccaagtacaatattacagccaaagactacccttgcaagtatctaggatgcccgttacttcctttggatatcattctccacttcctaaggctgagtgaaaggtggcttatgcttgaagggcagcaaaatattttactaatgcactgtgagaaagatggatggccagtgttggcatttatgcttgcaggtcttcttctgtacaggaaacaatataatggggagcaaagaactctagatatggtgtacaagcaagccccaaaggagcttcttcagatgctaaccacattgaatccacaaccgtctcatcttcggtatcttgggtacatatgcagaatggatgacggcataggatggcctacacaacctattcctttcaccttggattgtgtaattcttagagaaattccaaattttgatggagtcggtggttgtcggccaattgttcgagtatatgggcaggatattccaacaactgacagaagtcatagtgtcatttcaccaccatcaaaggccaagaaacatattaggcgttacagacaggcagataatgcgccagtgaagttaaatgtaggatcctgcgtccaaggtgatgtcgtccttgaatgtctgcatgtggatgatggccaaggaaatgaaaggttaatgtttagggtgatgttcaatacctttttcatccagtctcacattttaccgttgaactttgaggacatcgatgtcccttgggatgccgatcaccagttcacaaagaacttcaaagcagaggtactcttttcagagtttgatgctgagtctgatgcgtcaactgaagtagcacctgattatgattatgattatgactatgataatgatatggatgttgcctctgctgatgagttctttgaagcagaagaaatcttcagtaatgctgaatctcaagatggaaataaggatgcggatactctttctatggtctctacagattatattcgaactccaagtgccgaatgttggaaaaactctccattttccaactttgatctgaatattgacattgatggatcacaagacaataaagccgataacttgggcttgttgttagaaacagtaaatgatggaaagacatgcacatccactgaagccaatattttgctcaacaatgagactgcagttgtgaagtcaacttttaccgctacaatagcatgcacatccactgaagccaatattttgctcaacgatgagactgcagttgtgaagtcaacttttacagctacaatagatggagacacagatagcggcatctcaagttctacctataaagaggatgggtgcatgtttgaaaagggtagttccaagcaggatataaggatgggttccaatcaagacttgagccagattgataatgtattggttaaggaggtgattatattagaaactaatagtactgatgacatacagatgatcaaagaggtcatcatatctgaagttacaactcccaaacaagtggtagaggggaatatgatggaaactgaattagatgaggcagtccacagttcagaaagcactgcactgggagaagacgaggacacaaaacgacctaatacttttttcaaaaaagatgagggacagagtgcacgagatgaatatgctgcttatgacaatggcatagtgattgaacgggaagaaagtcgcaacaaagaaaaatttaccatcacaggcacagattcactagtggctgagcccaaagatttaccacatcttgacagctcaaacacttctttggaactaagttcagccaatgaaaatattgatcagcttcgtgcttgcagtagtaatgtcactgcagagcgaagagcaggaattgacacatcattttccagctccaggagtcagtcttctaatatctcttgtgcgaacattctaccagaagaatctaacttgataataaaccatgcttcaacttctgtgaatgcaaatacagatacaaccgattcatctcgactggtgctaaagaaaaaaccttttctaccattggcgacatctagtcttttttctccatcatctcccagacgcaatctgcttcgtgctgcatccacagatttgtcctttttttctccatcacaaacagaatctaagcagaactccgttacttctacaagtggaaggggtgattcagatacatcttctgtgcttccaccatttcagctctacacatccctgggatcatcatccaaaatgtctctagtacatcctactctgcgaccaataagaacgatttcatctctaccatcattatcatttggcacattcatagagatgtcaatggcttcttcaagatcacccaaacaccaagagcatgttagatctccctcaataccacaagatcaacatcttcacccaccaatgacagaggaaaatgatctacattcaggtagcttaactttgcctgcttccaaccaatatggccctcaaaccccacacccacctccactaccacccccacatgattcttgcacccaaagttattcgagcaccataatatatgaacctgaacaaataagagctgatggatcttgttcctatagtccagattatagacaaagtgttctcaacttaggtgattcctcactaacttcactctctaatagtagtatagctgcaactgaatgtcccttaggagcctctgattttgtagatgaggaagtaacaagtagacctaatatagtaactgccatggatgtcccatttaccaatgaagatacaaattctttgttgcacatgacttgttcttcacctcccaaaacattacaacgtgctgaaccaccaacgctgccgccaccacctttgcctctagtaccaccaccatcacaactaccactgccaactatatgcagtgatagtggatcagttccactggtatactcaaatccgtcttcagattgtccatataaagaaccaacaatgctaccagaacacaaatctgatgttccagctacttctctcgaaggacatgaagcaagtgaagttcaatttctgcaatctgatactgctgtcgaattatctccatcagagcattctgagtataaagttcagcatgtggttggaagcgctgaagatacaatttcaagtatgtcatcctatatacctgcagcacctccatatccaatgtttcacattgtaacagataattcctcatgttcaatatctgcagagcaagtaaattgtgagcagcctttagatcaaacaacattatcaattcatttgaggccatttgaggtggagatatcacaaggtgaaacaattaacggagtcttggcctctataattgatgataaagaacacggaggcattccaattctgcaattgccacaaaagttgcctcattctggagaacatatgaaatctccacctccacctcctcctcctccacaaccaccaccttgtcatgcaacagttataccttctttgtgtttatcttcaaaaccaccttctccaacagaacattacgaaaatccaccttcttcccctccacctttttctagagaatcatgtgttgttctacctccacttccagctccactcttgaatcatccatctcttcctggaaaacatattaatctatatccacctccaccacctccaccaccaactttacatcatatcgcacctgcatctccgtgctcgtaccaaccttctttctatgcagatatagcaacccaacctaccttttcagaggatattgtaatagttccacctccacattcaaaaggggttaatataattccattgccacctcctcctcctagaacaagtgaaactttgtctcaacctcttgatggtgggcaatcaacaggaccagcttctcttcttgaagttactaaagaaaacccaccacctcctctccttccccctgaaggacaaatgggatctccattgtcaactctttgtggagaaattgtgaatattccaatacctccaccttcacttcctggaggacatggagaagttccactatcaactcctcctagaggatgtggggccattccacctccaccaccctttactaaagggataggaggaattacattgccaattggatttcatagtggagacttgtcattcctccaatctaccagagaatctaaaggcccttcatgcttgccacctccacctccacctccacctccacctccaccaccaccactatcttctaatggacacataggtgatctgccaccaccacctacgagtgtatttgtagaggcttcgatccctctgccacctcaaacaggatgtggaggggatccaccaccgccaccacctactggaggacatgtagggcctccaccaccaccgccacctctaggggaatgtgcatgggatcttcaacctcccaaagcatgtgtaagggctcccccgccacctccacctcctggaggatatgcagaagttctaatgccaccaccacctcccagaggatatgtaggggctccagcaccacctccacctcctggaggatatgcaggagctccaccaccaccgccacctcctggaggatatgcaggagctccaccaccaccgccacctcctggaggatatgcaggagctccaccaccaccgccacctcctggaggatatgcaggagctccaccaccaccgccaccccctggaggatatgcaggagctccaccacccccgccttcatatggaggaattggaggagttcctcctcctccaccaccctttggaggactaggaggaactccaccgcctccacctccagcagggtttcgaggtggagctccatcaccacctcctcctcctggaggtcatggaggtccaccaccacctcctcctagaggacatggaagtggtccccctccccctcccggtgcaccttctcctccaatgcctcctggaatgtctggtggcccccctcctcctccaggtggaagagggatgcctactccacctggcggaaggggacatggccttgctcgaacgttaggcccgacattacaaagtgcaatgcgaaagtcatccctaaaaccactacattgggtcaaagtaacaagagcaatgcaaggaagcttatgggcggagctacaaaaacaagtggaagctaatagccatgctgaattcgatgtaaatgaactagagtctctgtttaccattgctccaaaggcaaaagctggctcaaaatcagaaggccgtggaaaatcccttggaacaaaatctgataaagttcaactgatcgatctaagacgggccaataacacagagatcatgttgacaaaaatcaaaatgccgctccctgatatgatgagtgctgctctagctttggacgattcagttttggatgctgaccagattgaaaatctaataaaattttgcccaacaaaagaggagatggaacttctaaagaactacagtggggacaaggaagctcttggcaagtgtgagcatttctttctagagttaatgaaggtgccaagggttgaatctaagcttaagatatttgctttcaagattcagtttcagtctcagggatgtcagaaagaatttgcagactgtatcatctgcttgtgaggagctcagaagctctgagaagttgaaggttatcatgaagaacattctgttaattgggaatacattgaatcaaggcacaccaagaggccaggctgttggttttcgcttggacagcctcctaaaacttatagagacccgtgccactagtggtagaatgacattaatgcattttctatgtaagtcccttgcagagaagtcaccagaagtaatggattttcatgaggatcttgtccacttggaagcttcttcaaagttgcaactaaaagcattggcggaggagcagctggcagtggtaaaggggctggagaaagttgaacaggagctaactgcttcagaaagtgatgggccggtttctgatgttttccgtaagactttaaaggagttcattgattgttcgagtgctgatgtatgctccttgtcagcattctattctgaagtaggtaaaagcgcagatgcacttgctctttattttggagaagaccctgctaaatttccttttgagcaaggtaatattcatgcctatagacccatggaaatggtttaa

SEQ ID NO: 34994 - DNA, 6429 bp, Zea Mays
cttccagctaacatgccttccttgtgcatgctgcatcagcttacggtgccaccatgattctatggccccattctagtttcgttcgagctatgcttctcaaaaagaaggtattcgattgttgcttctcaacagaaaccatggaccaatacagatacaagaattacctggacaacattattttgcagctccgtgaacagtttgcagattcttcattgatggtacttaactttagagatgaaggaaaaagtcttatttcaggcattttctccaagtacaatattacagccaaagactacccttgcaagtatctaggatgcccgttacttcctttggatatcattctccacttcctaaggctgagtgaaaggtggcttatgcttgaagggcagcaaaatattttactaatgcactgtgagaaagatggatggccagtgttggcatttatgcttgcaggtcttcttctgtacaggaaacaatataatggggagcaaagaactctagatatggtgtacaagcaagccccaaaggagcttcttcagatgctaaccacattgaatccacaaccgtctcatcttcggtatcttgggtacatatgcagaatggatgacggcataggatggcctacacaacctattcctttcaccttggattgtgtaattcttagagaaattccaaattttgatggagtcggtggttgtcggccaattgttcgagtatatgggcaggatattccaacaactgacagaagtcatagtgtcatttcaccaccatcaaaggccaagaaacatattaggcgttacagacaggcagataatgcgccagtgaagttaaatgtaggatcctgcgtccaaggtgatgtcgtccttgaatgtctgcatgtggatgatggccaaggaaatgaaaggttaatgtttagggtgatgttcaatacctttttcatccagtctcacattttaccgttgaactttgaggacatcgatgtcccttgggatgccgatcaccagttcacaaagaacttcaaagcagaggtactcttttcagagtttgatgctgagtctgatgcgtcaactgaagtagcacctgattatgattatgattatgactatgataatgatatggatgttgcctctgctgatgagttctttgaagcagaagaaatcttcagtaatgctgaatctcaagatggaaataaggatgcggatactctttctatggtctctacagattatattcgaactccaagtgccgaatgttggaaaaactctccattttccaactttgatctgaatattgacattgatggatcacaagacaataaagccgataacttgggcttgttgttagaaacagtaaatgatggaaagacatgcacatccactgaagccaatattttgctcaacaatgagactgcagttgtgaagtcaacttttaccgctacaatagcatgcacatccactgaagccaatattttgctcaacgatgagactgcagttgtgaagtcaacttttacagctacaatagatggagacacagatagcggcatctcaagttctacctataaagaggatgggtgcatgtttgaaaagggtagttccaagcaggatataaggatgggttccaatcaagacttgagccagattgataatgtattggttaaggaggtgattatattagaaactaatagtactgatgacatacagatgatcaaagaggtcatcatatctgaagttacaactcccaaacaagtggtagaggggaatatgatggaaactgaattagatgaggcagtccacagttcagaaagcactgcactgggagaagacgaggacacaaaacgacctaatacttttttcaaaaaagatgagggacagagtgcacgagatgaatatgctgcttatgacaatggcatagtgattgaacgggaagaaagtcgcaacaaagaaaaatttaccatcacaggcacagattcactagtggctgagcccaaagatttaccacatcttgacagctcaaacacttctttggaactaagttcagccaatgaaaatattgatcagcttcgtgcttgcagtagtaatgtcactgcagagcgaagagcaggaattgacacatcattttccagctccaggagtcagtcttctaatatctcttgtgcgaacattctaccagaagaatctaacttgataataaaccatgcttcaacttctgtgaatgcaaatacagatacaaccgattcatctcgactggtgctaaagaaaaaaccttttctaccattggcgacatctagtcttttttctccatcatctcccagacgcaatctgcttcgtgctgcatccacagatttgtcctttttttctccatcacaaacagaatctaagcagaactccgttacttctacaagtggaaggggtgattcagatacatcttctgtgcttccaccatttcagctctacacatccctgggatcatcatccaaaatgtctctagtacatcctactctgcgaccaataagaacgatttcatctctaccatcattatcatttggcacattcatagagatgtcaatggcttcttcaagatcacccaaacaccaagagcatgttagatctccctcaataccacaagatcaacatcttcacccaccaatgacagaggaaaatgatctacattcaggtagcttaactttgcctgcttccaaccaatatggccctcaaaccccacacccacctccactaccacccccacatgattcttgcacccaaagttattcgagcaccataatatatgaacctgaacaaataagagctgatggatcttgttcctatagtccagattatagacaaagtgttctcaacttaggtgattcctcactaacttcactctctaatagtagtatagctgcaactgaatgtcccttaggagcctctgattttgtagatgaggaagtaacaagtagacctaatatagtaactgccatggatgtcccatttaccaatgaagatacaaattctttgttgcacatgacttgttcttcacctcccaaaacattacaacgtgctgaaccaccaacgctgccgccaccacctttgcctctagtaccaccaccatcacaactaccactgccaactatatgcagtgatagtggatcagttccactggtatactcaaatccgtcttcagattgtccatataaagaaccaacaatgctaccagaacacaaatctgatgttccagctacttctctcgaaggacatgaagcaagtgaagttcaatttctgcaatctgatactgctgtcgaattatctccatcagagcattctgagtataaagttcagcatgtggttggaagcgctgaagatacaatttcaagtatgtcatcctatatacctgcagcacctccatatccaatgtttcacattgtaacagataattcctcatgttcaatatctgcagagcaagtaaattgtgagcagcctttagatcaaacaacattatcaattcatttgaggccatttgaggtggagatatcacaaggtgaaacaattaacggagtcttggcctctataattgatgataaagaacacggaggcattccaattctgcaattgccacaaaagttgcctcattctggagaacatatgaaatctccacctccacctcctcctcctccacaaccaccaccttgtcatgcaacagttataccttctttgtgtttatcttcaaaaccaccttctccaacagaacattacgaaaatccaccttcttcccctccacctttttctagagaatcatgtgttgttctacctccacttccagctccactcttgaatcatccatctcttcctggaaaacatattaatctatatccacctccaccacctccaccaccaactttacatcatatcgcacctgcatctccgtgctcgtaccaaccttctttctatgcagatatagcaacccaacctaccttttcagaggatattgtaatagttccacctccacattcaaaaggggttaatataattccattgccacctcctcctcctagaacaagtgaaactttgtctcaacctcttgatggtgggcaatcaacaggaccagcttctcttcttgaagttactaaagaaaacccaccacctcctctccttccccctgaaggacaaatgggatctccattgtcaactctttgtggagaaattgtgaatattccaatacctccaccttcacttcctggaggacatggagaagttccactatcaactcctcctagaggatgtggggccattccacctccaccaccctttactaaagggataggaggaattacattgccaattggatttcatagtggagacttgtcattcctccaatctaccagagaatctaaaggcccttcatgcttgccacctccacctccacctccacctccacctccaccaccaccactatcttctaatggacacataggtgatctgccaccaccacctacgagtgtatttgtagaggcttcgatccctctgccacctcaaacaggatgtggaggggatccaccaccgccaccacctactggaggacatgtagggcctccaccaccaccgccacctctaggggaatgtgcatgggatcttcaacctcccaaagcatgtgtaagggctcccccgccacctccacctcctggaggatatgcagaagttctaatgccaccaccacctcccagaggatatgtaggggctccagcaccacctccacctcctggaggatatgcaggagctccaccaccaccgccacctcctggaggatatgcaggagctccaccaccaccgccacctcctggaggatatgcaggagctccaccaccaccgccacctcctggaggatatgcaggagctccaccaccaccgccaccccctggaggatatgcaggagctccaccacccccgccttcatatggaggaattggaggagttcctcctcctccaccaccctttggaggactaggaggaactccaccgcctccacctccagcagggtttcgaggtggagctccatcaccacctcctcctcctggaggtcatggaggtccaccaccacctcctcctagaggacatggaagtggtccccctccccctcccggtgcaccttctcctccaatgcctcctggaatgtctggtggcccccctcctcctccaggtggaagagggatgcctactccacctggcggaaggggacatggccttgctcgaacgttaggcccgacattacaaagtgcaatgcgaaagtcatccctaaaaccactacattgggtcaaagtaacaagagcaatgcaaggaagcttatgggcggagctacaaaaacaagtggaagctaatagccatgctgaattcgatgtaaatgaactagagtctctgtttaccattgctccaaaggcaaaagctggctcaaaatcagaaggccgtggaaaatcccttggaacaaaatctgataaagttcaactgatcgatctaagacgggccaataacacagagatcatgttgacaaaaatcaaaatgccgctccctgatatgatggattgtcgtaaagtcatcagcttgtttaagtcagaatcacctgtttttcagtgctgctctagctttggacgattcagttttggatgctgaccagattgaaaatctaataaaattttgcccaacaaaagaggagatggaacttctaaagaactacagtggggacaaggaagctcttggcaagtgtgagcatttctttctagagttaatgaaggtgccaagggttgaatctaagcttaagatatttgctttcaagattcagtttcagtctcagattagggatgtcagaaagaatttgcagactgtatcatctgcttgtgaggagctcagaagctctgagaagttgaaggttatcatgaagaacattctgttaattgggaatacattgaatcaaggcacaccaagaggccaggctgttggttttcgcttggacagcctcctaaaacttatagagacccgtgccactagtggtagaatgacattaatgcattttctatgtaagtcccttgcagagaagtcaccagaagtaatggattttcatgaggatcttgtccacttggaagcttcttcaaagttgcaactaaaagcattggcggaggagcagctggcagtggtaaaggggctggagaaagttgaacaggagctaactgcttcagaaagtgatgggccggtttctgatgttttccgtaagactttaaaggagttcattgattgttcgagtgctgatgtatgctccttgtcagcattctattctgaagtaggtaaaagcgcagatgcacttgctctttattttggagaagaccctgctaaatttccttttgagcaaggtaatattcatgcctatagacccatggaaatggtttaa

SEQ ID NO: 34995 - DNA, 3737 bp, Zea Mays
atggcgctgttccggaggctcttctatcggaagccgccggatcggctcctcgagatagccgaccgcgtctacggtacggtaccacacaatgtagattaccactccgttgaaacggctgcggtcgtgctttggcaccttgcttactacttcctcccaccaatcgtattcgattgttgcttctcaacagaaaccatggaccaatacagatacaagaattacctggacaacattattttgcagctccgtgaacagtttgcagattcttcattgatggtacttaactttagagatgaaggaaaaagtcttatttcaggcattttctccaagtacaatattacagccaaagactacccttgcaagtatctaggatgcccgttacttcctttggatatcattctccacttcctaaggctgagtgaaaggtggcttatgcttgaagggcagcaaaatattttactaatgcactgtgagaaagatggatggccagtgttggcatttatgcttgcaggtcttcttctgtacaggaaacaatataatggggagcaaagaactctagatatggtgtacaagcaagccccaaaggagcttcttcagatgctaaccacattgaatccacaaccgtctcatcttcggtatcttgggtacatatgcagaatggatgacggcataggatggcctacacaacctattcctttcaccttggattgtgtaattcttagagaaattccaaattttgatggagtcggtggttgtcggccaattgttcgagtatatgggcaggatattccaacaactgacagaagtcatagtgtcatttcaccaccatcaaaggccaagaaacatattaggcgttacagacaggcagataatgcgccagtgaagttaaatgtaggatcctgcgtccaaggtgatgtcgtccttgaatgtctgcatgtggatgatggccaaggaaatgaaaggttaatgtttagggtgatgttcaatacctttttcatccagtctcacattttaccgttgaactttgaggacatcgatgtcccttgggatgccgatcaccagttcacaaagaacttcaaagcagaggtactcttttcagagtttgatgctgagtctgatgcgtcaactgaagtagcacctgattatgattatgattatgactatgataatgatatggatgttgcctctgctgatgagttctttgaagcagaagaaatcttcagtaatgctgaatctcaagatggaaataaggatgcggatactctttctatggtctctacagattatattcgaactccaagtgccgaatgttggaaaaactctccattttccaactttgatctgaatattgacattgatggatcacaagacaataaagccgataacttgggcttgttgttagaaacagtaaatgatggaaagacatgcacatccactgaagccaatattttgctcaacaatgagactgcagttgtgaagtcaacttttaccgctacaatagcatgcacatccactgaagccaatattttgctcaacgatgagactgcagttgtgaagtcaacttttacagctacaatagatggagacacagatagcggcatctcaagttctacctataaagaggatgggtgcatgtttgaaaagggtagttccaagcaggatataaggatgggttccaatcaagacttgagccagattgataatgtattggttaaggaggtgattatattagaaactaatagtactgatgacatacagatgatcaaagaggtcatcatatctgaagttacaactcccaaacaagtggtagaggggaatatgatggaaactgaattagatgaggcagtccacagttcagaaagcactgcactgggagaagacgaggacacaaaacgacctaatacttttttcaaaaaagatgagggacagagtgcacgagatgaatatgctgcttatgacaatggcatagtgattgaacgggaagaaagtcgcaacaaagaaaaatttaccatcacaggcacagattcactagtggctgagcccaaagatttaccacatcttgacagctcaaacacttctttggaactaagttcagccaatgaaaatattgatcagcttcgtgcttgcagtagtaatgtcactgcagagcgaagagcaggaattgacacatcattttccagctccaggagtcagtcttctaatatctcttgtgcgaacattctaccagaagaatctaacttgataataaaccatgcttcaacttctgtgaatgcaaatacagatacaaccgattcatctcgactggtgctaaagaaaaaaccttttctaccattggcgacatctagtcttttttctccatcatctcccagacgcaatctgcttcgtgctgcatccacagatttgtcctttttttctccatcacaaacagaatctaagcagaactccgttacttctacaagtggaaggggtgattcagatacatcttctgtgcttccaccatttcagctctacacatccctgggatcatcatccaaaatgtctctagtacatcctactctgcgaccaataagaacgatttcatctctaccatcattatcatttggcacattcatagagatgtcaatggcttcttcaagatcacccaaacaccaagagcatgttagatctccctcaataccacaagatcaacatcttcacccaccaatgacagaggaaaatgatctacattcagccatgctgaattcgatgtaaatgaactagagtctctgtttaccattgctccaaaggcaaaagctggctcaaaatcagaaggccgtggaaaatcccttggaacaaaatctgataaagttcaactgatcgatctaagacgggccaataacacagagatcatgttgacaaaaatcaaaatgccgctccctgatatgatgagtgctgctctagctttggacgattcagttttggatgctgaccagattgaaaatctaataaaattttgcccaacaaaagaggagatggaacttctaaagaactacagtggggacaaggaagctcttggcaagtgtgagcatttctttctagagttaatgaaggtgccaagggttgaatctaagcttaagatatttgctttcaagattcagtttcagtctcagattagggatgtcagaaagaatttgcagactgtatcatctgcttgtgaggagctcagaagctctgagaagttgaaggttatcatgaagaacattctgttaattgggaatacattgaatcaaggcacaccaagaggccaggctgttggttttcgcttggacagcctcctaaaacttatagagacccgtgccactagtggtagaatgacattaatgcattttctatgtaagtcccttgcagagaagtcaccagaagtaatggattttcatgaggatcttgtccacttggaagcttcttcaaagttgcaactaaaagcattggcggaggagcagctggcagtggtaaaggggctggagaaagttgaacaggagctaactgcttcagaaagtgatgggccggtttctgatgttttccgtaagactttaaaggagttcattgattgttcgagtgctgatgtatgctccttgtcagcattctattctgaagtaggtaaaagcgcagatgcacttgctctttattttggagaagaccctgctaaatttccttttgagcaaggtaatattcatgcctatagacccatggaaatggtttaa

SEQ ID NO: 34996 - DNA, 6351 bp, Zea Mays
atggcgctgttccggaggctcttctatcggaagccgccggatcggctcctcgagatagccgaccgcgtctacggtacggtaccacacaatgtagattaccactccgttgaaacggctgcggtcgtgctttggcaccttgcttactacttcctcccaccaatcgtattcgattgttgcttctcaacagaaaccatggaccaatacagatacaagaattacctggacaacattattttgcagctccgtgaacagtttgcagattcttcattgatggtacttaactttagagatgaaggaaaaagtcttatttcaggcattttctccaagtacaatattacagccaaagactacccttgcaagtatctaggatgcccgttacttcctttggatatcattctccacttcctaaggctgagtgaaaggtggcttatgcttgaagggcagcaaaatattttactaatgcactgtgagaaagatggatggccagtgttggcatttatgcttgcaggtcttcttctgtacaggaaacaatataatggggagcaaagaactctagatatggtgtacaagcaagccccaaaggagcttcttcagatgctaaccacattgaatccacaaccgtctcatcttcggtatcttgggtacatatgcagaatggatgacggcataggatggcctacacaacctattcctttcaccttggattgtgtaattcttagagaaattccaaattttgatggagtcggtggttgtcggccaattgttcgagtatatgggcaggatattccaacaactgacagaagtcatagtgtcatttcaccaccatcaaaggccaagaaacatattaggcgttacagacaggcagataatgcgccagtgaagttaaatgtaggatcctgcgtccaaggtgatgtcgtccttgaatgtctgcatgtggatgatggccaaggaaatgaaaggttaatgtttagggtgatgttcaatacctttttcatccagtctcacattttaccgttgaactttgaggacatcgatgtcccttgggatgccgatcaccagttcacaaagaacttcaaagcagaggtactcttttcagagtttgatgctgagtctgatgcgtcaactgaagtagcacctgattatgattatgattatgactatgataatgatatggatgttgcctctgctgatgagttctttgaagcagaagaaatcttcagtaatgctgaatctcaagatggaaataaggatgcggatactctttctatggtctctacagattatattcgaactccaagtgccgaatgttggaaaaactctccattttccaactttgatctgaatattgacattgatggatcacaagacaataaagccgataacttgggcttgttgttagaaacagtaaatgatggaaagacatgcacatccactgaagccaatattttgctcaacaatgagactgcagttgtgaagtcaacttttaccgctacaatagcatgcacatccactgaagccaatattttgctcaacgatgagactgcagttgtgaagtcaacttttacagctacaatagatggagacacagatagcggcatctcaagttctacctataaagaggatgggtgcatgtttgaaaagggtagttccaagcaggatataaggatgggttccaatcaagacttgagccagattgataatgtattggttaaggaggtgattatattagaaactaatagtactgatgacatacagatgatcaaagaggtcatcatatctgaagttacaactcccaaacaagtggtagaggggaatatgatggaaactgaattagatgaggcagtccacagttcagaaagcactgcactgggagaagacgaggacacaaaacgacctaatacttttttcaaaaaagatgagggacagagtgcacgagatgaatatgctgcttatgacaatggcatagtgattgaacgggaagaaagtcgcaacaaagaaaaatttaccatcacaggcacagattcactagtggctgagcccaaagatttaccacatcttgacagctcaaacacttctttggaactaagttcagccaatgaaaatattgatcagcttcgtgcttgcagtagtaatgtcactgcagagcgaagagcaggaattgacacatcattttccagctccaggagtcagtcttctaatatctcttgtgcgaacattctaccagaagaatctaacttgataataaaccatgcttcaacttctgtgaatgcaaatacagatacaaccgattcatctcgactggtgctaaagaaaaaaccttttctaccattggcgacatctagtcttttttctccatcatctcccagacgcaatctgcttcgtgctgcatccacagatttgtcctttttttctccatcacaaacagaatctaagcagaactccgttacttctacaagtggaaggggtgattcagatacatcttctgtgcttccaccatttcagctctacacatccctgggatcatcatccaaaatgtctctagtacatcctactctgcgaccaataagaacgatttcatctctaccatcattatcatttggcacattcatagagatgtcaatggcttcttcaagatcacccaaacaccaagagcatgttagatctccctcaataccacaagatcaacatcttcacccaccaatgacagaggaaaatgatctacattcaggtagcttaactttgcctgcttccaaccaatatggccctcaaaccccacacccacctccactaccacccccacatgattcttgcacccaaagttattcgagcaccataatatatgaacctgaacaaataagagctgatggatcttgttcctatagtccagattatagacaaagtgttctcaacttaggtgattcctcactaacttcactctctaatagtagtatagctgcaactgaatgtcccttaggagcctctgattttgtagatgaggaagtaacaagtagacctaatatagtaactgccatggatgtcccatttaccaatgaagatacaaattctttgttgcacatgacttgttcttcacctcccaaaacattacaacgtgctgaaccaccaacgctgccgccaccacctttgcctctagtaccaccaccatcacaactaccactgccaactatatgcagtgatagtggatcagttccactggtatactcaaatccgtcttcagattgtccatataaagaaccaacaatgctaccagaacacaaatctgatgttccagctacttctctcgaaggacatgaagcaagtgaagttcaatttctgcaatctgatactgctgtcgaattatctccatcagagcattctgagtataaagttcagcatgtggttggaagcgctgaagatacaatttcaaagcaagtaaattgtgagcagcctttagatcaaacaacattatcaattcatttgaggccatttgaggtggagatatcacaaggtgaaacaattaacggagtcttggcctctataattgatgataaagaacacggaggcattccaattctgcaattgccacaaaagttgcctcattctggagaacatatgaaatctccacctccacctcctcctcctccacaaccaccaccttgtcatgcaacagttataccttctttgtgtttatcttcaaaaccaccttctccaacagaacattacgaaaatccaccttcttcccctccacctttttctagagaatcatgtgttgttctacctccacttccagctccactcttgaatcatccatctcttcctggaaaacatattaatctatatccacctccaccacctccaccaccaactttacatcatatcgcacctgcatctccgtgctcgtaccaaccttctttctatgcagatatagcaacccaacctaccttttcagaggatattgtaatagttccacctccacattcaaaaggggttaatataattccattgccacctcctcctcctagaacaagtgaaactttgtctcaacctcttgatggtgggcaatcaacaggaccagcttctcttcttgaagttactaaagaaaacccaccacctcctctccttccccctgaaggacaaatgggatctccattgtcaactctttgtggagaaattgtgaatattccaatacctccaccttcacttcctggaggacatggagaagttccactatcaactcctcctagaggatgtggggccattccacctccaccaccctttactaaagggataggaggaattacattgccaattggatttcatagtggagacttgtcattcctccaatctaccagagaatctaaaggcccttcatgcttgccacctccacctccacctccacctccacctccaccaccaccactatcttctaatggacacataggtgatctgccaccaccacctacgagtgtatttgtagaggcttcgatccctctgccacctcaaacaggatgtggaggggatccaccaccgccaccacctactggaggacatgtagggcctccaccaccaccgccacctctaggggaatgtgcatgggatcttcaacctcccaaagcatgtgtaagggctcccccgccacctccacctcctggaggatatgcagaagttctaatgccaccaccacctcccagaggatatgtaggggctccagcaccacctccacctcctggaggatatgcaggagctccaccaccaccgccacctcctggaggatatgcaggagctccaccaccaccgccacctcctggaggatatgcaggagctccaccaccaccgccacctcctggaggatatgcaggagctccaccaccaccgccaccccctggaggatatgcaggagctccaccacccccgccttcatatggaggaattggaggagttcctcctcctccaccaccctttggaggactaggaggaactccaccgcctccacctccagcagggtttcgaggtggagctccatcaccacctcctcctcctggaggtcatggaggtccaccaccacctcctcctagaggacatggaagtggtccccctccccctcccggtgcaccttctcctccaatgcctcctggaatgtctggtggcccccctcctcctccaggtggaagagggatgcctactccacctggcggaaggggacatggccttgctcgaacgttaggcccgacattacaaagtgcaatgcgaaagtcatccctaaaaccactacattgggtcaaagtaacaagagcaatgcaaggaagcttatgggcggagctacaaaaacaagtggaagctaatagccatgctgaattcgatgtaaatgaactagagtctctgtttaccattgctccaaaggcaaaagctggctcaaaatcagaaggccgtggaaaatcccttggaacaaaatctgataaagttcaactgatcgatctaagacgggccaataacacagagatcatgttgacaaaaatcaaaatgccgctccctgatatgatgagtgctgctctagctttggacgattcagttttggatgctgaccagattgaaaatctaataaaattttgcccaacaaaagaggagatggaacttctaaagaactacagtggggacaaggaagctcttggcaagtgtgagcatttctttctagagttaatgaaggtgccaagggttgaatctaagcttaagatatttgctttcaagattcagtttcagtctcagattagggatgtcagaaagaatttgcagactgtatcatctgcttgtgaggagctcagaagctctgagaagttgaaggttatcatgaagaacattctgttaattgggaatacattgaatcaaggcacaccaagaggccaggctgttggttttcgcttggacagcctcctaaaacttatagagacccgtgccactagtggtagaatgacattaatgcattttctatgtaagtcccttgcagagaagtcaccagaagtaatggattttcatgaggatcttgtccacttggaagcttcttcaaagttgcaactaaaagcattggcggaggagcagctggcagtggtaaaggggctggagaaagttgaacaggagctaactgcttcagaaagtgatgggccggtttctgatgttttccgtaagactttaaaggagttcattgattgttcgagtgctgatgtatgctccttgtcagcattctattctgaagtaggtaaaagcgcagatgcacttgctctttattttggagaagaccctgctaaatttccttttgagcaaggtaatattcatgcctatagacccatggaaatggtttaa

SEQ ID NO: 34997 - DNA, 6340 bp, Zea Mays
atggcgctgttccggaggctcttctatcggaagccgccggatcggctcctcgagatagccgaccgcgtctacgtattcgattgttgcttctcaacagaaaccatggaccaatacagatacaagaattacctggacaacattattttgcagctccgtgaacagtttgcagattcttcattgatggtacttaactttagagatgaaggaaaaagtcttatttcaggcattttctccaagtacaatattacagccaaagactacccttgcaagtatctaggatgcccgttacttcctttggatatcattctccacttcctaaggctgagtgaaaggtggcttatgcttgaagggcagcaaaatattttactaatgcactgtgagaaagatggatggccagtgttggcatttatgcttgcaggtcttcttctgtacaggaaacaatataatggggagcaaagaactctagatatggtgtacaagcaagccccaaaggagcttcttcagatgctaaccacattgaatccacaaccgtctcatcttcggtatcttgggtacatatgcagaatggatgacggcataggatggcctacacaacctattcctttcaccttggattgtgtaattcttagagaaattccaaattttgatggagtcggtggttgtcggccaattgttcgagtatatgggcaggatattccaacaactgacagaagtcatagtgtcatttcaccaccatcaaaggccaagaaacatattaggcgttacagacaggcagataatgcgccagtgaagttaaatgtaggatcctgcgtccaaggtgatgtcgtccttgaatgtctgcatgtggatgatggccaaggaaatgaaaggttaatgtttagggtgatgttcaatacctttttcatccagtctcacattttaccgttgaactttgaggacatcgatgtcccttgggatgccgatcaccagttcacaaagaacttcaaagcagaggtactcttttcagagtttgatgctgagtctgatgcgtcaactgaagtagcacctgattatgattatgattatgactatgataatgatatggatgttgcctctgctgatgagttctttgaagcagaagaaatcttcagtaatgctgaatctcaagatggaaataaggatgcggatactctttctatggtctctacagattatattcgaactccaagtgccgaatgttggaaaaactctccattttccaactttgatctgaatattgacattgatggatcacaagacaataaagccgataacttgggcttgttgttagaaacagtaaatgatggaaagacatgcacatccactgaagccaatattttgctcaacaatgagactgcagttgtgaagtcaacttttaccgctacaatagcatgcacatccactgaagccaatattttgctcaacgatgagactgcagttgtgaagtcaacttttacagctacaatagatggagacacagatagcggcatctcaagttctacctataaagaggatgggtgcatgtttgaaaagggtagttccaagcaggatataaggatgggttccaatcaagacttgagccagattgataatgtattggttaaggaggtgattatattagaaactaatagtactgatgacatacagatgatcaaagaggtcatcatatctgaagttacaactcccaaacaagtggtagaggggaatatgatggaaactgaattagatgaggcagtccacagttcagaaagcactgcactgggagaagacgaggacacaaaacgacctaatacttttttcaaaaaagatgagggacagagtgcacgagatgaatatgctgcttatgacaatggcatagtgattgaacgggaagaaagtcgcaacaaagaaaaatttaccatcacaggcacagattcactagtggctgagcccaaagatttaccacatcttgacagctcaaacacttctttggaactaagttcagccaatgaaaatattgatcagcttcgtgcttgcagtagtaatgtcactgcagagcgaagagcaggaattgacacatcattttccagctccaggagtcagtcttctaatatctcttgtgcgaacattctaccagaagaatctaacttgataataaaccatgcttcaacttctgtgaatgcaaatacagatacaaccgattcatctcgactggtgctaaagaaaaaaccttttctaccattggcgacatctagtcttttttctccatcatctcccagacgcaatctgcttcgtgctgcatccacagatttgtcctttttttctccatcacaaacagaatctaagcagaactccgttacttctacaagtggaaggggtgattcagatacatcttctgtgcttccaccatttcagctctacacatccctgggatcatcatccaaaatgtctctagtacatcctactctgcgaccaataagaacgatttcatctctaccatcattatcatttggcacattcatagagatgtcaatggcttcttcaagatcacccaaacaccaagagcatgttagatctccctcaataccacaagatcaacatcttcacccaccaatgacagaggaaaatgatctacattcaggtagcttaactttgcctgcttccaaccaatatggccctcaaaccccacacccacctccactaccacccccacatgattcttgcacccaaagttattcgagcaccataatatatgaacctgaacaaataagagctgatggatcttgttcctatagtccagattatagacaaagtgttctcaacttaggtgattcctcactaacttcactctctaatagtagtatagctgcaactgaatgtcccttaggagcctctgattttgtagatgaggaagtaacaagtagacctaatatagtaactgccatggatgtcccatttaccaatgaagatacaaattctttgttgcacatgacttgttcttcacctcccaaaacattacaacgtgctgaaccaccaacgctgccgccaccacctttgcctctagtaccaccaccatcacaactaccactgccaactatatgcagtgatagtggatcagttccactggtatactcaaatccgtcttcagattgtccatataaagaaccaacaatgctaccagaacacaaatctgatgttccagctacttctctcgaaggacatgaagcaagtgaagttcaatttctgcaatctgatactgctgtcgaattatctccatcagagcattctgagtataaagttcagcatgtggttggaagcgctgaagatacaatttcaagtatgtcatcctatatacctgcagcacctccatatccaatgtttcacattgtaacagataattcctcatgttcaatatctgcagagcaagtaaattgtgagcagcctttagatcaaacaacattatcaattcatttgaggccatttgaggtggagatatcacaaggtgaaacaattaacggagtcttggcctctataattgatgataaagaacacggaggcattccaattctgcaattgccacaaaagttgcctcattctggagaacatatgaaatctccacctccacctcctcctcctccacaaccaccaccttgtcatgcaacagttataccttctttgtgtttatcttcaaaaccaccttctccaacagaacattacgaaaatccaccttcttcccctccacctttttctagagaatcatgtgttgttctacctccacttccagctccactcttgaatcatccatctcttcctggaaaacatattaatctatatccacctccaccacctccaccaccaactttacatcatatcgcacctgcatctccgtgctcgtaccaaccttctttctatgcagatatagcaacccaacctaccttttcagaggatattgtaatagttccacctccacattcaaaaggggttaatataattccattgccacctcctcctcctagaacaagtgaaactttgtctcaacctcttgatggtgggcaatcaacaggaccagcttctcttcttgaagttactaaagaaaacccaccacctcctctccttccccctgaaggacaaatgggatctccattgtcaactctttgtggagaaattgtgaatattccaatacctccaccttcacttcctggaggacatggagaagttccactatcaactcctcctagaggatgtggggccattccacctccaccaccctttactaaagggataggaggaattacattgccaattggatttcatagtggagacttgtcattcctccaatctaccagagaatctaaaggcccttcatgcttgccacctccacctccacctccacctccacctccaccaccaccactatcttctaatggacacataggtgatctgccaccaccacctacgagtgtatttgtagaggcttcgatccctctgccacctcaaacaggatgtggaggggatccaccaccgccaccacctactggaggacatgtagggcctccaccaccaccgccacctctaggggaatgtgcatgggatcttcaacctcccaaagcatgtgtaagggctcccccgccacctccacctcctggaggatatgcagaagttctaatgccaccaccacctcccagaggatatgtaggggctccagcaccacctccacctcctggaggatatgcaggagctccaccaccaccgccacctcctggaggatatgcaggagctccaccaccaccgccacctcctggaggatatgcaggagctccaccaccaccgccacctcctggaggatatgcaggagctccaccaccaccgccaccccctggaggatatgcaggagctccaccacccccgccttcatatggaggaattggaggagttcctcctcctccaccaccctttggaggactaggaggaactccaccgcctccacctccagcagggtttcgaggtggagctccatcaccacctcctcctcctggaggtcatggaggtccaccaccacctcctcctagaggacatggaagtggtccccctccccctcccggtgcaccttctcctccaatgcctcctggaatgtctggtggcccccctcctcctccaggtggaagagggatgcctactccacctggcggaaggggacatggccttgctcgaacgttaggcccgacattacaaagtgcaatgcgaaagtcatccctaaaaccactacattgggtcaaagtaacaagagcaatgcaaggaagcttatgggcggagctacaaaaacaagtggaagctaatagccatgctgaattcgatgtaaatgaactagagtctctgtttaccattgctccaaaggcaaaagctggctcaaaatcagaaggccgtggaaaatcccttggaacaaaatctgataaagttcaactgatcgatctaagacgggccaataacacagagatcatgttgacaaaaatcaaaatgccgctccctgatatgatgagtgctgctctagctttggacgattcagttttggatgctgaccagattgaaaatctaataaaattttgcccaacaaaagaggagatggaacttctaaagaactacagtggggacaaggaagctcttggcaagtgtgagcatttctttctagagttaatgaaggtgccaagggttgaatctaagcttaagatatttgctttcaagattcagtttcagtctcagggatgtcagaaagaatttgcagactgtatcatctgcttgtgaggagctcagaagctctgagaagttgaaggttatcatgaagaacattctgttaattgggaatacattgaatcaaggcacaccaagaggccaggctgttggttttcgcttggacagcctcctaaaacttatagagacccgtgccactagtggtagaatgacattaatgcattttctatgtaagtcccttgcagagaagtcaccagaagtaatggattttcatgaggatcttgtccacttggaagcttcttcaaagttgcaactaaaagcattggcggaggagcagctggcagtggtaaaggggctggagaaagttgaacaggagctaactgcttcagaaagtgatgggccggtttctgatgttttccgtaagactttaaaggagttcattgattgttcgagtgctgatgtatgctccttgtcagcattctattctgaagtaggtaaaagcgcagatgcacttgctctttattttggagaagaccctgctaaatttccttttgagcaaggtaatattcatgcctatagacccatggaaatggtttaa

SEQ ID NO: 34998 - DNA, 5775 bp, Zea Mays
atggcgctgttccggaggctcttctatcggaagccgccggatcggctcctcgagatagccgaccgcgtctacggtacggtaccacacaatgtagattaccactccgttgaaacggctgcggtcgtgctttggcaccttgcttactacttcctcccaccaatcgtattcgattgttgcttctcaacagaaaccatggaccaatacagatacaagaattacctggacaacattattttgcagctccgtgaacagtttgcagattcttcattgatggtacttaactttagagatgaaggaaaaagtcttatttcaggcattttctccaagtacaatattacagccaaagactacccttgcaagtatctaggatgcccgttacttcctttggatatcattctccacttcctaaggctgagtgaaaggtggcttatgcttgaagggcagcaaaatattttactaatgcactgtgagaaagatggatggccagtgttggcatttatgcttgcaggtcttcttctgtacaggaaacaatataatggggagcaaagaactctagatatggtgtacaagcaagccccaaaggagcttcttcagatgctaaccacattgaatccacaaccgtctcatcttcggtatcttgggtacatatgcagaatggatgacggcataggatggcctacacaacctattcctttcaccttggattgtgtaattcttagagaaattccaaattttgatggagtcggtggttgtcggccaattgttcgagtatatgggcaggatattccaacaactgacagaagtcatagtgtcatttcaccaccatcaaaggccaagaaacatattaggcgttacagacaggcagataatgcgccagtgaagttaaatgtaggatcctgcgtccaaggtgatgtcgtccttgaatgtctgcatgtggatgatggccaaggaaatgaaaggttaatgtttagggtgatgttcaatacctttttcatccagtctcacattttaccgttgaactttgaggacatcgatgtcccttgggatgccgatcaccagttcacaaagaacttcaaagcagaggtactcttttcagagtttgatgctgagtctgatgcgtcaactgaagtagcacctgattatgattatgattatgactatgataatgatatggatgttgcctctgctgatgagttctttgaagcagaagaaatcttcagtaatgctgaatctcaagatggaaataaggatgcggatactctttctatggtctctacagattatattcgaactccaagtgccgaatgttggaaaaactctccattttccaactttgatctgaatattgacattgatggatcacaagacaataaagccgataacttgggcttgttgttagaaacagtaaatgatggaaagacatgcacatccactgaagccaatattttgctcaacaatgagactgcagttgtgaagtcaacttttaccgctacaatagcatgcacatccactgaagccaatattttgctcaacgatgagactgcagttgtgaagtcaacttttacagctacaatagatggagacacagatagcggcatctcaagttctacctataaagaggatgggtgcatgtttgaaaagggtagttccaagcaggatataaggatgggttccaatcaagacttgagccagattgataatgtattggttaaggaggtgattatattagaaactaatagtactgatgacatacagatgatcaaagaggtcatcatatctgaagttacaactcccaaacaagtggtagaggggaatatgatggaaactgaattagatgaggcagtccacagttcagaaagcactgcactgggagaagacgaggacacaaaacgacctaatacttttttcaaaaaagatgagggacagagtgcacgagatgaatatgctgcttatgacaatggcatagtgattgaacgggaagaaagtcgcaacaaagaaaaatttaccatcacaggcacagattcactagtggctgagcccaaagatttaccacatcttgacagctcaaacacttctttggaactaagttcagccaatgaaaatattgatcagcttcgtgcttgcagtagtaatgtcactgcagagcgaagagcaggaattgacacatcattttccagctccaggagtcagtcttctaatatctcttgtgcgaacattctaccagaagaatctaacttgataataaaccatgcttcaacttctgtgaatgcaaatacagatacaaccgattcatctcgactggtgctaaagaaaaaaccttttctaccattggcgacatctagtcttttttctccatcatctcccagacgcaatctgcttcgtgctgcatccacagatttgtcctttttttctccatcacaaacagaatctaagcagaactccgttacttctacaagtggaaggggtgattcagatacatcttctgtgcttccaccatttcagctctacacatccctgggatcatcatccaaaatgtctctagtacatcctactctgcgaccaataagaacgatttcatctctaccatcattatcatttggcacattcatagagatgtcaatggcttcttcaagatcacccaaacaccaagagcatgttagatctccctcaataccacaagatcaacatcttcacccaccaatgacagaggaaaatgatctacattcaggacatgaagcaagtgaagttcaatttctgcaatctgatactgctgtcgaattatctccatcagagcattctgagtataaagttcagcatgtggttggaagcgctgaagatacaatttcaaagcaagtaaattgtgagcagcctttagatcaaacaacattatcaattcatttgaggccatttgaggtggagatatcacaaggtgaaacaattaacggagtcttggcctctataattgatgataaagaacacggaggcattccaattctgcaattgccacaaaagttgcctcattctggagaacatatgaaatctccacctccacctcctcctcctccacaaccaccaccttgtcatgcaacagttataccttctttgtgtttatcttcaaaaccaccttctccaacagaacattacgaaaatccaccttcttcccctccacctttttctagagaatcatgtgttgttctacctccacttccagctccactcttgaatcatccatctcttcctggaaaacatattaatctatatccacctccaccacctccaccaccaactttacatcatatcgcacctgcatctccgtgctcgtaccaaccttctttctatgcagatatagcaacccaacctaccttttcagaggatattgtaatagttccacctccacattcaaaaggggttaatataattccattgccacctcctcctcctagaacaagtgaaactttgtctcaacctcttgatggtgggcaatcaacaggaccagcttctcttcttgaagttactaaagaaaacccaccacctcctctccttccccctgaaggacaaatgggatctccattgtcaactctttgtggagaaattgtgaatattccaatacctccaccttcacttcctggaggacatggagaagttccactatcaactcctcctagaggatgtggggccattccacctccaccaccctttactaaagggataggaggaattacattgccaattggatttcatagtggagacttgtcattcctccaatctaccagagaatctaaaggcccttcatgcttgccacctccacctccacctccacctccacctccaccaccaccactatcttctaatggacacataggtgatctgccaccaccacctacgagtgtatttgtagaggcttcgatccctctgccacctcaaacaggatgtggaggggatccaccaccgccaccacctactggaggacatgtagggcctccaccaccaccgccacctctaggggaatgtgcatgggatcttcaacctcccaaagcatgtgtaagggctcccccgccacctccacctcctggaggatatgcagaagttctaatgccaccaccacctcccagaggatatgtaggggctccagcaccacctccacctcctggaggatatgcaggagctccaccaccaccgccacctcctggaggatatgcaggagctccaccaccaccgccacctcctggaggatatgcaggagctccaccaccaccgccacctcctggaggatatgcaggagctccaccaccaccgccaccccctggaggatatgcaggagctccaccacccccgccttcatatggaggaattggaggagttcctcctcctccaccaccctttggaggactaggaggaactccaccgcctccacctccagcagggtttcgaggtggagctccatcaccacctcctcctcctggaggtcatggaggtccaccaccacctcctcctagaggacatggaagtggtccccctccccctcccggtgcaccttctcctccaatgcctcctggaatgtctggtggcccccctcctcctccaggtggaagagggatgcctactccacctggcggaaggggacatggccttgctcgaacgttaggcccgacattacaaagtgcaatgcgaaagtcatccctaaaaccactacattgggtcaaagtaacaagagcaatgcaaggaagcttatgggcggagctacaaaaacaagtggaagctaatagccatgctgaattcgatgtaaatgaactagagtctctgtttaccattgctccaaaggcaaaagctggctcaaaatcagaaggccgtggaaaatcccttggaacaaaatctgataaagttcaactgatcgatctaagacgggccaataacacagagatcatgttgacaaaaatcaaaatgccgctccctgatatgatgagtgctgctctagctttggacgattcagttttggatgctgaccagattgaaaatctaataaaattttgcccaacaaaagaggagatggaacttctaaagaactacagtggggacaaggaagctcttggcaagtgtgagcatttctttctagagttaatgaaggtgccaagggttgaatctaagcttaagatatttgctttcaagattcagtttcagtctcagattagggatgtcagaaagaatttgcagactgtatcatctgcttgtgaggagctcagaagctctgagaagttgaaggttatcatgaagaacattctgttaattgggaatacattgaatcaaggcacaccaagaggccaggctgttggttttcgcttggacagcctcctaaaacttatagagacccgtgccactagtggtagaatgacattaatgcattttctatgtaagtcccttgcagagaagtcaccagaagtaatggattttcatgaggatcttgtccacttggaagcttcttcaaagttgcaactaaaagcattggcggaggagcagctggcagtggtaaaggggctggagaaagttgaacaggagctaactgcttcagaaagtgatgggccggtttctgatgttttccgtaagactttaaaggagttcattgattgttcgagtgctgatgtatgctccttgtcagcattctattctgaagtaggtaaaagcgcagatgcacttgctctttattttggagaagaccctgctaaatttccttttgagcaaggtaatattcatgcctatagacccatggaaatggtttaa

SEQ ID NO: 34999 - DNA, 6370 bp, Zea Mays
atggcgctgttccggaggctcttctatcggaagccgccggatcggctcctcgagatagccgaccgcgtctacggcttccagctaacatgccttccttgtgcatgctgcatcagcttacggtgccaccatgattctatggccccattctagtttcgttcgagctatgcttctcaaaaagaaggtattcgattgttgcttctcaacagaaaccatggaccaatacagatacaagaattacctggacaacattattttgcagctccgtgaacagtttgcagattcttcattgatggtacttaactttagagatgaaggaaaaagtcttatttcaggcattttctccaagtacaatattacagccaaagactacccttgcaagtatctaggatgcccgttacttcctttggatatcattctccacttcctaaggctgagtgaaaggtggcttatgcttgaagggcagcaaaatattttactaatgcactgtgagaaagatggatggccagtgttggcatttatgcttgcaggtcttcttctgtacaggaaacaatataatggggagcaaagaactctagatatggtgtacaagcaagccccaaaggagcttcttcagatgctaaccacattgaatccacaaccgtctcatcttcggtatcttgggtacatatgcagaatggatgacggcataggatggcctacacaacctattcctttcaccttggattgtgtaattcttagagaaattccaaattttgatggagtcggtggttgtcggccaattgttcgagtatatgggcaggatattccaacaactgacagaagtcatagtgtcatttcaccaccatcaaaggccaagaaacatattaggcgttacagacaggcagataatgcgccagtgaagttaaatgtaggatcctgcgtccaaggtgatgtcgtccttgaatgtctgcatgtggatgatggccaaggaaatgaaaggttaatgtttagggtgatgttcaatacctttttcatccagtctcacattttaccgttgaactttgaggacatcgatgtcccttgggatgccgatcaccagttcacaaagaacttcaaagcagaggtactcttttcagagtttgatgctgagtctgatgcgtcaactgaagtagcacctgattatgattatgattatgactatgataatgatatggatgttgcctctgctgatgagttctttgaagcagaagaaatcttcagtaatgctgaatctcaagatggaaataaggatgcggatactctttctatggtctctacagattatattcgaactccaagtgccgaatgttggaaaaactctccattttccaactttgatctgaatattgacattgatggatcacaagacaataaagccgataacttgggcttgttgttagaaacagtaaatgatggaaagacatgcacatccactgaagccaatattttgctcaacaatgagactgcagttgtgaagtcaacttttaccgctacaatagcatgcacatccactgaagccaatattttgctcaacgatgagactgcagttgtgaagtcaacttttacagctacaatagatggagacacagatagcggcatctcaagttctacctataaagaggatgggtgcatgtttgaaaagggtagttccaagcaggatataaggatgggttccaatcaagacttgagccagattgataatgtattggttaaggaggtgattatattagaaactaatagtactgatgacatacagatgatcaaagaggtcatcatatctgaagttacaactcccaaacaagtggtagaggggaatatgatggaaactgaattagatgaggcagtccacagttcagaaagcactgcactgggagaagacgaggacacaaaacgacctaatacttttttcaaaaaagatgagggacagagtgcacgagatgaatatgctgcttatgacaatggcatagtgattgaacgggaagaaagtcgcaacaaagaaaaatttaccatcacaggcacagattcactagtggctgagcccaaagatttaccacatcttgacagctcaaacacttctttggaactaagttcagccaatgaaaatattgatcagcttcgtgcttgcagtagtaatgtcactgcagagcgaagagcaggaattgacacatcattttccagctccaggagtcagtcttctaatatctcttgtgcgaacattctaccagaagaatctaacttgataataaaccatgcttcaacttctgtgaatgcaaatacagatacaaccgattcatctcgactggtgctaaagaaaaaaccttttctaccattggcgacatctagtcttttttctccatcatctcccagacgcaatctgcttcgtgctgcatccacagatttgtcctttttttctccatcacaaacagaatctaagcagaactccgttacttctacaagtggaaggggtgattcagatacatcttctgtgcttccaccatttcagctctacacatccctgggatcatcatccaaaatgtctctagtacatcctactctgcgaccaataagaacgatttcatctctaccatcattatcatttggcacattcatagagatgtcaatggcttcttcaagatcacccaaacaccaagagcatgttagatctccctcaataccacaagatcaacatcttcacccaccaatgacagaggaaaatgatctacattcaggtagcttaactttgcctgcttccaaccaatatggccctcaaaccccacacccacctccactaccacccccacatgattcttgcacccaaagttattcgagcaccataatatatgaacctgaacaaataagagctgatggatcttgttcctatagtccagattatagacaaagtgttctcaacttaggtgattcctcactaacttcactctctaatagtagtatagctgcaactgaatgtcccttaggagcctctgattttgtagatgaggaagtaacaagtagacctaatatagtaactgccatggatgtcccatttaccaatgaagatacaaattctttgttgcacatgacttgttcttcacctcccaaaacattacaacgtgctgaaccaccaacgctgccgccaccacctttgcctctagtaccaccaccatcacaactaccactgccaactatatgcagtgatagtggatcagttccactggtatactcaaatccgtcttcagattgtccatataaagaaccaacaatgctaccagaacacaaatctgatgttccagctacttctctcgaaggacatgaagcaagtgaagttcaatttctgcaatctgatactgctgtcgaattatctccatcagagcattctgagtataaagttcagcatgtggttggaagcgctgaagatacaatttcaaagcaagtaaattgtgagcagcctttagatcaaacaacattatcaattcatttgaggccatttgaggtggagatatcacaaggtgaaacaattaacggagtcttggcctctataattgatgataaagaacacggaggcattccaattctgcaattgccacaaaagttgcctcattctggagaacatatgaaatctccacctccacctcctcctcctccacaaccaccaccttgtcatgcaacagttataccttctttgtgtttatcttcaaaaccaccttctccaacagaacattacgaaaatccaccttcttcccctccacctttttctagagaatcatgtgttgttctacctccacttccagctccactcttgaatcatccatctcttcctggaaaacatattaatctatatccacctccaccacctccaccaccaactttacatcatatcgcacctgcatctccgtgctcgtaccaaccttctttctatgcagatatagcaacccaacctaccttttcagaggatattgtaatagttccacctccacattcaaaaggggttaatataattccattgccacctcctcctcctagaacaagtgaaactttgtctcaacctcttgatggtgggcaatcaacaggaccagcttctcttcttgaagttactaaagaaaacccaccacctcctctccttccccctgaaggacaaatgggatctccattgtcaactctttgtggagaaattgtgaatattccaatacctccaccttcacttcctggaggacatggagaagttccactatcaactcctcctagaggatgtggggccattccacctccaccaccctttactaaagggataggaggaattacattgccaattggatttcatagtggagacttgtcattcctccaatctaccagagaatctaaaggcccttcatgcttgccacctccacctccacctccacctccacctccaccaccaccactatcttctaatggacacataggtgatctgccaccaccacctacgagtgtatttgtagaggcttcgatccctctgccacctcaaacaggatgtggaggggatccaccaccgccaccacctactggaggacatgtagggcctccaccaccaccgccacctctaggggaatgtgcatgggatcttcaacctcccaaagcatgtgtaagggctcccccgccacctccacctcctggaggatatgcagaagttctaatgccaccaccacctcccagaggatatgtaggggctccagcaccacctccacctcctggaggatatgcaggagctccaccaccaccgccacctcctggaggatatgcaggagctccaccaccaccgccacctcctggaggatatgcaggagctccaccaccaccgccacctcctggaggatatgcaggagctccaccaccaccgccaccccctggaggatatgcaggagctccaccacccccgccttcatatggaggaattggaggagttcctcctcctccaccaccctttggaggactaggaggaactccaccgcctccacctccagcagggtttcgaggtggagctccatcaccacctcctcctcctggaggtcatggaggtccaccaccacctcctcctagaggacatggaagtggtccccctccccctcccggtgcaccttctcctccaatgcctcctggaatgtctggtggcccccctcctcctccaggtggaagagggatgcctactccacctggcggaaggggacatggccttgctcgaacgttaggcccgacattacaaagtgcaatgcgaaagtcatccctaaaaccactacattgggtcaaagtaacaagagcaatgcaaggaagcttatgggcggagctacaaaaacaagtggaagctaatagccatgctgaattcgatgtaaatgaactagagtctctgtttaccattgctccaaaggcaaaagctggctcaaaatcagaaggccgtggaaaatcccttggaacaaaatctgataaagttcaactgatcgatctaagacgggccaataacacagagatcatgttgacaaaaatcaaaatgccgctccctgatatgatgagtgctgctctagctttggacgattcagttttggatgctgaccagattgaaaatctaataaaattttgcccaacaaaagaggagatggaacttctaaagaactacagtggggacaaggaagctcttggcaagtgtgagcatttctttctagagttaatgaaggtgccaagggttgaatctaagcttaagatatttgctttcaagattcagtttcagtctcagattagggatgtcagaaagaatttgcagactgtatcatctgcttgtgaggagctcagaagctctgagaagttgaaggttatcatgaagaacattctgttaattgggaatacattgaatcaaggcacaccaagaggccaggctgttggttttcgcttggacagcctcctaaaacttatagagacccgtgccactagtggtagaatgacattaatgcattttctatgtaagtcccttgcagagaagtcaccagaagtaatggattttcatgaggatcttgtccacttggaagcttcttcaaagttgcaactaaaagcattggcggaggagcagctggcagtggtaaaggggctggagaaagttgaacaggagctaactgcttcagaaagtgatgggccggtttctgatgttttccgtaagactttaaaggagttcattgattgttcgagtgctgatgtatgctccttgtcagcattctattctgaagtaggtaaaagcgcagatgcacttgctctttattttggagaagaccctgctaaatttccttttgagcaaggtaatattcatgcctatagacccatggaaatggtttaa

SEQ ID NO: 35000 - DNA, 6337 bp, Zea Mays
atggcgctgttccggaggctcttctatcggaagccgccggatcggctcctcgagatagccgaccgcgtctacgtattcgattgttgcttctcaacagaaaccatggaccaatacagatacaagaattacctggacaacattattttgcagctccgtgaacagtttgcagattcttcattgatggtacttaactttagagatgaaggaaaaagtcttatttcaggcattttctccaagtacaatattacagccaaagactacccttgcaagtatctaggatgcccgttacttcctttggatatcattctccacttcctaaggctgagtgaaaggtggcttatgcttgaagggcagcaaaatattttactaatgcactgtgagaaagatggatggccagtgttggcatttatgcttgcaggtcttcttctgtacaggaaacaatataatggggagcaaagaactctagatatggtgtacaagcaagccccaaaggagcttcttcagatgctaaccacattgaatccacaaccgtctcatcttcggtatcttgggtacatatgcagaatggatgacggcataggatggcctacacaacctattcctttcaccttggattgtgtaattcttagagaaattccaaattttgatggagtcggtggttgtcggccaattgttcgagtatatgggcaggatattccaacaactgacagaagtcatagtgtcatttcaccaccatcaaaggccaagaaacatattaggcgttacagacaggcagataatgcgccagtgaagttaaatgtaggatcctgcgtccaaggtgatgtcgtccttgaatgtctgcatgtggatgatggccaaggaaatgaaaggttaatgtttagggtgatgttcaatacctttttcatccagtctcacattttaccgttgaactttgaggacatcgatgtcccttgggatgccgatcaccagttcacaaagaacttcaaagcagaggtactcttttcagagtttgatgctgagtctgatgcgtcaactgaagtagcacctgattatgattatgattatgactatgataatgatatggatgttgcctctgctgatgagttctttgaagcagaagaaatcttcagtaatgctgaatctcaagatggaaataaggatgcggatactctttctatggtctctacagattatattcgaactccaagtgccgaatgttggaaaaactctccattttccaactttgatctgaatattgacattgatggatcacaagacaataaagccgataacttgggcttgttgttagaaacagtaaatgatggaaagacatgcacatccactgaagccaatattttgctcaacaatgagactgcagttgtgaagtcaacttttaccgctacaatagcatgcacatccactgaagccaatattttgctcaacgatgagactgcagttgtgaagtcaacttttacagctacaatagatggagacacagatagcggcatctcaagttctacctataaagaggatgggtgcatgtttgaaaagggtagttccaagcaggatataaggatgggttccaatcaagacttgagccagattgataatgtattggttaaggaggtgattatattagaaactaatagtactgatgacatacagatgatcaaagaggtcatcatatctgaagttacaactcccaaacaagtggtagaggggaatatgatggaaactgaattagatgaggcagtccacagttcagaaagcactgcactgggagaagacgaggacacaaaacgacctaatacttttttcaaaaaagatgagggacagagtgcacgagatgaatatgctgcttatgacaatggcatagtgattgaacgggaagaaagtcgcaacaaagaaaaatttaccatcacaggcacagattcactagtggctgagcccaaagatttaccacatcttgacagctcaaacacttctttggaactaagttcagccaatgaaaatattgatcagcttcgtgcttgcagtagtaatgtcactgcagagcgaagagcaggaattgacacatcattttccagctccaggagtcagtcttctaatatctcttgtgcgaacattctaccagaagaatctaacttgataataaaccatgcttcaacttctgtgaatgcaaatacagatacaaccgattcatctcgactggtgctaaagaaaaaaccttttctaccattggcgacatctagtcttttttctccatcatctcccagacgcaatctgcttcgtgctgcatccacagatttgtcctttttttctccatcacaaacagaatctaagcagaactccgttacttctacaagtggaaggggtgattcagatacatcttctgtgcttccaccatttcagctctacacatccctgggatcatcatccaaaatgtctctagtacatcctactctgcgaccaataagaacgatttcatctctaccatcattatcatttggcacattcatagagatgtcaatggcttcttcaagatcacccaaacaccaagagcatgttagatctccctcaataccacaagatcaacatcttcacccaccaatgacagaggaaaatgatctacattcaggtagcttaactttgcctgcttccaaccaatatggccctcaaaccccacacccacctccactaccacccccacatgattcttgcacccaaagttattcgagcaccataatatatgaacctgaacaaataagagctgatggatcttgttcctatagtccagattatagacaaagtgttctcaacttaggtgattcctcactaacttcactctctaatagtagtatagctgcaactgaatgtcccttaggagcctctgattttgtagatgaggaagtaacaagtagacctaatatagtaactgccatggatgtcccatttaccaatgaagatacaaattctttgttgcacatgacttgttcttcacctcccaaaacattacaacgtgctgaaccaccaacgctgccgccaccacctttgcctctagtaccaccaccatcacaactaccactgccaactatatgcagtgatagtggatcagttccactggtatactcaaatccgtcttcagattgtccatataaagaaccaacaatgctaccagaacacaaatctgatgttccagctacttctctcgaaggacatgaagcaagtgaagttcaatttctgcaatctgatactgctgtcgaattatctccatcagagcattctgagtataaagttcagcatgtggttggaagcgctgaagatacaatttcaagtatgtcatcctatatacctgcagcacctccatatccaatgtttcacattgtaacagataattcctcatgttcaatatctgcagagcaagtaaattgtgagcagcctttagatcaaacaacattatcaattcatttgaggccatttgaggtggagatatcacaaggtgaaacaattaacggagtcttggcctctataattgatgataaagaacacggaggcattccaattctgcaattgccacaaaagttgcctcattctggagaacatatgaaatctccacctccacctcctcctcctccacaaccaccaccttgtcatgcaacagttataccttctttgtgtttatcttcaaaaccaccttctccaacagaacattacgaaaatccaccttcttcccctccacctttttctagagaatcatgtgttgttctacctccacttccagctccactcttgaatcatccatctcttcctggaaaacatattaatctatatccacctccaccacctccaccaccaactttacatcatatcgcacctgcatctccgtgctcgtaccaaccttctttctatgcagatatagcaacccaacctaccttttcagaggatattgtaatagttccacctccacattcaaaaggggttaatataattccattgccacctcctcctcctagaacaagtgaaactttgtctcaacctcttgatggtgggcaatcaacaggaccagcttctcttcttgaagttactaaagaaaacccaccacctcctctccttccccctgaaggacaaatgggatctccattgtcaactctttgtggagaaattgtgaatattccaatacctccaccttcacttcctggaggacatggagaagttccactatcaactcctcctagaggatgtggggccattccacctccaccaccctttactaaagggataggaggaattacattgccaattggatttcatagtggagacttgtcattcctccaatctaccagagaatctaaaggcccttcatgcttgccacctccacctccacctccacctccacctccaccaccaccactatcttctaatggacacataggtgatctgccaccaccacctacgagtgtatttgtagaggcttcgatccctctgccacctcaaacaggatgtggaggggatccaccaccgccaccacctactggaggacatgtagggcctccaccaccaccgccacctctaggggaatgtgcatgggatcttcaacctcccaaagcatgtgtaagggctcccccgccacctccacctcctggaggatatgcagaagttctaatgccaccaccacctcccagaggatatgtaggggctccagcaccacctccacctcctggaggatatgcaggagctccaccaccaccgccacctcctggaggatatgcaggagctccaccaccaccgccacctcctggaggatatgcaggagctccaccaccaccgccacctcctggaggatatgcaggagctccaccaccaccgccaccccctggaggatatgcaggagctccaccacccccgccttcatatggaggaattggaggagttcctcctcctccaccaccctttggaggactaggaggaactccaccgcctccacctccagcagggtttcgaggtggagctccatcaccacctcctcctcctggaggtcatggaggtccaccaccacctcctcctagaggacatggaagtggtccccctccccctcccggtgcaccttctcctccaatgcctcctggaatgtctggtggcccccctcctcctccaggtggaagagggatgcctactccacctggcggaaggggacatggccttgctcgaacgttaggcccgacattacaaagtgcaatgcgaaagtcatccctaaaaccactacattgggtcaaagtaacaagagcaatgcaaggaagcttatgggcggagctacaaaaacaagtggaagctaatagccatgctgaattcgatgtaaatgaactagagtctctgtttaccattgctccaaaggcaaaagctggctcaaaatcagaaggccgtggaaaatcccttggaacaaaatctgataaagttcaactgatcgatctaagacgggccaataacacagagatcatgttgacaaaaatcaaaatgccgctccctgatatgatgagtgctgctctagctttggacgattcagttttggatgctgaccagattgaaaatctaataaaattttgcccaacaaaagaggagatggaacttctaaagtggggacaaggaagctcttggcaagtgtgagcatttctttctagagttaatgaaggtgccaagggttgaatctaagcttaagatatttgctttcaagattcagtttcagtctcagattagggatgtcagaaagaatttgcagactgtatcatctgcttgtgaggagctcagaagctctgagaagttgaaggttatcatgaagaacattctgttaattgggaatacattgaatcaaggcacaccaagaggccaggctgttggttttcgcttggacagcctcctaaaacttatagagacccgtgccactagtggtagaatgacattaatgcattttctatgtaagtcccttgcagagaagtcaccagaagtaatggattttcatgaggatcttgtccacttggaagcttcttcaaagttgcaactaaaagcattggcggaggagcagctggcagtggtaaaggggctggagaaagttgaacaggagctaactgcttcagaaagtgatgggccggtttctgatgttttccgtaagactttaaaggagttcattgattgttcgagtgctgatgtatgctccttgtcagcattctattctgaagtaggtaaaagcgcagatgcacttgctctttattttggagaagaccctgctaaatttccttttgagcaaggtaatattcatgcctatagacccatggaaatggtttaa

SEQ ID NO: 35001 - DNA, 6277 bp, Zea Mays
ggaagcgcaagggaatggcgctgttccggaggctcttctatcggaagccgccggatcggctcctcgagatagccgaccgcgtctacgtattcgattgttgcttctcaacagaaaccatggaccaatacagatacaagaattacctggacaacattattttgcagctccgtgaacagtttgcagattcttcattgatggtacttaactttagagatgaaggaaaaagtcttatttcaggcattttctccaagtacaatattacagccaaagactacccttgcaagtatctaggatgcccgttacttcctttggatatcattctccacttcctaaggctgagtgaaaggtggcttatgcttgaagggcagcaaaatattttactaatgcactgtgagaaagatggatggccagtgttggcatttatgcttgcaggtcttcttctgtacaggaaacaatataatggggagcaaagaactctagatatggtgtacaagcaagccccaaaggagcttcttcagatgctaaccacattgaatccacaaccgtctcatcttcggtatcttgggtacatatgcagaatggatgacggcataggatggcctacacaacctattcctttcaccttggattgtgtaattcttagagaaattccaaattttgatggagtcggtggttgtcggccaattgttcgagtatatgggcaggatattccaacaactgacagaagtcatagtgtcatttcaccaccatcaaaggccaagaaacatattaggcgttacagacaggcagataatgcgccagtgaagttaaatgtaggatcctgcgtccaaggtgatgtcgtccttgaatgtctgcatgtggatgatggccaaggaaatgaaaggttaatgtttagggtgatgttcaatacctttttcatccagtctcacattttaccgttgaactttgaggacatcgatgtcccttgggatgccgatcaccagttcacaaagaacttcaaagcagaggtactcttttcagagtttgatgctgagtctgatgcgtcaactgaagtagcacctgattatgattatgattatgactatgataatgatatggatgttgcctctgctgatgagttctttgaagcagaagaaatcttcagtaatgctgaatctcaagatggaaataaggatgcggatactctttctatggtctctacagattatattcgaactccaagtgccgaatgttggaaaaactctccattttccaactttgatctgaatattgacattgatggatcacaagacaataaagccgataacttgggcttgttgttagaaacagtaaatgatggaaagacatgcacatccactgaagccaatattttgctcaacaatgagactgcagttgtgaagtcaacttttaccgctacaatagcatgcacatccactgaagccaatattttgctcaacgatgagactgcagttgtgaagtcaacttttacagctacaatagatggagacacagatagcggcatctcaagttctacctataaagaggatgggtgcatgtttgaaaagggtagttccaagcaggatataaggatgggttccaatcaagacttgagccagattgataatgtattggttaaggaggtgattatattagaaactaatagtactgatgacatacagatgatcaaagaggtcatcatatctgaagttacaactcccaaacaagtggtagaggggaatatgatggaaactgaattagatgaggcagtccacagttcagaaagcactgcactgggagaagacgaggacacaaaacgacctaatacttttttcaaaaaagatgagggacagagtgcacgagatgaatatgctgcttatgacaatggcatagtgattgaacgggaagaaagtcgcaacaaagaaaaatttaccatcacaggcacagattcactagtggctgagcccaaagatttaccacatcttgacagctcaaacacttctttggaactaagttcagccaatgaaaatattgatcagcttcgtgcttgcagtagtaatgtcactgcagagcgaagagcaggaattgacacatcattttccagctccaggagtcagtcttctaatatctcttgtgcgaacattctaccagaagaatctaacttgataataaaccatgcttcaacttctgtgaatgcaaatacagatacaaccgattcatctcgactggtgctaaagaaaaaaccttttctaccattggcgacatctagtcttttttctccatcatctcccagacgcaatctgcttcgtgctgcatccacagatttgtcctttttttctccatcacaaacagaatctaagcagaactccgttacttctacaagtggaaggggtgattcagatacatcttctgtgcttccaccatttcagctctacacatccctgggatcatcatccaaaatgtctctagtacatcctactctgcgaccaataagaacgatttcatctctaccatcattatcatttggcacattcatagagatgtcaatggcttcttcaagatcacccaaacaccaagagcatgttagatctccctcaataccacaagatcaacatcttcacccaccaatgacagaggaaaatgatctacattcaggtagcttaactttgcctgcttccaaccaatatggccctcaaaccccacacccacctccactaccacccccacatgattcttgcacccaaagttattcgagcaccataatatatgaacctgaacaaataagagctgatggatcttgttcctatagtccagattatagacaaagtgttctcaacttaggtgattcctcactaacttcactctctaatagtagtatagctgcaactgaatgtcccttaggagcctctgattttgtagatgaggaagtaacaagtagacctaatatagtaactgccatggatgtcccatttaccaatgaagatacaaattctttgttgcacatgacttgttcttcacctcccaaaacattacaacgtgctgaaccaccaacgctgccgccaccacctttgcctctagtaccaccaccatcacaactaccactgccaactatatgcagtgatagtggatcagttccactggtatactcaaatccgtcttcagattgtccatataaagaaccaacaatgctaccagaacacaaatctgatgttccagctacttctctcgaaggacatgaagcaagtgaagttcaatttctgcaatctgatactgctgtcgaattatctccatcagagcattctgagtataaagttcagcatgtggttggaagcgctgaagatacaatttcaagtatgtcatcctatatacctgcagcacctccatatccaatgtttcacattgtaacagataattcctcatgttcaatatctgcagagcaagtaaattgtgagcagcctttagatcaaacaacattatcaattcatttgaggccatttgaggtggagatatcacaaggtgaaacaattaacggagtcttggcctctataattgatgataaagaacacggaggcattccaattctgcaattgccacaaaagttgcctcattctggagaacatatgaaatctccacctccacctcctcctcctccacaaccaccaccttgtcatgcaacagttataccttctttgtgtttatcttcaaaaccaccttctccaacagaacattacgaaaatccaccttcttcccctccacctttttctagagaatcatgtgttgttctacctccacttccagctccactcttgaatcatccatctcttcctggaaaacatattaatctatatccacctccaccacctccaccaccaactttacatcatatcgcacctgcatctccgtgctcgtaccaaccttctttctatgcagatatagcaacccaacctaccttttcagaggatattgtaatagttccacctccacattcaaaaggggttaatataattccattgccacctcctcctcctagaacaagtgaaactttgtctcaacctcttgatggtgggcaatcaacaggaccagcttctcttcttgaagttactaaagaaaacccaccacctcctctccttccccctgaaggacaaatgggatctccattgtcaactctttgtggagaaattgtgaatattccaatacctccaccttcacttcctggaggacatggagaagttccactatcaactcctcctagaggatgtggggccattccacctccaccaccctttactaaagggataggaggaattacattgccaattggatttcatagtggagacttgtcattcctccaatctaccagagaatctaaaggcccttcatgcttgccacctccacctccacctccacctccacctccaccaccaccactatcttctaatggacacataggtgatctgccaccaccacctacgagtgtatttgtagaggcttcgatccctctgccacctcaaacaggatgtggaggggatccaccaccgccaccacctactggaggacatgtagggcctccaccaccaccgccacctctaggggaatgtgcatgggatcttcaacctcccaaagcatgtgtaagggctcccccgccacctccacctcctggaggatatgcagaagttctaatgccaccaccacctcccagaggatatgtaggggctccagcaccacctccacctcctggaggatatgcaggagctccaccaccaccgccacctcctggaggatatgcaggagctccaccaccaccgccacctcctggaggatatgcaggagctccaccaccaccgccacctcctggaggatatgcaggagctccaccaccaccgccaccccctggaggatatgcaggagctccaccacccccgccttcatatggaggaattggaggagttcctcctcctccaccaccctttggaggactaggaggaactccaccgcctccacctccagcagggtttcgaggtggagctccatcaccacctcctcctcctggaggtcatggaggtccaccaccacctcctcctagaggacatggaagtggtccccctccccctcccggtgcaccttctcctccaatgcctcctggaatgtctggtggcccccctcctcctccaggtggaagagggatgcctactccacctggcggaaggggacatggccttgctcgaacgttaggcccgacattacaaagtgcaatgcgaaagtcatccctaaaaccactacattgggtcaaagtaacaagagcaatgcaaggaagcttatgggcggagctacaaaaacaagtggaagctaatagccatgctgaattcgatgtaaatgaactagagtctctgtttaccattgctccaaaggcaaaagctggctcaaaatcagaaggccgtggaaaatcccttggaacaaaatctgataaagttcaactgatcgatctaagacgggccaataacacagagatcatgttgacaaaaatcaaaatgccgctccctgatatgatgagtgctgctctagctttggacgattcagttttggatgctgaccagattgaaaatctaataaaattttgcccaacaaaagaggagatggaacttctaaagtggggacaaggaagctcttggcaagtgtgagcatttctttctagagttaatgaaggtgccaagggttgaatctaagcttaagatatttgctttcaagattcagtttcagtctcagattagggatgtcagaaagaatttgcagactgtatcatctgcttgtgaggagaagctctgagaagttgaaggttatcatgaagaacattctgttaattgggaatacattgaatcaaggcacaccaagaggccaggctgttggttttcgcttggacagcctcctaaaacttatagagacccgtgccactagtggtagaatgacattaatgcattttctatgtaagtcccttgcagagaagtcaccagaagtaatggattttcatgaggatcttgtccacttggaagcttcttcaaagttgcaactaaaagcattggcggaggagcagctggcagtggtaaaggggctggagaaagttgaacaggagctaactgcttcagaaagtgatgggccggtttctgatgttttccgtaagggtaaaagcgcagatgcacttgctctttattttggagaagaccctgctaaatttccttttgagcaaggtaatattcatgcctatagacccatggaaatggtttaa

SEQ ID NO: 35002 - DNA, 6446 bp, Zea Mays
tcggaagcgcaagggaatggcgctgttccggaggctcttctatcggaagccgccggatcggctcctcgagatagccgaccgcgtctacggtaccacacaatgtagattaccactccgttgaaacggctgcggtcgtgctttggcaccttgcttactacttcctcccaccaatcgtattcgattgttgcttctcaacagaaaccatggaccaatacagatacaagaattacctggacaacattattttgcagctccgtgaacagtttgcagattcttcattgatggtacttaactttagagatgaaggaaaaagtcttatttcaggcattttctccaagtacaatattacagccaaagactacccttgcaagtatctaggatgcccgttacttcctttggatatcattctccacttcctaaggctgagtgaaaggtggcttatgcttgaagggcagcaaaatattttactaatgcactgtgagaaagatggatggccagtgttggcatttatgcttgcaggtcttcttctgtacaggaaacaatataatggggagcaaagaactctagatatggtgtacaagcaagccccaaaggagcttcttcagatgctaaccacattgaatccacaaccgtctcatcttcggtatcttgggtacatatgcagaatggatgacggcataggatggcctacacaacctattcctttcaccttggattgtgtaattcttagagaaattccaaattttgatggagtcggtggttgtcggccaattgttcgagtatatgggcaggatattccaacaactgacagaagtcatagtgtcatttcaccaccatcaaaggccaagaaacatattaggcgttacagacaggcagataatgcgccagtgaagttaaatgtaggatcctgcgtccaaggtgatgtcgtccttgaatgtctgcatgtggatgatggccaaggaaatgaaaggttaatgtttagggtgatgttcaatacctttttcatccagtctcacattttaccgttgaactttgaggacatcgatgtcccttgggatgccgatcaccagttcacaaagaacttcaaagcagaggtactcttttcagagtttgatgctgagtctgatgcgtcaactgaagtagcacctgattatgattatgattatgactatgataatgatatggatgttgcctctgctgatgagttctttgaagcagaagaaatcttcagtaatgctgaatctcaagatggaaataaggatgcggatactctttctatggtctctacagattatattcgaactccaagtgccgaatgttggaaaaactctccattttccaactttgatctgaatattgacattgatggatcacaagacaataaagccgataacttgggcttgttgttagaaacagtaaatgatggaaagacatgcacatccactgaagccaatattttgctcaacaatgagactgcagttgtgaagtcaacttttaccgctacaatagcatgcacatccactgaagccaatattttgctcaacgatgagactgcagttgtgaagtcaacttttacagctacaatagatggagacacagatagcggcatctcaagttctacctataaagaggatgggtgcatgtttgaaaagggtagttccaagcaggatataaggatgggttccaatcaagacttgagccagattgataatgtattggttaaggaggtgattatattagaaactaatagtactgatgacatacagatgatcaaagaggtcatcatatctgaagttacaactcccaaacaagtggtagaggggaatatgatggaaactgaattagatgaggcagtccacagttcagaaagcactgcactgggagaagacgaggacacaaaacgacctaatacttttttcaaaaaagatgagggacagagtgcacgagatgaatatgctgcttatgacaatggcatagtgattgaacgggaagaaagtcgcaacaaagaaaaatttaccatcacaggcacagattcactagtggctgagcccaaagatttaccacatcttgacagctcaaacacttctttggaactaagttcagccaatgaaaatattgatcagcttcgtgcttgcagtagtaatgtcactgcagagcgaagagcaggaattgacacatcattttccagctccaggagtcagtcttctaatatctcttgtgcgaacattctaccagaagaatctaacttgataataaaccatgcttcaacttctgtgaatgcaaatacagatacaaccgattcatctcgactggtgctaaagaaaaaaccttttctaccattggcgacatctagtcttttttctccatcatctcccagacgcaatctgcttcgtgctgcatccacagatttgtcctttttttctccatcacaaacagaatctaagcagaactccgttacttctacaagtggaaggggtgattcagatacatcttctgtgcttccaccatttcagctctacacatccctgggatcatcatccaaaatgtctctagtacatcctactctgcgaccaataagaacgatttcatctctaccatcattatcatttggcacattcatagagatgtcaatggcttcttcaagatcacccaaacaccaagagcatgttagatctccctcaataccacaagatcaacatcttcacccaccaatgacagaggaaaatgatctacattcaggtagcttaactttgcctgcttccaaccaatatggccctcaaaccccacacccacctccactaccacccccacatgattcttgcacccaaagttattcgagcaccataatatatgaacctgaacaaataagagctgatggatcttgttcctatagtccagattatagacaaagtgttctcaacttaggtgattcctcactaacttcactctctaatagtagtatagctgcaactgaatgtcccttaggagcctctgattttgtagatgaggaagtaacaagtagacctaatatagtaactgccatggatgtcccatttaccaatgaagatacaaattctttgttgcacatgacttgttcttcacctcccaaaacattacaacgtgctgaaccaccaacgctgccgccaccacctttgcctctagtaccaccaccatcacaactaccactgccaactatatgcagtgatagtggatcagttccactggtatactcaaatccgtcttcagattgtccatataaagaaccaacaatgctaccagaacacaaatctgatgttccagctacttctctcgaaggacatgaagcaagtgaagttcaatttctgcaatctgatactgctgtcgaattatctccatcagagcattctgagtataaagttcagcatgtggttggaagcgctgaagatacaatttcaagtatgtcatcctatatacctgcagcacctccatatccaatgtttcacattgtaacagataattcctcatgttcaatatctgcagagcaagtaaattgtgagcagcctttagatcaaacaacattatcaattcatttgaggccatttgaggtggagatatcacaaggtgaaacaattaacggagtcttggcctctataattgatgataaagaacacggaggcattccaattctgcaattgccacaaaagttgcctcattctggagaacatatgaaatctccacctccacctcctcctcctccacaaccaccaccttgtcatgcaacagttataccttctttgtgtttatcttcaaaaccaccttctccaacagaacattacgaaaatccaccttcttcccctccacctttttctagagaatcatgtgttgttctacctccacttccagctccactcttgaatcatccatctcttcctggaaaacatattaatctatatccacctccaccacctccaccaccaactttacatcatatcgcacctgcatctccgtgctcgtaccaaccttctttctatgcagatatagcaacccaacctaccttttcagaggatattgtaatagttccacctccacattcaaaaggggttaatataattccattgccacctcctcctcctagaacaagtgaaactttgtctcaacctcttgatggtgggcaatcaacaggaccagcttctcttcttgaagttactaaagaaaacccaccacctcctctccttccccctgaaggacaaatgggatctccattgtcaactctttgtggagaaattgtgaatattccaatacctccaccttcacttcctggaggacatggagaagttccactatcaactcctcctagaggatgtggggccattccacctccaccaccctttactaaagggataggaggaattacattgccaattggatttcatagtggagacttgtcattcctccaatctaccagagaatctaaaggcccttcatgcttgccacctccacctccacctccacctccacctccaccaccaccactatcttctaatggacacataggtgatctgccaccaccacctacgagtgtatttgtagaggcttcgatccctctgccacctcaaacaggatgtggaggggatccaccaccgccaccacctactggaggacatgtagggcctccaccaccaccgccacctctaggggaatgtgcatgggatcttcaacctcccaaagcatgtgtaagggctcccccgccacctccacctcctggaggatatgcagaagttctaatgccaccaccacctcccagaggatatgtaggggctccagcaccacctccacctcctggaggatatgcaggagctccaccaccaccgccacctcctggaggatatgcaggagctccaccaccaccgccacctcctggaggatatgcaggagctccaccaccaccgccacctcctggaggatatgcaggagctccaccaccaccgccaccccctggaggatatgcaggagctccaccacccccgccttcatatggaggaattggaggagttcctcctcctccaccaccctttggaggactaggaggaactccaccgcctccacctccagcagggtttcgaggtggagctccatcaccacctcctcctcctggaggtcatggaggtccaccaccacctcctcctagaggacatggaagtggtccccctccccctcccggtgcaccttctcctccaatgcctcctggaatgtctggtggcccccctcctcctccaggtggaagagggatgcctactccacctggcggaaggggacatggccttgctcgaacgttaggcccgacattacaaagtgcaatgcgaaagtcatccctaaaaccactacattgggtcaaagtaacaagagcaatgcaaggaagcttatgggcggagctacaaaaacaagtggaagctaatagccatgctgaattcgatgtaaatgaactagagtctctgtttaccattgctccaaaggcaaaagctggctcaaaatcagaaggccgtggaaaatcccttggaacaaaatctgataaagttcaactgatcgatctaagacgggccaataacacagagatcatgttgacaaaaatcaaaatgccgctccctgatatgatgagtgctgctctagctttggacgattcagttttggatgctgaccagattgaaaatctaataaaattttgcccaacaaaagaggagatggaacttctaaagaactacagtggggacaaggaagctcttggcaagtgtgagcatttctttctagagttaatgaaggtgccaagggttgaatctaagcttaagatatttgctttcaagattcagtttcagtctcagattagggatgtcagaaagaatttgcagactgtatcatctgcttgtgaggagctcagaagctctgagaagttgaaggttatcatgaagaacattctgttaattgggaatacattgaatcaaggcacaccaagaggccaggctgttggttttcgcttggacagcctcctaaaacttatagagacccgtgccactagtggtagaatgacattaatgcattttctatgtaagtcccttgcagagaagtcaccagaagtaatggattttcatgaggatcttgtccacttggaagcttcttcaaagttgcaactaaaagcattggcggaggagcagctggcagtggtaaaggggctggagaaagttgaacaggagctaactgcttcagaaagtgatgggccggtttctgatgttttccgtaagactttaaaggagttcattgattgttcgagtgctgatgtatgctccttgtcagcattctattctgaagtaggtaaaagcgcagatgcacttgctctttattttggagaagaccctgctaaatttccttttgagcaaggtaatattcatgcctatagacccatggaaatggtttaa

SEQ ID NO: 35003 - DNA, 4371 bp, Zea Mays
cgccgacggcggtcggaagcgcaagggaatggcgctgttccggaggctcttctatcggaagccgccggatcggctcctcgagatagccgaccgcgtctacgtattcgattgttgcttctcaacagaaaccatggaccaatacagatacaagaattacctggacaacattattttgcagctccgtgaacagtttgcagattcttcattgatggtacttaactttagagatgaaggaaaaagtcttatttcaggcattttctccaagtacaatattacagccaaagactacccttgcaagtatctaggatgcccgttacttcctttggatatcattctccacttcctaaggctgagtgaaaggtggcttatgcttgaagggcagcaaaatattttactaatgcactgtgagaaagatggatggccagtgttggcatttatgcttgcaggtcttcttctgtacaggaaacaatataatggggagcaaagaactctagatatggtgtacaagcaagccccaaaggagcttcttcagatgctaaccacattgaatccacaaccgtctcatcttcggtatcttgggtacatatgcagaatggatgacggcataggatggcctacacaacctattcctttcaccttggattgtgtaattcttagagaaattccaaattttgatggagtcggtggttgtcggccaattgttcgagtatatgggcaggatattccaacaactgacagaagtcatagtgtcatttcaccaccatcaaaggccaagaaacatattaggcgttacagacaggcagataatgcgccagtgaagttaaatgtaggatcctgcgtccaaggtgatgtcgtccttgaatgtctgcatgtggatgatggccaaggaaatgaaaggttaatgtttagggtgatgttcaatacctttttcatccagtctcacattttaccgttgaactttgaggacatcgatgtcccttgggatgccgatcaccagttcacaaagaacttcaaagcagaggtactcttttcagagtttgatgctgagtctgatgcgtcaactgaagtagcacctgattatgattatgattatgactatgataatgatatggatgttgcctctgctgatgagttctttgaagcagaagaaatcttcagtaatgctgaatctcaagatggaaataaggatgcggatactctttctatggtctctacagattatattcgaactccaagtgccgaatgttggaaaaactctccattttccaactttgatctgaatattgacattgatggatcacaagacaataaagccgataacttgggcttgttgttagaaacagtaaatgatggaaagacatgcacatccactgaagccaatattttgctcaacaatgagactgcagttgtgaagtcaacttttaccgctacaatagcatgcacatccactgaagccaatattttgctcaacgatgagactgcagttgtgaagtcaacttttacagctacaatagatggagacacagatagcggcatctcaagttctacctataaagaggatgggtgcatgtttgaaaagggtagttccaagcaggatataaggatgggttccaatcaagacttgagccagattgataatgtattggttaaggaggtgattatattagaaactaatagtactgatgacatacagatgatcaaagaggtcatcatatctgaagttacaactcccaaacaagtggtagaggggaatatgatggaaactgaattagatgaggcagtccacagttcagaaagcactgcactgggagaagacgaggacacaaaacgacctaatacttttttcaaaaaagatgagggacagagtgcacgagatgaatatgctgcttatgacaatggcatagtgattgaacgggaagaaagtcgcaacaaagaaaaatttaccatcacaggcacagattcactagtggctgagcccaaagatttaccacatcttgacagctcaaacacttctttggaactaagttcagccaatgaaaatattgatcagcttcgtgcttgcagtagtaatgtcactgcagagcgaagagcaggaattgacacatcattttccagctccaggagtcagtcttctaatatctcttgtgcgaacattctaccagaagaatctaacttgataataaaccatgcttcaacttctgtgaatgcaaatacagatacaaccgattcatctcgactggtgctaaagaaaaaaccttttctaccattggcgacatctagtcttttttctccatcatctcccagacgcaatctgcttcgtgctgcatccacagatttgtcctttttttctccatcacaaacagaatctaagcagaactccgttacttctacaagtggaaggggtgattcagatacatcttctgtgcttccaccatttcagctctacacatccctgggatcatcatccaaaatgtctctagtacatcctactctgcgaccaataagaacgatttcatctctaccatcattatcatttggcacattcatagagatgtcaatggcttcttcaagatcacccaaacaccaagagcatgttagatctccctcaataccacaagatcaacatcttcacccaccaatgacagaggaaaatgatctacattcaggtagcttaactttgcctgcttccaaccaatatggccctcaaaccccacacccacctccactaccacccccacatgattcttgcacccaaagttattcgagcaccataatatatgaacctgaacaaataagagctgatggatcttgttcctatagtccagattatagacaaagtgttctcaacttaggtgattcctcactaacttcactctctaatagtagtatagctgcaactgaatgtcccttaggagcctctgattttgtagatgaggaagtaacaagtagacctaatatagtaactgccatggatgtcccatttaccaatgaagatacaaattctttgttgcacatgacttgttcttcacctcccaaaacattacaacgtgctgaaccaccaacgctgccgccaccacctttgcctctagtaccaccaccatcacaactaccactgccaactatatgcagtgatagtggatcagttccactggtatactcaaatccgtcttcagattgtccatataaagaaccaacaatgctaccagaacacaaatctgatgttccagctacttctctcgaaggacatgaagcaagtgaagttcaatttctgcaatctgatactgctgtcgaattatctccatcagagcattctgagtataaagttcagcatgtggttggaagcgctgaagatacaatttcaaccatgctgaattcgatgtaaatgaactagagtctctgtttaccattgctccaaaggcaaaagctggctcaaaatcagaaggccgtggaaaatcccttggaacaaaatctgataaagttcaactgatcgatctaagacgggccaataacacagagatcatgttgacaaaaatcaaaatgccgctccctgatatgatgagtgctgctctagctttggacgattcagttttggatgctgaccagattgaaaatctaataaaattttgcccaacaaaagaggagatggaacttctaaagaactacagtggggacaaggaagctcttggcaagtgtgagcatttctttctagagttaatgaaggtgccaagggttgaatctaagcttaagatatttgctttcaagattcagtttcagtctcagattagggatgtcagaaagaatttgcagactgtatcatctgcttgtgaggagctcagaagctctgagaagttgaaggttatcatgaagaacattctgttaattgggaatacattgaatcaaggcacaccaagaggccaggctgttggttttcgcttggacagcctcctaaaacttatagagacccgtgccactagtggtagaatgacattaatgcattttctatgtaagtcccttgcagagaagtcaccagaagtaatggattttcatgaggatcttgtccacttggaagcttcttcaaagttgcaactaaaagcattggcggaggagcagctggcagtggtaaaggggctggagaaagttgaacaggagctaactgcttcagaaagtgatgggccggtttctgatgttttccgtaagactttaaaggagttcattgattgttcgagtgctgatgtatgctccttgtcagcattctattctgaagtaggtaaaagcgcagatgcacttgctctttattttggagaagaccctgctaaatttccttttgagcaaggtaatattcatgcctatagacccatggaaatggtttaa

SEQ ID NO: 35004 - DNA, 6354 bp, Zea Mays
gtcggctggtcccgggcgtcgcggagcaagtgggtccgggggcaggccgccggagacggcggcgacgccgacggcggtcggaagcgcaagggaatggcgctgttccggaggctcttctatcggaagccgccggatcggctcctcgagatagccgaccgcgtctacgtattcgattgttgcttctcaacagaaaccatggaccaatacagatacaagaattacctggacaacattattttgcagctccgtgaacagtttgcagattcttcattgatggtacttaactttagagatgaaggaaaaagtcttatttcaggcattttctccaagtacaatattacagccaaagactacccttgcaagtatctaggatgcccgttacttcctttggatatcattctccacttcctaaggctgagtgaaaggtggcttatgcttgaagggcagcaaaatattttactaatgcactgtgagaaagatggatggccagtgttggcatttatgcttgcaggtcttcttctgtacaggaaacaatataatggggagcaaagaactctagatatggtgtacaagcaagccccaaaggagcttcttcagatgctaaccacattgaatccacaaccgtctcatcttcggtatcttgggtacatatgcagaatggatgacggcataggatggcctacacaacctattcctttcaccttggattgtgtaattcttagagaaattccaaattttgatggagtcggtggttgtcggccaattgttcgagtatatgggcaggatattccaacaactgacagaagtcatagtgtcatttcaccaccatcaaaggccaagaaacatattaggcgttacagacaggcagataatgcgccagtgaagttaaatgtaggatcctgcgtccaaggtgatgtcgtccttgaatgtctgcatgtggatgatggccaaggaaatgaaaggttaatgtttagggtgatgttcaatacctttttcatccagtctcacattttaccgttgaactttgaggacatcgatgtcccttgggatgccgatcaccagttcacaaagaacttcaaagcagaggtactcttttcagagtttgatgctgagtctgatgcgtcaactgaagtagcacctgattatgattatgattatgactatgataatgatatggatgttgcctctgctgatgagttctttgaagcagaagaaatcttcagtaatgctgaatctcaagatggaaataaggatgcggatactctttctatggtctctacagattatattcgaactccaagtgccgaatgttggaaaaactctccattttccaactttgatctgaatattgacattgatggatcacaagacaataaagccgataacttgggcttgttgttagaaacagtaaatgatggaaagacatgcacatccactgaagccaatattttgctcaacaatgagactgcagttgtgaagtcaacttttaccgctacaatagcatgcacatccactgaagccaatattttgctcaacgatgagactgcagttgtgaagtcaacttttacagctacaatagatggagacacagatagcggcatctcaagttctacctataaagaggatgggtgcatgtttgaaaagggtagttccaagcaggatataaggatgggttccaatcaagacttgagccagattgataatgtattggttaaggaggtgattatattagaaactaatagtactgatgacatacagatgatcaaagaggtcatcatatctgaagttacaactcccaaacaagtggtagaggggaatatgatggaaactgaattagatgaggcagtccacagttcagaaagcactgcactgggagaagacgaggacacaaaacgacctaatacttttttcaaaaaagatgagggacagagtgcacgagatgaatatgctgcttatgacaatggcatagtgattgaacgggaagaaagtcgcaacaaagaaaaatttaccatcacaggcacagattcactagtggctgagcccaaagatttaccacatcttgacagctcaaacacttctttggaactaagttcagccaatgaaaatattgatcagcttcgtgcttgcagtagtaatgtcactgcagagcgaagagcaggaattgacacatcattttccagctccaggagtcagtcttctaatatctcttgtgcgaacattctaccagaagaatctaacttgataataaaccatgcttcaacttctgtgaatgcaaatacagatacaaccgattcatctcgactggtgctaaagaaaaaaccttttctaccattggcgacatctagtcttttttctccatcatctcccagacgcaatctgcttcgtgctgcatccacagatttgtcctttttttctccatcacaaacagaatctaagcagaactccgttacttctacaagtggaaggggtgattcagatacatcttctgtgcttccaccatttcagctctacacatccctgggatcatcatccaaaatgtctctagtacatcctactctgcgaccaataagaacgatttcatctctaccatcattatcatttggcacattcatagagatgtcaatggcttcttcaagatcacccaaacaccaagagcatgttagatctccctcaataccacaagatcaacatcttcacccaccaatgacagaggaaaatgatctacattcaggtagcttaactttgcctgcttccaaccaatatggccctcaaaccccacacccacctccactaccacccccacatgattcttgcacccaaagttattcgagcaccataatatatgaacctgaacaaataagagctgatggatcttgttcctatagtccagattatagacaaagtgttctcaacttaggtgattcctcactaacttcactctctaatagtagtatagctgcaactgaatgtcccttaggagcctctgattttgtagatgaggaagtaacaagtagacctaatatagtaactgccatggatgtcccatttaccaatgaagatacaaattctttgttgcacatgacttgttcttcacctcccaaaacattacaacgtgctgaaccaccaacgctgccgccaccacctttgcctctagtaccaccaccatcacaactaccactgccaactatatgcagtgatagtggatcagttccactggtatactcaaatccgtcttcagattgtccatataaagaaccaacaatgctaccagaacacaaatctgatgttccagctacttctctcgaaggacatgaagcaagtgaagttcaatttctgcaatctgatactgctgtcgaattatctccatcagagcattctgagtataaagttcagcatgtggttggaagcgctgaagatacaatttcaaagcaagtaaattgtgagcagcctttagatcaaacaacattatcaattcatttgaggccatttgaggtggagatatcacaaggtgaaacaattaacggagtcttggcctctataattgatgataaagaacacggaggcattccaattctgcaattgccacaaaagttgcctcattctggagaacatatgaaatctccacctccacctcctcctcctccacaaccaccaccttgtcatgcaacagttataccttctttgtgtttatcttcaaaaccaccttctccaacagaacattacgaaaatccaccttcttcccctccacctttttctagagaatcatgtgttgttctacctccacttccagctccactcttgaatcatccatctcttcctggaaaacatattaatctatatccacctccaccacctccaccaccaactttacatcatatcgcacctgcatctccgtgctcgtaccaaccttctttctatgcagatatagcaacccaacctaccttttcagaggatattgtaatagttccacctccacattcaaaaggggttaatataattccattgccacctcctcctcctagaacaagtgaaactttgtctcaacctcttgatggtgggcaatcaacaggaccagcttctcttcttgaagttactaaagaaaacccaccacctcctctccttccccctgaaggacaaatgggatctccattgtcaactctttgtggagaaattgtgaatattccaatacctccaccttcacttcctggaggacatggagaagttccactatcaactcctcctagaggatgtggggccattccacctccaccaccctttactaaagggataggaggaattacattgccaattggatttcatagtggagacttgtcattcctccaatctaccagagaatctaaaggcccttcatgcttgccacctccacctccacctccacctccacctccaccaccaccactatcttctaatggacacataggtgatctgccaccaccacctacgagtgtatttgtagaggcttcgatccctctgccacctcaaacaggatgtggaggggatccaccaccgccaccacctactggaggacatgtagggcctccaccaccaccgccacctctaggggaatgtgcatgggatcttcaacctcccaaagcatgtgtaagggctcccccgccacctccacctcctggaggatatgcagaagttctaatgccaccaccacctcccagaggatatgtaggggctccagcaccacctccacctcctggaggatatgcaggagctccaccaccaccgccacctcctggaggatatgcaggagctccaccaccaccgccacctcctggaggatatgcaggagctccaccaccaccgccacctcctggaggatatgcaggagctccaccaccaccgccaccccctggaggatatgcaggagctccaccacccccgccttcatatggaggaattggaggagttcctcctcctccaccaccctttggaggactaggaggaactccaccgcctccacctccagcagggtttcgaggtggagctccatcaccacctcctcctcctggaggtcatggaggtccaccaccacctcctcctagaggacatggaagtggtccccctccccctcccggtgcaccttctcctccaatgcctcctggaatgtctggtggcccccctcctcctccaggtggaagagggatgcctactccacctggcggaaggggacatggccttgctcgaacgttaggcccgacattacaaagtgcaatgcgaaagtcatccctaaaaccactacattgggtcaaagtaacaagagcaatgcaaggaagcttatgggcggagctacaaaaacaagtggaagctaatagccatgctgaattcgatgtaaatgaactagagtctctgtttaccattgctccaaaggcaaaagctggctcaaaatcagaaggccgtggaaaatcccttggaacaaaatctgataaagttcaactgatcgatctaagacgggccaataacacagagatcatgttgacaaaaatcaaaatgccgctccctgatatgatgagtgctgctctagctttggacgattcagttttggatgctgaccagattgaaaatctaataaaattttgcccaacaaaagaggagatggaacttctaaagaactacagtggggacaaggaagctcttggcaagtgtgagcatttctttctagagttaatgaaggtgccaagggttgaatctaagcttaagatatttgctttcaagattcagtttcagtctcagattagggatgtcagaaagaatttgcagactgtatcatctgcttgtgaggagctcagaagctctgagaagttgaaggttatcatgaagaacattctgttaattgggaatacattgaatcaaggcacaccaagaggccaggctgttggttttcgcttggacagcctcctaaaacttatagagacccgtgccactagtggtagaatgacattaatgcattttctatgtaagtcccttgcagagaagtcaccagaagtaatggattttcatgaggatcttgtccacttggaagcttcttcaaagttgcaactaaaagcattggcggaggagcagctggcagtggtaaaggggctggagaaagttgaacaggagctaactgcttcagaaagtgatgggccggtttctgatgttttccgtaagactttaaaggagttcattgattgttcgagtgctgatgtatgctccttgtcagcattctattctgaagtaggtaaaagcgcagatgcacttgctctttattttggagaagaccctgctaaatttccttttgagcaaggtaatattcatgcctatagacccatggaaatggtttaa

SEQ ID NO: 35005 - DNA, 2080 bp, Zea Mays
cttctccggatccttagtctggcggggccagcaatatgagtgggatataatcgaagcaacgccttcgccgccgcaccagccaccctccagctctagcctggcggccaggccgccgcccttgtacccgacggcacctacaatgcttgcaacgtctcatccatataaaatagtgttcggtagggagtctagtagtagtagatggtaccgagacgagatgaatttcaggcagattttttctattcatttcagctccaatcgcttcgcttgcttcgtctccagtacctgccttgccacgccagtcgccagctcagacctcgctcctctgccctgctcctccgtaaactaaagaggccctcccgcggtcccgcccggtggcctctcgccgtgctcatccgttcggtaccgggtcagtgccgccgtcagtaggtggtcagtcaatcatccgctcgtccattccagctctctcctgctcttgaccggccaaccatccatccatccatcggcgggcgcgcagccagccaagcggtcccgccataaaggtggcgagcgcgagtatgctgttgcattgctgctgattgctccgtctcctccgcctctcgctcgctctctgaggtgaggaagaagaagcggagaggttacgggtttgcgggttgcgttgcgtgcgacatggggagagcggcggggctggcgcgcgacggtgtgacgacagcggggcgggcgacgacgacgagggtcatgcgggctgccgtgtccgcgttcttcgccgggtaccaccgcttcacctccgtggcggcgctgctggcgctgccgttctcggcggcggtgctggcgtcggaggcgatggcgccgtcgtcgtgggcgctgcgcgctgtggcggcgcggctccgctccgtgttcgcggccgcggggttcccgccctcccccttcttcgcgctgctcgaggccaagctgtcgcagaccgtcttcacgttcgcggccacgctgccgttcgcgctcaccttcctgctgctggccaaggcctgcgtcgccgccatgctccgcctccgggacgacgacgcgtcggagtcgccgccgcctcggcggcggcgggtcgccgtggccgcgctcccgccgtgcgcggccgtggcgcgcgcgtacccggccgtcgtcgccacgcacctcctcaacgccttcctcatgctctccgccaacgccgcggtgttctcgctgctgctgctggctttcggcgccgccgacctgctgggtctcacctcccacgtctggacgctcgcgctctcggccgcgggcgccatcgtctactcgctcgtcgtcggcgtcgccaccgtggtctgcaacctcgccatcgtcgtggccgccacggagcccgggtgcgcgggccacgccgcggtgctcagggcctgcgtcgcgatccggggccgggtgtccacggcgctggcgctggcgctgcccaccaacctcggcatggcggcggccgaggcgctgttcggactccgcgtcgtcgcgcagcgtcggagggacgggaggctcgcgccgggtgtcgccggcgaggccttctcgatcgcctacatccacgcgatctgcgtcgtgctggagatcatcgtcacctgcatgttctacaggagctgcaagaggagtgaagccgacgagctcagagagctggagccagaggagaagggagacctccaggcttgatgccctctcaccttcagcttcagtctggtgcgtgcacaatacagatagtagcatcatcatagattgtgtttctgatcagaacaacaggatcagatcatagggtacagagctgatacaaagaaacatagtggtaagccgacataaatttctgcaaaatgtttctttttttatgcaaagcaaatggtaaacattgagttcaaataaacggttatttgtacagaaagaaacattctcttgaactgttcttgtgtgacactggtagcttgcaccagcacctcgaagaaggaattgcagttcagagcgtataaactcaacctcctcatcaatctactagccagatacattgaaaaatgctcttgtggtccgagacgagacaccgataccttgg

SEQ ID NO: 35006 - DNA, 1334 bp, Zea Mays
aaaggtcaaccgaaaccctacctttttcttaaagtggcggctcttgcacactcaagtataggcagcttttttctcgagtgtggcggcgcgtgagacggaagcgccgcacatccatcgtcgccttcttccttgcctcaacaactcatctgtgtcatcagtctctccctcggcacgagacttcgggtccactcaccatcaacacgcaacttctatcaccttcgtctcaacttcaagatccactctcgccatgccaacatcccggggtacaagggctatatggtgttacacatatgagaaaggacttgtggacatactgaaagagcatgctgatatcccaatgtacaaagcacaaaatggttggacaacagagggttgggtaaatattaccaaacagttcaatgaaacatttcctttggcttattttacaaaacaacaaatacaaaataaggaaaaggagttgaaagggaactataagataatacaagatgtcttgaaaattaatggtgttagttggaataagtcattaggcatgattattgctgaaccaaagatttggcatgaagtgatcaaggggaatgccaaagttagcaagttcaaaaagaagccatttcttctatatgaatacatgtcatcattatatgcagaaatgaaatctgcaccatccaatctcaatcaagaggaacaagaagacgctagcggaaaaaaacgcaagcaaactcaaacgacggctaaacttgtcgaactcttagagtttagaaagaaccatatagagaaaagtatgaaagagaagaaggaaaaagaagatgattattgtgtggagaagtgcattgatgttgtggatagcatgaaagatctaactgatgagcagaaggcagatgctaacgagctcttccaatctgagatgaatcgacggatatttatgaagactaaaaatctaaatgttcgactaatttggttaaagaaaaaaatttcacagaaccagtgagagataaggaacagaaagaagagaaggaacacatgtgggatggaaggcctttggcaaataaaacatatgcgatatgccttcattgctaattaatgaatttcttatcatttaggatcaattatatgcattaacatttaattgtctaatttcatattttgggtccgaagatggatattttcgtctaaaatttagaaacaatcatgtactttgctatgtgtggccacacacataatacttggtgtcattattgatcctatagacataaattatgagcattatttagtatctcaatctatggattgatagaacacaattgctatttttaatgacttatttggatttcccacta

SEQ ID NO: 35007 - DNA, 1210 bp, Zea Mays
ctttacttgtagtaaaacccaaccggtttacatgatcgattcctcctattctctactggggtgagcattggtattctatggtcttctctgtcaaacaagaaggaatttgatacgctgaagggcacactaaaacgaatggaaaacttagttcaggatttacaagatgaactggagatgaaagagggtttaactgtgaaggaattgcctaatgaaacttctagcgaacatgatgatgataatagcaaaccacaagtagttgattcagaggcaatgagcaaaattgaagcggagcttgaagctgagcttgcaagactggaactgaatatcacttcgaaacgtttggaagaagaaacatctgacttcaatgaggctgacaaggagttcattggtgacattgtttgtggggaactgaaagctgatatggtcccccgggacgtcacagattacagcagtgaatgtgactatggcagggacagcagggaaagttccccagactacacatgtggagcaaactatcccgtctcacctagagatctcagcattcgtctccacaaggtgatccaacgtaggcttgaagaccgagtcaaggagcttgaatcatcaattgcccacagacagaagcaggcgcaactacagatgatggtgactgatgaaatattctctgaaccgatatgctcaaacagtgaatcaggttcttcaggacgaggaagtcccattttcatacaagaaattagctccttggcagaaccatattgtctaaacctatctggagacgcgcttgaagcttatgacgaagcttacgaagaattcatgagaattgcggactccccttgcactacaagtacaaatgggaaggcacaggcaaccgaagattacctggtagaccgtggtttaatctggggaatggaggacagctctacgaagctgaaagaagtacccacttgggagagagttctaaagagcacagatcctaacagggatcaagagagcgatagagatgagtcggacgacgaagacgacgactgtaaagtgctgattcagcagattgtagagagaactaaacaaggttcccctgtacttgttaacgctcaaaaacttctgttttctgtggatcaataggccacttcactatacaccatttatttttgagatatagcatgtagtgtcgaattattattgagaaaggaaaattattaattgttttgcggct

SEQ ID NO: 35008 - DNA, 1237 bp, Zea Mays
ctgcattccttgggcatttcgacaccttcattttcattcgtatttctacaaggtttacatgatcgattcctcctattctctactggggtgagcattggtattctatggtcttctctgtcaaacaagaaggaatttgatacgctgaagggcacactaaaacgaatggaaaacttagttcaggatttacaagatgaactggagatgaaagagggtttaactgtgaaggaattgcctaatgaaacttctagcgaacatgatgatgataatagcaaaccacaagtagttgattcagaggcaatgagcaaaattgaagcggagcttgaagctgagcttgcaagactggaactgaatatcacttcgaaacgtttggaagaagaaacatctgacttcaatgaggctgacaaggagttcattggtgacattgtttgtggggaactgaaagctgatatggtcccccgggacgtcacagattacagcagtgaatgtgactatggcagggacagcagggaaagttccccagactacacatgtggagcaaactatcccgtctcacctagagatctcagcattcgtctccacaaggtgatccaacgtaggcttgaagaccgagtcaaggagcttgaatcatcaattgcccacagacagaagcaggcgcaactacagatgatggtgactgatgaaatattctctgaaccgatatgctcaaacagtgaatcaggttcttcaggacgaggaagtcccattttcatacaagaaattagctccttggcagaaccatattgtctaaacctatctggagacgcgcttgaagcttatgacgaagcttacgaagaattcatgagaattgcggactccccttgcactacaagtacaaatgggaaggcacaggcaaccgaagattacctggtagaccgtggtttaatctggggaatggaggacagctctacgaagctgaaagaagtacccacttgggagagagttctaaagagcacagatcctaacagggatcaagagagcgatagagatgagtcggacgacgaagacgacgactgtaaagtgctgattcagcagattgtagagagaactaaacaaggttcccctgtacttgttaacgctcaaaaacttctgttttctgtggatcaataggccacttcactatacaccatttatttttgagatatagcatgtagtgtcgaattattattgagaaaggaaaattattaattgttttgcggct

SEQ ID NO: 35009 - DNA, 446 bp, Zea Mays
acagccttttatataactcgccatcggcgccgcccaccacaggagaagagcgcaagaaggggagggcgatcggagagcagggctaagctggccagctacgtcggtggcaagaaggggagggcgatcggagagcagcgcaagaaggtcaccatgttcctgtactctgtactctgagttctacgacgagacgaactggaccgaaaacaacgcatgataacacatatggtgctgatagtggtgggacccaaccaaaatcccaaagcttacttttgaagaattcaaggtttgttatcaatctggattcaaattccctatgcaacacacattagactctacggtgaacactggttgaagcaatattgacttttgattcaaggatgaagtatcggtttaccgttggatcttaaaatatatcttgcagtattatccattataacagactcaag

SEQ ID NO: 35010 - DNA, 1696 bp, Zea Mays
ccagccccgcctcagagcctctgcgtgccgccgctccaggccgccgcgctccaggccgtcctccctcctgcgccgcccgtccggcgctgccagcccctccagccccgcctctgctgtcccactgcggcaggactacagagtacagagactgactgtcccactgtttggtatttgacttgataattgcctgaaattatgatatattgaaatttccctatgttgtttaaaactacgtttaaactttgtttaaaccgtttaaaagttaaaactcacccatgagcgtttcaacgttttgtcgttttaataaccttgatgcaatgcaatctgtactctcttgaaaagaacgcgcaaggacacataaacatgcatcattattgctcaaaagtagttcgattgctaagggcatgtacaacgacgtgaacggtatttagggggctaattgaaaatattacaaaagatgggctcctcgcgaagaacccgtctcttcacgattctccatagactttatctcttaactgcatttataatataggggcttagggttgtatcatgtaatcatttagctgtcacttgtcacttgtacttggaaaatcgatccatggactcaagtttgtacatgccctaataataccgagcagagcaagcctacctaaaagatactaagatttaacacccccaattttctaccatccaagactaccgaaagtggataaagctaaaatagatgcatagatatctttgtaagagcagaagagctccgtatcattgccctacatgtgaaaaaagaaaaccaacacaaatatacactaacacaggcacacagccagctagaatcgtcagattgttgtaccaatttaatgcacagaaccagtgttattaaaactaagtttaaatgtcaaaacactaattagaggttggaactctgaaacattaaagaatatggtccaaaacgacgttttacaacgtttaaatccacgttttggcgtactaaactgtaaaactcagtgtttcatgcgttttagaccattagctagttttgggtccagttcggtccagtctccacatgcttgccctactcctctgccctgaagcccgatggctagcagcacaccactctgctctctgtcgccgccgcctgaaggtgatgttgctgttgtccgcgcgtaccgactctccctccctctgcgccgagtgcgccctctccttccacagcgtgtgcagtcgcttctcagcaccgtgtgtcgcagtcggcgccatccgtaccgctcctctccctccatgctgccctctccctccacgtatttgtttactagcaaccagtggccagcactcagcagtcgactcctctcaacctttctacctctgcttttgtaagcctctagcctctctgttttggtatttaacttcatgttattgtctaaaattataatctattgatatttttgtatgttgtttaaaactacatttaaacttcgtttaaacgtttaaaagtcaaaacttcacccatgagtgtttaaacattttgtcgttttaataaccttgcatagaaccaaaggattgtcaactaaatggttttcgttcgcatgggcctctatagcaattgatatccagggccattgagttaccacaagatgaatgtttacaacgtacctctagattcaggaagctgaagttccacaattacaccatgatgcaa

SEQ ID NO: 35011 - DNA, 614 bp, Zea Mays
tgcccctcattcgatcgacggcgcttaggccatcaccttccctgcgatgtcagccaaggcggcaccgcccaacccaacgacagggcattgccagagttgcacggttttgcaaatccaatgccctacttccaaacgaacatgttctacatgaagccaagaccatggtggacatatgggtgaagttatctccgagaatagctcatcggggtgcacggtttagggtggaatgtggattacgacgacgtcaagattttggtgagcaattccatgcacgcgacttcaccaaggggaacgccatgaggtgcaataccaaggggtgaaggtggcgaaacgatctagaggattcttactagcttactgcgtggagcacagttggttgtctcggcgatggtgtgggggcagatcagtgatagagtttcttcatcggcggagaattacttgccgcttgagaccacaacccgcctgccgctcccacaaacagctccactaatccttggtgatcactccgacagtctaggtccctcaaatcaccggtgtaatcaaggccctcgagcggtgaccctactcatagctctcgctcacgacgatggtaatcagcggtggtgtaaactttg

SEQ ID NO: 35012 - DNA, 1649 bp, Zea Mays
agagagagtatctgatattctgatcatggccaccaccacatctccagttctcctcggtcctcgccgcggcgccggcatgtctctcgctctccaagccctccgccgcagccgccccctcgtcgggttcctcccccactcctcccctctctccacctcagcctcacctcccgacgcccacgagctcctccgcattgaccgcatcctaaccaaccccgccgccggcggcggcggcagcctaccctcgcaatcccaacaacacccacgcgccgccaccgatctacaccagctcctccgccgcgccgccggcctcaccgcagcggagtccgcctccctcctccgccgcctccctggcgcccagccccacccccgcctgggccgcctcctccaggagctcgcgggcctcggcctccctaggggcgaagtcaaggccgccctggcgtccgaccaggaaggtctcctctccatggaccccggcgaaccgtcccggctcctcgacctcctgcgcgacctccggtgccgggaggcggtgagggaccggatcctcgctcacggcgctctccgcgccgccgtcgccgcccggcggcgggtggagctcctccacgcgcgcgggctgtcccgccacgacgccctgcgtgtgctcgccgccgagccgcggacgatgctgtactcgccggaggacgtggagaggaagctggagttcttggtggaaacaatggggtttgaggtcggctggctagtgcagtacccggagttcctgggcgtgaacctggacaggtggatcatcccgcggcacaatgtggtggagcacctgaaatccgtcggcgggctcggagaccccgttgaaatgaagcactatgtgaggctcacccgcaggaggttttacaacatgtttgtgaagccgtaccctgagtgtgagaggatatttgggggcctggtcagggagagggacgagatggcgaggcggcgacatccgaccggcctatggaaactgtttaagccagcgaagcatgagagaactcaggaggatgtgcagaacatgaagtctctcgtgggatcactgaaatgagtaatgttatgcccaagggaacattggtggtctcaaacaacagcaaatgctgaaccaatgatgtattgtgatctttcgcttatgcacggataccccagactagttctgataaccaagaaggaccatttgagaatttcatgtttgaggtgacatgctagggcgcgaagaggtgtgggtggtgttgtgaaaccataactgttcatgaagtgcttgtgtggtgacagaagtggcagttattctgaacggacatagatcatgttcaatattctcaaaaatatcttgctaaggcatttcaccgcagattgcaagattaaaatttgagcaattctagtattctgatcagcatttctttcactggagagtagcagataacaagttcaggaaatctggcagctgatggaatggttacctcaagatttcgatgggatggatagagcagcagcagaagctcattgcatattttcttttgagaaatttatgatgatcagaagattctgctcagaagatgagcgtgctaatttaatacagaaatgttttcttgtgtgtacatcgtggcactggaggtttctcttggagatttgat

SEQ ID NO: 35013 - DNA, 436 bp, Zea Mays
caaaccccccgtaggcgctgcatccacgttcacgtcgcttgaggaggtgagcagtcggatctggctaggtgcgcagtcgcgcgccatttgtttttttctcgtgagcgccctctgccatcccgcctcctcctggtaacgcgctgctcaagattactggatctggtgagtcaccgttcagagttgggttcatgttcctggggcgcttcttcttacgttcgcaggcggagcgtccgtggaggaggcggcggggtattgatggaagtggtacccttgatggacagacactggttccccttggctagacagatttcaaactgaatatgaggttgtctctatcagcagcaagggaagaaaacttgacggttaatcctggaagatggcgagtgctctatcttggagacttggaagatggcgaatcttggaagaacatcaaaag

SEQ ID NO: 35014 - DNA, 2286 bp, Zea Mays
ctcatcagggaggcttgtctctgtgggctggttctaagcgtaagcgggccggccagcacttatgccgccgccaatcccttcccgtgctccgcaaccgctgagtgagaagaagagatggccggcaagggcgatggcccggctatcggcatcgatctcggcacgacgtactcttgcgtcggcgtgtggcagcacgaccgcgtcgagatcattgccaacgaccagggtaaccgcaccacgccctcgtacgtcgccttcaccgactccgagcgcctcatcggagatgcggccaagaaccaggtcgccatgaaccccatcaacaccgtctttgatgccaagcgtctcatcggcaggaggttcagtgatgcgtctgtccagagtgatatcaagttgtggcccttcaaggtcatttctgggcctggtgagaagccaatgattgttgtccagcacaagggtgaggagaagcagtttgcagctgaagagatctcctctatggttcttatcaagatgcgtgagattgctgaagcttaccttggtagcacgatcaagaatgctgtggtcacagtccctgcctacttcaatgactcacagaggcaggccacaaaggatgctggggtgattgctggccttaatgtgctgcgtatcatcaacgagccaacagctgcagctatcgcctatggtcttgacaagaaggctaccagtgtcggtgagaagaatgtcctcatctttgatcttggaggtggtacctttgatgtctccctcctcaccattgaggaaggaatctttgaggtcaaggccacagctggtgacacccatcttggtggtgaggactttgacaacaggatggtcaaccacttcgtccaggagttcaagaggaagaacaagaaggatatcactggcaaccccagggctctccggaggctgaggaccgcttgtgagagggcgaagaggactctgtcttccactgcccagaccacgattgagattgactcgctgtatgagggcatcgacttctactccaccatcacccgtgccaggtttgaggagctcaacatggacctgttcaggaagtgcatggagcctgttgagaagtgcctgagggatgccaagatgctccaggacttcttcaacggcaaggagctgtgcaagaacatcaaccccgatgaggctgtcgcctatggtgctgctgtccaggctgccatcctgagcggtgagggcaatgagaaggtgcaggacctgcttctgctggacgtcacccctctgtccctgggtctggagactgctggaggagttatgacagtgctgatcccgaggaacaccaccatccccaccaagaaggagcaggtattctccacctactcggacaaccagcccggtgtcctgatccaggtctacgagggtgagaggacccggacacgcgacaacaacctgctgggcaagttcgagctctccggcatcccccctgcaccccgtggtgtgccacagatcaccgtgtgctttgacatcgacgccaacggcatcctgaacgtgtctgccgaggacaagacaacggggcagaagaacaagatcacaatcaccaacgacaagggccgtctctccaaggaggagatcgagaagatggttcaggacgctgagaagtacaagtctgaggatgaggagcacaagaagaaggtggaggccaagaactcgctggagaactactcctacaacatgcgcaacacgatcaaggacgagaagattgcgtccaagctgccggccgatgacaagaagaagatcgaggacgccatcgacgcggccatcagctggctggacgccaaccagctcgccgaggcggacgagttcgaggacaagatgaaggagctggagagcctctgcaaccccatcatcgccaagatgtaccagggcgcgggtgaagacatgggcggcgctggcggcatggacgaggacgcccctgccggcagcggcggccctggccccaagatcgaggaggtggactaagcggtttgttgtcagtcttgagtgtgctgcagttgctggctggcccagttgctgccgagagttatcgtcagttggtgcggtgtgtccgcttaaactttatttgtggttggttggtacttttgtggtggttatttttttggacctcgtgatagtcggtcggttcaatgttatcgcggctactggcaaaccttaagtgatacggtattcttcttttcgactaaaatagaataaaacatagagactaaaacttagtctctagaaaccaaactgttacaagatctaagcagttac

SEQ ID NO: 35015 - DNA, 2356 bp, Zea Mays
ctcatcagggaggcttgtctctgtgggctggttctaagcgtaagcgggccggccagcacttatgccgccgccaatcccttcccgtgctccgcaaccgctgagtgagaagaagagatggccggcaagggcgatggcccggctatcggcatcgatctcggcacgacgtactcttgcgtcggcgtgtggcagcacgaccgcgtcgagatcattgccaacgaccagggtaaccgcaccacgccctcgtacgtcgccttcaccgactccgagcgcctcatcggagatgcggccaagaaccaggtcgccatgaaccccatcaacaccgtctttgatgccaagcgtctcatcggcaggaggttcagtgatgcgtctgtccagagtgatatcaagttgtggcccttcaaggtcatttctgggcctggtgagaagccaatgattgttgtccagcacaagggtgaggagaagcagtttgcagctgaagagatctcctctatggttcttatcaagatgcgtgagattgctgaagcttaccttggtagcacgatcaagaatgctgtggtcacagtccctgcctacttcaatgactcacagaggcaggccacaaaggatgctggggtgattgctggccttaatgtgctgcgtatcatcaacgagccaacagctgcagctatcgcctatggtcttgacaagaaggctaccagtgtcggtgagaagaatgtcctcatctttgatcttggaggtggtacctttgatgtctccctcctcaccattgaggaaggaatctttgaggtcaaggccacagctggtgacacccatcttggtggtgaggactttgacaacaggatggtcaaccacttcgtccaggagttcaagaggaagaacaagaaggatatcactggcaaccccagggctctccggaggctgaggaccgcttgtgagagggcgaagaggactctgtcttccactgcccagaccacgattgagattgactcgctgtatgagggcatcgacttctactccaccatcacccgtgccaggtttgaggagctcaacatggacctgttcaggaagtgcatggagcctgttgagaagtgcctgagggatgccaagatgctccaggacttcttcaacggcaaggagctgtgcaagaacatcaaccccgatgaggctgtcgcctatggtgctgctgtccaggctgccatcctgagcggtgagggcaatgagaaggtgcaggacctgcttctgctggacgtcacccctctgtccctgggtctggagactgctggaggagttatgacagtgctgatcccgaggaacaccaccatccccaccaagaaggagcaggtattctccacctactcggacaaccagcccggtgtcctgatccaggtctacgagggtgagaggacccggacacgcgacaacaacctgctgggcaagttcgagctctccggcatcccccctgcaccccgtggtgtgccacagatcaccgtgtgctttgacatcgacgccaacggcatcctgaacgtgtctgccgaggacaagacaacggggcagaagaacaagatcacaatcaccaacgacaagggccgtctctccaaggaggagatcgagaagatggttcaggacgacgagaagattgcgtccaagctgccggccgatgacaagaagaagatcgaggacgccatcgacgcggccatcagctggctggacgccaaccagctcgccgaggcggacgagttcgaggacaagatgaaggagctggagagcctctgcaaccccatcatcgccaagatgtaccagggcgcgggtgaagacatgggcggcgctggcggcatggacgaggacgcccctgccggcagcggcggccctggccccaagatcgaggaggtggactaagcggtttgttgtcagtcttgagtgtgctgcagttgctggctggcccagttgctgccgagagttatcgtcagttggtgcggtgtgtccgcttaaactttatttgtggttggttggtacttttgtggtggttatttttttggacctcgtgatagtcggtcggttcaatgttatcgcggctactggcaaaccttaagtgatacggtattcttcttttcggtatttgtttctgcatactgctggctcgtattttgtttttgagcttgcgattctttgttaatttcaaccttttgccagttaggaggccattctcatttgattgtttaccacaatttttaggctgtcatgttatgtggcatttaatgaaattgataaactcccacccagaatagctagcagcttttgttgggtcctggtttttcttgtcctcgaagagttttgggagcaaaacggtttctttata

SEQ ID NO: 35016 - DNA, 2799 bp, Zea Mays
cttactttgatgtcatttagccttttataagaggtagtcattttagctctatattatttgcagtgcacaaagattcctaacatacacgaggacttgagacaactatcttatgggacggtgacttgcagaacctttggtcgatacgatgtgaatggcttccgttttcgttcagatcaatttgaaatgcctcgtcctcgtgcaaccacacataacactggagttgtgactagggcattcgatgcactccgaagagaaactaattattatggcatcattcaaaacatcctagagtttatttttgtagggaacaaaactttgaaagtagtattctttctatgtgattggtttgacaacaataatgggattagacaaagtcaatatggcataactgaagtaaagcacaaggaacgacttcgaggccatgataattttatccttgcacaccagtgcgagcaagtctactatatgtcgtacccaaatccgaagtttaaagcatggtgagtagttcacaaggtgaaccctagggaacgtttacatactccttgcactgttggttatcaattcgaagacgaacaggtcgatgaggtttatcaagaagaagaattgccagccacttttattgtcgatgagggtgttgcactcaactcactagtcggagactgtaacaatatcactgttgatgagtgtgttgcactgaaacgaaaacgaaatccaaggaacaaaaaaccacattgcgagctttggatcgaagaagactccttgatcatgattccgatgaattttgatgtgtaatgcatattttaactttatgtgatgtattatttgttttttattaattatatttaattttgtggagttaatacatttaatgtttttctattgaacaggatgagtggttggaaaacaaagcacactgtgagggggtttcttaatgcggctagcaggatagtccctagtgcacgttccctttgcaagggagttcttctagccagagcagacaggaggcgttgttgagacacacccggccaaaactgcgtgatgacctatcgctctacaaaggagtaccgatttaaatgtttatgtaattgatcttatttgtcattcacttatatataaatgtgtcttacatgtctctatttcatgtccatgggaagaggaggacgaggaggaggaggtgcaacaccatgaggaagaggttgcagccatagatgtcggggtgcagggccatgaggaggaggaggtcgcagacatagatgatgaggcaaatgatgataccattgaggctcctgcctttcgacagaggggcactcggaagggccactttatcctacccccgtcagcgcttgcacaatcagaagccaatgggatgacacgtctttcgatgggcatggtcaccatagacagattaatcaagttttaggtaacctctgtcgtctatataatccaggaattgtgactgactcgaaaggtgtagtggttccttgcactagctggtcgcacttcgcactagctccacatgctacatatggaaaagcttagggcgccgtcaagcgcgacttttgggtaagagtattgtttgaaactaacattttatgatttgtttcatactaactttattttcgatgttggatagagacgctatcgtgtggaacctaaggctcaggagcatgcagaccgagtattagagaaaaatgcgaagaaggtgtgcaagtatgcattttccaatgctcgtctacaggttgtgaacgcgtacatgaagcgccgagggcattctatcaacaacttttgacaatattcggatgtctacttgactgtggaccagtacatggaggtaaaaatctaatttagcagctcattctggtgttaatgtaattttgtgctaacgcttagatgcaggtaactcttccatggatggaacaccggtcacaggcttacaaggctttgtgtgaggtatgggcttcgccagagtggattgagaagtcaaacaggaatcaacataggcagcaccatcagtaggacggggacattgatgaggtcgtagtcaaccatacctatggggctgatgaacacattaggttggcgaagcgaatggtgagtatgtagtattctattttactcaaaaatggaatcggtttaaactgatatatttgcaggaggctcaaactggagttgtcctaagcctaatcgatgtttataggcgagggcatagagcgaaaaacaatgaaatctccgatgagctatgtagtcaagcgacagttgagtgtatggttagttgttgttagtattaatgttttcttgccatatagctatacattacatgtgtgctgaaccttcgtatggagaagactataatttgcgatgagcacttaccatcgacgctgaagttgtgcattatactggaggaaagacccatggacggtattaacttgtgaatttttttcaataatattgaaactatgaccgaatagctaattttcttgtttttcaagatattctatgtttaccggtgtgatcgattcaacgaagttgcggtctcgtggtggctcttcgtcacagggggttgtggtagcagccgtagtcggcgctcgagcacggaggacgctatgagggagaagcaagaaaggttttgtgaagagctgcgacaacaacaaatgacattcctcctacaacaatcagagtacatggctgcttacaacgcacaagcgcaacaagcaatgaatgtgagtgtcttatttattctcaacacggtcgtatatttgtcctataactaacatattgtatttgcaacagtcttggttt

SEQ ID NO: 35017 - DNA, 4836 bp, Zea Mays
gtaagtggcagagtcaatatgtcgcttgacgttactcaagttctcttaagtgcacaatctgctgatggcgcaattaggaagcatgctgaagaaagcctcatgcaattccaggagcagaacctccctgggttcttgctctccctctcaagcgagatggccagtgaagagaaacctgaggagagccgcaggttagctggcttgattctgaagaatgcactggatgcaaaggagcagcacaggaagaatgaacttttccagagatggctggcactcgatactggtgccaaggcacatattaaaggattgttgttgcaaacgctcacatcttctgtcgcaagtgccagatccactgcttcccaagttattgccaaggttgccggtattgagattccacagaagcaatggccagagcttatagggtcattgctcgcaaacatacatcaggttcagccaaatgtcaagcaagcaacacttgagacgcttggctatttatgtgaggaagtttctccagatgctgttgagcaagatcaagtcaataaaatacttacagctgttgttcagggtatgaatgcttctgaggcaaactctgatgtgaggcttgcagctacacgggcattgtataatgctttgggctttgctcaggttaacttctcaaatgacatggagcgtgactatatcatgagagtagtttgtgaagcgacacagtctccagaggtgaagataaggcaggccgcctttgagtgtttggtggctatctcgtctacttattatgataagctggcaacagacatgcaggatatatttaatataactgcaaaagctgtgaggggagatgaggagtcagttgcactccaggctattgaattctggagttccatatgcgatgaggaaattgatattctggatgagtacagcagtgaatttacagctgattccgatgttccttgctactactttatcaagcaggctcttcctgccttggtgcctatgttgttggaaactctcctcaagcaagaggaagaccaagacttggatgaaggtgcttggaatcttgcaatggctgggggaacttgtttgggcctggtggcaaggaccgttggtgatgacattgttcctcttgtaatgccttttgtggaggagaacataaccaagtctgagtggagacaaagagaggctgcaacatatgcctttggctctatcttggagggcccatcagctgataaactggctcctcttgttaatgttgcattgggcttcatgctgtctgcactgatgaaggatccaagcaaccatgtgaaggacacaactgcttggacccttgggagaatctttgagttccttcatggttcagcgcttgaaactcctcctatcatcacaggtgagaattgtcagcaaatacttactgtgctgcttcacagcatgaaggatgtcccaaatgtggctgaaaaggcatgtggagccctatatttccttgcacaaggctatgttgatgctggatctgcatcaccattatcccctttctttcaagatatcgttcagaacctgcttatggtcactcacagggacgatgctggagaatctcggttgcgaacagcagcatatgagaccctaaatgaagttgtcaggtgctccactgaggagacggcccctattgttatgcagttagtacctgtgatcatggtggagctccatcagacactggaagctgaaaagctgtcaactgatgagagggagaagaggagcgaactgcagggcctcctttgtggttgcttgcaggtcataatccaaaagttaggggggatggagtcaactaagtactctttcttgcagtatgctgatcagatgatggatctgtttttgaaagttttcgcatgtcgaaatgccacagtacacgaagaagctatgcttgctattggtgcattggcatatgcagctggcccaaactttgcaaagtacatgacacagttttatcagtatttggagatgggacttcagaactttgaggagtatcaggtgtgtgccattaccgtgggtgttgttggtgacctctgcagagcactggaagacaaaattttacccttctgcgatggcatcatgacccagctcctgaaggacctgtccagtaaccagttgcacagatctgtgaaaccaccgatattttcgtgctttggtgatatagcactggcaattggggaggactttgagaagtatttgatctatgcgatgcctatgctgcaaagtgctgctgatttgtcggcccataccactgcaactgatgatgagatgctcgactacaccaatcagctaagaaatggaatcttggaagcctactctggtatcctgcaaggatttaagagttcacctaagacacaactgctgatgccattcgctccgcatattattcagttccttgatgctctgtacaatgggaaggatatggatgatactgtgatgaagactgcaataggtgtcttgggagatctggctgacacattaggtgtccatgctggccctttgatcaatcaatccacctcaagccaggcatttttagaggaatgcttggcatcagacgatcctttggtgaaagaatctgccgattgggcgaggatagcagtcagccgtgcagtttcgggttgatgccacaacctgctcttcggtgaagtccaacatctttacagcagagtcggagggtccccactaactcatgcatcagtacatgtgtcaacccgcgccccgcttcggcgggaaaagaagggttcaagttggccgcccactaactttcgccaaatgcatctgcaaccttcatgtcttgttggaggtgagatgaggttctattatcgcatgacatgctcacagattcctgtgcatggcatgcctatgatatgtggcccatcatttcctcccctgtatccatcccatgcatcaaagtttggtcagatggccacgtgggacaaaaggcgcagtttcttgctgctgctccagtaagaaagagcgggctcgaatcgcgttgtcacaggattatttttgtatcgatcagggtggccaagtccatttatgtcagacatatcctccctgctgctgctggtaggttgtgaatttcctagcattcttttccctttggccgcttgcattgtctttgcatttcattcttggtcggtctattttgtaagagttgctttgggggcaaaacatgtgtcctgtccggtctgctaccgcacgctatttgtacaagtcaggtccgtgcgtgcattggtttatttcccggtgttatcggagcagcgcgtgtttgtgcctttttccaccgtgtttttggtaatctacatacatgctgctccatttcggtttatgaggagctgtgtgggtgaagaaacagagatagagttatataggtctttgaagtggttcttgctggtggcagaggcaaattgagttgggtgtggtttatgaattgtaccatggtgtggagaagacccactggtaatatttactgtatttggctggtgctccgccgcagagcatatgagcaaagttaagcgtgagtgctctttttctcagcttcatctaaacatggaatcaatttagtaaaatgtaggtaaagaagtaaaggtagaatgcttcttgttatcttgcttttatctctgcccatatccttacccacccaacttgtctgcttctaatttgctatgaccgtccttttcttctttttttttgaattgataaaaaacggttttcgatcctagcccgtgtaggagtatattgaaaaccgtagccaaatctactactagcattgaagttcttttctctattgacccttctcatggacgctagtcgcatcactaagctcgcctataaaagccaggcagagctgtctgatgttttgtcattgccatcacaattcacaaactcacgcctaataacactacacaaccagctataggggcctaccagctttgtcaagggctgaagaagaccatggccagagccatcgtcctcgccgctcttctcctcgctgccactgccagctccacgacggcgaccacgctgaccatccacaacctctgccctcacccggtgtggcctctggtgacccccaactcaggcctcccttccatctccgacaacaccgcgcgactagaccccaacgcgctgctcaccctctccttcccgcccaccttctgggccggccgggtggccgcgcgcacgggctgcgacgccgccgcgtccggctgctggacgggcgccgcgccgcccgccaccgtcgtgcaggtcaccgtccacgacggcacgaaccaggaccaggccgcctacagcgtcagcctcgccgacggcttcaacgcgcccgtggtggtcagcccgcaggcggccggcggcgggcagtgcccagcgctggggtgccccgtcgacctcaactgcgactgccccccgcagcagcgcgccgccgagggcgccgcgtgccgcggcccgccggagtacttcaagagccggtgcccgctcaccaggaccacgcccaccgacgtggagcccgtgccgcagagctgccgcgcgccgggcgagctcaaggtcgtcttctgccaggcgaccatcgtcacaggcggtgtcgccgctgccgccgaagccgagatggccatccgaaccgtcgtcgccgacagctagactactggccgagacagacgtccagctccactggccccgcttcgttgaatcgttatttgtcacgctttttgctttcgtgtgtttgttagcttaggcttcgacgcgtgtaacccggtggtttttaagcaaaatttcaagtttaaattcgtattacatattttttaataaaagcattacatttct

SEQ ID NO: 35018 - DNA, 5074 bp, Zea Mays
aagataccctccaattcttttacccgcattattgtttgatttcctcgcctcgtccccctctcctcctctctaccttcgccgccgccgccgccgccgccgccacccctgcccttcctgcaccccacgcgcctgcgcgtcgctgatcgggtttccagccgcgcgctacttccggccttcctccgcgtgtactgaggcctcccgctccgctcaggacatacgcagcggggtcgtgactccgcgtccaacgacagtcaatatgtcgcttgacgttactcaagttctcttaagtgcacaatctgctgatggcgcaattaggaagcatgctgaagaaagcctcatgcaattccaggagcagaacctccctgggttcttgctctccctctcaagcgagatggccagtgaagagaaacctgaggagagccgcaggttagctggcttgattctgaagaatgcactggatgcaaaggagcagcacaggaagaatgaacttttccagagatggctggcactcgatactggtgccaaggcacatattaaaggattgttgttgcaaacgctcacatcttctgtcgcaagtgccagatccactgcttcccaagttattgccaaggttgccggtattgagattccacagaagcaatggccagagcttatagggtcattgctcgcaaacatacatcaggttcagccaaatgtcaagcaagcaacacttgagacgcttggctatttatgtgaggaagtttctccagatgctgttgagcaagatcaagtcaataaaatacttacagctgttgttcagggtatgaatgcttctgaggcaaactctgatgtgaggcttgcagctacacgggcattgtataatgctttgggctttgctcaggttaacttctcaaatgacatggagcgtgactatatcatgagagtagtttgtgaagcgacacagtctccagaggtgaagataaggcaggccgcctttgagtgtttggtggctatctcgtctacttattatgataagctggcaacagacatgcaggatatatttaatataactgcaaaagctgtgaggggagatgaggagtcagttgcactccaggctattgaattctggagttccatatgcgatgaggaaattgatattctggatgagtacagcagtgaatttacagctgattccgatgttccttgctactactttatcaagcaggctcttcctgccttggtgcctatgttgttggaaactctcctcaagcaagaggaagaccaagacttggatgaaggtgcttggaatcttgcaatggctgggggaacttgtttgggcctggtggcaaggaccgttggtgatgacattgttcctcttgtaatgccttttgtggaggagaacataaccaagtctgagtggagacaaagagaggctgcaacatatgcctttggctctatcttggagggcccatcagctgataaactggctcctcttgttaatgttgcattgggcttcatgctgtctgcactgatgaaggatccaagcaaccatgtgaaggacacaactgcttggacccttgggagaatctttgagttccttcatggttcagcgcttgaaactcctcctatcatcacaggtgagaattgtcagcaaatacttactgtgctgcttcacagcatgaaggatgtcccaaatgtggctgaaaaggcatgtggagccctatatttccttgcacaaggctatgttgatgctggatctgcatcaccattatcccctttctttcaagatatcgttcagaacctgcttatggtcactcacagggacgatgctggagaatctcggttgcgaacagcagcatatgagaccctaaatgaagttgtcaggtgctccactgaggagacggcccctattgttatgcagttagtacctgtgatcatggtggagctccatcagacactggaagctgaaaagctgtcaactgatgagagggagaagaggagcgaactgcagggcctcctttgtggttgcttgcaggtcataatccaaaagttaggggggatggagtcaactaagtactctttcttgcagtatgctgatcagatgatggatctgtttttgaaagttttcgcatgtcgaaatgccacagtacacgaagaagctatgcttgctattggtgcattggcatatgcagctggcccaaactttgcaaagtacatgacacagttttatcagtatttggagatgggacttcagaactttgaggagtatcaggtgtgtgccattaccgtgggtgttgttggtgacctctgcagagcactggaagacaaaattttacccttctgcgatggcatcatgacccagctcctgaaggacctgtccagtaaccagttgcacagatctgtgaaaccaccgatattttcgtgctttggtgatatagcactggcaattggggaggactttgagaagtatttgatctatgcgatgcctatgctgcaaagtgctgctgatttgtcggcccataccactgcaactgatgatgagatgctcgactacaccaatcagctaagaaatggaatcttggaagcctactctggtatcctgcaaggatttaagagttcacctaagacacaactgctgatgccattcgctccgcatattattcagttccttgatgctctgtacaatgggaaggatatggatgatactgtgatgaagactgcaataggtgtcttgggagatctggctgacacattaggtgtccatgctggccctttgatcaatcaatccacctcaagccaggcatttttagaggaatgcttggcatcagacgatcctttggtgaaagaatctgccgattgggcgaggatagcagtcagccgtgcagtttcgggttgatgccacaacctgctcttcggtgaagtccaacatctttacagcagagtcggagggtccccactaactcatgcatcagtacatgtgtcaacccgcgccccgcttcggcgggaaaagaagggttcaagttggccgcccactaactttcgccaaatgcatctgcaaccttcatgtcttgttggaggtgagatgaggttctattatcgcatgacatgctcacagattcctgtgcatggcatgcctatgatatgtggcccatcatttcctcccctgtatccatcccatgcatcaaagtttggtcagatggccacgtgggacaaaaggcgcagtttcttgctgctgctccagtaagaaagagcgggctcgaatcgcgttgtcacaggattatttttgtatcgatcagggtggccaagtccatttatgtcagacatatcctccctgctgctgctggtaggttgtgaatttcctagcattcttttccctttggccgcttgcattgtctttgcatttcattcttggtcggtctattttgtaagagttgctttgggggcaaaacatgtgtcctgtccggtctgctaccgcacgctatttgtacaagtcaggtccgtgcgtgcattggtttatttcccggtgttatcggagcagcgcgtgtttgtgcctttttccaccgtgtttttggtaatctacatacatgctgctccatttcggtttatgaggagctgtgtgggtgaagaaacagagatagagttatataggtctttgaagtggttcttgctggtggcagaggcaaattgagttgggtgtggtttatgaattgtaccatggtgtggagaagacccactggtaatatttactgtatttggctggtgctccgccgcagagcatatgagcaaagttaagcgtgagtgctctttttctcagcttcatctaaacatggaatcaatttagtaaaatgtaggtaaagaagtaaaggtagaatgcttcttgttatcttgcttttatctctgcccatatccttacccacccaacttgtctgcttctaatttgctatgaccgtccttttcttctttttttttgaattgataaaaaacggttttcgatcctagcccgtgtaggagtatattgaaaaccgtagccaaatctactactagcattgaagttcttttctctattgacccttctcatggacgctagtcgcatcactaagctcgcctataaaagccaggcagagctgtctgatgttttgtcattgccatcacaattcacaaactcacgcctaataacactacacaaccagctataggggcctaccagctttgtcaagggctgaagaagaccatggccagagccatcgtcctcgccgctcttctcctcgctgccactgccagctccacgacggcgaccacgctgaccatccacaacctctgccctcacccggtgtggcctctggtgacccccaactcaggcctcccttccatctccgacaacaccgcgcgactagaccccaacgcgctgctcaccctctccttcccgcccaccttctgggccggccgggtggccgcgcgcacgggctgcgacgccgccgcgtccggctgctggacgggcgccgcgccgcccgccaccgtcgtgcaggtcaccgtccacgacggcacgaaccaggaccaggccgcctacagcgtcagcctcgccgacggcttcaacgcgcccgtggtggtcagcccgcaggcggccggcggcgggcagtgcccagcgctggggtgccccgtcgacctcaactgcgactgccccccgcagcagcgcgccgccgagggcgccgcgtgccgcggcccgccggagtacttcaagagccggtgcccgctcaccaggaccacgcccaccgacgtggagcccgtgccgcagagctgccgcgcgccgggcgagctcaaggtcgtcttctgccaggcgaccatcgtcacaggcggtgtcgccgctgccgccgaagccgagatggccatccgaaccgtcgtcgccgacagctagactactggccgagacagacgtccagctccactggccccgcttcgttgaatcgttatttgtcacgctttttgctttcgtgtgtttgttagcttaggcttcgacgcgtgtaacccggtggtttttaagcaaaatttcaagtttaaattcgtattacatattttttaataaaagcattacatttct

SEQ ID NO: 35019 - DNA, 1294 bp, Zea Mays
gaaattttatatatgaatgttagatgtgtagtttagtagcattctggggtgtttgtggatcccggggtgttacaccttgggtgcaggcatccttgttagctgaagtatcatgttgttttgtttaaaagatcatcacaaaaacatctatgtagtacatataaagtgaagtatagttgcaataggtcagtttgaaattcatcctagatgtcaaggaagcaaaatagacaagcaagcaatctgacactattcatcatgtgacagtgacacttgtatttttttattttaatctcagcataaaagatgaattctaaactaaattgttatggctacacataacttatgtgatgactttttgaaatattgtaacatgctattttagctaaagaggaccatcacacccctggatgccaaaacattggtttaatcataaatttgattccaaaaagatcatattactgattctctactattattgtttggttagagctatgcatacaagtggtggaggcctggtggtaaattgtttatcaagatcgctagagcagttaaatttactcctattatcttctgggataaatttggcacaccattccccttcccaaaacccatgcatgtggtcgtgggtaaaccaattgaagtcaataagattccccatcctacaattgacgaggacctctttgagaagtacaaggcgaaagctggatatcttggccttcatctaagagttctatgacattccataagccagactcaaagttagaattcagcaataacatggctctattactcttccctcaactggggtgtcgaactgcacctcgcaggcactcgggcggtagttgttgcattatggtgatgataataaggctccagcaccgatgccaaaacatgcacgggttggtcaagagtcagagccttttgttgctggcttaacttttttaattattatttttctttgacagtaattacagaagtagggtatctagaagccctcaactgctatgcaatatgctacctgtttttttaatttactggtgaacaatttagatagagagtgaaatagtgatataagaaatttccaggcatttgggctatggtgctggttaccaacaacagtttctggatgtggatggataactctcgggagtggtatccttagactggaaaaaaagaagagaaaagatggcgttaatagaatgatgttgagtatttcagtagaaaaataataattatcctctagggatgagcaaacacataacataaaccattactaaccaagtaaaattacatgaga

SEQ ID NO: 35020 - DNA, 1034 bp, Zea Mays
cttcctttttctgggagatttgaacgcgccttcacttgcttggatctgcgtcgtggggactgcctatgatgtgtccattaatgacgactcttggccaacagaagtgtttgagcttgtcactggagagaaatcgaagacattggaaaggcttgaccctggtgccactgcttcacacacatatgtcctggagaccaaaacacagggcaggttccagggttcaccagctatcattacataccgtgttcccacaaagacagctcttcaggtcccccccaccccactttatctctactgttaaatgtcttcaagtcgtccaattaatcgcgattagtcgtccaagttggtttggaccaatcacgattaatcgccctagtcggtcagcaagaacgaccagcaagtcgtccgacttgaaaacattgctactgtacataatttagtagtgtttcttgtattgtccaacccacggtgtttcgctaaatcaatgctttgtacatgttgaaggaggcatactcaactcccatcttcccactggatattctcgctgagagacctccagagaagaagtttgaatgggtaaaggcttgtgatgaaatacgggtcacttgtgtctgttgtctcttttgttggactgtttatctaccttgtcgcgagcccgtcgaagagcagctcaaaggcaagcaagaagagacgctgatctacttataggtcgcagttgacggtgtagctggtggttttgcctggaggaactcttggtagtttgagctgtgcgaaagcttttaagtttacatttactcaccactccatgaacggcaacgaagtattcatcagttagaaaagtgcacctataattttggttgcttataactttctatttgtcagagatttaactcgaaggacctgtaactaggaaagttaattttgcttggaagaacattttgatatgatcgttgttcctgtgcttcgtgcgtggtgccgtgaaattgagaggaaccatttggtgggacgttttcagctgacaatggtcatgacattgc

SEQ ID NO: 35021 - DNA, 804 bp, Zea Mays
atgccttcctttttctgggagatttgaacgcgccttcacttgcttggatctgcgtcgtggggactgcctatgatgtgtccattaatgacgactcttggccaacagaagtgtttgagcttgtcactggagagaaatcgaagacattggaaaggcttgaccctggtgccactgcttcacacacatatgtcctggagaccaaaacacagggcaggttccagggttcaccagctatcattacataccgtgttcccacaaagacagctcttcaggaggcatactcaactcccatcttcccactggatattctcgctgagagacctccagagaagaagtttgaatgggctaagaggcttgtgatgaaatacgggtcacttgtgtctgttgtctcttttgttggactgtttatctaccttgtcgcgagcccgtcgaagagcagctcaaaggcaagcaagaagagacgctgatctacttataggtcgcagttgacggtgtagctggtggttttgcctggaggaactcttggtagtttgagctgtgcgaaagcttttaagtttacatttactcaccactccatgaacggcaacgaagtattcatcagttagaaaagtgcacctataattttggttgcttataactttctatttgtcagagatttaactcgaaggacctgtaactaggaaagttaattttgcttggaagaacattttgatatgatcgttgttcctgtgcttcgtgcgtggtgccgtgaaattgagaggaaccatttggtgggacgttttcagctgacaatggtcatgacattgc

SEQ ID NO: 35022 - DNA, 762 bp, Zea Mays
ctgatctgactcgtatgcggactgcctatgatgtgtccattaatgacgactcttggccaacagaagtgtttgagcttgtcactggagagaaatcgaagacattggaaaggcttgaccctggtgccactgcttcacacacatatgtcctggagaccaaaacacagggcaggttccagggttcaccagctatcattacataccgtgttcccacaaagacagctcttcaggaggcatactcaactcccatcttcccactggatattctcgctgagagacctccagagaagaagtttgaatgggctaagaggcttgtgatgaaatacgggtcacttgtgtctgttgtctcttttgttggactgtttatctaccttgtcgcgagcccgtcgaagagcagctcaaaggcaagcaagaagagacgctgatctacttataggtcgcagttgacggtgtagctggtggttttgcctggaggaactcttggtagtttgagctgtgcgaaagcttttaagtttacatttactcaccactccatgaacggcaacgaagtattcatcagttagaaaagtgcacctataattttggttgcttataactttctatttgtcagagatttaactcgaaggacctgtaactaggaaagttaattttgcttggaagaacattttgatatgatcgttgttcctgtgcttcgtgcgtggtgccgtgaaattgagaggaaccatttggtgggacgttttcagctgacaatggtcatgacattgc

SEQ ID NO: 35023 - DNA, 778 bp, Zea Mays
cgctgctttcccacagcacccccaccgccgatccggactgcctatgatgtgtccattaatgacgactcttggccaacagaagtgtttgagcttgtcactggagagaaatcgaagacattggaaaggcttgaccctggtgccactgcttcacacacatatgtcctggagaccaaaacacagggcaggttccagggttcaccagctatcattacataccgtgttcccacaaagacagctcttcaggaggcatactcaactcccatcttcccactggatattctcgctgagagacctccagagaagaagtttgaatgggctaagaggcttgtgatgaaatacgggtcacttgtgtctgttgtctcttttgttggactgtttatctaccttgtcgcgagcccgtcgaagagcagctcaaaggcaagcaagaagagacgctgatctacttataggtcgcagttgacggtgtagctggtggttttgcctggaggaactcttggtagtttgagctgtgcgaaagcttttaagtttacatttactcaccactccatgaacggcaacgaagtattcatcagttagaaaagtgcacctataattttggttgcttataactttctatttgtcagagatttaactcgaaggacctgtaactaggaaagttaattttgcttggaagaacattttgatatgatcgttgttcctgtgcttcgtgcgtggtgccgtgaaattgagaggaaccatttggtgggacgttttcagctgacaatggtcatgacattgc

SEQ ID NO: 35024 - DNA, 952 bp, Zea Mays
cccagctcaccatcccgagatcttcccccgatcgacctcgtgatccttgcggccatgtcgtcgtcggcagccatgggcaattgatgaattcgtctagctctctgagtccatgcggctagacgcctcgctacctgcggatgatgacccatccaatgagaccgcctcgcatcgcccctccatcattctcaacgccgtcgcgctcggcaatatcgatgctggcaagtcggctgtgtggaacagcctcatcggccaccctgtgctgcccacggaaggggaaaaccacgcgtcgcagaccgccgggaacctgggcgcggcggaatcttgcgcggtggtctgctggtgaggccggaatcgctcactagagccaactcgtcgccttgcgcccgccgtatatcgtggccagcagcttctgctctacaatcgctggaaataccgccttcagcaggttcgtcgtagccaccaccttgttaagccggttttgatttgggtttcatggcacctgtgcactagattgggaacgcgccggtgatgccttcgcggtgcgctctgcgccgccatgggtgaccagcggattggggaagactgcgtgctgctgttggattctaatcaacggtggtgattaagcaggagagtaactcttcgtgaaatagatctgggccgtgtatcttggatcgtgcgtacaagaatggatcgggatcactttaaatctgaaccgttgatggtcgatccaatggaaccctatagcataccgcttcgctttaatggaggatctaatcgcgaccgtagaactcagatccaacggccagtagttatccataccccttcggccatccgttttgcataagaaccctttctttttggactaatcaacccgcagtccatcactgcataaccctgagtctgtggaatctttacattttaaccctgtactccctgcaaattatgcgcgcca

SEQ ID NO: 35025 - DNA, 1422 bp, Zea Mays
acagcctttcccctgaaaaaaaaattaccccccggacctcctcctccgatcggcttcctcctcccagtcccgaaccgcacgcgctcgatttcccgcaccccctctagcctctagcggccatgtcgcccgccgccgccaccacaaccttcgtcgcaatctccatcgccgtccccaaccctaccgctccatcccgcggtcgcgtgcgccttccgctaggcggggtccccgctgctccacgccgcgccgtcgcctctatggcagtgtccgcccccaggtccggcgccgccacctcgtttctcgagcgccgcgagtcggagcgcgctctccactttgtcaaataccagggcctcggcaacgacttcataatggtggacaacagggattcgtcggtgccgaaggtgacgcccgaggaggctgcgaagctgtgcgaccgaaacttcggcattggcgccgacggtgttatcttcgtcatgccgggggtcaatggtgccgactacaccatgagaatcttcaactctgatggcagcgaaccagagatgtgtggtaatggagtccgttgcttcgctcggtttatagccgagattgaaaatctgcaggggacaaatagattcactattcatactggtgctggaaagatcgttcctgaaatacaaagtgatgggcaggtaaaggttgatatgggcgagcctatcctttctggactagacatccccacaaaactgctagctaccaagaacaaagctgttgttcaagctgaattggcagttgagggcttaacatggcatgtcacatgtgttagcatgggaaaccctcactgtgtcacatttggtgcaaatgagttaaaggtattgcaggtcgacgatttaaaacttagcgaaattgggcctaaatttgagcatcatgaaatgtttcctgctcgcacaaacacagaattcgtacaggttttgtctcgctcacacctcaaaatgcgggtctgggaacgtggtgctggagcaactcttgcctgtggtactggtgcttgtgcagtggttgttgcagctgttcttgagggtcgagctgagcggaaatgtgtagttgatttgcctggcgggccattggaaattgagtggagggaggatgacaatcatgtttacatgactggtcctgcagaggtcgtcttttatggatctgttgttcactagctggtcacaggtgaaacgacgagcgggcagcgtctaaagcatcatttcatggatcgtcctctttgaacgttcggtggtgtcaggtcaggctgaagcacaagatgtcctccatcacgtacccctccaaactggtaaaccgtctctagattatggtttctcgattaagaaacgatttgactctctctcgagatgttggcacgcgtgctaggctgctggctcgagaggcagaatgattgttctg

SEQ ID NO: 35026 - DNA, 1450 bp, Zea Mays
agcctttcccctgaaaaaaaaattaccccccggacctcctcctccgatcggcttcctcctcccagtcccgaaccgcacgcgctcgatttcccgcaccccctctagcctctagcggccatgtcgcccgccgccgccaccacaaccttcgtcgcaatctccatcgccgtccccaaccctaccgctccatcccgcggtcgcgtgcgccttccgctaggcggggtccccgctgctccacgccgcgccgtcgcctctatggcagtgtccgcccccaggtccggcgccgccacctcgtttctcgagcgccgcgagtcggagcgcgctctccactttgtcaaataccagggcctcggcaacgacttcataatggtggacaacagggattcgtcggtgccgaaggtgacgcccgaggaggctgcgaagctgtgcgaccgaaacttcggcattggcgccgacggtgttatcttcgtcatgccgggggtcaatggtgccgactacaccatgagaatcttcaactctgatggcagcgaaccagagatgtgtggtaatggagtccgttgcttcgctcggtttatagccgagattgaaaatctgcaggggacaaatagattcactattcatactggtgctggaaagatcgttcctgaaatacaaagtgatgggcaggtaaaggttgatatgggcgagcctatcctttctggactagacatccccacaaaactgctagctaccaagaacaaagctgttgttcaagctgaattggcagttgagggcttaacatggcatgtcacatgtgttagcatgggaaaccctcactgtgtcacatttggtgcaaatgagttaaaggtattgcaggtcgacgatttaaaacttagcgaaattgggcctaaatttgagcatcatgaaatgtttcctgctcgcacaaacacagaattcgtacaggttttgtctcgctcacacctcaaaatgcgggtctgggaacgtggtgctggagcaactcttgcctgtggtactggtgcttgtgcagtggttgttgcagctgttcttgagggtcgagctgagcggaaatgtgtagttgatttgcctggcgggccattggaaattgagtggagggaggatgacaatcatgtttacatgactggtcctgcagaggtcgtcttttatggatctgttgttcactaggtaagagggggaggtcttggtggccaggtgatatggtgggtgtgatttggagctccctaaagatcctatattccaccatttgggttgccctcagattctaactgataaagtagcttttttaattggctcatgttgcgcatattgtattgcaaaatcataggtgtgcatgttaggacatcagctttattgacgtctggaatttgcagaggtatattcttgctttttgttaataaactacagtatacaataaaagttaatttatttgtttacc

SEQ ID NO: 35027 - DNA, 1176 bp, Zea Mays
atgtcgcccgccgccgccaccacaaccttcgtcgcaatctccatcgccgtccccaaccctaccgctccatcccgcggtcgcgtgcgccttccgctaggcggggtccccgctgctccacgccgcgccgtcgcctctatggcagtgtccgcccccaggtccggcgccgccacctcgtttctcgagcgccgcgagtcggagcgcgctctccactttgtcaaataccagggcctcggcaacgacttcataatggtggacaacagggattcgtcggtgccgaaggtgacgcccgaggaggctgcgaagctgtgcgaccgaaacttcggcattggcgccgacggtgttatcttcgtcatgccgggggtcaatggtgccgactacaccatgagaatcttcaactctgatggcagcgaaccagagatgtgtggtaatggagtccgttgcttcgctcggtttatagccgagattgaaaatctgcaggggacaaatagattcactattcatactggtgctggaaagatcgttcctgaaatacaaagtgatgggcaggtaaaggttgatatgggcgagcctatcctttctggactagacatccccacaaaactgctagctaccaagaacaaagctgttgttcaagctgaattggcagttgagggcttaacatggcatgtcacatgtgttagcatgggaaaccctcactgtgtcacatttggtgcaaatgagttaaaggtattgcaggtcgacgatttaaaacttagcgaaattgggcctaaatttgagcatcatgaaatgtttcctgctcgcacaaacacagaattcgtacaggttttgtctcgctcacacctcaaaatgcgggtctgggaacgtggtgctggagcaactcttgcctgtggtactggtgcttgtgcagtggttgttgcagctgttcttgagggtcgagctgagcggaaatgtgtagttgatttgcctggcgggccattggaaattgagtggagggaggatgacaatcatgtttacatgactggtcctgcagaggtcgtcttttatggatctgttgttcactagcgttttaacatacgaagtcatcaggagtttcggtcctggtgtgtttgtcctgactcctgaagttattttggattctctaccctgcactcctatagctaagccccctcctatttg

SEQ ID NO: 35028 - DNA, 1249 bp, Zea Mays
ctcctcctccgatcggcttcctcctcccagtcccgaaccgcacgcgctcgatttcccgcaccccctctagcctctagcggccatgtcgcccgccgccgccaccacaaccttcgtcgcaatctccatcgccgtccccaaccctaccgctccatcccgcggtcgcgtgcgccttccgctaggcggggtccccgctgctccacgccgcgccgtcgcctctatggcagtgtccgcccccaggtccggcgccgccacctcgtttctcgagcgccgcgagtcggagcgcgctctccactttgtcaaataccagggcctcggcaacgacttcataatggtggacaacagggattcgtcggtgccgaaggtgacgcccgaggaggctgcgaagctgtgcgaccgaaacttcggcattggcgccgacggtgttatcttcgtcatgccgggggtcaatggtgccgactacaccatgagaatcttcaactctgatggcagcgaaccagagatgtgtggtaatggagtccgttgcttcgctcggtttatagccgagattgaaaatctgcaggggacaaatagattcactattcatactggtgctggaaagatcgttcctgaaatacaaagtgatgggcaggtaaaggttgatatgggcgagcctatcctttctggactagacatccccacaaaactgctagctaccaagaacaaagctgttgttcaagctgaattggcagttgagggcttaacatggcatgtcacatgtgttagcatgggaaaccctcactgtgtcacatttggtgcaaatgagttaaaggtcgacgatttaaaacttagcgaaattgggcctaaatttgagcatcatgaaatgtttcctgctcgcacaaacacagaattcgtacaggttttgtctcgctcacacctcaaaatgcgggtctgggaacgtggtgctggagcaactcttgcctgtggtactggtgcttgtgcagtggttgttgcagctgttcttgagggtcgagctgagcggaaatgtgtagttgatttgcctggcgggccattggaaattgagtggagggaggatgacaatcatgtttacatgactggtcctgcagaggtcgtcttttatggatctgttgttcactagcgttttaacatacgaagtcatcaggagtttcggtcctggtgtgtttgtcctgactcctgaagttattttggattctctaccctgcactcctatagctaagccccctcctatttg

SEQ ID NO: 35029 - DNA, 1229 bp, Zea Mays
ccctgaaaaaaaaattaccccccggacctcctcctccgatcggcttcctcctcccagtcccgaaccgcacgcgctcgatttcccgcaccccctctagcctctagcggccatgtcgcccgccgccgccaccacaaccttcgtcgcaatctccatcgccgtccccaaccctaccgctccatcccgcggtcgcgtgcgccttccgctaggcggggtccccgctgctccacgccgcgccgtcgcctctatggcagtgtccgcccccaggtccggcgccgccacctcgtttctcgagcgccgcgagtcggagcgcgctctccactttgtcaaataccagggcctcggcaacgacttcataatggtggacaacagggattcgtcggtgccgaaggtgacgcccgaggaggctgcgaagctgtgcgaccgaaacttcggcattggcgccgacggtgttatcttcgtcatgccgggggtcaatggtgccgactacaccatgagaatcttcaactctgatggcagcgaaccagagatgtgtggtaatggagtccgttgcttcgctcggtttatagccgagattgaaaatctgcaggggacaaatagattcactattcatactggtgctggaaagatcgttcctgaaatacaaagtgatgggcaggtaaaggttgatatgggcgagcctatcctttctggactagacatccccacaaaactgctagctaccaagaacaaagctgttgttcaagctgaattggcagttgagggcttaacatggcatgtcacatgtgttagcatgggaaaccctcactgtgtcacatttggtgcaaatgagttaaaggtattgcaggtcgacgatttaaaacttagcgaaattgggcctaaatttgagcatcatgaaatgtttcctgctcgcacaaacacagaattcgtacaggttttgtctcgctcacacctcaaaatgcgggtctgggaacgtggtgctggagcaactcttgcctgtggtactggtgcttgtgcagtggttgttgcagctgttcttgagggtcgagctgagcggaaatgtgtagttgatttgcctggcgggccattggaaattgagtggagggaggatgacaatcatgtttacatgactggtcctgcagaggtcgtcttttatggatctgttgttcactagctccaggaaactacttagatttcaacttgaaggctttacatatctgtttttgttccca

SEQ ID NO: 35030 - DNA, 1644 bp, Zea Mays
ctccgatcggcttcctcctcccagtcccgaaccgcacgcgctcgatttcccgcaccccctctagcctctagcggccatgtcgcccgccgccgccaccacaaccttcgtcgcaatctccatcgccgtccccaaccctaccgctccatcccgcggtcgcgtgcgccttccgctaggcggggtccccgctgctccacgccgcgccgtcgcctctatggcagtgtccgcccccaggtccggcgccgccacctcgtttctcgagcgccgcgagtcggagcgcgctctccactttgtcaaataccagggcctcggcaacgacttcataatggtggacaacagggattcgtcggtgccgaaggtgacgcccgaggaggctgcgaagctgtgcgaccgaaacttcggcattggcgccgacggtgttatcttcgtcatgccgggggtcaatggtgccgactacaccatgagaatcttcaactctgatggcagcgaaccagagatgtgtggtaatggagtccgttgcttcgctcggtttatagccgagattgaaaatctgcaggggacaaatagattcactattcatactggtgctggaaagatcgttcctgaaatacaaagtgatgggcaggtaaaggttgatatgggcgagcctatcctttctggactagacatccccacaaaactgctagctaccaagaacaaagctgttgttcaagctgaattggcagttgagggcttaacatggcatgtcacatgtgttagcatgggaaaccctcactgtgtcacatttggtgcaaatgagttaaaggtattgcaggtcgacgatttaaaacttagcgaaattgggcctaaatttgagcatcatgaaatgtttcctgctcgcacaaacacagaattcgtacaggttttgtctcgctcacacctcaaaatgcgggtctgggaacgtggtgctggtttgactgtaggagcaactcttgcctgtggtactggtgcttgtgcagtggttgttgcagctgttcttgagggtcgagctgagcggaaatgtgtagttgatttgcctggcgggccattggaaattgagtggagggaggatgacaatcatgtttacatgactggtcctgcagaggtcgtcttttatggatctgttgttcactaggtactggggaccaagatagaagggttggctgccactcagagcttgtgagattggttatagtatccatgaaacagagtgttctggtaccagtacacttgttcagatattcttaattatgattgcttgatttgggtagcagtagaggcttccttttgaagcattctagtgttcaccttttgtactcctttagtttgtcaggtttgaacactacatgggtaacatgtctttcccaccattttctgtttcttttctttgtaagtgaacgccaatgcagttttagtattgttttctatagatttgtcttgatgcactgggcttactacttattttctggtatgaatgctgcctatttcctgaaaatcgcaatcatctaaagtgcttctgacaagtgacaacagacaacatgggttgttggctatggctcactattaattttcacctgcaacaattaagagtgtcaaattctgtgcttatataatctccgtattttgctc

SEQ ID NO: 35031 - DNA, 1577 bp, Zea Mays
aaaaaattaccccccggacctcctcctccgatcggcttcctcctcccagtcccgaaccgcacgcgctcgatttcccgcaccccctctagcctctagcggccatgtcgcccgccgccgccaccacaaccttcgtcgcaatctccatcgccgtccccaaccctaccgctccatcccgcggtcgcgtgcgccttccgctaggcggggtccccgctgctccacgccgcgccgtcgcctctatggcagtgtccgcccccaggtccggcgccgccacctcgtttctcgagcgccgcgagtcggagcgcgctctccactttgtcaaataccagggcctcggcaacgacttcataatggtggacaacagggattcgtcggtgccgaaggtgacgcccgaggaggctgcgaagctgtgcgaccgaaacttcggcattggcgccgacggtgttatcttcgtcatgccgggggtcaatggtgccgactacaccatgagaatcttcaactctgatggcagcgaaccagagattcactattcatactggtgctggaaagatcgttcctgaaatacaaagtgatgggcaggtaaaggttgatatgggcgagcctatcctttctggactagacatccccacaaaactgctagctaccaagaacaaagctgttgttcaagctgaattggcagttgagggcttaacatggcatgtcacatgtgttagcatgggaaaccctcactgtgtcacatttggtgcaaatgagttaaaggtcgacgatttaaaacttagcgaaattgggcctaaatttgagcatcatgaaatgtttcctgctcgcacaaacacagaattcgtacaggttttgtctcgctcacacctcaaaatgcgggtctgggaacgtggtgctggagcaactcttgcctgtggtactggtgcttgtgcagtggttgttgcagctgttcttgagggtcgagctgagcggaaatgtgtagttgatttgcctggcgggccattggaaattgagtggagggaggatgacaatcatgtttacatgactggtcctgcagaggtcgtcttttatggatctgttgttcactaggtactggggaccaagatagaagggttggctgccactcagagcttgtgagattggttatagtatccatgaaacagagtgttctggtaccagtacacttgttcagatattcttaattatgattgcttgatttgggtagcagtagaggcttccttttgaagcattctagtgttcaccttttgtactcctttagtttgtcaggtttgaacactacatgggtaacatgtctttcccaccattttctgtttcttttctttgtaagtgaacgccaatgcagttttagtattgttttctatagatttgtcttgatgcactgggcttactacttattttctggtatgaatgctgcctatttcctgaaaatcgcaatcatctaaagtgcttctgacaagtgacaacagacaacatgggttgttggctatggctcactattaattttcacctgcaacaattaagagtgtcaaattctgtgcttatataatctccgtattttgctc

SEQ ID NO: 35032 - DNA, 1673 bp, Zea Mays
gttccctacagcctttcccctgaaaaaaaaattaccccccggacctcctcctccgatcggcttcctcctcccagtcccgaaccgcacgcgctcgatttcccgcaccccctctagcctctagcggccatgtcgcccgccgccgccaccacaaccttcgtcgcaatctccatcgccgtccccaaccctaccgctccatcccgcggtcgcgtgcgccttccgctaggcggggtccccgctgctccacgccgcgccgtcgcctctatggcagtgtccgcccccaggtccggcgccgccacctcgtttctcgagcgccgcgagtcggagcgcgctctccactttgtcaaataccagggcctcggcaacgacttcataatggtggacaacagggattcgtcggtgccgaaggtgacgcccgaggaggctgcgaagctgtgcgaccgaaacttcggcattggcgccgacggtgttatcttcgtcatgccgggggtcaatggtgccgactacaccatgagaatcttcaactctgatggcagcgaaccagagatgtgtggtaatggagtccgttgcttcgctcggtttatagccgagattgaaaatctgcaggggacaaatagattcactattcatactggtgctggaaagatcgttcctgaaatacaaagtgatgggcaggtaaaggttgatatgggcgagcctatcctttctggactagacatccccacaaaactgctagctaccaagaacaaagctgttgttcaagctgaattggcagttgagggcttaacatggcatgtcacatgtgttagcatgggaaaccctcactgtgtcacatttggtgcaaatgagttaaaggtcgacgatttaaaacttagcgaaattgggcctaaatttgagcatcatgaaatgtttcctgctcgcacaaacacagaattcgtacaggttttgtctcgctcacacctcaaaatgcgggtctgggaacgtggtgctggagcaactcttgcctgtggtactggtgcttgtgcagtggttgttgcagctgttcttgagggtcgagctgagcggaaatgtgtagttgatttgcctggcgggccattggaaattgagtggagggaggatgacaatcatgtttacatgactggtcctgcagaggtcgtcttttatggatctgttgttcactaggtactggggaccaagatagaagggttggctgccactcagagcttgtgagattggttatagtatccatgaaacagagtgttctggtaccagtacacttgttcagatattcttaattatgattgcttgatttgggtagcagtagaggcttccttttgaagcattctagtgttcaccttttgtactcctttagtttgtcaggtttgaacactacatgggtaacatgtctttcccaccattttctgtttcttttctttgtaagtgaacgccaatgcagttttagtattgttttctatagatttgtcttgatgcactgggcttactacttattttctggtatgaatgctgcctatttcctgaaaatcgcaatcatctaaagtgcttctgacaagtgacaacagacaacatgggttgttggctatggctcactattaattttcacctgcaacaattaagagtgtcaaattctgtgcttatataatctccgtattttgctc

SEQ ID NO: 35033 - DNA, 1742 bp, Zea Mays
ccagctagacacggtcaagaatttctgattattgcatgggaacagatattcatgttagaagttccctacagcctttcccctgaaaaaaaaattaccccccggacctcctcctccgatcggcttcctcctcccagtcccgaaccgcacgcgctcgatttcccgcaccccctctagcctctagcggccatgtcgcccgccgccgccaccacaaccttcgtcgcaatctccatcgccgtccccaaccctaccgctccatcccgcggtcgcgtgcgccttccgctaggcggggtccccgctgctccacgccgcgccgtcgcctctatggcagtgtccgcccccaggtccggcgccgccacctcgtttctcgagcgccgcgagtcggagcgcgctctccactttgtcaaataccagggcctcggcaacgacttcataatggtggacaacagggattcgtcggtgccgaaggtgacgcccgaggaggctgcgaagctgtgcgaccgaaacttcggcattggcgccgacggtgttatcttcgtcatgccgggggtcaatggtgccgactacaccatgagaatcttcaactctgatggcagcgaaccagagatgtgtggtaatggagtccgttgcttcgctcggtttatagccgagattgaaaatctgcaggggacaaatagattcactattcatactggtgctggaaagatcgttcctgaaatacaaagtgatgggcaggtaaaggttgatatgggcgagcctatcctttctggactagacatccccacaaaactgctagctaccaagaacaaagctgttgttcaagctgaattggcagttgagggcttaacatggcatgtcacatgtgttagcatgggaaaccctcactgtgtcacatttggtgcaaatgagttaaaggtattgcaggtcgacgatttaaaacttagcgaaattgggcctaaatttgagcatcatgaaatgtttcctgctcgcacaaacacagaattcgtacaggttttgtctcgctcacacctcaaaatgcgggtctgggaacgtggtgctggagcaactcttgcctgtggtactggtgcttgtgcagtggttgttgcagctgttcttgagggtcgagctgagcggaaatgtgtagttgatttgcctggcgggccattggaaattgagtggagggaggatgacaatcatgtttacatgactggtcctgcagaggtcgtcttttatggatctgttgttcactaggtactggggaccaagatagaagggttggctgccactcagagcttgtgagattggttatagtatccatgaaacagagtgttctggtaccagtacacttgttcagatattcttaattatgattgcttgatttgggtagcagtagaggcttccttttgaagcattctagtgttcaccttttgtactcctttagtttgtcaggtttgaacactacatgggtaacatgtctttcccaccattttctgtttcttttctttgtaagtgaacgccaatgcagttttagtattgttttctatagatttgtcttgatgcactgggcttactacttattttctggtatgaatgctgcctatttcctgaaaatcgcaatcatctaaagtgcttctgacaagtgacaacagacaacatgggttgttggctatggctcactattaattttcacctgcaacaattaagagtgtcaaattctgtgcttatataatctccgtattttgctc

SEQ ID NO: 35034 - DNA, 1241 bp, Zea Mays
cgcacagttcagcctgtacaagtggtcgaagatagcgcagcacctgccggggaggacggacaacgagatcaagaactactggaggacgcgggtgcagaagcacgccaagcagctcaactgcgacgccagcagcaagcgcttcaaggacgccatgcgctacctctggatgccgcacctcgtcgacgccaccgctaccgctgacgacgaataccaccaacaccaagccgccgcagcaggcaacatcgacggcctgctcgccggcggcgacgtcgaccacgtccagcacgctctggcggcgggcgtggccgctgctatggcgtcgtcgtcgtccgactcgctcgcgtcggagccgtactcgtacgaggacggtggcctcctcgcgagcctgcgcgccggcgacgacatgcagctggtgatgagcggcggcggctgggcggcggcgcaggcgcaggaggccaacgaccaagggctgtggccgtcgtcgtctggtcatggtctgtcgtcgtcggtgcaggccgctgccggtggtgccggccagtttgaggacccggagctcagtggatgggtgcaaggtttctccgacagcattattactggtaacctttgggccttggaggaaatttggaagatgcaatgagcaattttgcgttttccacacgcatccaacgaagagctagcggaaatgtatacgactagtgatgttgacagtagatagaacatgaggttgtcatatataattctcgatctctccctctctctatcgatctatatatactctaactccaaagatactatacggtatactaaagttgtatagcatttttatttttttcctcgttttttttatttcgcctcttaaggttcattcttatagaggttggaaaaggagggtattgtttatgcaagtcgaaacaaatatttgtgtgtgcgtgtgcaatgtacgtacaagtattgaagtacttcctccttacacgtgagttagtcattttaggtttgttctttgttaattactattaactttgactagttatatcagatgttttacaaaattttacaacatcaaaataaagttattaaattcatcatgacttgaaataccataatatataattcttttgaagtatatatgtagcgctgtcactagagagaaagtttaaataacttgacttcggacaaatccaaaatgactaactaatgcatgcggacggagggagtatatatgtagcgctattgatagtcgc

SEQ ID NO: 35035 - DNA, 1792 bp, Zea Mays
ctcgcatcttgcctagtctaggctataaaaggacttggaaattgccatccgtctcccactagctggtcatcttctctagatctcctcctcctcctctctatctctctctccccaaccaacaacctgtcgattaagctagctctcagctcatcccggcctcacaaccaaccagttcctgttttagacggttaacaatctacaacaacagttagcatggccgcaacacagagcaggggcggcggcggtgttgttcccgttcaggtggacgaggagcacggccgccgccggcagggaggagcagcgccgcaggaggaggaggaggaggcggccgagaagccggagctccggcgtggcccgtggaccgtggacgaggaccacatcctcgtcaactacatcgccgacaacggcgagggccgctggaactccctcgcccgcgccgccggcctgaagcgcacgggcaagagctgccggctgcggtggctcaactacctccggcccgacgtgaagcgcggcaacttcaccgccgacgagcagctgctcatcctcgacctccacacccgctggggcaaccggtggtcgaagatagcgcagcacctgccggggaggacggacaacgagatcaagaactactggaggacgcgggtgcagaagcacgccaagcagctcaactgcgacgccagcagcaagcgcttcaaggacgccatgcgctacctctggatgccgcacctcgtcgacgccaccgctaccgctgacgacgaataccaccaacaccaagccgccgcagcaggcaacatcgacggcctgctcgccggcggcgacgtcgaccacgtccagcacgctctggcggcgggcgtggccgctgctatggcgtcgtcgtcgtccgactcgctcgcgtcggagccgtactcgtacgaggacggtggcctcctcgcgagcctgcgcgccggcgacgacatgcagctggtgatgagcggcggcggctgggcggcggcgcaggcgcaggaggccaacgaccaagggctgtggccgtcgtcgtctggtcatggtctgtcgtcgtcggtgcaggccgctgccggtggtgccggccagtttgaggacccggagctcagtggatgggtgcaaggtttctccgacagcattattactggtaacctttgggccttggaggaaatttggaagatgcaatgagcaattttgcgttttccacacgcatccaacgaagagctagcggaaatgtatacgactagtgatgttgacagtagatagaacatgaggttgtcatatataattctcgatctctccctctctctatcgatctatatatactctaactccaaagatactatacggtatactaaagttgtatagcatttttatttttttcctcgttttttttatttcgcctcttaaggttcattcttatagaggttggaaaaggagggtattgtttatgcaagtcgaaacaaatatttgtgtgtgcgtgtgcaatgtacgtacaagtattgaagtacttcctccttacacgtgagttagtcattttaggtttgttctttgttaattactattaactttgactagttatatcagatgttttacaaaattttacaacatcaaaataaagttattaaattcatcatgacttgaaataccataatatataattcttttgaagtatatatgtagcgctgtcactagagagaaagtttaaataacttgacttcggacaaatccaaaatgactaactaatgcatgcggacggagggagtatatatgtagcgctattgatagtcgc

SEQ ID NO: 35036 - DNA, 2215 bp, Zea Mays
tttcgaatcttgaataggtatgtgcatgccgagttgcatggagcttccagtactataatcaagaatcacaaacctgacactcctattccaccattaacattaaaccaagcaggatgcttcactgtttgccacagcaaagcatgggattcaaaaattgttacaagtgcttggtgggtgtatccacatcaagttagcaagacagctcctactggcgagtaccttactgttggtagttttatgatccgtggcaagaaaaattttcttccacctcacccccttgttatgggctttggtatactcttccgtttggacgagagctccctagcatctcatttgaatgaaaggagggttaggggtgaagatgaggccctccatgaaatggaagcagagtctcgcaagaagcaaagtaaccctgaatctgatgaagatattggtagtgaaggtgcaaataaggaaactcatgaagatgaatcaaacgggcaaactacaaacattcaacaaaacaatgatcttgagcttcctgatctgtctagcaacattggtactgccaactcatctgaactccttcctgaaatccaagctgaggaaaccttggacaatggaagttccattcttaaggaagaaacaatcgaagcttctgtttcatctcaacttgatgatctgctagataagactctttgccttggccctgcaaaggtgtcaggtaaaagctctctgcttaccagcatcccttcaagtttagcagaagatgatgatgatcttgaagtgaaaaggccaactataagagacaaaccatacatatcgaaagcagagagaagaaaattgaagaagggccaagttaatgatgaaactgctactgattctcaaaatggtgaagctgtagaaacaccaggtacatcaaagcaagaaaagggaaaggcagagacaaaggctactgattctaaagcaagtcagccagatacttcacagcaagaaaaaggaaaggcaaacacaaaggctactggttctaaattaagccagccaggtaattcacaacaagaaaaaggcaagggaagcactcacgctggtaacgctaaagtaagccgtggacagaaagggaagcttaagaagattaaagagaaatatgcagagcaggatgaagaagaaagagagatccgtatggcattgctcgcggtgaagatgattcgtcaaaaatatgttataaatgcaaaaaggctggacatctttctcgcgattgcccagaaagcacatctgaggtggaccgaaatgatggcagtattagtagaagcagagacgatacgggtaccaatactgctcctgctggtggcaacagtcctatggacgaagacgatgttcaagaaattggtgatgaagagaaagaaaagttgattgacttggactacttaactggaaacccactaccaaatgatattttgctatatgctgtacctgtgtgtgccccttacaacgcattgcagacatacaaatatcgtgtaaagattaccccaggcactgcaaagaaagggaaagctgcaaaaaccgcgatgagcttgttcctgcacacacctgatgctaccaaccgtgagaaggagctcatgaaggcatgcacagaccctgagctggtggctgcaatcgtcgggaatgccaagatcacagcgcctggcctcactcaactgaagcagaaacagaagcagaaggggaagaagtctgcaaaacagaactagtgtgaaactggtgggtccaaagaactgatccatccccgattcgcaggaagtgaagctttgcctttgcagaaagtctgtggatgttgtggtttgtcagttgtcgctcgaggcgcatttgggggtatatgcagcctgtcagggagtacacccctttggcgtcacactggtgaggccagagcgacaggcacgcagtaggggacccaagctgcacgtctatgatgcaattgcgatatacagctcataataaaagaagtattgatttcatatgcaactgattggttctttattttatttgtgataccctgaaatgaattccgcacatacatttcatgtgcaattcccactaggcatgaatgagtcgtcgattgtgactcgatggtacatgcagaagcatgtcagaacacaagaaaattatataggttcgggttgcctgaatgagtagtaccatacattttatttggtgctaagtattgagtttgctggtggtgcac

SEQ ID NO: 35037 - DNA, 2628 bp, Zea Mays
ggaaatgttgcattattagaagaagaaatgttatatttgggtagaggttgatatagcactttctgcacatgcaaatgcaagacggtggtatgaaatgaagaagaaacaggaaagtaaacaagagaagactatcacagctcatgataaggcgtttaaagcagctgagaagaagacacgccttcagcttgctcaggaaaaaacagtagccgcaatcactcatatgcgcaaagttcactggtttgagaaattcaattggttcatcagcagtgaaaactacttgataatcagtggccgagatgctcaacaaaacgagttgattgtgaagcgctatatgtccaaaggagatctgtatgtgcatgccgagttgcatggagcttccagtactataatcaagaatcacaaacctgacactcctattccaccattaacattaaaccaagcaggatgcttcactgtttgccacagcaaagcatgggattcaaaaattgttacaagtgcttggtgggtgtatccacatcaagttagcaagacagctcctactggcgagtaccttactgttggtagttttatgatccgtggcaagaaaaattttcttccacctcacccccttgttatgggctttggtatactcttccgtttggacgagagctccctagcatctcatttgaatgaaaggagggttaggggtgaagatgaggccctccatgaaatggaagcagagtctcgcaagaagcaaagtaaccctgaatctgatgaagatattggtagtgaaggtgcaaataaggaaactcatgaagatgaatcaaacgggcaaactacaaacattcaacaaaacaatgatcttgagcttcctgatctgtctagcaacattggtactgccaactcatctgaactccttcctgaaatccaagctgaggaaaccttggacaatggaagttccattcttaaggaagaaacaatcgaagcttctgtttcatctcaacttgatgatctgctagataagactctttgccttggccctgcaaaggtgtcaggtaaaagctctctgcttaccagcatcccttcaagtttagcagaagatgatgatgatcttgaagtgaaaaggccaactataagagacaaaccatacatatcgaaagcagagagaagaaaattgaagaagggccaagttaatgatgaaactgctactgattctcaaaatggtgaagctgtagaaacaccaggtacatcaaagcaagaaaagggaaaggcagagacaaaggctactgattctaaagcaagtcagccagatacttcacagcaagaaaaaggaaaggcaaacacaaaggctactggttctaaattaagccagccaggtaattcacaacaagaaaaaggcaagggaagcactcacgctggtaacgctaaagtaagccgtggacagaaagggaagcttaagaagattaaagagaaatatgcagagcaggatgaagaagaaagagagatccgtatggcattgctcgcgtcatctgggaaagcattgcggaaggataaaccttcacaagatgtagaagaaacctctgttaaagaatcaaaaccatcagctggtgaagatgattcgtcaaaaatatgttataaatgcaaaaaggctggacatctttctcgcgattgcccagaaagcacatctgaggtggaccgaaatgatggcagtattagtagaagcagagacgatacgggtaccaatactgctcctgctggtggcaacagtcctatggacgaagacgatgttcaagaaattggtgatgaagagaaagaaaagttgattgacttggactacttaactggaaacccactaccaaatgatattttgctatatgctgtacctgtgtgtgccccttacaacgcattgcagacatacaaatatcgtgtaaagattaccccaggcactgcaaagaaagggaaagctgcaaaaaccgcgatgagcttgttcctgcacacacctgatgctaccaaccgtgagaaggagctcatgaaggcatgcacagaccctgagctggtggctgcaatcgtcgggaatgccaagatcacagcgcctggcctcactcaactgaagcagaaacagaagcagaaggggaagaagtctgcaaaacagaactagtgtgaaactggtgggtccaaagaactgatccatccccgattcgcaggaagtgaagctttgcctttgcagaaagtctgtggatgttgtggtttgtcagttgtcgctcgaggcgcatttgggggtatatgcagcctgtcagggagtacacccctttggcgtcacactggtgaggccagagcgacaggcacgcagtaggggacccaagctgcacgtctatgatgcaattgcgatatacagctcataataaaagaagtattgatttcatatgcaactgattggttctttattttatttgtgataccctgaaatgaattccgcacatacatttcatgtgcaattcccactaggcatgaatgagtcgtcgattgtgactcgatggtacatgcagaagcatgtcagaacacaagaaaattatataggttcgggttgcctgaatgagtagtaccatacattttatttggtgctaagtattgagtttgctggtggtgcac

SEQ ID NO: 35038 - DNA, 3140 bp, Zea Mays
gttcaaaacagcttctctgcatttgtgggggaaggcttgcctcgttttatcagtggaagtctccgacactggatatatgatgaatattgccctgttctgttgaatcaattcaagtcaagggaatataatgaatttgcgacatttgatgctgcattagacgagttctacagcaaaatagaaagtcaaaaggtgaatcaacagcagaaagcaaaagaggaatctgcagctcagaggctgaacaaaataaaattggatcaggagaatcgtgtgcatacattgaggaaggaagtggaccattgtgtcaaaatggcagaattaattgaatacaatttagaggatgtagatgcagcaattttggctgtgcgtgtttctcttgcaaatgaaatgagttgggaagctcttactcgcatgattaaagaggaaagaaaggctggaaacccagtagcaggacttatcgacaaactaaattttgaaagaaattgtatcactctactcttgagcaataatcttgatgacatggatgaggatgaaaaaactgcacctgtggagaaggtagaggttgatatagcactttctgcacatgcaaatgcaagacggtggtatgaaatgaagaagaaacaggaaagtaaacaagagaagactatcacagctcatgataaggcgtttaaagcagctgagaagaagacacgccttcagcttgctcaggaaaaaacagtagccgcaatcactcatatgcgcaaagttcactggtttgagaaattcaattggttcatcagcagtgaaaactacttgataatcagtggccgagatgctcaacaaaacgagttgattgtgaagcgctatatgtccaaaggagatctgtatgtgcatgccgagttgcatggagcttccagtactataatcaagaatcacaaacctgacactcctattccaccattaacattaaaccaagcaggatgcttcactgtttgccacagcaaagcatgggattcaaaaattgttacaagtgcttggtgggtgtatccacatcaagttagcaagacagctcctactggcgagtaccttactgttggtagttttatgatccgtggcaagaaaaattttcttccacctcacccccttgttatgggctttggtatactcttccgtttggacgagagctccctagcatctcatttgaatgaaaggagggttaggggtgaagatgaggccctccatgaaatggaagcagagtctcgcaagaagcaaagtaaccctgaatctgatgaagatattggtagtgaaggtgcaaataaggaaactcatgaagatgaatcaaacgggcaaactacaaacattcaacaaaacaatgatcttgagcttcctgatctgtctagcaacattggtactgccaactcatctgaactccttcctgaaatccaagctgaggaaaccttggacaatggaagttccattcttaaggaagaaacaatcgaagcttctgtttcatctcaacttgatgatctgctagataagactctttgccttggccctgcaaaggtgtcaggtaaaagctctctgcttaccagcatcccttcaagtttagcagaagatgatgatgatcttgaagtgaaaaggccaactataagagacaaaccatacatatcgaaagcagagagaagaaaattgaagaagggccaagttaatgatgaaactgctactgattctcaaaatggtgaagctgtagaaacaccaggtacatcaaagcaagaaaagggaaaggcagagacaaaggctactgattctaaagcaagtcagccagatacttcacagcaagaaaaaggaaaggcaaacacaaaggctactggttctaaattaagccagccaggtaattcacaacaagaaaaaggcaagggaagcactcacgctggtaacgctaaagtaagccgtggacagaaagggaagcttaagaagattaaagagaaatatgcagagcaggatgaagaagaaagagagatccgtatggcattgctcgcgtcatctgggaaagcattgcggaaggataaaccttcacaagatgtagaagaaacctctgttaaagaatcaaaaccatcagctggtgaagatgattcgtcaaaaatatgttataaatgcaaaaaggctggacatctttctcgcgattgcccagaaagcacatctgaggtggaccgaaatgatggcagtattagtagaagcagagacgatacgggtaccaatactgctcctgctggtggcaacagtcctatggacgaagacgatgttcaagaaattggtgatgaagagaaagaaaagttgattgacttggactacttaactggaaacccactaccaaatgatattttgctatatgctgtacctgtgtgtgccccttacaacgcattgcagacatacaaatatcgtgtaaagattaccccaggcactgcaaagaaagggaaagctgcaaaaaccgcgatgagcttgttcctgcacacacctgatgctaccaaccgtgagaaggagctcatgaaggcatgcacagaccctgagctggtggctgcaatcgtcgggaatgccaagatcacagcgcctggcctcactcaactgaagcagaaacagaagcagaaggggaagaagtctgcaaaacagaactagtgtgaaactggtgggtccaaagaactgatccatccccgattcgcaggaagtgaagctttgcctttgcagaaagtctgtggatgttgtggtttgtcagttgtcgctcgaggcgcatttgggggtatatgcagcctgtcagggagtacacccctttggcgtcacactggtgaggccagagcgacaggcacgcagtaggggacccaagctgcacgtctatgatgcaattgcgatatacagctcataataaaagaagtattgatttcatatgcaactgattggttctttattttatttgtgataccctgaaatgaattccgcacatacatttcatgtgcaattcccactaggcatgaatgagtcgtcgattgtgactcgatggtacatgcagaagcatgtcagaacacaagaaaattatataggttcgggttgcctgaatgagtagtaccatacattttatttggtgctaagtattgagtttgctggtggtgcac

SEQ ID NO: 35039 - DNA, 4247 bp, Zea Mays
ggcggcgtccttcaccgctccaggtccaggtgggcggccgcgaccagagtcgtgcccgagcccgactcgagccgacgaggagagagctcaggaggcggcggagagaagggagaaaatccccggtagggaggggggaaggaagccaaaggcccaaaggtctcggcgctgccgtagtaccggctgaggcaagatggtgaaggcacgaatgacgacgacggacgtggcggcggaggtgaagtgcctccgccgcctcatcggcatgcgcctagccaacgtctacgacatcacccccaaggggaaagcgagaaggtcttgttgctcatggagagtggtgtcaggttccacaccacccaatacgttcgtgacaagagtaccaccccttcaggtttcactctgaaactacgaaagcacattcgtaacaagagacttgaagatgtccgtatgctcggatatgacaggattatccttttccaatttgggcttggtagtaatgcacatttcataattttagagctatatgcacaaggaaacattcttctcacggattcagaatacacagtattgacactactccgttctcacagagatgacaacaaaggattggccatcatgtcacgtcatcgctatccagtagaagcttgccgtgtttttggcaggactgactttgcaaagttaaaggacatgttgacaaagcctgataaggctgatgataaagaggaaattacgtctggatcaaccgatgctcaggaaacttctcaatccaccaatgatgaagtgttggtaactgaaatatctgaaaaatcactgagtaaaaaagaaaagaaggctgctgcaaaagctaagcagtttggttcaaatgcaaaagtaaacaatggtgctcaatccaataaagctactctgaagacaattcttggtgaggcactggcttatggccctgcactagcagagcatatcatattggatgctggtttggttccaagtacaaaggttgggaaagacccagagagcactatcaatgacagcactgttcagtctctaatggaatctattacaaggtttgaggactggcttgtagatattatatccggccaaaggattcctgagggttatattctcatgcaaaataagatgaccgcaaagaacatcacacccttggaagaggcttcgattaatcataagatatatgatgaatattgccctgttctgttgaatcaattcaagtcaagggaatataatgaatttgcgacatttgatgctgcattagacgagttctacagcaaaatagaaagtcaaaaggtgaatcaacagcagaaagcaaaagaggaatctgcagctcagaggctgaacaaaataaaattggatcaggagaatcgtgtgcatacattgaggaaggaagtggaccattgtgtcaaaatggcagaattaattgaatacaatttagaggatgtagatgcagcaattttggctgtgcgtgtttctcttgcaaatgaaatgagttgggaagctcttactcgcatgattaaagaggaaagaaaggctggaaacccagtagcaggacttatcgacaaactaaattttgaaagaaattgtatcactctactcttgagcaataatcttgatgacatggatgaggatgaaaaaactgcacctgtggagaaggtagaggttgatatagcactttctgcacatgcaaatgcaagacggtggtatgaaatgaagaagaaacaggaaagtaaacaagagaagactatcacagctcatgataaggcgtttaaagcagctgagaagaagacacgccttcagcttgctcaggaaaaaacagtagccgcaatcactcatatgcgcaaagttcactggtttgagaaattcaattggttcatcagcagtgaaaactacttgataatcagtggccgagatgctcaacaaaacgagttgattgtgaagcgctatatgtccaaaggagatctgtatgtgcatgccgagttgcatggagcttccagtactataatcaagaatcacaaacctgacactcctattccaccattaacattaaaccaagcaggatgcttcactgtttgccacagcaaagcatgggattcaaaaattgttacaagtgcttggtgggtgtatccacatcaagttagcaagacagctcctactggcgagtaccttactgttggtagttttatgatccgtggcaagaaaaattttcttccacctcacccccttgttatgggctttggtatactcttccgtttggacgagagctccctagcatctcatttgaatgaaaggagggttaggggtgaagatgaggccctccatgaaatggaagcagagtctcgcaagaagcaaagtaaccctgaatctgatgaagatattggtagtgaaggtgcaaataaggaaactcatgaagatgaatcaaacgggcaaactacaaacattcaacaaaacaatgatcttgagcttcctgatctgtctagcaacattggtactgccaactcatctgaactccttcctgaaatccaagctgaggaaaccttggacaatggaagttccattcttaaggaagaaacaatcgaagcttctgtttcatctcaacttgatgatctgctagataagactctttgccttggccctgcaaaggtgtcaggtaaaagctctctgcttaccagcatcccttcaagtttagcagaagatgatgatgatcttgaagtgaaaaggccaactataagagacaaaccatacatatcgaaagcagagagaagaaaattgaagaagggccaagttaatgatgaaactgctactgattctcaaaatggtgaagctgtagaaacaccaggtacatcaaagcaagaaaagggaaaggcagagacaaaggctactgattctaaagcaagtcagccagatacttcacagcaagaaaaaggaaaggcaaacacaaaggctactggttctaaattaagccagccaggtaattcacaacaagaaaaaggcaagggaagcactcacgctggtaacgctaaagtaagccgtggacagaaagggaagcttaagaagattaaagagaaatatgcagagcaggatgaagaagaaagagagatccgtatggcattgctcgcgtcatctgggaaagcattgcggaaggataaaccttcacaagatgtagaagaaacctctgttaaagaatcaaaaccatcagctggtgaagatgattcgtcaaaaatatgttataaatgcaaaaaggctggacatctttctcgcgattgcccagaaagcacatctgaggtggaccgaaatgatggcagtattagtagaagcagagacgatacgggtaccaatactgctcctgctggtggcaacagtcctatggacgaagacgatgttcaagaaattggtgatgaagagaaagaaaagttgattgacttggactacttaactggaaacccactaccaaatgatattttgctatatgctgtacctgtgtgtgccccttacaacgcattgcagacatacaaatatcgtgtaaagattaccccaggcactgcaaagaaagggaaagctgcaaaaaccgcgatgagcttgttcctgcacacacctgatgctaccaaccgtgagaaggagctcatgaaggcatgcacagaccctgagctggtggctgcaatcgtcgggaatgccaagatcacagcgcctggcctcactcaactgaagcagaaacagaagcagaaggggaagaagtctgcaaaacagaactagtgtgaaactggtgggtccaaagaactgatccatccccgattcgcaggaagtgaagctttgcctttgcagaaagtctgtggatgttgtggtttgtcagttgtcgctcgaggcgcatttgggggtatatgcagcctgtcagggagtacacccctttggcgtcacactggtgaggccagagcgacaggcacgcagtaggggacccaagctgcacgtctatgatgcaattgcgatatacagctcataataaaagaagtattgatttcatatgcaactgattggttctttattttatttgtgataccctgaaatgaattccgcacatacatttcatgtgcaattcccactaggcatgaatgagtcgtcgattgtgactcgatggtacatgcagaagcatgtcagaacacaagaaaattatataggttcgggttgcctgaatgagtagtaccatacattttatttggtgctaagtattgagtttgctggtggtgcac

SEQ ID NO: 35040 - DNA, 4368 bp, Zea Mays
cctcagtaacaaaacgggccgaagataatgatccacggaccacggaccggcccatctcgtcctagcggcggcggcggcggcgtccttcaccgctccaggtccaggtgggcggccgcgaccagagtcgtgcccgagcccgactcgagccgacgaggagagagctcaggaggcggcggagagaagggagaaaatccccggtagggaggggggaaggaagccaaaggcccaaaggtctcggcgctgccgtagtaccggctgaggcaagatggtgaaggcacgaatgacgacgacggacgtggcggcggaggtgaagtgcctccgccgcctcatcggcatgcgcctagccaacgtctacgacatcacccccaagacataccttttcaagctgatgaacagcagtgggattactgaatcaggggaaagcgagaaggtcttgttgctcatggagagtggtgtcaggttccacaccacccaatacgttcgtgacaagagtaccaccccttcaggtttcactctgaaactacgaaagcacattcgtaacaagagacttgaagatgtccgtatgctcggatatgacaggattatccttttccaatttgggcttggtagtaatgcacatttcataattttagagctatatgcacaaggaaacattcttctcacggattcagaatacacagtattgacactactccgttctcacagagatgacaacaaaggattggccatcatgtcacgtcatcgctatccagtagaagcttgccgtgtttttggcaggactgactttgcaaagttaaaggacatgttgacaaagcctgataaggctgatgataaagaggaaattacgtctggatcaaccgatgctcaggaaacttctcaatccaccaatgatgaagtgttggtaactgaaatatctgaaaaatcactgagtaaaaaagaaaagaaggctgctgcaaaagctaagcagtttggttcaaatgcaaaagtaaacaatggtgctcaatccaataaagctactctgaagacaattcttggtgaggcactggcttatggccctgcactagcagagcatatcatattggatgctggtttggttccaagtacaaaggttgggaaagacccagagagcactatcaatgacagcactgttcagtctctaatggaatctattacaaggtttgaggactggcttgtagatattatatccggccaaaggattcctgagggttatattctcatgcaaaataagatgaccgcaaagaacatcacacccttggaagaggcttcgattaatcataagatatatgatgaatattgccctgttctgttgaatcaattcaagtcaagggaatataatgaatttgcgacatttgatgctgcattagacgagttctacagcaaaatagaaagtcaaaaggtgaatcaacagcagaaagcaaaagaggaatctgcagctcagaggctgaacaaaataaaattggatcaggagaatcgtgtgcatacattgaggaaggaagtggaccattgtgtcaaaatggcagaattaattgaatacaatttagaggatgtagatgcagcaattttggctgtgcgtgtttctcttgcaaatgaaatgagttgggaagctcttactcgcatgattaaagaggaaagaaaggctggaaacccagtagcaggacttatcgacaaactaaattttgaaagaaattgtatcactctactcttgagcaataatcttgatgacatggatgaggatgaaaaaactgcacctgtggagaaggtagaggttgatatagcactttctgcacatgcaaatgcaagacggtggtatgaaatgaagaagaaacaggaaagtaaacaagagaagactatcacagctcatgataaggcgtttaaagcagctgagaagaagacacgccttcagcttgctcaggaaaaaacagtagccgcaatcactcatatgcgcaaagttcactggtttgagaaattcaattggttcatcagcagtgaaaactacttgataatcagtggccgagatgctcaacaaaacgagttgattgtgaagcgctatatgtccaaaggagatctgtatgtgcatgccgagttgcatggagcttccagtactataatcaagaatcacaaacctgacactcctattccaccattaacattaaaccaagcaggatgcttcactgtttgccacagcaaagcatgggattcaaaaattgttacaagtgcttggtgggtgtatccacatcaagttagcaagacagctcctactggcgagtaccttactgttggtagttttatgatccgtggcaagaaaaattttcttccacctcacccccttgttatgggctttggtatactcttccgtttggacgagagctccctagcatctcatttgaatgaaaggagggttaggggtgaagatgaggccctccatgaaatggaagcagagtctcgcaagaagcaaagtaaccctgaatctgatgaagatattggtagtgaaggtgcaaataaggaaactcatgaagatgaatcaaacgggcaaactacaaacattcaacaaaacaatgatcttgagcttcctgatctgtctagcaacattggtactgccaactcatctgaactccttcctgaaatccaagctgaggaaaccttggacaatggaagttccattcttaaggaagaaacaatcgaagcttctgtttcatctcaacttgatgatctgctagataagactctttgccttggccctgcaaaggtgtcaggtaaaagctctctgcttaccagcatcccttcaagtttagcagaagatgatgatgatcttgaagtgaaaaggccaactataagagacaaaccatacatatcgaaagcagagagaagaaaattgaagaagggccaagttaatgatgaaactgctactgattctcaaaatggtgaagctgtagaaacaccaggtacatcaaagcaagaaaagggaaaggcagagacaaaggctactgattctaaagcaagtcagccagatacttcacagcaagaaaaaggaaaggcaaacacaaaggctactggttctaaattaagccagccaggtaattcacaacaagaaaaaggcaagggaagcactcacgctggtaacgctaaagtaagccgtggacagaaagggaagcttaagaagattaaagagaaatatgcagagcaggatgaagaagaaagagagatccgtatggcattgctcgcgtcatctgggaaagcattgcggaaggataaaccttcacaagatgtagaagaaacctctgttaaagaatcaaaaccatcagctggtgaagatgattcgtcaaaaatatgttataaatgcaaaaaggctggacatctttctcgcgattgcccagaaagcacatctgaggtggaccgaaatgatggcagtattagtagaagcagagacgatacgggtaccaatactgctcctgctggtggcaacagtcctatggacgaagacgatgttcaagaaattggtgatgaagagaaagaaaagttgattgacttggactacttaactggaaacccactaccaaatgatattttgctatatgctgtacctgtgtgtgccccttacaacgcattgcagacatacaaatatcgtgtaaagattaccccaggcactgcaaagaaagggaaagctgcaaaaaccgcgatgagcttgttcctgcacacacctgatgctaccaaccgtgagaaggagctcatgaaggcatgcacagaccctgagctggtggctgcaatcgtcgggaatgccaagatcacagcgcctggcctcactcaactgaagcagaaacagaagcagaaggggaagaagtctgcaaaacagaactagtgtgaaactggtgggtccaaagaactgatccatccccgattcgcaggaagtgaagctttgcctttgcagaaagtctgtggatgttgtggtttgtcagttgtcgctcgaggcgcatttgggggtatatgcagcctgtcagggagtacacccctttggcgtcacactggtgaggccagagcgacaggcacgcagtaggggacccaagctgcacgtctatgatgcaattgcgatatacagctcataataaaagaagtattgatttcatatgcaactgattggttctttattttatttgtgataccctgaaatgaattccgcacatacatttcatgtgcaattcccactaggcatgaatgagtcgtcgattgtgactcgatggtacatgcagaagcatgtcagaacacaagaaaattatataggttcgggttgcctgaatgagtagtaccatacattttatttggtgctaagtattgagtttgctggtggtgcac

SEQ ID NO: 35041 - DNA, 1368 bp, Zea Mays
aatcattttaaatcattagactatttatattcttattttgtgtaaacatgaacaaacatcaatgatatttatattacatttgtaccttcgacttgacagaaggtgaaaaagcgagagtgacgcgagagtgattacaagtcagcgtgaacagtacagaggtactgttcatctatttataggcacgggacacagcccagataaaattacatccataaccctgatggctgattacaattacaatacaaattatcaagggctatacagtcttttcctctttaagtcggtaacgtcctttgtctttagcgcgtcaccatgcgaagctccttcaatagtagcttcggcttacaccttcatgtcacacctgcttgtgtatcgttctaccgaaggtgtttttgtttagaggacctttggcggagaagacccccaacaggaggcttctatgtgtggttatgcgtttgatggtttaggattctattacatcccgcatgggcctacccagaagaaaaaaaatctgattctaaattggccataatcagtgtgactggtggctcactctctgtgcctcaagtgatttctgagcttgagagattagtgtctagctcatggaagtgggaggtggaacatactaagaaggatatgttcaaggttcaatttccttctagggtagaaatagatcacatgatagagtgaggagttgttttgattaaatttaaagcttacatgataatagaggaaacagtactgccaatggaagttaaatctgctttgcctaaagttttggattcaattttctggtatcccaaaggagctaagggagttttaaattatctggacagttggatcaatgttgggggtaacaaaagcagtggatatgaagttcaccaatagattttgacatatgcaggttataggtgatggtccttgatgctagtttgatccctcagtttgtggatgttgtgattggggattacttgtatgagttgcagtttagagtagaggaaaatatggatgaagagaaccagaacctatggacttagatgacatcggttttggtgaagatgaggggcagaattcaaaggaaaatgatttaaaatctggtcatcacccaacgaatgaatctgatcaaagtaacaacaagaagaagaatggcggggattggcatgggtctgcagcgaatggtacaggcaagcgggtggtatctctgctgagtttatcttgaataggctgcaacctttaggtttctcttttccttcaaatgatagtgttgttcataacttggtagagttatgggctaattcaaaaatttcgaaaccggaagtgcatgtcaatcaggacgctctctcacgggtactgggaaaggaggaaaat

SEQ ID NO: 35042 - DNA, 436 bp, Zea Mays
ctgggctttgttgctagctagccgctactgcattgcacttgcacaccacctggcgactatatatatagctaatgcctaaacacacggcattatacctatacagtatatgcaggtagaaggaagctcagatattgtttctccatagtctgttactggagtgatcgatgtcttattcgtcgctaaaactggcgaccacaataagaggcgacccaatttcccgtctcacgggcgcaagcgcgcacgagtcttaggacgccgcaatgatcccactcaacggcagcactctcacccttgggtttgcttgcacatcaacgagaggcagcatgagcaccaccaccactccgccatgatctcctcactctcaccgaagtagggatgggacgaagggaaagagggccggggaaaagagagcacagtgccactaggggtaggagag

SEQ ID NO: 35043 - DNA, 695 bp, Zea Mays
ggacatcctagcccggattgctgcgagctgcagcagtacaaaatagtggagatgaagcttctagcacaacaaagggatcttcaggcaaagattcctgatatagagaagtgcttggatattgttacaacattacaagctaaaaaggatttgggtgaggccaatgccctcttgaagaaaaacttggaaaatgccaaggccagcttagaagtccttgttgctgatctccatttcctgcgagaccagcaaaccatcactcaggttacaattgctcgggtattcaactgggacgtgcaccatcggagaagcaaacaggccgtaaaagaaacctgattacttacatcacgaggccgaccaatgcgactgggactttttttttttgtaccttctgctacctctggcagattagcccgtcatagcaagcagtttgttgttgtatcggtttgttcagagttttacggtgtgggaacattagtagaaatgtcatttcactgccttcttttccccgctggatcgcatttcacaaaatatttccaccattcttgcagagaagccttgctatcgccaaactacttggaacattttgtcccgcctcggaactttaggacttttttccccgtgtttcttgcgtttttctagtaagaaaacgaactggttcatgtataattcctgcttttctaaaggggcttcctttttta

SEQ ID NO: 35044 - DNA, 1492 bp, Zea Mays
ctgaacctctggagaactttgatcaccagctcttgtgggacagtatatcatgctttgtggtatggttcggatgtggctgttaaagttttctccaggcaagaatattcagaagatgtgatactgtcctttcgacaagaggtgtcccttatgaaaaaactgcgccatcctaacatactgctcttcatgggtgcggttacgtctccacaacgcctttgtattgtaacagagtttctccctcgtggaagcttgtttcgcttacttcaaaggagtgctaccaagttgggtgtgagacgacatgttcacatggctttagatattgcaaggggcatgaactatcttcaccattccagcccacctatcattcaccgagatttgaagtcatctaatctgttagtcgacaagaactggactgtgaaggtggcggactttggcctttcacgtctcaagcgcgaaactttcttgacaacaaaaacgggaaaaggaacaccgcaatggatggcgccagaggtgctgcgcaacgaaccttccgatgaaaagtctgatgtgtatagctatggggtgatcctatgggagctcgttactcagaagataccctgggaaaacctgaactcgatgcagggttttgcggccacaattttttttaagataatgcttgtctgggtagcttcgacgatccctaactgtcgagggtatgctcccatatccgtaggtcattggcgcagtaggttttatgaaccaaaggttggatatcccaagcgaagtagatcctcagtggagatcaattatcctgaactgttgggaaagcgacccgcagcaacggccgtcgttccaggagcttctggagaggctccgcgagctgcagaggcgttacgccatccagcagcggaacgcgaagaacagcgtcgaggagtgaagactgaagaatgcaatgcaactctcccaagcggcggcgggcttgctttgaagcattttgcgagccagcagcatgccagatctagagaagggcctgagcctcctgtactggggcctgggggctgctaaggctggaagaagtatgttctacagacgaggcgccttctgtcttcttctttttttttaaaaaaaaagaaagttcttccccatggcaattgtgactgtaattaatttctgggtcctgacagcaagggtcagtagggtagcgagtgagtagtgactgagctcgggcttgcttgctagcgcctctgggttctgattcttgacaacgcaaatgcgtactacgtggttaacagtaacatccaatccagcctccagtttctggcaagggcatgcatgatgatgtgtagattgtctgttctgataggtcagtggtgtgtacatgtgatccccaaccgaacgcattcgactgcgtcgcttcgatatctggttggtcaggttacactgctgaatacgggtgatagatccttcttccctagcaagtagcaatggctgccgaacaagaattcttatatttgag

SEQ ID NO: 35045 - DNA, 1439 bp, Zea Mays
ctagtttgtatgtttgtcatgctctaagcactcatggtctgaacctctggagaactttgatcaccagctcttgtgggacagtatatcatgctttgtggtatggttcggatgtggctgttaaagttttctccaggcaagaatattcagaagatgtgatactgtcctttcgacaagaggtgtcccttatgaaaaaactgcgccatcctaacatactgctcttcatgggtgcggttacgtctccacaacgcctttgtattgtaacagagtttctccctcgtggaagcttgtttcgcttacttcaaaggagtgctaccaagttgggtgtgagacgacatgttcacatggctttagatattgcaaggggcatgaactatcttcaccattccagcccacctatcattcaccgagatttgaagtcatctaatctgttagtcgacaagaactggactgtgaaggtggcggactttggcctttcacgtctcaagcgcgaaactttcttgacaacaaaaacgggaaaaggaacaccgcaatggatggcgccagaggtgctgcgcaacgaaccttccgatgaaaagtctgatgtgtatagctatggggtgatcctatgggagctcgttactcagaagataccctgggaaaacctgaactcgatgcaggtcattggcgcagtaggttttatgaaccaaaggttggatatcccaagcgaagtagatcctcagtggagatcaattatcctgaactgttgggaaagcgacccgcagcaacggccgtcgttccaggagcttctggagaggctccgcgagctgcagaggcgttacgccatccagcagcggaacgcgaagaacagcgtcgaggagtgaagactgaagaatgcaatgcaactctcccaagcggcggcgggcttgctttgaagcattttgcgagccagcagcatgccagatctagagaagggcctgagcctcctgtactggggcctgggggctgctaaggctggaagaagtatgttctacagacgaggcgccttctgtcttcttctttttttttaaaaaaaaagaaagttcttccccatggcaattgtgactgtaattaatttctgggtcctgacagcaagggtcagtagggtagcgagtgagtagtgactgagctcgggcttgcttgctagcgcctctgggttctgattcttgacaacgcaaatgcgtactacgtggttaacagtaacatccaatccagcctccagtttctggcaagggcatgcatgatgatgtgtagattgtctgttctgataggtcagtggtgtgtacatgtgatccccaaccgaacgcattcgactgcgtcgcttcgatatctggttggtcaggttacactgctgaatacgggtgatagatccttcttccctagcaagtagcaatggctgccgaacaagaattcttatatttgag

SEQ ID NO: 35046 - DNA, 2507 bp, Zea Mays
attcgttttgagttgcatttcttatgaatcagtctgcggagaatctgtttggctatcctgcatcagaagcccttggtcaggacgccctcatgcttctggttgattctggtgatcacaatgtggtgaatgacattttccgacgtatttctatgggtgaaagttggactgggaagtttccagttaagagcaaacaaggagatagattttcagctgttgccaccaacacacctttctatgatgaagatggaagtttggtgggtatcatttgtgtttcaagtgattcccgccacttggagcagatattttgtaagcctccaacctctgcaaggcctcaatcagaatcatctaggacatcttgtgatgggagttgcagcaacactagtcgcagaatcaatttgttgaacagaagtccttttgatcctcagatacccctgcaaagcacttttgcatccaggataacgaatttgacgattatggcatagaacgggaaggtggcagtggtgagagtcattgttcggatcgtggtgcaaaggaagaaccaacatctagcggaacaaatacacctagagggaatgcaccacatggtcccttttctacagatgagaactcccctgggaaatcaacgaacccaagcagtgatgaattagaaggaaaagtaggtctgcacaagtttttgagttcaaaggcagaggcactactgaacaagaaagggatatcatggccttggaaagtgcgcgagaatgacggacctgatgaaagaaatcatgtgatattgttgcatggagaccaagagaatgttatgaatcatcagaaggtttcagattctagcatagctccagattcccaaggcgctgaacacaacctacctagcaaaaatgaggcatcaggttcctggtcctcttacaacaataacagcacaagcagtgcaagcagcacaggaagcactaatagcagtgctctctacaaagtagatcatgaagcggattgtctggattatgagatcttatgggaagaccttgtcattggagaacaaatagggcaaggctcttgtgggacagtatatcatgctttgtggtatggttcggatgtggctgttaaagttttctccaggcaagaatattcagaagatgtgatactgtcctttcgacaagaggtgtcccttatgaaaaaactgcgccatcctaacatactgctcttcatgggtgcggttacgtctccacaacgcctttgtattgtaacagagtttctccctcgtggaagcttgtttcgcttacttcaaaggagtgctaccaagttgggtgtgagacgacatgttcacatggctttagatattgcaaggggcatgaactatcttcaccattccagcccacctatcattcaccgagatttgaagtcatctaatctgttagtcgacaagaactggactgtgaaggtggcggactttggcctttcacgtctcaagcgcgaaactttcttgacaacaaaaacgggaaaaggaacaccgcaatggatggcgccagaggtgctgcgcaacgaaccttccgatgaaaagtctgatgtgtatagctatggggtgatcctatgggagctcgttactcagaagataccctgggaaaacctgaactcgatgcagggttttgcggccacaattttttttaagataatgcttgtctgggtagcttcgacgatccctaactgtcgagggtatgctcccatatccgtaggtcattggcgcagtaggttttatgaaccaaaggttggatatcccaagcgaagtagatcctcagtggagatcaattatcctgaactgttgggaaagcgacccgcagcaacggccgtcgttccaggagcttctggagaggctccgcgagctgcagaggcgttacgccatccagcagcggaacgcgaagaacagcgtcgaggagtgaagactgaagaatgcaatgcaactctcccaagcggcggcgggcttgctttgaagcattttgcgagccagcagcatgccagatctagagaagggcctgagcctcctgtactggggcctgggggctgctaaggctggaagaagtatgttctacagacgaggcgccttctgtcttcttctttttttttaaaaaaaaagaaagttcttccccatggcaattgtgactgtaattaatttctgggtcctgacagcaagggtcagtagggtagcgagtgagtagtgactgagctcgggcttgcttgctagcgcctctgggttctgattcttgacaacgcaaatgcgtactacgtggttaacagtaacatccaatccagcctccagtttctggcaagggcatgcatgatgatgtgtagattgtctgttctgataggtcagtggtgtgtacatgtgatccccaaccgaacgcattcgactgcgtcgcttcgatatctggttggtcaggttacactgctgaatacgggtgatagatccttcttccctagcaagtagcaatggctgccgaacaagaattcttatatttgag

SEQ ID NO: 35047 - DNA, 2610 bp, Zea Mays
ccaacattgagtcacaaaatgcatcaggagctccatgcaagatcaaaattcgttttgagttgcatttcttatgaatcagtctgcggagaatctgtttggctatcctgcatcagaagcccttggtcaggacgccctcatgcttctggttgattctggtgatcacaatgtggtgaatgacattttccgacgtatttctatgggtgaaagttggactgggaagtttccagttaagagcaaacaaggagatagattttcagctgttgccaccaacacacctttctatgatgaagatggaagtttggtgggtatcatttgtgtttcaagtgattcccgccacttggagcagatattttgtaagcctccaacctctgcaaggcctcaatcagaatcatctaggacatcttgtgatgggagttgcagcaacactagtcgcagaatcaatttgttgaacagaagtccttttgatcctcagatacccctgcaaagcacttttgcatccaggataacgaatttgaataataacacaggctaccaaggtcacaaataaagttcgttctcgggtcagcacagacgattatggcatagaacgggaaggtggcagtggtgagagtcattgttcggatcgtggtgcaaaggaagaaccaacatctagcggaacaaatacacctagagggaatgcaccacatggtcccttttctacagatgagaactcccctgggaaatcaacgaacccaagcagtgatgaattagaaggaaaagtaggtctgcacaagtttttgagttcaaaggcagaggcactactgaacaagaaagggatatcatggccttggaaagtgcgcgagaatgacggacctgatgaaagaaatcatgtgatattgttgcatggagaccaagagaatgttatgaatcatcagaaggtttcagattctagcatagctccagattcccaaggcgctgaacacaacctacctagcaaaaatgaggcatcaggttcctggtcctcttacaacaataacagcacaagcagtgcaagcagcacaggaagcactaatagcagtgctctctacaaagtagatcatgaagcggattgtctggattatgagatcttatgggaagaccttgtcattggagaacaaatagggcaaggctcttgtgggacagtatatcatgctttgtggtatggttcggatgtggctgttaaagttttctccaggcaagaatattcagaagatgtgatactgtcctttcgacaagaggtgtcccttatgaaaaaactgcgccatcctaacatactgctcttcatgggtgcggttacgtctccacaacgcctttgtattgtaacagagtttctccctcgtggaagcttgtttcgcttacttcaaaggagtgctaccaagttgggtgtgagacgacatgttcacatggctttagatattgcaaggggcatgaactatcttcaccattccagcccacctatcattcaccgagatttgaagtcatctaatctgttagtcgacaagaactggactgtgaaggtggcggactttggcctttcacgtctcaagcgcgaaactttcttgacaacaaaaacgggaaaaggaacaccgcaatggatggcgccagaggtgctgcgcaacgaaccttccgatgaaaagtctgatgtgtatagctatggggtgatcctatgggagctcgttactcagaagataccctgggaaaacctgaactcgatgcagggttttgcggccacaattttttttaagataatgcttgtctgggtagcttcgacgatccctaactgtcgagggtatgctcccatatccgtaggtcattggcgcagtaggttttatgaaccaaaggttggatatcccaagcgaagtagatcctcagtggagatcaattatcctgaactgttgggaaagcgacccgcagcaacggccgtcgttccaggagcttctggagaggctccgcgagctgcagaggcgttacgccatccagcagcggaacgcgaagaacagcgtcgaggagtgaagactgaagaatgcaatgcaactctcccaagcggcggcgggcttgctttgaagcattttgcgagccagcagcatgccagatctagagaagggcctgagcctcctgtactggggcctgggggctgctaaggctggaagaagtatgttctacagacgaggcgccttctgtcttcttctttttttttaaaaaaaaagaaagttcttccccatggcaattgtgactgtaattaatttctgggtcctgacagcaagggtcagtagggtagcgagtgagtagtgactgagctcgggcttgcttgctagcgcctctgggttctgattcttgacaacgcaaatgcgtactacgtggttaacagtaacatccaatccagcctccagtttctggcaagggcatgcatgatgatgtgtagattgtctgttctgataggtcagtggtgtgtacatgtgatccccaaccgaacgcattcgactgcgtcgcttcgatatctggttggtcaggttacactgctgaatacgggtgatagatccttcttccctagcaagtagcaatggctgccgaacaagaattcttatatttgag

SEQ ID NO: 35048 - DNA, 3525 bp, Zea Mays
attcaatctccatccggatgcgtcatgcgtgtgtgtgacttgtgagagagacagattccacagcaatttgctccccttccacgcacaggtcaagaaccgctccccagaaaagatcgtatttttcatcgattcaaccggtttctgtacgggaaatcgctgctggagatctcagagaaccggaagctcggagcttttgctccgtttgcgtcgaatctgccttgggagcggataaaggagcggcctttcgagctcgtcggagccgcccctgaggaggcgaaaggggacgcggcggcggcgccatcagctgtagggcgctcgtggaagtcggtgaagccggtggtttgaggacgaggtggcctcggtggtttcgaggaagccacccactgccgcggcggggatggactccagcggggaggaactcctgaagaagatccgggagctggaggttgggcaggcgcagctcaagcaggagatgtccaagctgatacccggcgccgtggagcggcggcgctcgcaatccgtctcgccgcggcgcggcgcgccggtgccaccgccgaccaaggcgaaggcggggccaccaggtaggctgctgtccgggggatttgagggcgggcagcgtgcgtgggcccgtgggtcggcgtctttcccgcactcatcgccgctgcatcgggagggccgggccacgggcgctggaaatggtagcaccagcgctaggctgcctgagaggcagtactccagggtgctgcagtcactggggcattccgtccacattcttgacctcgatgggaggatcatatactgttgttggttgcttgggggccaacattgagtcacaaaatgcatcaggagctccatgcaagatcaaaattcgttttgagttgcatttcttatgaatcagtctgcggagaatctgtttggctatcctgcatcagaagcccttggtcaggacgccctcatgcttctggttgattctggtgatcacaatgtggtgaatgacattttccgacgtatttctatgggtgaaagttggactgggaagtttccagttaagagcaaacaaggagatagattttcagctgttgccaccaacacacctttctatgatgaagatggaagtttggtgggtatcatttgtgtttcaagtgattcccgccacttggagcagatattttgtaagcctccaacctctgcaaggcctcaatcagaatcatctaggacatcttgtgatgggagttgcagcaacactagtcgcagaatcaatttgttgaacagaagtccttttgatcctcagatacccctgcaaagcacttttgcatccaggataacgaatttggctaccaaggtcacaaataaagttcgttctcgggtcagcacagacgattatggcatagaacgggaaggtggcagtggtgagagtcattgttcggatcgtggtgcaaaggaagaaccaacatctagcggaacaaatacacctagagggaatgcaccacatggtcccttttctacagatgagaactcccctgggaaatcaacgaacccaagcagtgatgaattagaaggaaaagtaggtctgcacaagtttttgagttcaaaggcagaggcactactgaacaagaaagggatatcatggccttggaaagtgcgcgagaatgacggacctgatgaaagaaatcatgtgatattgttgcatggagaccaagagaatgttatgaatcatcagaaggtttcagattctagcatagctccagattcccaaggcgctgaacacaacctacctagcaaaaatgaggcatcaggttcctggtcctcttacaacaataacagcacaagcagtgcaagcagcacaggaagcactaatagcagtgctctctacaaagtagatcatgaagcggattgtctggattatgagatcttatgggaagaccttgtcattggagaacaaatagggcaaggctcttgtgggacagtatatcatgctttgtggtatggttcggatgtggctgttaaagttttctccaggcaagaatattcagaagatgtgatactgtcctttcgacaagaggtgtcccttatgaaaaaactgcgccatcctaacatactgctcttcatgggtgcggttacgtctccacaacgcctttgtattgtaacagagtttctccctcggctatgacaatgcctgaagtaccattatatattttgattctgagggagtattctccatgggtgatggatgacagcagatctatgatatccttttccttgggttgggttggttccatgttcaaaacactgtcaagcactcaaacacttctctctttttggttcatttccgtattttttcacttctgtcttttcaaatgcagtggaagcttgtttcgcttacttcaaaggagtgctaccaagttgggtgtgagacgacatgttcacatggctttagatattgcaaggggcatgaactatcttcaccattccagcccacctatcattcaccgagatttgaagtcatctaatctgttagtcgacaagaactggactgtgaaggtggcggactttggcctttcacgtctcaagcgcgaaactttcttgacaacaaaaacgggaaaaggaacaccgcaatggatggcgccagaggtgctgcgcaacgaaccttccgatgaaaagtctgatgtgtatagctatggggtgatcctatgggagctcgttactcagaagataccctgggaaaacctgaactcgatgcaggtcattggcgcagtaggttttatgaaccaaaggttggatatcccaagcgaagtagatcctcagtggagatcaattatcctgaactgttgggaaagcgacccgcagcaacggccgtcgttccaggagcttctggagaggctccgcgagctgcagaggcgttacgccatccagcagcggaacgcgaagaacagcgtcgaggagtgaagactgaagaatgcaatgcaactctcccaagcggcggcgggcttgctttgaagcattttgcgagccagcagcatgccagatctagagaagggcctgagcctcctgtactggggcctgggggctgctaaggctggaagaagtatgttctacagacgaggcgccttctgtcttcttctttttttttaaaaaaaaagaaagttcttccccatggcaattgtgactgtaattaatttctgggtcctgacagcaagggtcagtagggtagcgagtgagtagtgactgagctcgggcttgcttgctagcgcctctgggttctgattcttgacaacgcaaatgcgtactacgtggttaacagtaacatccaatccagcctccagtttctggcaagggcatgcatgatgatgtgtagattgtctgttctgataggtcagtggtgtgtacatgtgatccccaaccgaacgcattcgactgcgtcgcttcgatatctggttggtcaggttacactgctgaatacgggtgatagatccttcttccctagcaagtagcaatggctgccgaacaagaattcttatatttgag

SEQ ID NO: 35049 - DNA, 3325 bp, Zea Mays
attcaatctccatccggatgcgtcatgcgtgtgtgtgacttgtgagagagacagattccacagcaatttgctccccttccacgcacaggtcaagaaccgctccccagaaaagatcgtatttttcatcgattcaaccggtttctgtacgggaaatcgctgctggagatctcagagaaccggaagctcggagcttttgctccgtttgcgtcgaatctgccttgggagcggataaaggagcggcctttcgagctcgtcggagccgcccctgaggaggcgaaaggggacgcggcggcggcgccatcagctgtagggcgctcgtggaagtcggtgaagccggtggtttgaggacgaggtggcctcggtggtttcgaggaagccacccactgccgcggcggggatggactccagcggggaggaactcctgaagaagatccgggagctggaggttgggcaggcgcagctcaagcaggagatgtccaagctgatacccggcgccgtggagcggcggcgctcgcaatccgtctcgccgcggcgcggcgcgccggtgccaccgccgaccaaggcgaaggcggggccaccaggtaggctgctgtccgggggatttgagggcgggcagcgtgcgtgggcccgtgggtcggcgtctttcccgcactcatcgccgctgcatcgggagggccgggccacgggcgctggaaatggtagcaccagcgctaggctgcctgagaggcagtactccagggtgctgcagtcactggggcattccgtccacattcttgacctcgatgggaggatcatatactgttgttggttgcttgggggccaacattgagtcacaaaatgcatcaggagctccatgcaagatcaaaattcgttttgagttgcatttcttatgaatcagtctgcggagaatctgtttggctatcctgcatcagaagcccttggtcaggacgccctcatgcttctggttgattctggtgatcacaatgtggtgaatgacattttccgacgtatttctatgggtgaaagttggactgggaagtttccagttaagagcaaacaaggagatagattttcagctgttgccaccaacacacctttctatgatgaagatggaagtttggtgggtatcatttgtgtttcaagtgattcccgccacttggagcagatattttgtaagcctccaacctctgcaaggcctcaatcagaatcatctaggacatcttgtgatgggagttgcagcaacactagtcgcagaatcaatttgttgaacagaagtccttttgatcctcagatacccctgcaaagcacttttgcatccaggataacgaatttggctaccaaggtcacaaataaagttcgttctcgggtcagcacagacgattatggcatagaacgggaaggtggcagtggtgagagtcattgttcggatcgtggtgcaaaggaagaaccaacatctagcggaacaaatacacctagagggaatgcaccacatggtcccttttctacagatgagaactcccctgggaaatcaacgaacccaagcagtgatgaattagaaggaaaagtaggtctgcacaagtttttgagttcaaaggcagaggcactactgaacaagaaagggatatcatggccttggaaagtgcgcgagaatgacggacctgatgaaagaaatcatgtgatattgttgcatggagaccaagagaatgttatgaatcatcagaaggtttcagattctagcatagctccagattcccaaggcgctgaacacaacctacctagcaaaaatgaggcatcaggttcctggtcctcttacaacaataacagcacaagcagtgcaagcagcacaggaagcactaatagcagtgctctctacaaagtagatcatgaagcggattgtctggattatgagatcttatgggaagaccttgtcattggagaacaaatagggcaaggctcttgtgggacagtatatcatgctttgtggtatggttcggatgtggctgttaaagttttctccaggcaagaatattcagaagatgtgatactgtcctttcgacaagaggtgtcccttatgaaaaaactgcgccatcctaacatactgctcttcatgggtgcggttacgtctccacaacgcctttgtattgtaacagagtttctccctcgtggaagcttgtttcgcttacttcaaaggagtgctaccaagttgggtgtgagacgacatgttcacatggctttagatattgcaaggggcatgaactatcttcaccattccagcccacctatcattcaccgagatttgaagtcatctaatctgttagtcgacaagaactggactgtgaaggtggcggactttggcctttcacgtctcaagcgcgaaactttcttgacaacaaaaacgggaaaaggaacaccgcaatggatggcgccagaggtgctgcgcaacgaaccttccgatgaaaagtctgatgtgtatagctatggggtgatcctatgggagctcgttactcagaagataccctgggaaaacctgaactcgatgcaggtcattggcgcagtaggttttatgaaccaaaggttggatatcccaagcgaagtagatcctcagtggagatcaattatcctgaactgttgggaaagcgacccgcagcaacggccgtcgttccaggagcttctggagaggctccgcgagctgcagaggcgttacgccatccagcagcggaacgcgaagaacagcgtcgaggagtgaagactgaagaatgcaatgcaactctcccaagcggcggcgggcttgctttgaagcattttgcgagccagcagcatgccagatctagagaagggcctgagcctcctgtactggggcctgggggctgctaaggctggaagaagtatgttctacagacgaggcgccttctgtcttcttctttttttttaaaaaaaaagaaagttcttccccatggcaattgtgactgtaattaatttctgggtcctgacagcaagggtcagtagggtagcgagtgagtagtgactgagctcgggcttgcttgctagcgcctctgggttctgattcttgacaacgcaaatgcgtactacgtggttaacagtaacatccaatccagcctccagtttctggcaagggcatgcatgatgatgtgtagattgtctgttctgataggtcagtggtgtgtacatgtgatccccaaccgaacgcattcgactgcgtcgcttcgatatctggttggtcaggttacactgctgaatacgggtgatagatccttcttccctagcaagtagcaatggctgccgaacaagaattcttatatttgag

SEQ ID NO: 35050 - DNA, 4135 bp, Zea Mays
attcaatctccatccggatgcgtcatgcgtgtgtgtgacttgtgagagagacagattccacagcaatttgctccccttccacgcacaggtcaagaaccgctccccagaaaagatcgtatttttcatcgattcaaccggtttctgtacgggaaatcgctgctggagatctcagagaaccggaagctcggagcttttgctccgtttgcgtcgaatctgccttgggagcggataaaggagcggcctttcgagctcgtcggagccgcccctgaggaggcgaaaggggacgcggcggcggcgccatcagctgtagggcgctcgtggaagtcggtgaagccggtggtttgaggacgaggtggcctcggtggtttcgaggaagccacccactgccgcggcggggatggactccagcggggaggaactcctgaagaagatccgggagctggaggttgggcaggcgcagctcaagcaggagatgtccaagctgatacccggcgccgtggagcggcggcgctcgcaatccgtctcgccgcggcgcggcgcgccggtgccaccgccgaccaaggcgaaggcggggccaccaggtaggctgctgtccgggggatttgagggcgggcagcgtgcgtgggcccgtgggtcggcgtctttcccgcactcatcgccgctgcatcgggagggccgggccacgggcgctggaaatggtagcaccagcgctaggctgcctgagaggcagtactccagggtgctgcagtcactggggcattccgtccacattcttgacctcgatgggaggatcatatactgttgttggttgcttgggggccaacattgagtcacaaaatgcatcaggagctccatgcaagatcaaaattcgttttgagttgcatttcttatgaatcagtctgcggagaatctgtttggctatcctgcatcagaagcccttggtcaggacgccctcatgcttctggttgattctggtgatcacaatgtggtgaatgacattttccgacgtatttctatgggtgaaagttggactgggaagtttccagttaagagcaaacaaggagatagattttcagctgttgccaccaacacacctttctatgatgaagatggaagtttggtgggtatcatttgtgtttcaagtgattcccgccacttggagcagatattttgtaagcctccaacctctgcaaggcctcaatcagaatcatctaggacatcttgtgatgggagttgcagcaacactagtcgcagaatcaatttgttgaacagaagtccttttgatcctcagatacccctgcaaagcacttttgcatccaggataacgaatttggctaccaaggtcacaaataaagttcgttctcgggtcagcacagacgattatggcatagaacgggaaggtggcagtggtgagagtcattgttcggatcgtggtgcaaaggaagaaccaacatctagcggaacaaatacacctagagggaatgcaccacatggtcccttttctacagatgagaactcccctgggaaatcaacgaacccaagcagtgatgaattagaaggaaaagtaggtctgcacaagtttttgagttcaaaggcagaggcactactgaacaagaaagggatatcatggccttggaaagtgcgcgagaatgacggacctgatgaaagaaatcatgtgatattgttgcatggagaccaagagaatgttatgaatcatcagaaggtttcagattctagcatagctccagattcccaaggcgctgaacacaacctacctagcaaaaatgaggcatcaggttcctggtcctcttacaacaataacagcacaagcagtgcaagcagcacaggaagcactaatagcagtgctctctacaaagtagatcatgaagcggattgtctggattatgagatcttatgggaagaccttgtcattggagaacaaatagggcaaggctcttgtgggacagtatatcatgctttgtggtatggttcggatgtggctgttaaagttttctccaggcaagaatattcagaagatgtgatactgtcctttcgacaagaggtgtcccttatgaaaaaactgcgccatcctaacatactgctcttcatgggtgcggttacgtctccacaacgcctttgtattgtaacagagtttctccctcggtatgtgcctacttttttttatgggcatacatgtttgcaagtgtttcttattctgtagcattatctcactgagtcactgttgcacatctacatgagttgagccaagaagtatgtttatatctggttgaattgttcgactgcaacagcaatagttgcataaggaaaaggaaatttaaattcagaaaatctaggcttggtttaagttgagaagtcattgatatgcatacattttgctgttggaagtattgtatcctgtaaaataaaatctgtatttaagtaggattatgtagtaactagtaaaaatgtttctctcgaaattgaagtattctgtccaaccttagtgaatcttgatgcatgtatagaatataaaaccataatgtatagcctaggtgatactttccctggttcaaacttcaagatatatgccgtttaaattcctacagatcaaacatttttttgactttgaccatggatatgtaaaggattgcgtagattgactatgtaagatgttgctagatttatcatgaaaattactttcacaatatttaattatgtttattgaagatcatatttttcgtagaaattgctagtcaaagtgtcaccttgtaggctatgacaatgcctgaagtaccattatatattttgattctgagggagtattctccatgggtgatggatgacagcagatctatgatatccttttccttgggttgggttggttccatgttcaaaacactgtcaagcactcaaacacttctctctttttggttcatttccgtattttttcacttctgtcttttcaaatgcagtggaagcttgtttcgcttacttcaaaggagtgctaccaagttgggtgtgagacgacatgttcacatggctttagatattgcaaggggcatgaactatcttcaccattccagcccacctatcattcaccgagatttgaagtcatctaatctgttagtcgacaagaactggactgtgaaggtggcggactttggcctttcacgtctcaagcgcgaaactttcttgacaacaaaaacgggaaaaggaacaccgcaatggatggcgccagaggtgctgcgcaacgaaccttccgatgaaaagtctgatgtgtatagctatggggtgatcctatgggagctcgttactcagaagataccctgggaaaacctgaactcgatgcagggtcattggcgcagtaggttttatgaaccaaaggttggatatcccaagcgaagtagatcctcagtggagatcaattatcctgaactgttgggaaagcgacccgcagcaacggccgtcgttccaggagcttctggagaggctccgcgagctgcagaggcgttacgccatccagcagcggaacgcgaagaacagcgtcgaggagtgaagactgaagaatgcaatgcaactctcccaagcggcggcgggcttgctttgaagcattttgcgagccagcagcatgccagatctagagaagggcctgagcctcctgtactggggcctgggggctgctaaggctggaagaagtatgttctacagacgaggcgccttctgtcttcttctttttttttaaaaaaaaagaaagttcttccccatggcaattgtgactgtaattaatttctgggtcctgacagcaagggtcagtagggtagcgagtgagtagtgactgagctcgggcttgcttgctagcgcctctgggttctgattcttgacaacgcaaatgcgtactacgtggttaacagtaacatccaatccagcctccagtttctggcaagggcatgcatgatgatgtgtagattgtctgttctgataggtcagtggtgtgtacatgtgatccccaaccgaacgcattcgactgcgtcgcttcgatatctggttggtcaggttacactgctgaatacgggtgatagatccttcttccctagcaagtagcaatggctgccgaacaagaattcttatatttgag

SEQ ID NO: 35051 - DNA, 3464 bp, Zea Mays
attcaatctccatccggatgcgtcatgcgtgtgtgtgacttgtgagagagacagattccacagcaatttgctccccttccacgcacaggtcaagaaccgctccccagaaaagatcgtatttttcatcgattcaaccggtttctgtacgggaaatcgctgctggagatctcagagaaccggaagctcggagcttttgctccgtttgcgtcgaatctgccttgggagcggataaaggagcggcctttcgagctcgtcggagccgcccctgaggaggcgaaaggggacgcggcggcggcgccatcagctgtagggcgctcgtggaagtcggtgaagccggtggtttgaggacgaggtggcctcggtggtttcgaggaagccacccactgccgcggcggggatggactccagcggggaggaactcctgaagaagatccgggagctggaggttgggcaggcgcagctcaagcaggagatgtccaagctgatacccggcgccgtggagcggcggcgctcgcaatccgtctcgccgcggcgcggcgcgccggtgccaccgccgaccaaggcgaaggcggggccaccaggtaggctgctgtccgggggatttgagggcgggcagcgtgcgtgggcccgtgggtcggcgtctttcccgcactcatcgccgctgcatcgggagggccgggccacgggcgctggaaatggtagcaccagcgctaggctgcctgagaggcagtactccagggtgctgcagtcactggggcattccgtccacattcttgacctcgatgggaggatcatatactggaatcagtctgcggagaatctgtttggctatcctgcatcagaagcccttggtcaggacgccctcatgcttctggttgattctggtgatcacaatgtggtgaatgacattttccgacgtatttctatgggtgaaagttggactgggaagtttccagttaagagcaaacaaggagatagattttcagctgttgccaccaacacacctttctatgatgaagatggaagtttggtgggtatcatttgtgtttcaagtgattcccgccacttggagcagatattttgtaagcctccaacctctgcaaggcctcaatcagaatcatctaggacatcttgtgatgggagttgcagcaacactagtcgcagaatcaatttgttgaacagaagtccttttgatcctcagatacccctgcaaagcacttttgcatccaggataacgaatttggctaccaaggtcacaaataaagttcgttctcgggtcagcacagacgattatggcatagaacgggaaggtggcagtggtgagagtcattgttcggatcgtggtgcaaaggaagaaccaacatctagcggaacaaatacacctagagggaatgcaccacatggtcccttttctacagatgagaactcccctgggaaatcaacgaacccaagcagtgatgaattagaaggaaaagtaggtctgcacaagtttttgagttcaaaggcagaggcactactgaacaagaaagggatatcatggccttggaaagtgcgcgagaatgacggacctgatgaaagaaatcatgtgatattgttgcatggagaccaagagaatgttatgaatcatcagaaggtttcagattctagcatagctccagattcccaaggcgctgaacacaacctacctagcaaaaatgaggcatcaggttcctggtcctcttacaacaataacagcacaagcagtgcaagcagcacaggaagcactaatagcagtgctctctacaaagtagatcatgaagcggattgtctggattatgagatcttatgggaagaccttgtcattggagaacaaatagggcaaggctcttgtgggacagtatatcatgctttgtggtatggttcggatgtggctgttaaagttttctccaggcaagaatattcagaagatgtgatactgtcctttcgacaagaggtgtcccttatgaaaaaactgcgccatcctaacatactgctcttcatgggtgcggttacgtctccacaacgcctttgtattgtaacagagtttctccctcgaaattgctagtcaaagtgtcaccttgtaggctatgacaatgcctgaagtaccattatatattttgattctgagggagtattctccatgggtgatggatgacagcagatctatgatatccttttccttgggttgggttggttccatgttcaaaacactgtcaagcactcaaacacttctctctttttggttcatttccgtattttttcacttctgtcttttcaaatgcagtggaagcttgtttcgcttacttcaaaggagtgctaccaagttgggtgtgagacgacatgttcacatggctttagatattgcaaggggcatgaactatcttcaccattccagcccacctatcattcaccgagatttgaagtcatctaatctgttagtcgacaagaactggactgtgaaggtggcggactttggcctttcacgtctcaagcgcgaaactttcttgacaacaaaaacgggaaaaggaacaccgcaatggatggcgccagaggtgctgcgcaacgaaccttccgatgaaaagtctgatgtgtatagctatggggtgatcctatgggagctcgttactcagaagataccctgggaaaacctgaactcgatgcaggtcattggcgcagtaggttttatgaaccaaaggttggatatcccaagcgaagtagatcctcagtggagatcaattatcctgaactgttgggaaagcgacccgcagcaacggccgtcgttccaggagcttctggagaggctccgcgagctgcagaggcgttacgccatccagcagcggaacgcgaagaacagcgtcgaggagtgaagactgaagaatgcaatgcaactctcccaagcggcggcgggcttgctttgaagcattttgcgagccagcagcatgccagatctagagaagggcctgagcctcctgtactggggcctgggggctgctaaggctggaagaagtatgttctacagacgaggcgccttctgtcttcttctttttttttaaaaaaaaagaaagttcttccccatggcaattgtgactgtaattaatttctgggtcctgacagcaagggtcagtagggtagcgagtgagtagtgactgagctcgggcttgcttgctagcgcctctgggttctgattcttgacaacgcaaatgcgtactacgtggttaacagtaacatccaatccagcctccagtttctggcaagggcatgcatgatgatgtgtagattgtctgttctgataggtcagtggtgtgtacatgtgatccccaaccgaacgcattcgactgcgtcgcttcgatatctggttggtcaggttacactgctgaatacgggtgatagatccttcttccctagcaagtagcaatggctgccgaacaagaattcttatatttgag

SEQ ID NO: 35052 - DNA, 3238 bp, Zea Mays
cttgtgtttattttattcattcaatctccatccggatgcgtcatgcgtgtgtgtgacttgtgagagagacagattccacagcaatttgctccccttccacgcacaggtcaagaaccgctccccagaaaagatcgtatttttcatcgattcaaccggtttctgtacgggaaatcgctgctggagatctcagagaaccggaagctcggagcttttgctccgtttgcgtcgaatctgccttgggagcggataaaggagcggcctttcgagctcgtcggagccgcccctgaggaggcgaaaggggacgcggcggcggcgccatcagctgtagggcgctcgtggaagtcggtgaagccggtggtttgaggacgaggtggcctcggtggtttcgaggaagccacccactgccgcggcggggatggactccagcggggaggaactcctgaagaagatccgggagctggaggttgggcaggcgcagctcaagcaggagatgtccaagctgatacccggcgccgtggagcggcggcgctcgcaatccgtctcgccgcggcgcggcgcgccggtgccaccgccgaccaaggcgaaggcggggccaccaggtaggctgctgtccgggggatttgagggcgggcagcgtgcgtgggcccgtgggtcggcgtctttcccgcactcatcgccgctgcatcgggagggccgggccacgggcgctggaaatggtagcaccagcgctaggctgcctgagaggcagtactccagggtgctgcagtcactggggcattccgtccacattcttgacctcgatgggaggatcatatactggaatcagtctgcggagaatctgtttggctatcctgcatcagaagcccttggtcaggacgccctcatgcttctggttgattctggtgatcacaatgtggtgaatgacattttccgacgtatttctatgggtgaaagttggactgggaagtttccagttaagagcaaacaaggagatagattttcagctgttgccaccaacacacctttctatgatgaagatggaagtttggtgggtatcatttgtgtttcaagtgattcccgccacttggagcagatattttgtaagcctccaacctctgcaaggcctcaatcagaatcatctaggacatcttgtgatgggagttgcagcaacactagtcgcagaatcaatttgttgaacagaagtccttttgatcctcagatacccctgcaaagcacttttgcatccaggataacgaatttggctaccaaggtcacaaataaagttcgttctcgggtcagcacagacgattatggcatagaacgggaaggtggcagtggtgagagtcattgttcggatcgtggtgcaaaggaagaaccaacatctagcggaacaaatacacctagagggaatgcaccacatggtcccttttctacagatgagaactcccctgggaaatcaacgaacccaagcagtgatgaattagaaggaaaagtaggtctgcacaagtttttgagttcaaaggcagaggcactactgaacaagaaagggatatcatggccttggaaagtgcgcgagaatgacggacctgatgaaagaaatcatgtgatattgttgcatggagaccaagagaatgttatgaatcatcagaaggtttcagattctagcatagctccagattcccaaggcgctgaacacaacctacctagcaaaaatgaggcatcaggttcctggtcctcttacaacaataacagcacaagcagtgcaagcagcacaggaagcactaatagcagtgctctctacaaagtagatcatgaagcggattgtctggattatgagatcttatgggaagaccttgtcattggagaacaaatagggcaaggctcttgtgggacagtatatcatgctttgtggtatggttcggatgtggctgttaaagttttctccaggcaagaatattcagaagatgtgatactgtcctttcgacaagaggtgtcccttatgaaaaaactgcgccatcctaacatactgctcttcatgggtgcggttacgtctccacaacgcctttgtattgtaacagagtttctccctcgtggaagcttgtttcgcttacttcaaaggagtgctaccaagttgggtgtgagacgacatgttcacatggctttagatattgcaaggggcatgaactatcttcaccattccagcccacctatcattcaccgagatttgaagtcatctaatctgttagtcgacaagaactggactgtgaaggtggcggactttggcctttcacgtctcaagcgcgaaactttcttgacaacaaaaacgggaaaaggaacaccgcaatggatggcgccagaggtgctgcgcaacgaaccttccgatgaaaactatggggtgatcctatgggagctcgttactcagaagataccctgggaaaacctgaactcgatgcaggtcattggcgcagtaggttttatgaaccaaaggttggatatcccaagcgaagtagatcctcagtggagatcaattatcctgaactgttgggaaagcgacccgcagcaacggccgtcgttccaggagcttctggagaggctccgcgagctgcagaggcgttacgccatccagcagcggaacgcgaagaacagcgtcgaggagtgaagactgaagaatgcaatgcaactctcccaagcggcggcgggcttgctttgaagcattttgcgagccagcagcatgccagatctagagaagggcctgagcctcctgtactggggcctgggggctgctaaggctggaagaagtatgttctacagacgaggcgccttctgtcttcttctttttttttaaaaaaaaagaaagttcttccccatggcaattgtgactgtaattaatttctgggtcctgacagcaagggtcagtagggtagcgagtgagtagtgactgagctcgggcttgcttgctagcgcctctgggttctgattcttgacaacgcaaatgcgtactacgtggttaacagtaacatccaatccagcctccagtttctggcaagggcatgcatgatgatgtgtagattgtctgttctgataggtcagtggtgtgtacatgtgatccccaaccgaacgcattcgactgcgtcgcttcgatatctggttggtcaggttacactgctgaatacgggtgatagatccttcttccctagcaagtagcaatggctgccgaacaagaattcttatatttgag

SEQ ID NO: 35053 - DNA, 3322 bp, Zea Mays
cttccctccatattctatatgacataacttttttctctctctatcatttattctaccaattattattacttgtgtttattttattcattcaatctccatccggatgcgtcatgcgtgtgtgtgacttgtgagagagacagattccacagcaatttgctccccttccacgcacaggtcaagaaccgctccccagaaaagatcgtatttttcatcgattcaaccggtttctgtacgggaaatcgctgctggagatctcagagaaccggaagctcggagcttttgctccgtttgcgtcgaatctgccttgggagcggataaaggagcggcctttcgagctcgtcggagccgcccctgaggaggcgaaaggggacgcggcggcggcgccatcagctgtagggcgctcgtggaagtcggtgaagccggtggtttgaggacgaggtggcctcggtggtttcgaggaagccacccactgccgcggcggggatggactccagcggggaggaactcctgaagaagatccgggagctggaggttgggcaggcgcagctcaagcaggagatgtccaagctgatacccggcgccgtggagcggcggcgctcgcaatccgtctcgccgcggcgcggcgcgccggtgccaccgccgaccaaggcgaaggcggggccaccaggtaggctgctgtccgggggatttgagggcgggcagcgtgcgtgggcccgtgggtcggcgtctttcccgcactcatcgccgctgcatcgggagggccgggccacgggcgctggaaatggtagcaccagcgctaggctgcctgagaggcagtactccagggtgctgcagtcactggggcattccgtccacattcttgacctcgatgggaggatcatatactggaatcagtctgcggagaatctgtttggctatcctgcatcagaagcccttggtcaggacgccctcatgcttctggttgattctggtgatcacaatgtggtgaatgacattttccgacgtatttctatgggtgaaagttggactgggaagtttccagttaagagcaaacaaggagatagattttcagctgttgccaccaacacacctttctatgatgaagatggaagtttggtgggtatcatttgtgtttcaagtgattcccgccacttggagcagatattttgtaagcctccaacctctgcaaggcctcaatcagaatcatctaggacatcttgtgatgggagttgcagcaacactagtcgcagaatcaatttgttgaacagaagtccttttgatcctcagatacccctgcaaagcacttttgcatccaggataacgaatttggctaccaaggtcacaaataaagttcgttctcgggtcagcacagacgattatggcatagaacgggaaggtggcagtggtgagagtcattgttcggatcgtggtgcaaaggaagaaccaacatctagcggaacaaatacacctagagggaatgcaccacatggtcccttttctacagatgagaactcccctgggaaatcaacgaacccaagcagtgatgaattagaaggaaaagtaggtctgcacaagtttttgagttcaaaggcagaggcactactgaacaagaaagggatatcatggccttggaaagtgcgcgagaatgacggacctgatgaaagaaatcatgtgatattgttgcatggagaccaagagaatgttatgaatcatcagaaggtttcagattctagcatagctccagattcccaaggcgctgaacacaacctacctagcaaaaatgaggcatcaggttcctggtcctcttacaacaataacagcacaagcagtgcaagcagcacaggaagcactaatagcagtgctctctacaaagtagatcatgaagcggattgtctggattatgagatcttatgggaagaccttgtcattggagaacaaatagggcaaggctcttgtgggacagtatatcatgctttgtggtatggttcggatgtggctgttaaagttttctccaggcaagaatattcagaagatgtgatactgtcctttcgacaagaggtgtcccttatgaaaaaactgcgccatcctaacatactgctcttcatgggtgcggttacgtctccacaacgcctttgtattgtaacagagtttctccctcgtggaagcttgtttcgcttacttcaaaggagtgctaccaagttgggtgtgagacgacatgttcacatggctttagatattgcaaggggcatgaactatcttcaccattccagcccacctatcattcaccgagatttgaagtcatctaatctgttagtcgacaagaactggactgtgaaggtggcggactttggcctttcacgtctcaagcgcgaaactttcttgacaacaaaaacgggaaaaggaacaccgcaatggatggcgccagaggtgctgcgcaacgaaccttccgatgaaaagtctgatgtgtatagctatggggtgatcctatgggagctcgttactcagaagataccctgggaaaacctgaactcgatgcagggtcattggcgcagtaggttttatgaaccaaaggttggatatcccaagcgaagtagatcctcagtggagatcaattatcctgaactgttgggaaagcgacccgcagcaacggccgtcgttccaggagcttctggagaggctccgcgagctgcagaggcgttacgccatccagcagcggaacgcgaagaacagcgtcgaggagtgaagactgaagaatgcaatgcaactctcccaagcggcggcgggcttgctttgaagcattttgcgagccagcagcatgccagatctagagaagggcctgagcctcctgtactggggcctgggggctgctaaggctggaagaagtatgttctacagacgaggcgccttctgtcttcttctttttttttaaaaaaaaagaaagttcttccccatggcaattgtgactgtaattaatttctgggtcctgacagcaagggtcagtagggtagcgagtgagtagtgactgagctcgggcttgcttgctagcgcctctgggttctgattcttgacaacgcaaatgcgtactacgtggttaacagtaacatccaatccagcctccagtttctggcaagggcatgcatgatgatgtgtagattgtctgttctgataggtcagtggtgtgtacatgtgatccccaaccgaacgcattcgactgcgtcgcttcgatatctggttggtcaggttacactgctgaatacgggtgatagatccttcttccctagcaagtagcaatggctgccgaacaagaattcttatatttgag

SEQ ID NO: 35054 - DNA, 3397 bp, Zea Mays
atttcatctactatttaattttttcgttttaaacttaactgaacaaacagtattacaatacgtggagacagtctcacttccctccatattctatatgacataacttttttctctctctatcatttattctaccaattattattacttgtgtttattttattcattcaatctccatccggatgcgtcatgcgtgtgtgtgacttgtgagagagacagattccacagcaatttgctccccttccacgcacaggtcaagaaccgctccccagaaaagatcgtatttttcatcgattcaaccggtttctgtacgggaaatcgctgctggagatctcagagaaccggaagctcggagcttttgctccgtttgcgtcgaatctgccttgggagcggataaaggagcggcctttcgagctcgtcggagccgcccctgaggaggcgaaaggggacgcggcggcggcgccatcagctgtagggcgctcgtggaagtcggtgaagccggtggtttgaggacgaggtggcctcggtggtttcgaggaagccacccactgccgcggcggggatggactccagcggggaggaactcctgaagaagatccgggagctggaggttgggcaggcgcagctcaagcaggagatgtccaagctgatacccggcgccgtggagcggcggcgctcgcaatccgtctcgccgcggcgcggcgcgccggtgccaccgccgaccaaggcgaaggcggggccaccaggtaggctgctgtccgggggatttgagggcgggcagcgtgcgtgggcccgtgggtcggcgtctttcccgcactcatcgccgctgcatcgggagggccgggccacgggcgctggaaatggtagcaccagcgctaggctgcctgagaggcagtactccagggtgctgcagtcactggggcattccgtccacattcttgacctcgatgggaggatcatatactggaatcagtctgcggagaatctgtttggctatcctgcatcagaagcccttggtcaggacgccctcatgcttctggttgattctggtgatcacaatgtggtgaatgacattttccgacgtatttctatgggtgaaagttggactgggaagtttccagttaagagcaaacaaggagatagattttcagctgttgccaccaacacacctttctatgatgaagatggaagtttggtgggtatcatttgtgtttcaagtgattcccgccacttggagcagatattttgtaagcctccaacctctgcaaggcctcaatcagaatcatctaggacatcttgtgatgggagttgcagcaacactagtcgcagaatcaatttgttgaacagaagtccttttgatcctcagatacccctgcaaagcacttttgcatccaggataacgaatttggctaccaaggtcacaaataaagttcgttctcgggtcagcacagacgattatggcatagaacgggaaggtggcagtggtgagagtcattgttcggatcgtggtgcaaaggaagaaccaacatctagcggaacaaatacacctagagggaatgcaccacatggtcccttttctacagatgagaactcccctgggaaatcaacgaacccaagcagtgatgaattagaaggaaaagtaggtctgcacaagtttttgagttcaaaggcagaggcactactgaacaagaaagggatatcatggccttggaaagtgcgcgagaatgacggacctgatgaaagaaatcatgtgatattgttgcatggagaccaagagaatgttatgaatcatcagaaggtttcagattctagcatagctccagattcccaaggcgctgaacacaacctacctagcaaaaatgaggcatcaggttcctggtcctcttacaacaataacagcacaagcagtgcaagcagcacaggaagcactaatagcagtgctctctacaaagtagatcatgaagcggattgtctggattatgagatcttatgggaagaccttgtcattggagaacaaatagggcaaggctcttgtgggacagtatatcatgctttgtggtatggttcggatgtggctgttaaagttttctccaggcaagaatattcagaagatgtgatactgtcctttcgacaagaggtgtcccttatgaaaaaactgcgccatcctaacatactgctcttcatgggtgcggttacgtctccacaacgcctttgtattgtaacagagtttctccctcgtggaagcttgtttcgcttacttcaaaggagtgctaccaagttgggtgtgagacgacatgttcacatggctttagatattgcaaggggcatgaactatcttcaccattccagcccacctatcattcaccgagatttgaagtcatctaatctgttagtcgacaagaactggactgtgaaggtggcggactttggcctttcacgtctcaagcgcgaaactttcttgacaacaaaaacgggaaaaggaacaccgcaatggatggcgccagaggtgctgcgcaacgaaccttccgatgaaaagtctgatgtgtatagctatggggtgatcctatgggagctcgttactcagaagataccctgggaaaacctgaactcgatgcaggtcattggcgcagtaggttttatgaaccaaaggttggatatcccaagcgaagtagatcctcagtggagatcaattatcctgaactgttgggaaagcgacccgcagcaacggccgtcgttccaggagcttctggagaggctccgcgagctgcagaggcgttacgccatccagcagcggaacgcgaagaacagcgtcgaggagtgaagactgaagaatgcaatgcaactctcccaagcggcggcgggcttgctttgaagcattttgcgagccagcagcatgccagatctagagaagggcctgagcctcctgtactggggcctgggggctgctaaggctggaagaagtatgttctacagacgaggcgccttctgtcttcttctttttttttaaaaaaaaagaaagttcttccccatggcaattgtgactgtaattaatttctgggtcctgacagcaagggtcagtagggtagcgagtgagtagtgactgagctcgggcttgcttgctagcgcctctgggttctgattcttgacaacgcaaatgcgtactacgtggttaacagtaacatccaatccagcctccagtttctggcaagggcatgcatgatgatgtgtagattgtctgttctgataggtcagtggtgtgtacatgtgatccccaaccgaacgcattcgactgcgtcgcttcgatatctggttggtcaggttacactgctgaatacgggtgatagatccttcttccctagcaagtagcaatggctgccgaacaagaattcttatatttgag

SEQ ID NO: 35055 - DNA, 563 bp, Zea Mays
agacgaatacggtcgtctcaaggatggccgggacccgggagcatgcaagcggtgtatgcggtgggccggataagcgcgtctcgcgctgcactggctcctcgtcatgccccgatcgctggccctgctcctgtccttccggtggcgcccgcgaccgggggtcggggccgcgaccgtgccgtctgatggctgccgcccgcattggaggctagcaggtagaaggtgaaggcgtcttcgttggtggttctacaagggctgacgttggcggcaaggctattcaccaatgtcatgccggaacagcgtggaccagtgttatttgctgcaagtgtaatcatggttacttccaacaagtatgtataaatatgattaggtaaattagttacacaacaaagggcatttggtctagtggtatgattctcgcttagggtgcgagaggtcccgagttcaattctcggaatgccccaaaaatatgcgttttttttttgttttacgtttgaacatgcacttcacttctggtttggcttccctttccaaccttgagctctatgaacggatgaacaaacagg

SEQ ID NO: 35056 - DNA, 481 bp, Zea Mays
atgtcaatattatccgtgcatcacccactcaaaagtcaggacaaatctccacagcaagcaatcactttgtcatgctctcgagagagttctttgaaaataactgggaagaactctttactcctcgacgacaacgctgatctggcccttgtcaagcatgtcatagaaggacctagtcttcctctgctcgttccagtggtgcatcttccacatgcctcccgcgatcagacccagggtcagtccaatgaagatctccttcaccacactcgggcccttgagggtggcatgcgcaaccctgccgcctgccatttgctttcttgcttgttgaggtcagacgccaagcgcctcgaaccggcagaagttggggaagttgtgcgggccgagggaatgaaacgaggatggggtgctgaggcaaggaggcgaggcgtggggtggtgtgcacggacacgacgacgacgcgacaagcgcttgggcgacagcacga

SEQ ID NO: 35057 - DNA, 1839 bp, Zea Mays
cgaacccatttcttgcagtgccacaggaaggagcaagacgatccatatttggagaggccatttggcatccagagcatccagataaacttgaaagagcaagaaaaacgaggcctcgtttcttgcagtgcctgtgcgtgcggcggcagcgcatgcgcattctctcccctccccgttctcctctccccgggcaacccggccgcgccgcccccctttcttccaccctcgttggtagagtaccgatatagttcccccatcggccaggaatcctcgcatcgcatcacgacacccggttcctctccctcccttcccttcctctgcttccggggaggaggagaggaaagagacagacgaagggcgcaccgggaaggaggacctggaggaggaggcacacaacacaatccttcctcttgcacgcggagtcctcaagcgggcctcctcctcggccttggctcaaattccgggtgccataacacgacctccgccggcggccaccggcagccatgtcgcccttctacctcgctcgcggtgcttccaagctagtgagaaggattacctcggagacatcggtcgagctcaagattctatctgataaatggcggcttctcctcgctggcctcattttccagtacatacatggtttggccgctcatggggttcattatctgcaccggccgggccctacccttcaagatcttggcttcatgattcttccggagcttgggaaagaaaggggttacatcagtgagacattgtttacattcgtcttcctcaccttcgttttgtggacatttcatcctttcatccttcagactaaacgcttctacactgttctgatatggcgcagggtacttgccttcttatgtgcttctcagtttcttcgaataataacattctatgcaacacagcttccaggacctaattatcattgtcgcgagggctcgcctctggctagattaccacctccccagaatgcagctgaggtctttctgattaattgagtgatttatggatgtggtgacttgatattttcatcccacatgattttcaccctagttttcgtcataacataccagaaatatggaagcataaggttttgtaagatgcttgcttggtgcatagctgttgctcagagtcttcttattatatgttctcgcaagcattacagtgttgacgtcgttgttgcatggtatactgtgaatttggtcgttttctttgtggataagaagcttacagaacttcctgatcgatcagtgggatccacatcagtacttcctgtgagtgcaagggataaagataccaagttgaaagaagaaaataccagattgctgaatggtaactctatggattcagctgatcggaggccacggacacaaatgaatggaaagcaaattgagaatgaaagccatgttgatagtgaaactgtgaaaacatgatcaactatcaaggaggggattttgttagctaagagacgtttcagacgactaaagaaatatgggatgccatccgctttggtgcctactgcctagctccttgacgacttcatgaaatatagctacgaaggaaatagttttacatctcgctgttctaggcagcagaagttttgtttgcaaaactgtacatcttcctcggctctctcatttgtaaccctttttctttctggtttctttcatttatttaccagcttggaattcagattatttatactagttgtgtatagttagcacaggttctttgcatgtgaacagtaatcatatggacaatataagattgttcttgttataagcaccactttttattattcaactttttattcaagtgaaacagccgtagtgtaaaagg

SEQ ID NO: 35058 - DNA, 1869 bp, Zea Mays
acttgcctcctccggaaaggaagacgaacccatttcttgcagtgccacaggaaggagcaagacgatccatatttggagaggccatttggcatccagagcatccagataaacttgaaagagcaagaaaaacgaggcctcgtttcttgcagtgcctgtgcgtgcggcggcagcgcatgcgcattctctcccctccccgttctcctctccccgggcaacccggccgcgccgcccccctttcttccaccctcgttggtagagtaccgatatagttcccccatcggccaggaatcctcgcatcgcatcacgacacccggttcctctccctcccttcccttcctctgcttccggggaggaggagaggaaagagacagacgaagggcgcaccgggaaggaggacctggaggaggaggcacacaacacaatccttcctcttgcacgcggagtcctcaagcgggcctcctcctcggccttggctcaaattccgggtgccataacacgacctccgccggcggccaccggcagccatgtcgcccttctacctcgctcgcggtgcttccaagctagtgagaaggattacctcggagacatcggtcgagctcaagattctatctgataaatggcggcttctcctcgctggcctcattttccagtacatacatggtttggccgctcatggggttcattatctgcaccggccgggccctacccttcaagatcttggcttcatgattcttccgcttgggaaagaaaggggttacatcagtgagacattgtttacattcgtcttcctcaccttcgttttgtggacatttcatcctttcatccttcagactaaacgcttctacactgttctgatatggcgcagggtacttgccttcttatgtgcttctcagtttcttcgaataataacattctatgcaacacagcttccaggacctaattatcattgtcgcgagggctcgcctctggctagattaccacctccccagaatgcagctgaggtctttctgattaatttcccaacaggagtgatttatggatgtggtgacttgatattttcatcccacatgattttcaccctagttttcgtcataacataccagaaatatggaagcataaggttttgtaagatgcttgcttggtgcatagctgttgctcagagtcttcttattatatgttctcgcaagcattacagtgttgacgtcgttgttgcatggtatactgtgaatttggtcgttttctttgtggataagaagcttacagaacttcctgatcgatcagtgggatccacatcagtacttcctgtgagtgcaagggataaagataccaagttgaaagaagaaaataccagattgctgaatggtaactctatggattcagctgatcggaggccacggacacaaatgaatggaaagcaaattgagaatgaaagccatgttgatagtgaaactgtgaaaacatgatcaactatcaaggaggggattttgttagctaagagacgtttcagacgactaaagaaatatgggatgccatccgctttggtgcctactgcctagctccttgacgacttcatgaaatatagctacgaaggaaatagttttacatctcgctgttctaggcagcagaagttttgtttgcaaaactgtacatcttcctcggctctctcatttgtaaccctttttctttctggtttctttcatttatttaccagcttggaattcagattatttatactagttgtgtatagttagcacaggttctttgcatgtgaacagtaatcatatggacaatataagattgttcttgttataagcaccactttttattattcaactttttattcaagtgaaacagccgtagtgtaaaagg

SEQ ID NO: 35059 - DNA, 1949 bp, Zea Mays
cagcactccaacctgtcaatcgccatggttccgttgttactcgcacgactattccaactccgttctagaagtgtctctctctcgtccctgccttgacttgcctcctccggaaaggaagacgaacccatttcttgcagtgccacaggaaggagcaagacgatccatatttggagaggccatttggcatccagagcatccagataaacttgaaagagcaagaaaaacgaggcctcgtttcttgcagtgcctgtgcgtgcggcggcagcgcatgcgcattctctcccctccccgttctcctctccccgggcaacccggccgcgccgcccccctttcttccaccctcgttggtagagtaccgatatagttcccccatcggccaggaatcctcgcatcgcatcacgacacccggttcctctccctcccttcccttcctctgcttccggggaggaggagaggaaagagacagacgaagggcgcaccgggaaggaggacctggaggaggaggcacacaacacaatccttcctcttgcacgcggagtcctcaagcgggcctcctcctcggccttggctcaaattccgggtgccataacacgacctccgccggcggccaccggcagccatgtcgcccttctacctcgctcgcggtgcttccaagctagtgagaaggattacctcggagacatcggtcgagctcaagattctatctgataaatggcggcttctcctcgctggcctcattttccagtacatacatggtttggccgctcatggggttcattatctgcaccggccgggccctacccttcaagatcttggcttcatgattcttccggagcttgggaaagaaaggggttacatcagtgagacattgtttacattcgtcttcctcaccttcgttttgtggacatttcatcctttcatccttcagactaaacgcttctacactgttctgatatggcgcagggcttctcagtttcttcgaataataacattctatgcaacacagcttccaggacctaattatcattgtcgcgagggctcgcctctggctagattaccacctccccagaatgcagctgaggtctttctgattaatttcccaacaggagtgatttatggatgtggtgacttgatattttcatcccacatgattttcaccctagttttcgtcataacataccagaaatatggaagcataaggttttgtaagatgcttgcttggtgcatagctgttgctcagagtcttcttattatatgttctcgcaagcattacagtgttgacgtcgttgttgcatggtatactgtgaatttggtcgttttctttgtggataagaagcttacagaacttcctgatcgatcagtgggatccacatcagtacttcctgtgagtgcaagggataaagataccaagttgaaagaagaaaataccagattgctgaatggtaactctatggattcagctgatcggaggccacggacacaaatgaatggaaagcaaattgagaatgaaagccatgttgatagtgaaactgtgaaaacatgatcaactatcaaggaggggattttgttagctaagagacgtttcagacgactaaagaaatatgggatgccatccgctttggtgcctactgcctagctccttgacgacttcatgaaatatagctacgaaggaaatagttttacatctcgctgttctaggcagcagaagttttgtttgcaaaactgtacatcttcctcggctctctcatttgtaaccctttttctttctggtttctttcatttatttaccagcttggaattcagattatttatactagttgtgtatagttagcacaggttctttgcatgtgaacagtaatcatatggacaatataagattgttcttgttataagcaccactttttattattcaactttttattcaagtgaaacagccgtagtgtaaaagg

SEQ ID NO: 35060 - DNA, 938 bp, Zea Mays
ttctgacaaggatgcagtcctagaggctgacatggaggctacaagccaatctgagaaggggaaaaaaggatgatcagaggcaaaagaagtgcaaaagatgtggtgaattaggtcacagagaaactagctacaagtgccctttaaatggaacaaagaaaaagaagagaaagcctcgcatgaataaaacaaagtatggggagaatgccaaaatccccaaaagccgacttgaagaaggtgtccaaagtcaaggtgttatccaaggtgaagttgttgtccaacttgaagaaattgtccaagatcatagcgttgtccaaggtgaagttgttgtccaaggtgaagaggctgtctaagtcgaagtttcgcttctggtgcaaagcccagctagaccaacaagggagtatattttataggacaacccaatcagggtgactaggagtcggcttgctatgctactgggagatggacagattgataatcagtcacctctcaaaaatacaactccgaagaagatgctagtgaagaagctcacgccaaggaagctgaagagaatgtgaaaatattctaataagctactgttttatgtgttatccaagattttagtaagatagtattagaagtgaaccttgttatgctgtcagatgaactatatttattatgacgtgtgagtagtgctgtcagcttttgggagtagtgtgctgtcagatgaactactactttgaccaagaactactacttgatggagatcgtagttattttgatggatagcgtagtgtgctgtcagatgtactgttatctgaaagaaatgttgaatctgttagtgtgcacaggttaccagcttgtgttattgtgcacaggttatcagcaactctgtttgtgcccaattgttcagcaactgtattccttttgtttgtgctgcaatgttcagcaaagaatgggag

SEQ ID NO: 35061 - DNA, 118 bp, Zea Mays
tccagctcactgaatttgacttaactttttcttgagaattatacggtacaggacaccagtgctgataatattcaagttcttcagaatctggtaagctggtgcatccacatattcaaag

SEQ ID NO: 35062 - DNA, 3110 bp, Zea Mays
gaaccagctaaccaaacagaccgcactctgctcgctcggcgttgtctgatctctcctcgcgcccgtcctccgctgcccgactccggcgtcctccccaccgacccatccacagctcaagccaacattcacccgtatcccgcgcgcgcttgattcgccgcatctgagcgtcacggccgcgactgcgcgccctgcgtcgcctcccgccgccgccgcacggccgcgacggatgctcggccaccgcttccccgccgcgctcggcctcccgcgcggtctgctgctggggaggagcgtcacccgccgcagtctgtccgccatggccggtggcgaggcggagggcccgctcgggggtttcttcgattacatggagcggctgcgcaactacgagcgctcgggcgtgccgcgcggcgccggcaccgactccgacgacggattcgacctcgggcgcatgcgccgactccttcgtcggctcggcgatccccacaccgacttcccggctgtgcatatcgccggcaccaaggggaaaggttctactgctgcattgctgtccaatatcatgagggcgcaaggctacaatgtgggaagttattctagtccacatcttctaacaatacgtgaacggatttctgttggaaatgatggaggccctgttccagtacgactgttgagtgatctttttgatggggctaaggaagctattgatgaagcaatagaattggaaaatggatccctaacgcattttgaggtagtttgttattgtaaatatgcccacctgttctcttatgaagattagtttttgactgttttgtggacacatacaaataatcattgtaactgatgggaatttttttcttacatccaaatactatcgggtttgaaactgttcatgttttgtttctcatttgatcatagacatgacttccagagattgtatgcatgcctttgtaggtttttactgctctctcatttcttctattctcacaagaaaatgttgacattgccatcattgaagtaagttacagaacatctgttactgccctttatgacctctcagattttgtgctcattgctgttaaatgtcaagactgaaataggaagtaatgcaatcgatatcactgattttaaagaagtcttgaaagcaaagggtcttgcttttcaaaattgaattacattctcaacatcatctgttcaattcagtcgtaaaaatgatatcaccagtttttgcttttatctatttattttctaggcaggtcttggtggagctagggatgcaacaaatgttattcggagtactgaattagcagcatccgtcataacaacagtagggagggaacatctggttgcattgggtggctccctgcaaagcatagcaatagcaaagtctggaatcattaaacaaggacaaccagttgtgattggtggaccattttcagcagttattgagcaaattattcgtgacagggcattcttgacacaatctcctgtgatatctgcttgtgatcctggcatcaagagctttacgaaatgcatagattgggataatgtccattgaaatgcatgacataaacctccaactgctgggagatcatcagcgtcagaatgctgtcacagctgcttgcacggctctctgtctccgtagtctagttaaggatgggaaatctctgatgcttctatccaagctggcttgagggagacccaacttcctgggaggagccagtttctcacagcagaggaagcctcggttcttgggctggatggtgcatctactgtactaatcgatggagcccatactgaggaatctgcaaaggccttatcaggcgtgatagaagctgtcagaccagaagggcctctagcgcttgttgtcggaatggctagtgacaaggagcatcttgcgtttgctgagcagcttctctcaggtcaaaccccagatgtcgtgctactgacagaggcgagcatcgccggaggaagctcccgtgcaatgccagcctcatccctgaaagaagtatggattgccgcggcacgccatcgtggcatcgagtacgtggacatcggtggcatcagtggcactgaaaccctggagcacatcgccgatctgttgggcagtccttcgctgagttccagaaggaagcccatggtgatcgggtgccaagacatggggccgttctcctggaacctgatcattgctgcctcccagctccttgagagcagaggcagggccccaggcctcatctgcgtgaccggctccctgcatctcgtcggggccatactgcaaaagctgggacggcattagaggcgccaaccatctcatctttcatagtaccatatactagactggaagagagtggaagctacactggactcgtagtggtgtaccggcgagatggatcattcgtgtggtgtacattgcgggactgtttggatggaatctaccaaaatgcctgggccaggcatccatcccaggcgcccgattttgaacatttgggccaggacccaggatgcatttgactgaggcagggctcccatccaaacggacggcaggcaagcaaggcatctgtgctgatgggatattgggatcacgtcctgcgttgctgccaacttgttcgtggctctttctaagctgacaataatagattgtaaataggctgattatctgtactcctacaaaacacaccagtttttctggtttataccttcgtgaggtatattcctctacccctctcggctcggctaactagtgtataggtgtacatttgggccgggtttgatgggtcggcctggagcacggaaaaaagagcacggcctaggcacggcacgactcgaaatattttagtgttgggccagcacggcctgatatatcgggctgagtttgggccgaggtcacgacatatttaaggcaggcacgaaatgactcatatagagacacgaaaaggcttatatatttattaaaaccacacttcattccatactttcatgtactttataaaaacacaaatctagagataattctagttagatgttttttgtagctttgaattatagtatgtgatgtaattttacttttgttatgaacattagataatgaattgaacttatgaactttgtatacaattgat

SEQ ID NO: 35063 - DNA, 2851 bp, Zea Mays
gaaccagctaaccaaacagaccgcactctgctcgctcggcgttgtctgatctctcctcgcgcccgtcctccgctgcccgactccggcgtcctccccaccgacccatccacagctcaagccaacattcacccgtatcccgcgcgcgcttgattcgccgcatctgagcgtcacggccgcgactgcgcgccctgcgtcgcctcccgccgccgccgcacggccgcgacggatgctcggccaccgcttccccgccgcgctcggcctcccgcgcggtctgctgctggggaggagcgtcacccgccgcagtctgtccgccatggccggtggcgaggcggagggcccgctcgggggtttcttcgattacatggagcggctgcgcaactacgagcgctcgggcgtgccgcgcggcgccggcaccgactccgacgacggattcgacctcgggcgcatgcgccgactccttcgtcggctcggcgatccccacaccgacttcccggctgtgcatatcgccggcaccaaggggaaaggttctactgctgcattgctgtccaatatcatgagggcgcaaggctacaatgtgggaagttattctagtccacatcttctaacaatacgtgaacggatttctgttggaaatgatggaggccctgttccagtacgactgttgagtgatctttttgatggggctaaggaagctattgatgaagcaatagaattggaaaatggatccctaacgcattttgaggtttttactgctctctcatttcttctattctcacaagaaaatgttgacattgccatcattgaagtaagttacagaacatctgttactgccctttatgacctctcagattttgtgctcattgctgttaaatgtcaagactgaaataggaagtaatgcaatcgatatcactgattttaaagaagtcttgaaagcaaagggtcttgcttttcaaaattgaattacattctcaacatcatctgttcaattcagtcgtaaaaatgatatcaccagtttttgcttttatctatttattttctaggcaggtcttggtggagctagggatgcaacaaatgttattcggagtactgaattagcagcatccgtcataacaacagtagggagggaacatctggttgcattgggtggctccctgcaaagcatagcaatagcaaagtctggaatcattaaacaaggacaaccagttgtgattggtggaccattttcagcagttattgagcaaattattcgtgacagggcattcttgacacaatctcctgtgatatctgcttgtgatcctggcatcaagagctttacgaaatgcatagattgggataatggtaagccgtatcaacgctgttacttcagcataaatatttcaaatgatgtacccttgtccattgaaatgcatgacataaacctccaactgctgggagatcatcagcgtcagaatgctgtcacagctgcttgcacggctctctgtctccgtagtctaggatgggaaatctctgatgcttctatccaagctggcttgagggagacccaacttcctgggaggagccagtttctcacagcagaggaagcctcggttcttgggctggatggtgcatctactgtactaatcgatggagcccatactgaggaatctgcaaaggccttatcaggcgtgatagaagctgtcagaccagaagggcctctagcgcttgttgtcggaatggctagtgacaaggagcatcttgcgtttgctgagcagcttctctcaggtcaaaccccagatgtcgtgctactgacagaggcgagcatcgccggaggaagctcccgtgcaatgccagcctcatccctgaaagaagtatggattgccgcggcacgccatcgtggcatcgagtacgtggacatcggtggcatcagtggcactgaaaccctggagcacatcgccgatctgttgggcagtccttcgctgagttccagaaggaagcccatggtgatcgggtgccaagacatggggccgttctcctggaacctgatcattgctgcctcccagctccttgagagcagaggcagggccccaggcctcatctgcgtgaccggctccctgcatctcgtcggggccatactgcaaaagctgggacggcattagaggcgccaaccatctcatctttcatagtaccatatactagactggaagagagtggaagctacactggactcgtagtggtgtaccggcgagatggatcattcgtgtggtgtacattgcgggactgtttggatggaatctaccaaaatgcctgggccaggcatccatcccaggcgcccgattttgaacatttgggccaggacccaggatgcatttgactgaggcagggctcccatccaaacggacggcaggcaagcaaggcatctgtgctgatgggatattgggatcacgtcctgcgttgctgccaacttgttcgtggctctttctaagctgacaataatagattgtaaataggctgattatctgtactcctacaaaacacaccacacggaaaaaagagcacggcctaggcacggcacgactcgaaatattttagtgttgggccagcacggcctgatatatcgggctgagtttgggccgaggtcacgacatatttaaggcaggcacgaaatgactcatatagagacacgaaaaggcttatatatttattaaaaccacacttcattccatactttcatgtactttataaaaacacaaatctagagataattctagttagatgttttttgtagctttgaattatagtatgtgatgtaattttacttttgttatgaacattagataatgaattgaacttatgaactttgtatacaattgat

SEQ ID NO: 35064 - DNA, 2560 bp, Zea Mays
gaaccagctaaccaaacagaccgcactctgctcgctcggcgttgtctgatctctcctcgcgcccgtcctccgctgcccgactccggcgtcctccccaccgacccatccacagctcaagccaacattcacccgtatcccgcgcgcgcttgattcgccgcatctgagcgtcacggccgcgactgcgcgccctgcgtcgcctcccgccgccgccgcacggccgcgacggatgctcggccaccgcttccccgccgcgctcggcctcccgcgcggtctgctgctggggaggagcgtcacccgccgcagtctgtccgccatggccggtggcgaggcggagggcccgctcgggggtttcttcgattacatggagcggctgcgcaactacgagcgctcgggcgtgccgcgcggcgccggcaccgactccgacgacggattcgacctcgggcgcatgcgccgactccttcgtcggctcggcgatccccacaccgacttcccggctgtgcatatcgccggcaccaaggggaaaggttctactgctgcattgctgtccaatatcatgagggcgcaaggctacaatgtgggaagttattctagtccacatcttctaacaatacgtgaacggatttctgttggaaatgatggaggccctgttccagtacgactgttgagtgatctttttgatggggctaaggaagctattgatgaagcaatagaattggaaaatggatccctaacgcattttgaggtttttactgctctctcatttcttctattctcacaagaaaatgttgacattgccatcattgaagcaggtcttggtggagctagggatgcaacaaatgttattcggagtactgaattagcagcatccgtcataacaacagtagggagggaacatctggttgcattgggtggctccctgcaaagcatagcaatagcaaagtctggaatcattaaacaaggacaaccagttgtgattggtggaccattttcagcagttattgagcaaattattcgtgacagggcattcttgacacaatctcctgtgatatctgcttgtgatcctggcatcaagagctttacgaaatgcatagattgggataatgtccattgaaatgcatgacataaacctccaactgctgggagatcatcagcgtcagaatgctgtcacagctgcttgcacggctctctgtctccgtagtctaggatgggaaatctctgatgcttctatccaagctggcttgagggagacccaacttcctgggaggagccagtttctcacagcagaggaagcctcggttcttgggctggatggtgcatctactgtactaatcgatggagcccatactgaggaatctgcaaaggccttatcaggcgtgatagaagctgtcagaccagaagggcctctagcgcttgttgtcggaatggctagtgacaaggagcatcttgcgtttgctgagcagcttctctcaggtcaaaccccagatgtcgtgctactgacagaggcgagcatcgccggaggaagctcccgtgcaatgccagcctcatccctgaaagaagtatggattgccgcggcacgccatcgtggcatcgagtacgtggacatcggtggcatcagtggcactgaaaccctggagcacatcgccgatctgttgggcagtccttcgctgagttccagaaggaagcccatggtgatcgggtgccaagacatggggccgttctcctggaacctgatcattgctgcctcccagctccttgagagcagaggcagggccccaggcctcatctgcgtgaccggctccctgcatctcgtcggggccatactgcaaaagctgggacggcattagaggcgccaaccatctcatctttcatagtaccatatactagactggaagagagtggaagctacactggactcgtagtggtgtaccggcgagatggatcattcgtgtggtgtacattgcgggactgtttggatggaatctaccaaaatgcctgggccaggcatccatcccaggcgcccgattttgaacatttgggccaggacccaggatgcatttgactgaggcagggctcccatccaaacggacggcaggcaagcaaggcatctgtgctgatgggatattgggatcacgtcctgcgttgctgccaacttgttcgtggctctttctaagctgacaataatagattgtaaataggctgattatctgtactcctacaaaacacaccacacggaaaaaagagcacggcctaggcacggcacgactcgaaatattttagtgttgggccagcacggcctgatatatcgggctgagtttgggccgaggtcacgacatatttaaggcaggcacgaaatgactcatatagagacacgaaaaggcttatatatttattaaaaccacacttcattccatactttcatgtactttataaaaacacaaatctagagataattctagttagatgttttttgtagctttgaattatagtatgtgatgtaattttacttttgttatgaacattagataatgaattgaacttatgaactttgtatacaattgat

SEQ ID NO: 35065 - DNA, 3161 bp, Zea Mays
gaaccagctaaccaaacagaccgcactctgctcgctcggcgttgtctgatctctcctcgcgcccgtcctccgctgcccgactccggcgtcctccccaccgacccatccacagctcaagccaacattcacccgtatcccgcgcgcgcttgattcgccgcatctgagcgtcacggccgcgactgcgcgccctgcgtcgcctcccgccgccgccgcacggccgcgacggatgctcggccaccgcttccccgccgcgctcggcctcccgcgcggtctgctgctggggaggagcgtcacccgccgcagtctgtccgccatggccggtggcgaggcggagggcccgctcgggggtttcttcgattacatggagcggctgcgcaactacgagcgctcgggcgtgccgcgcggcgccggcaccgactccgacgacggattcgacctcgggcgcatgcgccgactccttcgtcggctcggcgatccccacaccgacttcccggctgtgcatatcgccggcaccaaggggaaaggttctactgctgcattgctgtccaatatcatgagggcgcaaggctacaatgtgggaagttattctagtccacatcttctaacaatacgtgaacggatttctgttggaaatgatggaggccctgttccagtacgactgttgagtgatctttttgatggggctaaggaagctattgatgaagcaatagaattggaaaatggatccctaacgcattttgaggtagtttgttattgtaaatatgcccacctgttctcttatgaagattagtttttgactgttttgtggacacatacaaataatcattgtaactgatgggaatttttttcttacatccaaatactatcgggtttgaaactgttcatgttttgtttctcatttgatcatagacatgacttccagagattgtatgcatgcctttgtaggtttttactgctctctcatttcttctattctcacaagaaaatgttgacattgccatcattgaagtaagttacagaacatctgttactgccctttatgacctctcagattttgtgctcattgctgttaaatgtcaagactgaaataggaagtaatgcaatcgatatcactgattttaaagaagtcttgaaagcaaagggtcttgcttttcaaaattgaattacattctcaacatcatctgttcaattcagtcgtaaaaatgatatcaccagtttttgcttttatctatttattttctaggcaggtcttggtggagctagggatgcaacaaatgttattcggagtactgaattagcagcatccgtcataacaacagtagggagggaacatctggttgcattgggtggctccctgcaaagcatagcaatagcaaagtctggaatcattaaacaaggacaaccagttgtgattggtggaccattttcagcagttattgagcaaattattcgtgacagggcattcttgacacaatctcctgtgatatctgcttgtgatcctggcatcaagagctttacgaaatgcatagattgggataatggtaagccgtatcaacgctgttacttcagcataaatatttcaaatgatgtacccttgtccattgaaatgcatgacataaacctccaactgctgggagatcatcagcgtcagaatgctgtcacagctgcttgcacggctctctgtctccgtagtctaggatgggaaatctctgatgcttctatccaagctggcttgagggagacccaacttcctgggaggagccagtttctcacagcagaggaagcctcggttcttgggctggatggtgcatctactgtactaatcgatggagcccatactgaggaatctgcaaaggccttatcaggcgtgatagaagctgtcagaccagaagggcctctagcgcttgttgtcggaatggctagtgacaaggagcatcttgcgtttgctgagcagcttctctcaggtcaaaccccagatgtcgtgctactgacagaggcgagcatcgccggaggaagctcccgtgcaatgccagcctcatccctgaaagaagtatggattgccgcggcacgccatcgtggcatcgagtacgtggacatcggtggcatcagtggcactgaaaccctggagcacatcgccgatctgttgggcagtccttcgctgagttccagaaggaagcccatggtgatcgggtgccaagacatggggccgttctcctggaacctgatcattgctgcctcccagctccttgagagcagaggcagggccccaggcctcatctgcgtgaccggctccctgcatctcgtcggggccatactgcaaaagctgggacggcattagaggcgccaaccatctcatctttcatagtaccatatactagactggaagagagtggaagctacactggactcgtagtggtgtaccggcgagatggatcattcgtgtggtgtacattgcgggactgtttggatggaatctaccaaaatgcctgggccaggcatccatcccaggcgcccgattttgaacatttgggccaggacccaggatgcatttgactgaggcagggctcccatccaaacggacggcaggcaagcaaggcatctgtgctgatgggatattgggatcacgtcctgcgttgctgccaacttgttcgtggctctttctaagctgacaataatagattgtaaataggctgattatctgtactcctacaaaacacaccagtttttctggtttataccttcgtgaggtatattcctctacccctctcggctcggctaactagtgtataggtgtacatttgggccgggtttgatgggtcggcctggagcacggaaaaaagagcacggcctaggcacggcacgactcgaaatattttagtgttgggccagcacggcctgatatatcgggctgagtttgggccgaggtcacgacatatttaaggcaggcacgaaatgactcatatagagacacgaaaaggcttatatatttattaaaaccacacttcattccatactttcatgtactttataaaaacacaaatctagagataattctagttagatgttttttgtagctttgaattatagtatgtgatgtaattttacttttgttatgaacattagataatgaattgaacttatgaactttgtatacaattgat

SEQ ID NO: 35066 - DNA, 2775 bp, Zea Mays
gaaccagctaaccaaacagaccgcactctgctcgctcggcgttgtctgatctctcctcgcgcccgtcctccgctgcccgactccggcgtcctccccaccgacccatccacagctcaagccaacattcacccgtatcccgcgcgcgcttgattcgccgcatctgagcgtcacggccgcgactgcgcgccctgcgtcgcctcccgccgccgccgcacggccgcgacggatgctcggccaccgcttccccgccgcgctcggcctcccgcgcggtctgctgctggggaggagcgtcacccgccgcagtctgtccgccatggccggtggcgaggcggagggcccgctcgggggtttcttcgattacatggagcggctgcgcaactacgagcgctcgggcgtgccgcgcggcgccggcaccgactccgacgacggattcgacctcgggcgcatgcgccgactccttcgtcggctcggcgatccccacaccgacttcccggctgtgcatatcgccggcaccaaggggaaaggttctactgctgcattgctgtccaatatcatgagggcgcaaggctacaatgtgggaagttattctagtccacatcttctaacaatacgtgaacggatttctgttggaaatgatggaggccctgttccagtacgactgttgagtgatctttttgatggggctaaggaagctattgatgaagcaatagaattggaaaatggatccctaacgcattttgaggtttttactgctctctcatttcttctattctcacaagaaaatgttgacattgccatcattgaagcaggtcttggtggagctagggatgcaacaaatgttattcggagtactgaattagcagcatccgtcataacaacagtagggagggaacatctggttgcattgggtggctccctgcaaagcatagcaatagcaaagtctggaatcattaaacaaggacaaccaggcattcttgacacaatctcctgtgatatctgcttgtgatcctggcatcaagagctttacgaaatgcatagattgggataatggtaagccgtatcaacgctgttacttcagcataaatatttcaaatgatgtacccttggtgagttacattgggaacctcacctacttcatctgaaattgacaagttcgtatctgtttttcaaatcctctggctgatcagcgcaaactatccttttcagtccattgaaatgcatgacataaacctccaactgctgggagatcatcagcgtcagaatgctgtcacagctgcttgcacggctctctgtctccgtagtctagttaaggatgggaaatctctgatgcttctatccaagctggcttgagggagacccaacttcctgggaggagccagtttctcacagcagaggaagcctcggttcttgggctggatggtgcatctactgtactaatcgatggagcccatactgaggaatctgcaaaggccttatcaggcgtgatagaagctgtcagaccagaagggcctctagcgcttgttgtcggaatggctagtgacaaggagcatcttgcgtttgctgagcagcttctctcaggtcaaaccccagatgtcgtgctactgacagaggcgagcatcgccggaggaagctcccgtgcaatgccagcctcatccctgaaagaagtatggattgccgcggcacgccatcgtggcatcgagtacgtggacatcggtggcatcagtggcactgaaaccctggagcacatcgccgatctgttgggcagtccttcgctgagttccagaaggaagcccatggtgatcgggtgccaagacatggggccgttctcctggaacctgatcattgctgcctcccagctccttgagagcagaggcagggccccaggcctcatctgcgtgaccggctccctgcatctcgtcggggccatactgcaaaagctgggacggcattagaggcgccaaccatctcatctttcatagtaccatatactagactggaagagagtggaagctacactggactcgtagtggtgtaccggcgagatggatcattcgtgtggtgtacattgcgggactgtttggatggaatctaccaaaatgcctgggccaggcatccatcccaggcgcccgattttgaacatttgggccaggacccaggatgcatttgactgaggcagggctcccatccaaacggacggcaggcaagcaaggcatctgtgctgatgggatattgggatcacgtcctgcgttgctgccaacttgttcgtggctctttctaagctgacaataatagattgtaaataggctgattatctgtactcctacaaaacacaccagtttttctggtttataccttcgtgaggtatattcctctacccctctcggctcggctaactagtgtataggtgtacatttgggccgggtttgatgggtcggcctggagcacggaaaaaagagcacggcctaggcacggcacgactcgaaatattttagtgttgggccagcacggcctgatatatcgggctgagtttgggccgaggtcacgacatatttaaggcaggcacgaaatgactcatatagagacacgaaaaggcttatatatttattaaaaccacacttcattccatactttcatgtactttataaaaacacaaatctagagataattctagttagatgttttttgtagctttgaattatagtatgtgatgtaattttacttttgttatgaacattagataatgaattgaacttatgaactttgtatacaattgat

SEQ ID NO: 35067 - DNA, 3364 bp, Zea Mays
gaaccagctaaccaaacagaccgcactctgctcgctcggcgttgtctgatctctcctcgcgcccgtcctccgctgcccgactccggcgtcctccccaccgacccatccacagctcaagccaacattcacccgtatcccgcgcgcgcttgattcgccgcatctgagcgtcacggccgcgactgcgcgccctgcgtcgcctcccgccgccgccgcacggccgcgacggatgctcggccaccgcttccccgccgcgctcggcctcccgcgcggtctgctgctggggaggagcgtcacccgccgcagtctgtccgccatggccggtggcgaggcggagggcccgctcgggggtttcttcgattacatggagcggctgcgcaactacgagcgctcgggcgtgccgcgcggcgccggcaccgactccgacgacggattcgacctcgggcgcatgcgccgactccttcgtcggctcggcgatccccacaccgacttcccggctgtgcatatcgccggcaccaaggggaaaggttctactgctgcattgctgtccaatatcatgagggcgcaaggctacaatgtgggaagttattctagtccacatcttctaacaatacgtgaacggatttctgttggaaatgatggaggccctgttccagtacgactgttgagtgatctttttgatggggctaaggaagctattgatgaagcaatagaattggaaaatggatccctaacgcattttgaggtttttactgctctctcatttcttctattctcacaagaaaatgttgacattgccatcattgaagtcttggtggagctagggatgcaacaaatgttattcggagtactgaattagcagcatccgtcataacaacagtagggagggaacatctggttgcattgggtggctccctgcaaagcatagcaatagcaaagtctggaatcattaaacaaggacaaccagtatgcaattcacttatcattttcattctgtatttctgtaactaccagtgtctagttgctcctgtttataccttgatcttaaagccaacttgaatgtgtctagcactttttttgtacttgtattaaatgggtgatatgacaaaccctgctcctgacacctgactcgttccattgtaggaatcttgttctcgttttgttcagtaacatgagaaagatgttatcttttttcttgtttctttctaaaagacttggttcagttgtattgtccttacataaaatctgccacagtatatgacaattatgactggacatgcaggccctttccttattcagttattcttgtttatgtttacccagactgcttgattctcagacttgtttcttaaagcaacattttaacattgagttgtgtcctacactactacataatgtattacctcaggtattgcatcatgtatgagtggtcctgtcacactgcattgtatgcaaggagcagcagcattagaaaccctccctcttccaattttctctaatttagcttcgtaaatccttcttattgcactaatctttcctccactcatatatgaatttcttaccatagcatagatggtccaaacgaggacagtgggattattttcttattccagcttagtttcagatcttgacaagatgtaacctggatatcaaacattttttgtcaggttgtgattggtggaccattttcagcagttattgagcaaattattcgtgacagggcattcttgacacaatctcctgtgatatctgcttgtgatcctggcatcaagagctttacgaaatgcatagattgggataatgtccattgaaatgcatgacataaacctccaactgctgggagatcatcagcgtcagaatgctgtcacagctgcttgcacggctctctgtctccgtagtctaggatgggaaatctctgatgcttctatccaagctggcttgagggagacccaacttcctgggaggagccagtttctcacagcagaggaagcctcggttcttgggctggatggtgcatctactgtactaatcgatggagcccatactgaggaatctgcaaaggccttatcaggcgtgatagaagctgtcagaccagaagggcctctagcgcttgttgtcggaatggctagtgacaaggagcatcttgcgtttgctgagcagcttctctcaggtcaaaccccagatgtcgtgctactgacagaggcgagcatcgccggaggaagctcccgtgcaatgccagcctcatccctgaaagaagtatggattgccgcggcacgccatcgtggcatcgagtacgtggacatcggtggcatcagtggcactgaaaccctggagcacatcgccgatctgttgggcagtccttcgctgagttccagaaggaagcccatggtgatcgggtgccaagacatggggccgttctcctggaacctgatcattgctgcctcccagctccttgagagcagaggcagggccccaggcctcatctgcgtgaccggctccctgcatctcgtcggggccatactgcaaaagctgggacggcattagaggcgccaaccatctcatctttcatagtaccatatactagactggaagagagtggaagctacactggactcgtagtggtgtaccggcgagatggatcattcgtgtggtgtacattgcgggactgtttggatggaatctaccaaaatgcctgggccaggcatccatcccaggcgcccgattttgaacatttgggccaggacccaggatgcatttgactgaggcagggctcccatccaaacggacggcaggcaagcaaggcatctgtgctgatgggatattgggatcacgtcctgcgttgctgccaacttgttcgtggctctttctaagctgacaataatagattgtaaataggctgattatctgtactcctacaaaacacaccagtttttctggtttataccttcgtgaggtatattcctctacccctctcggctcggctaactagtgtataggtgtacatttgggccgggtttgatgggtcggcctggagcacggaaaaaagagcacggcctaggcacggcacgactcgaaatattttagtgttgggccagcacggcctgatatatcgggctgagtttgggccgaggtcacgacatatttaaggcaggcacgaaatgactcatatagagacacgaaaaggcttatatatttattaaaaccacacttcattccatactttcatgtactttataaaaacacaaatctagagataattctagttagatgttttttgtagctttgaattatagtatgtgatgtaattttacttttgttatgaacattagataatgaattgaacttatgaactttgtatacaattgat

SEQ ID NO: 35068 - DNA, 2493 bp, Zea Mays
gaaccagctaaccaaacagaccgcactctgctcgctcggcgttgtctgatctctcctcgcgcccgtcctccgctgcccgactccggcgtcctccccaccgacccatccacagctcaagccaacattcacccgtatcccgcgcgcgcttgattcgccgcatctgagcgtcacggccgcgactgcgcgccctgcgtcgcctcccgccgccgccgcacggccgcgacggatgctcggccaccgcttccccgccgcgctcggcctcccgcgcggtctgctgctggggaggagcgtcacccgccgcagtctgtccgccatggccggtggcgaggcggagggcccgctcgggggtttcttcgattacatggagcggctgcgcaactacgagcgctcgggcgtgccgcgcggcgccggcaccgactccgacgacggattcgacctcgggcgcatgcgccgactccttcgtcggctcggcgatccccacaccgacttcccggctgtgcatatcgccggcaccaaggggaaaggttctactgctgcattgctgtccaatatcatgagggcgcaaggctacaatgtgggaagttattctagtccacatcttctaacaatacgtgaacggatttctgttggaaatgatggaggccctgttccagtacgactgttgagtgatctttttgatggggctaaggaagctattgatgaagcaatagaattggaaaatggatccctaacgcattttgaggtcttggtggagctagggatgcaacaaatgttattcggagtactgaattagcagcatccgtcataacaacagtagggagggaacatctggttgcattgggtggctccctgcaaagcatagcaatagcaaagtctggaatcattaaacaaggacaaccagttgtgattggtggaccattttcagcagttattgagcaaattattcgtgacagggcattcttgacacaatctcctgtgatatctgcttgtgatcctggcatcaagagctttacgaaatgcatagattgggataatgtccattgaaatgcatgacataaacctccaactgctgggagatcatcagcgtcagaatgctgtcacagctgcttgcacggctctctgtctccgtagtctaggatgggaaatctctgatgcttctatccaagctggcttgagggagacccaacttcctgggaggagccagtttctcacagcagaggaagcctcggttcttgggctggatggtgcatctactgtactaatcgatggagcccatactgaggaatctgcaaaggccttatcaggcgtgatagaagctgtcagaccagaagggcctctagcgcttgttgtcggaatggctagtgacaaggagcatcttgcgtttgctgagcagcttctctcaggtcaaaccccagatgtcgtgctactgacagaggcgagcatcgccggaggaagctcccgtgcaatgccagcctcatccctgaaagaagtatggattgccgcggcacgccatcgtggcatcgagtacgtggacatcggtggcatcagtggcactgaaaccctggagcacatcgccgatctgttgggcagtccttcgctgagttccagaaggaagcccatggtgatcgggtgccaagacatggggccgttctcctggaacctgatcattgctgcctcccagctccttgagagcagaggcagggccccaggcctcatctgcgtgaccggctccctgcatctcgtcggggccatactgcaaaagctgggacggcattagaggcgccaaccatctcatctttcatagtaccatatactagactggaagagagtggaagctacactggactcgtagtggtgtaccggcgagatggatcattcgtgtggtgtacattgcgggactgtttggatggaatctaccaaaatgcctgggccaggcatccatcccaggcgcccgattttgaacatttgggccaggacccaggatgcatttgactgaggcagggctcccatccaaacggacggcaggcaagcaaggcatctgtgctgatgggatattgggatcacgtcctgcgttgctgccaacttgttcgtggctctttctaagctgacaataatagattgtaaataggctgattatctgtactcctacaaaacacaccacacggaaaaaagagcacggcctaggcacggcacgactcgaaatattttagtgttgggccagcacggcctgatatatcgggctgagtttgggccgaggtcacgacatatttaaggcaggcacgaaatgactcatatagagacacgaaaaggcttatatatttattaaaaccacacttcattccatactttcatgtactttataaaaacacaaatctagagataattctagttagatgttttttgtagctttgaattatagtatgtgatgtaattttacttttgttatgaacattagataatgaattgaacttatgaactttgtatacaattgat

SEQ ID NO: 35069 - DNA, 1825 bp, Zea Mays
aaaaccaaacgctttctaaaccaaacactccttgtcggtcgccgctagctcctccaacctcgttggccgttgccgtctccgtctcgcccgcccatctacgcggcgagatctgctcgcgccgcgccgaggcgcaggcgcctctccttgccaggcgtgacacagacgaactggtgccgcctctgctggggcttggtcctcccagccgagcgcgcctcatccggatcttgcgacgacggtgcccaagctcccggcctccctttcgcatccctgctgcgagccgtcggtctccggaaagagttagagccgtcggtctccgtaaagaattggagccgccaggcgccttgagaagggttttgtcccgggatgtcgtcgtcggggaagatggaggggccgtctgccccggtggtgcgtcgggatccctacgaggtgctcagcgttcccagagattcctccgaccaggagatcaagtccgcctaccggaagctcgcactcaagtaccaccctgacaagaatgctagcaacccagaagcatcggaactcttcaaagaagttgcatattcttatagcatcttgtcagatcctgagaaaagaaggcagtatgatactgctggttttgaggagttagaaaatgaaggaatggatatggaaattgatttgtccaatcttggaactgtgaacacaatgtttgcagcactttttagcttggtgttcctatcaagaccacaatatctcctactgtgctggaagaggccatgaatggcacagttacagtgagaccactccctgttggaacatcagctacgggaaaggttgataagcaatgcgctcatttttttggcgtaacaataagtgaagagcaagctcattctggaatggttgtcagagtgacttcacctgctcaaagtaaatttaagcttctttacttcgagcaagaagttaatggaggttatggacttgctttgcagatagtcaaaagactggcaaggtaacatcagcaggcatgtatttcttgcatttccaggtgtatcgtatggactcaacagcgaatgcgttggcaatggccaaagatcctgaagctgccttctttaaaaggttggaaggtctccaaccctgcgaagtttcagctctcaaatctggaacccatatatttgctgtatatggtgacaattttttcaagccagctagctatatgattgaagcgatgtgcgcaaagagttatgaagacacaacagagaggctgaaagagatagaatctaaaattctagctaagcgaaatgatctgcgtcaatttgaaactgagtacagaaaagctttggcacgatttcaagaagtcaccaacagatatacacaagagagagaagcggttgatgatatgctgagagagagggacaatatccattgctcgttcacaactgaacgaactttggcaaaccctgttggtgtcggtagtagcagtaggtataccatcgagcagagcattcctgagagccctgagaatggtagcgtagatggcagagacaaatctggcaaaaagaagtggtttaatctaaaccttaataggtccgacaagaaagcctgatgaatcttttgtcagggaacgtcatgtgttttcactttgttgtacattttggaatccctattgtattcatgccgtatgagttctttggttcccagttctctgggagttttgtagcatatagcagttttgggtacaactttctattctcatgtatgtattatcctaagtgactgcattgaccccatgcatcccaggcgaagttgaatcgcccgaccaagttattttatcgttataatttcttctatc

SEQ ID NO: 35070 - DNA, 2809 bp, Zea Mays
gtaatattaatagaaataatattatagaaatactcttttaaaagaaaattggttgaataaaaatagttgataaccatgtgttttttctttattaattacttgacaaatgttgccgatcagcgggaacaaaaaaatgtatctaaatttagggtgtggcagataaggattgatcatggatagtttaccaatatatgagatatatacatagatatataggtagaaaagattgtccgatgtagccatgatctaaatgaacatataagcgtagcataatattcatgagataaacactgtgttgtcacattggtacatctaagtaggttgcttatcaaagcataataacaaaaggtggttgtcacatatttacatctaagttggtcgcacatgactacatattagcaaaaggttcgtagttgatggtatgttatttattgaatggagcaaccatggagtattggtagcatcctagtcatccaaattgcagcttgaactaaggtccttgcgtctacaatagataattagagttaaatattgtaagattaaatggtacaaaataggatattactttactgatgtaagggaaaatgtgttcggtacctattggcaaattgtaagcatgataatgtgatttgtatttgagcagttttgttggtagtagtaatgcattagaaaaattatagttgtttagtaaggagggacaataagatatatagttatgtaataaaaggatatctagtttgcaaaaaacaatcaataactggtgtatacccgttatgtgtttcatactgctttggtaatgcatgttgtcgtatttcaatggtgagcacaggtagaagcaaaggtgaagttataggaagtatataatcaaaactccactgcaacaaaaaattaggcgataaatatttttcgtctcaaaacaaaatcatataactgattattaagggctaggcgttctctttgcacatattcacaacgaaaccgatgctaagatgtaaccccgacccataattaagtaagggagaaatatcacaatgtaattatacttgtgattcgtaccaaccattaacttacaaagttttaccataatttactcgagctgcactatcacaaatttagctcctatttatttaagccaactattaagcaatcatatgtgatacataagacacgttttagcgaataaccaggagggcactattaggaaaaaatagtaaaaatagagcacaatgttatgaaaatgaatgtgtaatgagatgtactttggtcaagtagcttttttccctatgtagatatgtataagttgacaaagctcatgtttcgaaaccaaatattaggatttactgtcaatttgaaaataccaaaacagtaagcagtcaatgcactgacgtttctgtgcgaaactgctaaggtactataaatactaaatgaatgttgtgtttagaggtaatgtagcaaacctgtgaaatgttttgaataaatgtatcaagtaatacatatagatattaaatgaacgttgtgtttagaggtaatgtaccaaacttgtgaaatattttgagtaaaagtaccaagcaatagatagttatgcaaagaagaagtacgtacagaaatggttatgcaaagaataaatacgtaatagtaccaccactgaagagaaattgttaaattggaagacactgttagggataggattgcgtaatgaaatgtaccttaatcaagcagccttttttcccttgagtaaatatgttgaagttgatgaagcctgtgtttccaaaactaagattagaatttactggaaaattaaaaagaaggaaaccataagaagcgaatgcatggataattcaatgatgagataccatgaacatcatgtatacagaaaatgtagctaccacttgtattgtttagagtaattgtagcaagcatatggtctatacgtagcacgacacaacaaaattagtatcactacacaccaaaagtatgttttccgacaaaatgtaactaaagttcaagaggttgatgatggtatagcaaacttatttgtgactgaccaccattaacaatgtggaaccacaaaaacctcgtacgcgaactcaatggaagactgatacttgcaatgagaaattaccaatttcgagcaggtgtatggagctctgataaggaaaaagacatccgtacatgtggaccctaacagcgaggacactcgcatgtacggagctccgagggtgaggatggtatagctaacttatttttgaccggacgccattaacaatctggaagcacaggaaggtcctacgtgaaatgaacggacgactgatagctgcaatgagaaataatcaagtgcgagcaggtgtacggagttccaattgagaaaaggcatatgtatttgcaaaccctatcagtgaggacactcggatgtactcagctccgatgggggaaaagacatttgtatctatgtcgaacgtggaggagatgacgaagtagtcagagaagtggtggagattttagcaggcctcagcccggatggtccttgtcggcgacggcgcggcgagtatgcggcgaagcaggaacgatgatgcggcggacgacactggtgtagtgccaagggcagtggacgacggaggaggggggacgtcgagagcggcgactagcgaccggcgtcaacttagtggagaagatggcggcacgacggagacgattcctcccctgacttctctcattctctccggtcgattcgtcccctgacttctctcattctctccggtcgattcatccccggtccagaaggctctggtagcggctgcaaagaaaagag

SEQ ID NO: 35071 - DNA, 2319 bp, Zea Mays
aagagcacacgcaggcaggttagccttgatttcggcagtccaacgacactttccctccctcccagttcgttgaggatccgagagttctgggtccgagcggctgactctgcgagctgcgatgcatcgacgagtggccatgcgacccgaccggcccttctcccacccacgcaccctaaaacctggacacctcctcctctctctcctctagaacgcgcgcaagaacacacgtaggagaaactggaccggcgcgcaccaaccccgaaccacataactaggacgaggcgaaggattgtcatccaagccgcgtgatctttaattcgccgccgcacgcccttgtcatggaaggtggcggctgggctgtcggaggccacgcacttggcgccgcccaagaaccgcgggggcagcagcagcatcgggaggaggagaaggcagccggagctgccgccgagaggaagggcgctggcgccggcggcggcggcggcatgaagttccgcgtgcgcgcgcgggcgccgcacggtgtcggggcgctgctgctcatcggcggagcggccgtcgtcggggccgccgtcctcgcgtggcgccgctcacgccacggcaacaagggtggctccgtggaccagcctgatcgccggctgccagcgaaagtagagggtttggatggcggaattgtcgaggatgggaaggtgaggagtcatctgtcgcattcattgatggaaagtgaatctttttacatgcaaaaaaaattggttcgaatttgtaggttcagggtggctcattggtgcagaagcttagtcagtctaatgagatcttgagcgtgggcaacacagatattggatccggtagattggatggcaacgcgtcagaggaaagccatcagattcacaaggatggtgaaatcactgcagatcaatcggagagcaagcatgacgggaaaattgatgagaattcaggtatcaatcctgccgaggtccaaatgcacgatcaggagagcaagcatgaagagaaaaacgatgagaattcaggcagcaatcctgtcgaggttcacaaacacgatctgtttcaggacaaagaacatgtcgaagaagttgaccagaagtcaagcagcaaccatgttgagatcagtgcgcatgatatgtgtgaggacaatgaacatgttgagaaaattgatcacgttgaaagaatcgatcagaattcgagcagggaccctgtcaaagccatcatgcaggaaatgatcaaagtttgtttggtcagtggaagcgtggagaaggtggaggaagaggactcaagcaagaaggacttggagaaagagatagccccaaaagataataaagatatggaggcctctgatggaagcaagctcggcgtcaacggtccagaaactggaggtgctgttgcagacactgaagaagatgatactgttgcagagacagaagatgttgttacagacactgaagatactgttacagacaccgaagatgctcttgcagaaacagaagcagagaaaggtgaaagagcaatcgcggacaagggtgagctcgagcaggacgaaaagaaagatctggtagcactccctgaacttgccagctcaccagcactgtcatcgttggttaagccaacagtagtgaagaaagagctggactttccgagacccaacgaaacggggatgaagacagagcaagattacactaacggtgagctgagggagcacaatgacctggtcagcaaagtgcagggagaaggtggcgtcgcgacgaccatggagtccaggagctctgctctgatgatcattctcgctctgatattcgcgctggccacgggaataacgatcgtcgtgcgcctctactccccttcccgagcaacgaaactccagatggatctgccataagcctgcaatcggtcatcaagtacgatttctgaggctgcaaagttccattgggatttttcgtggcctcgtacgcgcgcgcgcatgaacggcgaagttaggagctgctggagtgtgtgcaagtacaagataggaagagaagtctaccatggtcatgaacgaattcatatggccattgtgcagcacgatctgtctgtgctggagaagttacacgtgtggtgccagctaccaaaagaaagaaccgaggtccgagagcagtagagtaggtttcttccggctgaggagcgcttgtttttcttttttcttcttttaaaagaaatatatattattttgcaagccatgttagtgctgatagtctatggaaatgcctaaaccatgttgaagttcgtgcttggttttgtttgatttgatcgcctgtctcgtcaaccttttaattt

SEQ ID NO: 35072 - DNA, 2264 bp, Zea Mays
ggataacaaaaactttaccgcggtccatggagcaattaagagcacacgcaggcaggttagccttgatttcggcagtccaacgacactttccctccctcccagttcgttgaggatccgagagttctgggtccgagcggctgactctgcgagctgcgatgcatcgacgagtggccatgcgacccgaccggcccttctcccacccacgcaccctaaaacctggacacctcctcctctctctcctctagaacgcgcgcaagaacacacgtaggagaaactggaccggcgcgcaccaaccccgaaccacataactaggacgaggcgaaggattgtcatccaagccgcgtgatctttaattcgccgccgcacgcccttgtcatggaaggtggcggctgggctgtcggaggccacgcacttggcgccgcccaagaaccgcgggggcagcagcagcatcgggaggaggagaaggcagccggagctgccgccgagaggaagggcgctggcgccggcggcggcggcggcatgaagttccgcgtgcgcgcgcgggcgccgcacggtgtcggggcgctgctgctcatcggcggagcggccgtcgtcggggccgccgtcctcgcgtggcgccgctcacgccacggcaacaagggtggctccgtggaccagcctgatcgccggctgccagcgaaagtagagggtttggatggcggaattgtcgaggatgggaaggttcagggtggctcattggtgcagaagcttagtcagtctaatgagatcttgagcgtgggcaacacagatattggatccggtagattggatggcaacgcgtcagaggaaagccatcagattcacaaggatggtgaaatcactgcagatcaatcggagagcaagcatgacgggaaaattgatgagaattcaggtatcaatcctgccgaggtccaaatgcacgatcagcatgaagagaaaaacgatgagaattcaggcagcaatcctgtcgaggttcacaaacacgatctggacaaagaacatgtcgaagaagttgaccagaagtcaagcagcaaccatgttgagatcagtgcgcatgatatgtgtgaggacaatgaacatgttgagaaaattgatcacgttgaaagaatcgatcagaattcgagcagggaccctgtcaaagccatcatgcaggaaatgatcaaagtttgtttggtcagtggaagcgtggagaaggtggaggaagaggactcaagcaagaaggacttggagaaagagatagccccaaaagataataaagatatggaggcctctgatggaagcaagctcggcgtcaacggtccagaaactggaggtgctgttgcagacactgaagaagatgatactgttgcagagacagaagatgttgttacagacactgaagatactgttacagacaccgaagatgctcttgcagaaacagaagcagagaaaggtgaaagagcaatcgcggacaagggtgagctcgagcaggacgaaaagaaagatctggtagcactccctgaacttgccagctcaccagcactgtcatcgttggttaagccaacagtagtgaagaaagagctggactttccgagacccaacgaaacggggatgaagacagagcaagattacactaacggtgagctgagggagcacaatgacctggtcagcaaagtgcagggagaaggtggcgtcgcgacgaccatggagtccaggagctctgctctgatgatcattctcgctctgatattcgcgctggccacgggaataacgatcgtcgtgcgcctctactccccttcccgagcaacgaaactccagatggatctgccataagcctgcaatcggtcatcaagtacgatttctgaggctgcaaagttccattgggatttttcgtggcctcgtacgcgcgcgcgcatgaacggcgaagttaggagctgctggagtgtgtgcaagtacaagataggaagagaagtctaccatggtcatgaacgaattcatatggccattgtgcagcacgatctgtctgtgctggagaagttacacgtgtggtgccagctaccaaaagaaagaaccgaggtccgagagcagtagagtaggtttcttccggctgaggagcgcttgtttttcttttttcttcttttaaaagaaatatatattattttgcaagccatgttagtgctgatagtctatggaaatgcctaaaccatgttgaagttcgtgcttggttttgtttgatttgatcgcctgtctcgtcaaccttttaattt

SEQ ID NO: 35073 - DNA, 2325 bp, Zea Mays
gtttgattaaaaaaaacacagctttgatcacaatttatgtccacaaaactacggataacaaaaactttaccgcggtccatggagcaattaagagcacacgcaggcaggttagccttgatttcggcagtccaacgacactttccctccctcccagttcgttgaggatccgagagttctgggtccgagcggctgactctgcgagctgcgatgcatcgacgagtggccatgcgacccgaccggcccttctcccacccacgcaccctaaaacctggacacctcctcctctctctcctctagaacgcgcgcaagaacacacgtaggagaaactggaccggcgcgcaccaaccccgaaccacataactaggacgaggcgaaggattgtcatccaagccgcgtgatctttaattcgccgccgcacgcccttgtcatggaaggtggcggctgggctgtcggaggccacgcacttggcgccgcccaagaaccgcgggggcagcagcagcatcgggaggaggagaaggcagccggagctgccgccgagaggaagggcgctggcgccggcggcggcggcggcatgaagttccgcgtgcgcgcgcgggcgccgcacggtgtcggggcgctgctgctcatcggcggagcggccgtcgtcggggccgccgtcctcgcgtggcgccgctcacgccacggcaacaagggtggctccgtggaccagcctgatcgccggctgccagcgaaagtagagggtttggatggcggaattgtcgaggatgggaaggttcagggtggctcattggtgcagaagcttagtcagtctaatgagatcttgagcgtgggcaacacagatattggatccggtagattggatggcaacgcgtcagaggaaagccatcagattcacaaggatggtgaaatcactgcagatcaatcggagagcaagcatgacgggaaaattgatgagaattcaggtatcaatcctgccgaggtccaaatgcacgatcaggagagcaagcatgaagagaaaaacgatgagaattcaggcagcaatcctgtcgaggttcacaaacacgatctggacaaagaacatgtcgaagaagttgaccagaagtcaagcagcaaccatgttgagatcagtgcgcatgatatgtgtgaggacaatgaacatgttgagaaaattgatcacgttgaaagaatcgatcagaattcgagcagggaccctgtcaaagccatcatgcaggaaatgatcaaagtttgtttggtcagtggaagcgtggagaaggtggaggaagaggactcaagcaagaaggacttggagaaagagatagccccaaaagataataaagatatggaggcctctgatggaagcaagctcggcgtcaacggtccagaaactggaggtgctgttgcagacactgaagaagatgatactgttgcagagacagaagatgttgttacagacactgaagatactgttacagacaccgaagatgctcttgcagaaacagaagcagagaaaggtgaaagagcaatcgcggacaagggtgagctcgagcaggacgaaaagaaagatctggtagcactccctgaacttgccagctcaccagcactgtcatcgttggttaagccaacagtagtgaagaaagagctggactttccgagacccaacgaaacggggatgaagacagagcaagattacactaacggtgagctgagggagcacaatgacctggtcagcaaagtgcagggagaaggtggcgtcgcgacgaccatggagtccaggagctctgctctgatgatcattctcgctctgatattcgcgctggccacgggaataacgatcgtcgtgcgcctctactccccttcccgagcaacgaaactccagatggatctgccataagcctgcaatcggtcatcaagtacgatttctgaggctgcaaagttccattgggatttttcgtggcctcgtacgcgcgcgcgcatgaacggcgaagttaggagctgctggagtgtgtgcaagtacaagataggaagagaagtctaccatggtcatgaacgaattcatatggccattgtgcagcacgatctgtctgtgctggagaagttacacgtgtggtgccagctaccaaaagaaagaaccgaggtccgagagcagtagagtaggtttcttccggctgaggagcgcttgtttttcttttttcttcttttaaaagaaatatatattattttgcaagccatgttagtgctgatagtctatggaaatgcctaaaccatgttgaagttcgtgcttggttttgtttgatttgatcgcctgtctcgtcaaccttttaattt

SEQ ID NO: 35074 - DNA, 2700 bp, Zea Mays
cttcgaccctcacctgaggcaggcggtattccgaccggcttcacctatccacatctctctctctctctccctccctcttccgtctctctcctatgctccacacctccacgcctctcctcacctgtggagctccccacagcccgtaactacctgcccccagtccccgccgccccgcctcgcctgaccccagtccccgcggtttatccaccacgacaccaccacctctccaccgctgggccggatcgatcgggatcgcgccgccgccgccgccctccgcactcgcgggatcctgctcctaccatgcagcagcgctgcgcccttgcccgaccgcgccggcccgccgaaccgcgcgtcccgctccccgacgaccaccccttcgtcgccgtcttctccttccttttcatccccacctaaaccaacctcctcgcagcgtaattctgccagtatctcctcatcttctctcgtcgccgggagagcgaacggatcgccgcgtgctcggccgacgggatgagccgggaggcgcagaaactcgattgcgccaccggcggcggcggcggcgtcgggataggggtcttgtcgctggacctgctgggccaggtgctggaccgcctacgggagccgcgggaccgcaaggcgtgccgcctcgtcagccgcgccttcgagcgctccgaggccgcgcaccgacgcgcgctgcgggtgctccgacgcgagccgctcccgcgcctgctccgcgcgttcccggcgctcgagcggctcgacctctctgcctgcgcttcgctcgacgacgcctccctcgccgcggctgttgccggtgccggtgggggcctcgccggcctccgcagcgtgtgcctcgcgcgggccaatggggttggctggcgcggcctcgaggcgctcgtggctgcctgccccaagctggaggcggtcgatttgtcgcactgcgtcagcgccggggaccgcgaggccgctgcgctggcggcggcggccgggctcagggagctgaggctggacaaatgccttgctgtcaccgacatggggctcgccaaggtggctgttggctgccccaggctggagaagctcagcctcaagtggtgccgtgagatctctgatatcggaattgatctgctggccaagaagtgccccgagctccgcagcctcaacatatcctacctcaaggtgggtaatggatcccttagatcaatttcctcacttgagaggcttgaggaattggcaatggtttgttgttcatgtattgatgatgaaggcctggaattgctgagcaaggggagtgattcgctgcagagtgttgatgtgtcaagatgtgatcatgtgacttcccatgggttagcttcactcatagacggtcgcaattttctccagaagttatatgctgcagattgtttgcatgagataggacagcgttttgtatccaagttggcaacactgaaggaaaccttgacaacattgaaactcgacggtcttgaagtctcggactctcttcttgaagccattggtgaaagctgtaacaaattggttgagattggacttagcaaatgcagtggtgttacagatgaaggaatctcatctcttgtagctcggtgtagtgacctaagaacaattgatctcacatgctgcaacctcagtaccaacaatgctcttgattcaatagctggcaactgtaagatgcttgaatgtttgcggttggaatcctgctctttgataaatgagaagggactaaaacgaattgcaacttgttgccccaatcttaaggagatagacctcactgactgcggagtggatgatgcagcattggagcacttggctaaatgctctgaattgagagtattgaaattaggcctatgctcaagtatttctgacaaaggcattgcgtttattagttcaaattgtggaaaacttgtggagcttgatctctaccggtgcagctctattaccgatgatgggttggcagctttagcaaatggatgcaagaggatcaagttactgaacttgtgttactgcaacaagatcactgatactggtttgggtcacttaggctccctggaggagctcacaaaccttgaactgaggtgcttggtccgcataacaggcattgggatttcctcagttgcaatcggatgcaagaacctgatagagctggacttgaaacgatgctattcggttgatgacgctggcctgtgggctcttgctcgttatgctttgaaccttagacagcttacgatatcgtactgccaagtcacggggctgggcctgtgccacctgctgagctccctgcggtgcctccaggacattaagatggtgcacctctcatgggtctccatagaagggttcgagatcgcgttgcgagcagcctgcgggaggttgaagaagctgaagatgctctgtgggctgaagaccgtgctgtcccctgaactcatccagatgctgcaggcgtgtggctgccgaataagatgggtcaacaagcctcttgtctacaaggactagaccacctgttcctcatcgtttgtgaagtttcagcgctgccatggattgccaagagcccaagacctaccaggagaaccgtgcctcattatattagcagaccagacaacaacaaacagaaaacaagggaaagagagggggtgtgctggcagcaacaactatgcacacgggtggtgagagcagcaccaactacttccaatccta

SEQ ID NO: 35075 - DNA, 4108 bp, Zea Mays
ctgcggttaatagtggttttattttctcgtggttgtttgctcctctatatgtgggatggtttttccacataaatctttgtgtctattttattctctaacactccggtatatgaggtactatatttagaattcaatagaccgaagttatattcgttgataattttttgtaaaataatgataatgctagagcatgtttttatgttaaagtcatatcctttaaaataggaccctgtttatcttgttggagatgctccgtgacaaatctagctattccaacgtacataacatggaagcgtgattttatcgtgtcaggatgttttggggtgactaaaaaaattttaaatagaaaataattaagaatgattaaaaatgatttttttgagtagttgtgccacaccacatagtcagattgctcttggatcatcgaaaacttcccgaccaatctctactgaaatcagattactatacgcaatcattttactatgtaacagattaatagtagaatgattacgtattatattgtagtatcaagaaaaagaatgaaataatgagactatagcgacatccattcagttgggaatgtgatccctgccatgataacttcttttcttcacattgtttacctatcgagctatcacgagagtttcttcctttttcttaatttcttcttctaaagagaaaaggaagagtagcaactcgcggcgggcacgggtcatcactggcctgtcgacatcagtactggtccgagagtaggggtattttagtcatcttctccatcgcactaccgtggactgatcaggtgccaccttcgaccctcacctgaggcaggcggtattccgaccggcttcacctatccacatctctctctctctctccctccctcttccgtctctctcctatgctccacacctccacgcctctcctcacctgtggagctccccacagcccgtaactacctgcccccagtccccgccgccccgcctcgcctgaccccagtccccgcggtttatccaccacgacaccaccacctctccaccgctgggccggatcgatcgggatcgcgccgccgccgccgccctccgcactcgcgggatcctgctcctaccatgcagcagcgctgcgcccttgcccgaccgcgccggcccgccgaaccgcgcgtcccgctccccgacgaccaccccttcgtcgccgtcttctccttccttttcatccccacctaaaccaacctcctcgcagcgtaattctgccagtatctcctcatcttctctcgtcgccgggagagcgaacggatcgccgcgtgctcggccgacgggatgagccgggaggcgcagaaactcgattgcgccaccggcggcggcggcggcgtcgggataggggtcttgtcgctggacctgctgggccaggtgctggaccgcctacgggagccgcgggaccgcaaggcgtgccgcctcgtcagccgcgccttcgagcgctccgaggccgcgcaccgacgcgcgctgcgggtgctccgacgcgagccgctcccgcgcctgctccgcgcgttcccggcgctcgagcggctcgacctctctgcctgcgcttcgctcgacgacgcctccctcgccgcggctgttgccggtgccggtgggggcctcgccggcctccgcagcgtgtgcctcgcgcgggccaatggggttggctggcgcggcctcgaggcgctcgtggctgcctgccccaagctggaggcggtcgatttgtcgcactgcgtcagcgccggggaccgcgaggccgctgcgctggcggcggcggccgggctcagggagctgaggctggacaaatgccttgctgtcaccgacatggggctcgccaaggtggctgttggctgccccaggctggagaagctcagcctcaagtggtgccgtgagatctctgatatcggaattgatctgctggccaagaagtgccccgagctccgcagcctcaacatatcctacctcaaggtgggtaatggatcccttagatcaatttcctcacttgagaggcttgaggaattggcaatggtttgttgttcatgtattgatgatgaaggcctggaattgctgagcaaggggagtgattcgctgcagagtgttgatgtgtcaagatgtgatcatgtgacttcccatgggttagcttcactcatagacggtcgcaattttctccagaagttatatgctgcagattgtttgcatgagataggacagcgttttgtatccaagttggcaacactgaaggaaaccttgacaacattgaaactcgacggtcttgaagtctcggactctcttcttgaagccattggtgaaagctgtaacaaattggttgagattggacttagcaaatgcagtggtgttacagatgaaggaatctcatctcttgtagctcggtgtagtgacctaagaacaattgatctcacatgctgcaacctcagtaccaacaatgctcttgattcaatagctggcaactgtaagatgcttgaatgtttgcggttggaatcctgctctttgataaatgagaagggactaaaacgaattgcaacttgttgccccaatcttaaggagatagacctcactgactgcggagtggatgatgcagcattggagcacttggctaaatgctctgaattgagagtattgaaattaggcctatgctcaagtatttctgacaaaggcattgcgtttattagttcaaattgtggaaaacttgtggagcttgatctctaccgctctattaccgatgatgggttggcagctttagcaaatggatgcaagaggatcaagttactgaacttgtgttactgcaacaagatcactgatactggtttgggtcacttaggctccctggaggagctcacaaaccttgaactgaggtgcttggtccgcataacaggcattgggatttcctcagttgcaatcggatgcaagaacctgatagagctggacttgaaacgatgctattcggttgatgacgctggcctgtgggctcttgctcgttatgctttgaaccttagacagcttacgatatcgtactgccaagtcacggggctgggcctgtgccacctgctgagctccctgcggtgcctccaggacattaagatggtgcacctctcatgggtctccatagaagggttcgagatcgcgttgcgagcagcctgcgggaggttgaagaagctgaagatgctctgtgggctgaagaccgtgctgtcccctgaactcatccagatgctgcaggcgtgtggctgccgaataagatgggtcaacaagcctcttgtctacaaggactagaccacctgttcctcatcgtttgtgaagtttcagcgctgccatggattgccaagagcccaagacctaccaggtttgccctgtgagccatgtgagatgttctgcaatagtccttgtgagatattccgcaataatcgttgggggcgtaacatatctagcggcgattatcggctctgctccagtgtatgtacactgaggcatcggttatgttcatgtgtatagcctgcagtgggatgatccacttcctgggattactttagtgtgtttgttacttcattccgcatggtttgggcctttgaagttaaaagaatcataagaccttgttcggttattgatattacatgtgtattggagtgtattaggtgggattaggatggattttgacttgttatggatttaaaccggctcaatcctattcaatacatgtggattatcaccaaaacgaacaagcccagggatatgatccatgctttggttctttcttacttttggctgacactaccttatctgataatatgtatatggtgttctgtttcatgttatgaggtgttcaaacagtgggtctatgaagacattgtagtctctgtcgaatggcccacttgtaccatttgcaagaatctgtcacaattgcctcgctatcttgattgatgattagatttggcacgagtcaggttcagccatccgtgcacacagtggctactggtattactttctgcatcgcgcttcgctttgactgaaacatacaacgaaagagttaccgctagtttggcaactcattttttataaggggttctcatttttcccaaaaaaaa

SEQ ID NO: 35076 - DNA, 1352 bp, Zea Mays
ctcgcttgcctatcctaccaactaattataatatctcgacttactaacttcagacaccaaataatcaggataaggatggcaacaagttaattaatttcttaaccaacaaagctttgcgcaagcatcaaggaagcagtatactggacacatgacacgaggcatcgatttaacaatattggattctatcacattactacatgaacaaagtatttcacaaatacttaatatcaccacttatcacgcatataaaacctagttaaatatacgtggcttatatatatacccaatgaagcactctttccatagatggaatcttaaacctatatttcatacgacgcaaatatgtcacaaacgttaacacaatcatatcgcatatatatctactaatattctttgcgtaaatctatatttaaaatctagacttcaacacctaacgcgaccacctcacaatcacctcactgcatgaaacgatgtggttgaacaacactaaatatagtcacaagatcatcacgactaatacacctagccaagccattcatcaaaccggctaacaaaaataataaattagcttaccaaagctaaatccaatttgaaaccacgaaatcgacgacgcatttatacttgacgagcgttgcactggcgctttcctttcatcttccggcgtgaacgcaaggtgcaacaagctgctgaaatgacgacgatgctagggatgcagacattgatgccatggatttggacacgaccgccacacaccacgtgaagacaaaggaagccagagcgacaagggcgcagcgacttcgacgctaagcaccggagcttgacgatgtcgcggcgcagcaggaaataatgacgccacgatggctaatgtgatagttgcgggcagcagggaggctcgacgtcgtagtggagtggacgcacggccagagcaccacaccgggtcgagcagagagaggctcccagcgcgcggcaaggtgaagaggctggctcacccatggatttgaagttgctggccacagcgaggctggggagaatgaaggggcgctcgcagcagccgtcaccggcaagggtgggtgcaggggcgcggctgagaccgagcacgtccgctgatggaggaaggaggctgaacacaggggcacaacggagctgaggtgagctcgggcgtcgggaacagggatgggcgagtggggtcaagcagggcagggcggaggttgaagccaggcgagctctgccgaccagcaacgtgaggaagacgccgactgaacctagagcagcgccaggggagcagagtgcgctgacgagctctagcagcactatggctaggcactggtgaagagatagtgcctctacagtca

SEQ ID NO: 35077 - DNA, 635 bp, Zea Mays
tcctccgcaagaagattgtggcctgggatgctgagctcgcctagatcacgtgcgcccctgcttttcccctcatggcgcgccctgcgcaccgttgccaacatgttctacctcgctgtcctccccacctgaatcctagcagcagctcgtgcatcagttcccccatatgtagccatggtggtgctctactcaccattctaaccacaacagcaagccccaagccactctcctcttcgctcaatctgctcgacaaaatgcccctcagtgcacgctgctgcccccatgttgtgtcacctgcgcgagagttcgtcaagagcagccgcgtcgtcgatccgtgcaggcacgacgtctccgcgtctcgcttcgccggatttgcgcagcgcttgcgcatcgtcgtcaaaatcctcgctagatgttgtcgttgcgcctcgcgcgatgcatgattcgatgaagcacctaaaccgtggaggcatgcgcgacacgagtcggccaggaccgagagatgatgatcgtgcaagtgatatggtgccaaccacaagatgcagttggtggacgacctgaagactgatggacttaaccagtggatgctcgccaagcgagtgtcatctagcagacactatctgagtgttgaattccag

SEQ ID NO: 35078 - DNA, 816 bp, Zea Mays
cgaccttgccgtggactagtttgcgactgccaccgcctttgacttccacaacagtgtcatcagccatgctcgaacctcgccattgaacttcgccgacgtgctattctgcgcaatacaggctcgtgtcatcgtcgttcttgctgaaggttgcagacgtcactcgcctcgacagcaaccacgtccacgactctgccgttccaataattttgtcacgccacccttcaagttcgtgtcctcatacgcaggatcatcgtcgacctggcagattcgggtcgagtttagttatggtgcgctagttgatcttgtgatgcggaagacgacccaagtcgaccccaggatgacataacgggtgggctactccgcatggtgatgctgatagacgaacctgcctgatcaagtgctaggacaaaggacgatcgtcaagtggacgtcatctaacaaacactaacctaatgttctccagacaagccctggtgcatttgccacctccttgctgttttaaaatctttatcaccttatatgatgcattaggtgataggagttgtgtgctaaaccattgctgcatttccttccttggaaaaattgattacccttccttgacacccttttataaaaaggatttttatgatgtttagccttgctttagaaaaacaaaatgttttgttttaagacaaaagtgatgctacacattggatggaaagttttcaaaaataaaacttgatggtggatccatcatggccgtgatgggttcaacatcggaaaagatgtacctctgccagtgtcggggaccataattaggggtaccctcaagacgcc

SEQ ID NO: 35079 - DNA, 458 bp, Zea Mays
cttagtaggtttgggtgatcaatcggtgatgcttcccctttgagaactttcgattgaggagatgcatcgtgaactttgcagcttggtaatatgttttattccaccaatgtctacgcctcagcctccaggctctgtatttaggtcctttgtacaaagtttggtgctcaaagctagaggtggagatcataggatggttgtcaatgggactttcaacaacactgtgcttatttcattgtacacagtaatcctgcatttgttgtctgctggtgcccttccatcatggtggagcctaagattcaaaaggaatgatgcctatcatagtacaggaatgataccagagttggataaaaaaaatttatcacaattttttgttgtggtccgacatcgcctactaccgctgtcagtgtgtggctgaaaatttgatttctttcaactgaagtgacatgattcaatccttt

SEQ ID NO: 35080 - DNA, 450 bp, Zea Mays
cgcaaacgggcgcggtcgatttccgcgtcgctgcgcgcgctagctggggcttctccgggcccaacccaaactgaccaaggggggaacatatatttctgcctgagcttccctcgtcctcttgttacgccactacaagccctagccaccaccgttgagagaggaacgccaaccgcgcaagcctgttccgccgagggagggaggaaacaccgaccgcctgcctacgtcgccgctcggggaccatcggggagccgggggagttcgcaattgctcgaagaacctctgcgcagagccactgggatggggatcgactgggtcgacaaggattgctcaactgagtcccttccatcaccatcggtccgattcgcgtggttcgtgccaacctcgtccccatattcgacgagcaagtggtcgaggaacccagaactcaaaaggtggaaaactctgagttag

SEQ ID NO: 35081 - DNA, 2096 bp, Zea Mays
ctcctttattcaattccccggtaaatcaataccactcggtccgcgacgctttcctctcccttcgcgatgccgacgatttcctcgcgttgcctcccttcgcgccgccgcctccctcgcgtcggccgtcgcctccccccacatcggccgtcacccctcaccgaacaatagagggtttcttcttaaggagtggtgagacagtgagcagaaacttcaatgcatgcctcctagcagtattgaagcttcaccaattgctccttaagaaaccagaacctatacctgagggctgcacagactttagatggaatcacttcaagagttgtttgggtgcattggatggcacacatgtaaaggtgactgtcccaactaagttgaaggggagatataggtcaagaaaaggagaaattgtgacaaatgtgttgggtgtttgtgcacctgacatgcagtttatatatgtcttacctggttgggagggttctgcacatgacgggcgtgtgcttcgagatgccatctcgaggccgaatggattacgtgtccctcaaggttgctattatcttgttgatgctggttacacaaatgcaaatggtttcttagcaccatatcgaggacagaggtatcatctaggaggtttcactactcaaaacccaccacatagtgctgaggagtacttcaacttgtgccatgctagagctaggaatattgttgagagggcatttggaaggctcaagggtcggtgggcaattttaagagacccatttgaaaatgatgaggagccagctatggatgcatcatttgaagttatggatggagaaatcagtgaaccagaatttatcacaggtgtctcaacatctaatgaatggactgatttccgcaataatcttgctcaggggatgtataatagatatagagctaggtctaataactaaggacatgaaccaattagagagctcaagtgttactcggggaagagggaaaaacaaaaggatctggacttattatgaggatgaggagttaattaaagcactatatgagatatctttagatccaaagtggaaaagtgagggaggttttaagaatgggtattgttctgttctagaaaatgaactcaaagcaaggctaccagggtgtggtctcagtgctattccacacattgagtctagagtgaggcattttaggaccaagtatggttctattgaggtcatgcttgctaagagtggttttaatcagatgacgatgcttttcgcgcttcctgagactcttaggagagaattcatcctgaacatgattgcagatgaagctcaaaggaagtgacttgtcaaattatcaatgaagaatgtcaggagcatttggtgaagagtgatcggcatatcaacttctggaagttgaattttgaagacgtttgaagtcctaagacatttctagaacatgaaaattatgaattcctaaggctagctttttttgactgactgtgttgttgactttgtgtgaaaataacccgttgtttgaaacctattatatttgctagctttatttgctattcagcaagacatataaagttgctagctttattggttgtctgtgttttcaactgtttgtgaaaataaccagtataaagttgttgtttagaacatgttatttgtgctagcgcaaagctgaaaataaaatcagtatttttgtgcgccataattttgaagttgttctttaaatcagtatttatttgctacggcagttcataattttgaagtaaaataactatttctgtgcggctgctaggcttatgtgtggctgctaggtttcattacctccaggaccatccaaacagcataaagggaatgctaaacgctaccagctttatccaaacaattggcgcttttcatttccatgtgtgactgcagatctacgaatcaattaggtgcattgtttttccaatagacatgatggcaacaggagaagatcagtgggactatgtatgttgttgtacaaatcgagactaccataatggataatggagtgaacacactaataataataatataacagctcaactattcagcggatggaactataccttgtctgtatacccggatctttcattcttt

SEQ ID NO: 35082 - DNA, 642 bp, Zea Mays
gtccgcgacgctttcctctcccttcgcgatgccgacgatttcctcgcgttgcctcccttcgcgccgccgcctccctcgcgtcggccgtcgcctccccccacatcggccgtcacccctcaccgatgaagctcaaaggaagtgacttgtcaaattatcaatgaagaatgtcaggagcatttggtgaagagtgatcggcatatcaacttctggaagttgaattttgaagacgtttgaagtcctaagacatttctagaacatgaaaattatgaattcctaaggctagctttttttgactgactgtgttgttgactttgtgtgaaaataacccgttgtttgaaacctattatatttgctagctttatttgctattcagcaagacatataaagttgctagctttattggttgtctgtgttttcaactgtttgtgaaaataaccagtataaagttgttgtttagaacatgttatttgtgctagcgcaaagctgaaaataaaatcagtatttttgtgcgccataattttgaagttgttctttaaatcagtatttatttgctacggcagttcataattttgaagtaaaataactatttctgtgcggctgctaggcttatgtgtggctgctaggtttcattacctccaggac

SEQ ID NO: 35083 - DNA, 1508 bp, Zea Mays
cggtccgcgacgctttcctctcccttcgcgatgccgacgatttcctcgcgttgcctcccttcgcgccgccgcctccctcgcgtcggccgtcgcctccccccacatcggccgtcacccctcaccgtttatatatgtcttacctggttgggagggttctgcacatgacgggcgtgtgcttcgagatgccatctcgaggccgaatggattacgtgtccctcaaggttgctattatcttgttgatgctggttacacaaatgcaaatggtttcttagcaccatatcgaggacagaggtatcatctaggaggtttcactactcaaaacccaccacatagtgctgaggagtacttcaacttgtgccatgctagagctaggaatattgttgagagggcatttggaaggctcaagggtcggtgggcaattttaagagacccatttgaaaatgatgaggagccagctatggatgcatcatttgaagttatggatggagaaatcagtgaaccagaatttatcacaggtgtctcaacatctaatgaatggactgatttccgcaataatcttgctcaggggatgtataatagatatagagctaggtctaataactaaggacatgaaccaattagagagctcaagtgttactcggggaagagggaaaaacaaaaggatctggacttattatgaggatgaggagttaattaaagcactatatgagatatctttagatccaaagtggaaaagtgagggaggttttaagaatgggtattgttctgttctagaaaatgaactcaaagcaaggctaccagggtgtggtctcagtgctattccacacattgagtctagagtgaggcattttaggaccaagtatggttctattgaggtcatgcttgctaagagtggttttaatcagatgacgatgcttttcgcgcttcctgagactcttaggagagaattcatcctgaacatgattgcagacctatatcctttcttcagatgaagctcaaaggaagtgacttgtcaaattatcaatgaagaatgtcaggagcatttggtgaagagtgatcggcatatcaacttctggaagttgaattttgaagacgtttgaagtcctaagacatttctagaacatgaaaattatgaattcctaaggctagctttttttgactgactgtgttgttgactttgtgtgaaaataacccgttgtttgaaacctattatatttgctagctttatttgctattcagcaagacatataaagttgctagctttattggttgtctgtgttttcaactgtttgtgaaaataaccagtataaagttgttgtttagaacatgttatttgtgctagcgcaaagctgaaaataaaatcagtatttttgtgcgccataattttgaagttgttctttaaatcagtatttatttgctacggcagttcataattttgaagtaaaataactatttctgtgcggctgctaggcttatgtgtggctgctaggtttcattacctccaggac

SEQ ID NO: 35084 - DNA, 1586 bp, Zea Mays
cactcggtccgcgacgctttcctctcccttcgcgatgccgacgatttcctcgcgttgcctcccttcgcgccgccgcctccctcgcgtcggccgtcgcctccccccacatcggccgtcacccctcaccggtgactgtcccaactaagttgaaggggagatataggtcaagaaaaggagaaattgtgacaaatgtgttgggtgtttgtgcacctgacatgcagtttatatatgtcttacctggttgggagggttctgcacatgacgggcgtgtgcttcgagatgccatctcgaggccgaatggattacgtgtccctcaaggttgctattatcttgttgatgctggttacacaaatgcaaatggtttcttagcaccatatcgaggacagaggtatcatctaggaggtttcactactcaaaacccaccacatagtgctgaggagtacttcaacttgtgccatgctagagctaggaatattgttgagagggcatttggaaggctcaagggtcggtgggcaattttaagagacccatttgaaaatgatgaggagccagctatggatgcatcatttgaagttatggatggagaaatcagtgaaccagaatttatcacaggtgtctcaacatctaatgaatggactgatttccgcaataatcttgctcaggggatgtataatagatatagagctaggtctaataactaaggacatgaaccaattagagagctcaagtgttactcggggaagagggaaaaacaaaaggatctggacttattatgaggatgaggagttaattaaagcactatatgagatatctttagatccaaagtggaaaagtgagggaggttttaagaatgggtattgttctgttctagaaaatgaactcaaagcaaggctaccagggtgtggtctcagtgctattccacacattgagtctagagtgaggcattttaggaccaagtatggttctattgaggtcatgcttgctaagagtggttttaatcagatgacgatgcttttcgcgcttcctgagactcttaggagagaattcatcctgaacatgattgcagatgaagctcaaaggaagtgacttgtcaaattatcaatgaagaatgtcaggagcatttggtgaagagtgatcggcatatcaacttctggaagttgaattttgaagacgtttgaagtcctaagacatttctagaacatgaaaattatgaattcctaaggctagctttttttgactgactgtgttgttgactttgtgtgaaaataacccgttgtttgaaacctattatatttgctagctttatttgctattcagcaagacatataaagttgctagctttattggttgtctgtgttttcaactgtttgtgaaaataaccagtataaagttgttgtttagaacatgttatttgtgctagcgcaaagctgaaaataaaatcagtatttttgtgcgccataattttgaagttgttctttaaatcagtatttatttgctacggcagttcataattttgaagtaaaataactatttctgtgcggctgctaggcttatgtgtggctgctaggtttcattacctccaggac

SEQ ID NO: 35085 - DNA, 2202 bp, Zea Mays
atcaataccactcggtccgcgacgctttcctctcccttcgcgatgccgacgatttcctcgcgttgcctcccttcgcgccgccgcctccctcgcgtcggccgtcgcctccccccacatcggccgtcacccctcaccggcgaccaacctaccctcgacctcctctgctgatgcggatccccagcgggtgctgaccgtgacgggacctccccgtgaccgtgctctgctgcgtggtgcgcgccccgctccgcgttcggctgcccggcggcggctcgcaccaaaacagttcatgttttgatgcatccatacgagcgcttcccagtcgattcaatgcatccatgttcgcgttcggttcggcggccaaaacagtcgccgtgtgctccgtcaggcatcagcatcaggcttcccaatcgaaaaatgtgcatcagcatcaggcttgtccgttagttaagttcaaagaggcattccataccagcgcgcaacatcattcagatatcccaccactactccttgtttctagtataaataaatgtgcatccaagtcactcatgaggagcaacaagctggagtagctagcaactcgagggatgaagactagttgataggctagctttctccttctgtgccactcataaaacaacagctaggtagcacctttttgttgccaagcaatgcaagatctatctgctgagatcaatctgaatacctaaaatatctatctggccggtcatcagctcgatcttaagcaggtgactgtcccaactaagttgaaggggagatataggtcaagaaaaggagaaattgtgacaaatgtgttgggtgtttgtgcacctgacatgcagtttatatatgtcttacctggttgggagggttctgcacatgacgggcgtgtgcttcgagatgccatctcgaggccgaatggattacgtgtccctcaaggttgctattatcttgttgatgctggttacacaaatgcaaatggtttcttagcaccatatcgaggacagaggtatcatctaggaggtttcactactcaaaacccaccacatagtgctgaggagtacttcaacttgtgccatgctagagctaggaatattgttgagagggcatttggaaggctcaagggtcggtgggcaattttaagacccatttgaaaatgatgaggagccagctatggatgcatcatttgaagttatggatggagaaatcagtgaaccagaatttatcacaggtgtctcaacatctaatgaatggactgatttccgcaataatcttgctcaggggatgtataatagatatagagctaggtctaataactaaggacatgaaccaattagagagctcaagtgttactcggggaagagggaaaaacaaaaggatctggacttattatgaggatgaggagttaattaaagcactatatgagatatctttagatccaaagtggaaaagtgagggaggttttaagaatgggtattgttctgttctagaaaatgaactcaaagcaaggctaccagggtgtggtctcagtgctattccacacattgagtctagagtgaggcattttaggaccaagtatggttctattgaggtcatgcttgctaagagtggttttaatcagatgacgatgcttttcgcgcttcctgagactcttaggagagaattcatcctgaacatgattgcagatgaagctcaaaggaagtgacttgtcaaattatcaatgaagaatgtcaggagcatttggtgaagagtgatcggcatatcaacttctggaagttgaattttgaagacgtttgaagtcctaagacatttctagaacatgaaaattatgaattcctaaggctagctttttttgactgactgtgttgttgactttgtgtgaaaataacccgttgtttgaaacctattatatttgctagctttatttgctattcagcaagacatataaagttgctagctttattggttgtctgtgttttcaactgtttgtgaaaataaccagtataaagttgttgtttagaacatgttatttgtgctagcgcaaagctgaaaataaaatcagtatttttgtgcgccataattttgaagttgttctttaaatcagtatttatttgctacggcagttcataattttgaagtaaaataactatttctgtgcggctgctaggcttatgtgtggctgctaggtttcattacctccaggac

SEQ ID NO: 35086 - DNA, 2216 bp, Zea Mays
atcaataccactcggtccgcgacgctttcctctcccttcgcgatgccgacgatttcctcgcgttgcctcccttcgcgccgccgcctccctcgcgtcggccgtcgcctccccccacatcggccgtcacccctcaccggcgaccaacctaccctcgacctcctctgctgatgcggatccccagcgggtgctgaccgtgacgggacctccccgtgaccgtgctctgctgcgtggtgcgcgccccgctccgcgttcggctgcccggcggcggctcgcaccaaaacagttcatgttttgatgcatccatacgagcgcttcccagtcgattcaatgcatccatgttcgcgttcggttcggcggccaaaacagtcgccgtgtgctccgtcaggcatcagcatcaggcttcccaatcgaaaaatgtgcatcagcatcaggcttgtccgttagttaagttcaaagaggcattccataccagcgcgcaacatcattcagatatcccaccactactccttgtttctagtataaataaatgtgcatccaagtcactcatgaggagcaacaagctggagtagctagcaactcgagggatgaagactagttgataggctagctttctccttctgtgccactcataaaacaacagctaggtagcacctttttgttgccaagcaatgcaagatctatctgctgagatcaatctgaatacctaaaatatctatctggccggtcatcagctcgatcttaagcaggtgactgtcccaactaagttgaaggggagatataggtcaagaaaaggagaaattgtgacaaatgtgttgggtgtttgtgcacctgacatgcagtttatatatgtcttacctggttgggagggttctgcacatgacgggcgtgtgcttcgagatgccatctcgaggccgaatggattacgtgtccctcaaggcgagttctgtcccttcatattgaaaaaacaattatttaggcatagttattggtattaaacttatactttcttttttccatgttaaggttgctattatcttgttgatgctggttacacaaatgcaaatggtttcttagcaccatatcgaggacagagagctaggaatattgttgagagggcatttggaaggctcaagggtcggtgggcaattttaagagacccatttgaaaatgatgaggagccagctatggatgcatcatttgaagttatggatggagaaatcagtgaaccagaatttatcacaggtgtctcaacatctaatgaatggactgatttccgcaataatcttgctcaggggatgtataatagatatagagctaggtctaataactaaggacatgaaccaattagagagctcaagtgttactcggggaagagggaaaaacaaaaggatctggacttattatgaggatgaggagttaattaaagcactatatgagatatctttagatccaaagtggaaaagtgagggaggttttaagaatgggtattgttctgttctagaaaatgaactcaaagcaaggctaccagggtgtggtctcagtgctattccacacattgagtctagagtgaggcattttaggaccaagtatggttctattgaggtcatgcttgctaagagtggttttaatcagatgacgatgcttttcgcgcttcctgagactcttaggagagaattcatcctgaacatgattgcagatgaagctcaaaggaagtgacttgtcaaattatcaatgaagaatgtcaggagcatttggtgaagagtgatcggcatatcaacttctggaagttgaattttgaagacgtttgaagtcctaagacatttctagaacatgaaaattatgaattcctaaggctagctttttttgactgactgtgttgttgactttgtgtgaaaataacccgttgtttgaaacctattatatttgctagctttatttgctattcagcaagacatataaagttgctagctttattggttgtctgtgttttcaactgtttgtgaaaataaccagtataaagttgttgtttagaacatgttatttgtgctagcgcaaagctgaaaataaaatcagtatttttgtgcgccataattttgaagttgttctttaaatcagtatttatttgctacggcagttcataattttgaagtaaaataactatttctgtgcggctgctaggcttatgtgtggctgctaggtttcattacctccaggac

SEQ ID NO: 35087 - DNA, 2111 bp, Zea Mays
atcaataccactcggtccgcgacgctttcctctcccttcgcgatgccgacgatttcctcgcgttgcctcccttcgcgccgccgcctccctcgcgtcggccgtcgcctccccccacatcggccgtcacccctcaccggcgaccaacctaccctcgacctcctctgctgatgcggatccccagcgggtgctgaccgtgacgggacctccccgtgaccgtgctctgctgcgtggtgcgcgccccgctccgcgttcggctgcccggcggcggctcgcaccaaaacagttcatgttttgatgcatccatacgagcgcttcccagtcgattcaatgcatccatgttcgcgttcggttcggcggccaaaacagtcgccgtgtgctccgtcaggcatcagcatcaggcttcccaatcgaaaaatgtgcatcagcatcaggcttgtccgttagttaagttcaaagaggcattccataccagcgcgcaacatcattcagatatcccaccactactccttgtttctagtataaataaatgtgcatccaagtcactcatgaggagcaacaagctggagtagctagcaactcgagggatgaagactagttgataggctagctttctccttctgtgccactcataaaacaacagctaggtagcacctttttgttgccaagcaatgcaagatctatctgctgagatcaatctgaatacctaaaatatctatctggccggtcatcagctcgatcttaagcagtttatatatgtcttacctggttgggagggttctgcacatgacgggcgtgtgcttcgagatgccatctcgaggccgaatggattacgtgtccctcaaggttgctattatcttgttgatgctggttacacaaatgcaaatggtttcttagcaccatatcgaggacagaggtatcatctaggaggtttcactactcaaaacccaccacatagtgctgaggagtacttcaacttgtgccatgctagagctaggaatattgttgagagggcatttggaaggctcaagggtcggtgggcaattttaagagacccatttgaaaatgatgaggagccagctatggatgcatcatttgaagttatggatggagaaatcagtgaaccagaatttatcacaggtgtctcaacatctaatgaatggactgatttccgcaataatcttgctcaggggatgtataatagatatagagctaggtctaataactaaggacatgaaccaattagagagctcaagtgttactcggggaagagggaaaaacaaaaggatctggacttattatgaggatgaggagttaattaaagcactatatgagatatctttagatccaaagtggaaaagtgagggaggttttaagaatgggtattgttctgttctagaaaatgaactcaaagcaaggctaccagggtgtggtctcagtgctattccacacattgagtctagagtgaggcattttaggaccaagtatggttctattgaggtcatgcttgctaagagtggttttaatcagatgacgatgcttttcgcgcttcctgagactcttaggagagaattcatcctgaacatgattgcagatgaagctcaaaggaagtgacttgtcaaattatcaatgaagaatgtcaggagcatttggtgaagagtgatcggcatatcaacttctggaagttgaattttgaagacgtttgaagtcctaagacatttctagaacatgaaaattatgaattcctaaggctagctttttttgactgactgtgttgttgactttgtgtgaaaataacccgttgtttgaaacctattatatttgctagctttatttgctattcagcaagacatataaagttgctagctttattggttgtctgtgttttcaactgtttgtgaaaataaccagtataaagttgttgtttagaacatgttatttgtgctagcgcaaagctgaaaataaaatcagtatttttgtgcgccataattttgaagttgttctttaaatcagtatttatttgctacggcagttcataattttgaagtaaaataactatttctgtgcggctgctaggcttatgtgtggctgctaggtttcattacctccaggac

SEQ ID NO: 35088 - DNA, 1041 bp, Zea Mays
aaatcaataccactcggtccgcgacgctttcctctcccttcgcgatgccgacgatttcctcgcgttgcctcccttcgcgccgccgcctccctcgcgtcggccgtcgcctccccccacatcggccgtcacccctcaccggacatgaaccaattagagagctcaagtgttactcggggaagagggaaaaacaaaaggatctggacttattatgaggatgaggagttaattaaagcactatatgagatatctttagatccaaagtggaaaagtgagggaggttttaagaatgggtattgttctgttctagaaaatgaactcaaagcaaggctaccagggtgtggtctcagtgctattccacacattgagtctagagtgaggcattttaggaccaagtatggttctattgaggtcatgcttgctaagagtggttttaatcagatgacgatgcttttcgcgcttcctgagactcttaggagagaattcatcctgaacatgattgcagacctatatcctttcttcagatgaagctcaaaggaagtgacttgtcaaattatcaatgaagaatgtcaggagcatttggtgaagagtgatcggcatatcaacttctggaagttgaattttgaagacgtttgaagtcctaagacatttctagaacatgaaaattatgaattcctaaggctagctttttttgactgactgtgttgttgactttgtgtgaaaataacccgttgtttgaaacctattatatttgctagctttatttgctattcagcaagacatataaagttgctagctttattggttgtctgtgttttcaactgtttgtgaaaataaccagtataaagttgttgtttagaacatgttatttgtgctagcgcaaagctgaaaataaaatcagtatttttgtgcgccataattttgaagttgttctttaaatcagtatttatttgctacggcagttcataattttgaagtaaaataactatttctgtgcggctgctaggcttatgtgtggctgctaggtttcattacctccaggac

SEQ ID NO: 35089 - DNA, 1054 bp, Zea Mays
aatcaaatacctcctttattcaattccccggtaaatcaataccactcggtccgcgacgctttcctctcccttcgcgatgccgacgatttcctcgcgttgcctcccttcgcgccgccgcctccctcgcgtcggccgtcgcctccccccacatcggccgtcacccctcaccggacatgaaccaattagagagctcaagtgttactcggggaagagggaaaaacaaaaggatctggacttattatgaggatgaggagttaattaaagcactatatgagatatctttagatccaaagtggaaaagtgagggaggttttaagaatgggtattgttctgttctagaaaatgaactcaaagcaaggctaccagggtgtggtctcagtgctattccacacattgagtctagagtgaggcattttaggaccaagtatggttctattgaggtcatgcttgctaagagtggttttaatcagatgacgatgcttttcgcgcttcctgagactcttaggagagaattcatcctgaacatgattgcagatgaagctcaaaggaagtgacttgtcaaattatcaatgaagaatgtcaggagcatttggtgaagagtgatcggcatatcaacttctggaagttgaattttgaagacgtttgaagtcctaagacatttctagaacatgaaaattatgaattcctaaggctagctttttttgactgactgtgttgttgactttgtgtgaaaataacccgttgtttgaaacctattatatttgctagctttatttgctattcagcaagacatataaagttgctagctttattggttgtctgtgttttcaactgtttgtgaaaataaccagtataaagttgttgtttagaacatgttatttgtgctagcgcaaagctgaaaataaaatcagtatttttgtgcgccataattttgaagttgttctttaaatcagtatttatttgctacggcagttcataattttgaagtaaaataactatttctgtgcggctgctaggcttatgtgtggctgctaggtttcattacctccaggac

SEQ ID NO: 35090 - DNA, 1788 bp, Zea Mays
tgaagttctacgcttgtatctatggagacgtttggttacaacaaatgtaatgtgatctaattacgtccgtaaagagatacccatacaactgtttggttagatataatctgtaatagatacctgtaatcaaatacctcctttattcaattccccggtaaatcaataccactcggtccgcgacgctttcctctcccttcgcgatgccgacgatttcctcgcgttgcctcccttcgcgccgccgcctccctcgcgtcggccgtcgcctccccccacatcggccgtcacccctcaccgagttgtttgggtgcattggatggcacacatgtaaaggtgactgtcccaactaagttgaaggggagatataggtcaagaaaaggagaaattgtgacaaatgtgttgggtgtttgtgcacctgacatgcagtttatatatgtcttacctggttgggagggttctgcacatgacgggcgtgtgcttcgagatgccatctcgaggccgaatggattacgtgtccctcaaggttgctattatcttgttgatgctggttacacaaatgcaaatggtttcttagcaccatatcgaggacagaggtatcatctaggaggtttcactactcaaaacccaccacatagtgctgaggagtacttcaacttgtgccatgctagagctaggaatattgttgagagggcatttggaaggctcaagggtcggtgggcaattttaagagacccatttgaaaatgatgaggagccagctatggatgcatcatttgaagttatggatggagaaatcagtgaaccagaatttatcacaggtgtctcaacatctaatgaatggactgatttccgcaataatcttgctcaggggatgtataatagatatagagctaggtctaataactaaggacatgaaccaattagagagctcaagtgttactcggggaagagggaaaaacaaaaggatctggacttattatgaggatgaggagttaattaaagcactatatgagatatctttagatccaaagtggaaaagtgagggaggttttaagaatgggtattgttctgttctagaaaatgaactcaaagcaaggctaccagggtgtggtctcagtgctattccacacattgagtctagagtgaggcattttaggaccaagtatggttctattgaggtcatgcttgctaagagtggttttaatcagatgacgatgcttttcgcgcttcctgagactcttaggagagaattcatcctgaacatgattgcagatgaagctcaaaggaagtgacttgtcaaattatcaatgaagaatgtcaggagcatttggtgaagagtgatcggcatatcaacttctggaagttgaattttgaagacgtttgaagtcctaagacatttctagaacatgaaaattatgaattcctaaggctagctttttttgactgactgtgttgttgactttgtgtgaaaataacccgttgtttgaaacctattatatttgctagctttatttgctattcagcaagacatataaagttgctagctttattggttgtctgtgttttcaactgtttgtgaaaataaccagtataaagttgttgtttagaacatgttatttgtgctagcgcaaagctgaaaataaaatcagtatttttgtgcgccataattttgaagttgttctttaaatcagtatttatttgctacggcagttcataattttgaagtaaaataactatttctgtgcggctgctaggcttatgtgtggctgctaggtttcattacctccaggac

SEQ ID NO: 35091 - DNA, 1577 bp, Zea Mays
attggataaagacggtgaagttctacgcttgtatctatggagacgtttggttacaacaaatgtaatgtgatctaattacgtccgtaaagagatacccatacaactgtttggttagatataatctgtaatagatacctgtaatcaaatacctcctttattcaattccccggtaaatcaataccactcggtccgcgacgctttcctctcccttcgcgatgccgacgatttcctcgcgttgcctcccttcgcgccgccgcctccctcgcgtcggccgtcgcctccccccacatcggccgtcacccctcaccggttgctattatcttgttgatgctggttacacaaatgcaaatggtttcttagcaccatatcgaggacagaggtatcatctaggaggtttcactactcaaaacccaccacatagtgctgaggagtacttcaacttgtgccatgctagagctaggaatattgttgagagggcatttggaaggctcaagggtcggtgggcaattttaagagacccatttgaaaatgatgaggagccagctatggatgcatcatttgaagttatggatggagaaatcagtgaaccagaatttatcacaggtgtctcaacatctaatgaatggactgatttccgcaataatcttgctcaggggatgtataatagatatagagctaggtctaataactaaggacatgaaccaattagagagctcaagtgttactcggggaagagggaaaaacaaaaggatctggacttattatgaggatgaggagttaattaaagcactatatgagatatctttagatccaaagtggaaaagtgagggaggttttaagaatgggtattgttctgttctagaaaatgaactcaaagcaaggctaccagggtgtggtctcagtgctattccacacattgagtctagagtgaggcattttaggaccaagtatggttctattgaggtcatgcttgctaagagtggttttaatcagatgacgatgcttttcgcgcttcctgagactcttaggagagaattcatcctgaacatgattgcagatgaagctcaaaggaagtgacttgtcaaattatcaatgaagaatgtcaggagcatttggtgaagagtgatcggcatatcaacttctggaagttgaattttgaagacgtttgaagtcctaagacatttctagaacatgaaaattatgaattcctaaggctagctttttttgactgactgtgttgttgactttgtgtgaaaataacccgttgtttgaaacctattatatttgctagctttatttgctattcagcaagacatataaagttgctagctttattggttgtctgtgttttcaactgtttgtgaaaataaccagtataaagttgttgtttagaacatgttatttgtgctagcgcaaagctgaaaataaaatcagtatttttgtgcgccataattttgaagttgttctttaaatcagtatttatttgctacggcagttcataattttgaagtaaaataactatttctgtgcggctgctaggcttatgtgtggctgctaggtttcattacctccaggac

SEQ ID NO: 35092 - DNA, 1387 bp, Zea Mays
gtaaatcaataccactcggtccgcgacgctttcctctcccttcgcgatgccgacgatttcctcgcgttgcctcccttcgcgccgccgcctccctcgcgtcggccgtcgcctccccccacatcggccgtcacccctcaccggtgagtatcgtcctctccctccctccctctctagctgtttcctttctctgacgatgcggatccccgtcggatggtgtggatctaggcgaccaacctaccctcgacctcctctgctgatgcggatccccagcgggtgctgaccgtgacgggacctccccgtgaccgtgctctgctgcgtggtgcgcgccccgctccgcgttcggctgcccggcggcggctcgcaccaaaacagttcatgttttgatgcatccatacgagcgcttcccagtcgattcaatgcatccatgttcgcgttcggttcggcggccaaaacagtcgccgtgtgctccgtcaggcatcagcatcaggcttcccaatcgaaaaatgtgcatcagcatcaggcttgtccgttagttaagttcaaagaggcattccataccagcgcgcaacatcattcagatatcccaccactactccttgtttctagtataaataaatgtgcatccaagtcactcatgaggagcaacaagctggagtagctagcaactcgagggatgaagactagttgataggctagctttctccttctgtgccactcataaaacaacagctaggtagcacctttttgttgccaagcaatgcaagatctatctgctgagatcaatctgaatacctaaaatatctatctggccggtcatcagctcgatcttaagcaggtgatcttcatttcacatgcatgcttgttccttaccaaaacttgtttcttccaattctttctcatatatcctgcgcttagtgatggttactaatcagggatgctctttattgagcaactagtctagtctagtctagggatgcaaatttgccctctatattttcttgtcttgtttatatattgtgctcaaagaaatctgatttttctatactaaccttgaacaacactatggcccgtcttcctttatctacacgaacgcggaagagaaatttgacatttagaaatgtgacatctgccattatgcttatgtactattatatcttggctttattagtactatcacataagtggaagtgttggaagatagaaaggaggataaaggttaaagaacttagaagtcaacgtatgtaccatctaatctgtgagagcgatgttaagtgtataaatgaccttcgcatggataggagaacatttcatatattgtgtgatatgcttagagatgttggtggtttgaggggtacaagaaatacaccattggaagagatagtagcgg

SEQ ID NO: 35093 - DNA, 878 bp, Zea Mays
aagagatcgaggctcctatctggtataggacggagctgagcttctagcaacgtacagtgtatccgccatgagtcctttcggggcggtgatcacgccagaaaccctcaagtacatgtccaagtaccagggacgtgagatcacgcaggtggactgcgcacgggaggcgatgaggctgatccacgcggaagacaagaacctcaaggccgaggactcagcgtgggagctgaagaagaagttcggcaacggcgtgagcaccatggtcctcgtctacaacgccaccggggccagcctgagcctggtggacgacgggaaagactggatgggctccgtctacagctcgccgatcccggacaccttccacaacgggcagtggatcgccttcctccacgtcaagcccggctcgctggcgcagggcagccaggccgccagggtgttccgcggcagggacgtcgatggccggactcgggacttcgtcgtcgcctggtacatcccgtgggacaacataccgacacgatgaaaactacttcaagactcggtggagtagtgtcaaaacgagtctaggacattcaaggagagtgacccgtgccaaggacgagaactgtgcgtcaactgtcagcatcggtggctacactacagccttctgcatcgcagtcctacaacaccagttccagccgctgccggaagagcgcgaataatcaatcaatcgatcgatcgagtttgcgatcgtgttacctcctaaataaaagttgtacacgcgaagtactactccagtatttacatgtatgtttctagcaggtgtacgtacgctactcctgaataaattgtggtgcacgcaataaataaataattaatgctcctggataaatttctgcctacca

SEQ ID NO: 35094 - DNA, 2270 bp, Zea Mays
ggtggattcaggctagcgggattatgctaggtcggtgcagtggcgatgcgatgcggtgcaggcaaacccgcaacggctaggaagacctctacaaaaaaataaacaagcatgtcaacaaaaaaattcggcaacactacctctgcacggggaggtttccaaaacgtgcaaataaaagtaataggatgacagttgacatccacacatatacaacaaacgacacgatggccatcaatcacatatatattattaatcggtgcagaagaatatatccaaccacatcaactacttgaattaattaaggtacaaagtaaaataaaaaacttttcatttgagcacatttgttgatacggatagaccaaagtcttatgctacaaatgtaacctaatttgtactaatttcctatatattaaagccggaaggaaacgtggcctgatatgcgtccacgtcatcctttttactctcagccatacgattcagatccaatggacgcgagctatcctcctccttccacctgtctccgcacaaaagaaaaaaaattcttgggtctccacgctaccagagccttccaggcgaagacgacatcgggagatttgcgctctctcttgctatggcgcttcctccccctctgagatgtgcttgcgctggcgccacgcccgcgtgaatggcctcgccgccgcttctcgcgctcgcacgtgctactgtgtctgcgcgcctctccctgcgttcaagcacgccgcctcttctcccaccccgtcgcccctgcgccgtggtggctcccgtggtcgcactcgcatctctctcgccgcagcgctttctctcctcccgagatccctctcctcgtgctcgccgccacgcccgggtgaacgccctcgctgccgcttcttgcactccccgcgcgcctctcctcgctttcgcccaagccgcctcctctccctctccgtcgcccataatcaagcgagactgcgtgcaggggtgcatgctgcacgcggtggcgacgagctacggcacgaccgcgacgtcgcgaatgactccgagttccgttcgtggggtgcaggctcaccggctccgcatgctgtaattgggcaaagcgtggggacgctacgctcgggtggtctacttcaatcttagcgcccagcgacatcgtcgtgcaccagggctggagcgactaggcgaccggtccagaacgaagtcagcctcatcgaacggtcttcaactactggcaaatgcaacgccgttagttgccgcatgtgactactcgcaaatcagatggagaggggcgagcggatcacgagttgctggagccggggaggaagaagcgggcatgagcttggaggggacgaggaaccaaggccagcaccaaggcgcggggcggcgctagggttggacggtgctgggtggcggcggtggtggcgcggggcggggcagcgacgaagttggttcggcggcgatgtaattggcgcgacggcggcgacggtggagatgcggcggcagtggagagggagtgtagaagaatggggctacgagccgtcggtcagggctaagtaaatgttctttgccgagtgcccgcaatctggcactcgacaatttttttattctataacttactttgtcgactgtcctggatctaacacttggcaaagaatactttgccgaatgcgtcctggtgggtactcggcaaagaatgtttaaattatttaaatttttctttgccgggtgttccctcatgttactcggcaaaacttgtctttgccactctttccgtgacactcgacaaattatgtttgtttttttctttttttctccaaactttttatggtgtgttcttatagtatggaggcctatatgttcaattttggcataattataaaagtgtttgctataactatcagatttagttcgtttaattgaatttcttcagataatttcaaatttgaactgcaagtcactcgaaaaatgaaaaatagtaaatgcaaaaatgatactcatgttatttagcataagttacgacctatttaaggaatagactagaattttcgaacaccatgctcacaaaacatgatcgcgaacttatgatccagttgttttaaaattgtataaaacacaaacaaagtcagaaaatcataaaacttgtcggcatgtcatgatatcctatgtagagactctaataaaaatttaagaccattttatgaaatttatcatgcactatgtgtagaaacctaatcggtctacatttaaattttgtgatttcacgtgaaggtactaaacaaaac

SEQ ID NO: 35095 - DNA, 2189 bp, Zea Mays
ggtggattcaggctagcgggattatgctaggtcggtgcagtggcgatgcgatgcggtgcaggcaaacccgcaacggctaggaagacctctacaaaaaaataaacaagcatgtcaacaaaaaaattcggcaacactacctctgcacggggaggtttccaaaacgtgcaaataaaagtaataggatgacagttgacatccacacatatacaacaaacgacacgatggccatcaatcacatatatattattaatcggtgcagaagaatatatccaaccacatcaactacttgaattaattaaggtacaaagtaaaataaaaaacttttcatttgagcacatttgttgatacggatagaccaaagtcttatgctacaaatgtaacctaatttgtactaatttcctatatattaaagccggaaggaaacgtggcctgatatgcgtccacgtcatcctttttactctcagccatacgattcagatccaatggacgcgagctatcctcctccttccacctgtctccgcacaaaagaaaaaaaattcttgggtctccacgctaccagagccttccaggcgaagacgacatcgggagatttgcgctctctcttgctatggcgcttcctccccctctgagatgtgcttgcgctggcgccacgcccgcgtgaatggcctcgccgccgcttctcgcgctcgcacgtgctactgtgtctgcgcgcctctccctgcgttcaagcacgccgcctcttctcccaccccgtcgcccctgcgccgtggtggctcccgtggtcgcactcgcatctctctcgccgcagcgctttctctcctcccgagatccctctcctcgtgctcgccgccacgcccgggtgaacgccctcgctgccgcttcttgcactccccgcgcgcctctcctcgctttcgcccaagccgcctcctctccctctccgtcgcccataatcaagcgagactgcgtgcaggggtgcatgctgcacgcggtggcgacgagctacggcacgaccgcgacgtcgcgaatgactccgagttccgttcgtggggtgcaggctcaccggctccgcatgctgtaattgggcaaagcgtggggacgctacgctcgggtggtctacttcaatcttagcgcccagcgacatcgtcgtgcaccagggctggagcgactaggcgaccggtccagaacgaagagaggggcgagcggatcacgagttgctggagccggggaggaagaagcgggcatgagcttggaggggacgaggaaccaaggccagcaccaaggcgcggggcggcgctagggttggacggtgctgggtggcggcggtggtggcgcggggcggggcagcgacgaagttggttcggcggcgatgtaattggcgcgacggcggcgacggtggagatgcggcggcagtggagagggagtgtagaagaatggggctacgagccgtcggtcagggctaagtaaatgttctttgccgagtgcccgcaatctggcactcgacaatttttttattctataacttactttgtcgactgtcctggatctaacacttggcaaagaatactttgccgaatgcgtcctggtgggtactcggcaaagaatgtttaaattatttaaatttttctttgccgggtgttccctcatgttactcggcaaaacttgtctttgccactctttccgtgacactcgacaaattatgtttgtttttttctttttttctccaaactttttatggtgtgttcttatagtatggaggcctatatgttcaattttggcataattataaaagtgtttgctataactatcagatttagttcgtttaattgaatttcttcagataatttcaaatttgaactgcaagtcactcgaaaaatgaaaaatagtaaatgcaaaaatgatactcatgttatttagcataagttacgacctatttaaggaatagactagaattttcgaacaccatgctcacaaaacatgatcgcgaacttatgatccagttgttttaaaattgtataaaacacaaacaaagtcagaaaatcataaaacttgtcggcatgtcatgatatcctatgtagagactctaataaaaatttaagaccattttatgaaatttatcatgcactatgtgtagaaacctaatcggtctacatttaaattttgtgatttcacgtgaaggtactaaacaaaac

SEQ ID NO: 35096 - DNA, 2194 bp, Zea Mays
ggtggattcaggctagcgggattatgctaggtcggtgcagtggcgatgcgatgcggtgcaggcaaacccgcaacggctaggaagacctctacaaaaaaataaacaagcatgtcaacaaaaaaattcggcaacactacctctgcacggggaggtttccaaaacgtgcaaataaaagtaataggatgacagttgacatccacacatatacaacaaacgacacgatggccatcaatcacatatatattattaatcggtgcagaagaatatatccaaccacatcaactacttgaattaattaaggtacaaagtaaaataaaaaacttttcatttgagcacatttgttgatacggatagaccaaagtcttatgctacaaatgtaacctaatttgtactaatttcctatatattaaagccggaaggaaacgtggcctgatatgcgtccacgtcatcctttttactctcagccatacgattcagatccaatggacgcgagctatcctcctccttccacctgtctccgcacaaaagaaaaaaaattcttgggtctccacgctaccagagccttccaggcgaagacgacatcgggagatttgcgctctctcttgctatggcgcttcctccccctctgagatgtgcttgcgctggcgccacgcccgcgtgaatggcctcgccgccgcttctcgcgctcgcacgtgctactgtgtctgcgcgcctctccctgcgttcaagcacgccgcctcttctcccaccccgtcgcccctgcgccgtggtggctcccgtggtcgcactcgcatctctctcgccgcagcgctttctctcctcccgagatccctctcctcgtgctcgccgccacgcccgggtgaacgccctcgctgccgcttcttgcactccccgcgcgcctctcctcgctttcgcccaagccgcctcctctccctctccgtcgcccataatcaagcgagactgcgtgcaggggtgcatgctgcacgcggtggcgacgagctacggcacgaccgcgacgtcgcgaatgactccgagttccgttcgtggggtgcaggctcaccggctccgcatgctgtaattgggcaaagcgtggggacgctacgctcgggtggtctacttcaatcttagcgcccagcgacatcgtcgtgcaccagggctggagcgactaggcgaccggtccagaacgaatgtaggagaggggcgagcggatcacgagttgctggagccggggaggaagaagcgggcatgagcttggaggggacgaggaaccaaggccagcaccaaggcgcggggcggcgctagggttggacggtgctgggtggcggcggtggtggcgcggggcggggcagcgacgaagttggttcggcggcgatgtaattggcgcgacggcggcgacggtggagatgcggcggcagtggagagggagtgtagaagaatggggctacgagccgtcggtcagggctaagtaaatgttctttgccgagtgcccgcaatctggcactcgacaatttttttattctataacttactttgtcgactgtcctggatctaacacttggcaaagaatactttgccgaatgcgtcctggtgggtactcggcaaagaatgtttaaattatttaaatttttctttgccgggtgttccctcatgttactcggcaaaacttgtctttgccactctttccgtgacactcgacaaattatgtttgtttttttctttttttctccaaactttttatggtgtgttcttatagtatggaggcctatatgttcaattttggcataattataaaagtgtttgctataactatcagatttagttcgtttaattgaatttcttcagataatttcaaatttgaactgcaagtcactcgaaaaatgaaaaatagtaaatgcaaaaatgatactcatgttatttagcataagttacgacctatttaaggaatagactagaattttcgaacaccatgctcacaaaacatgatcgcgaacttatgatccagttgttttaaaattgtataaaacacaaacaaagtcagaaaatcataaaacttgtcggcatgtcatgatatcctatgtagagactctaataaaaatttaagaccattttatgaaatttatcatgcactatgtgtagaaacctaatcggtctacatttaaattttgtgatttcacgtgaaggtactaaacaaaac

SEQ ID NO: 35097 - DNA, 3006 bp, Zea Mays
gttatatctagggtggcggtggattcaggctagcgggattatgctaggtcggtgcagtggcgatgcgatgcggtgcaggcaaacccgcaacggctaggaagacctctacaaaaaaataaacaagcatgtcaacaaaaaaattcggcaacactacctctgcacggggaggtttccaaaacgtgcaaataaaagtaataggatgacagttgacatccacacatatacaacaaacgacacgatggccatcaatcacatatatattattaatcggtgcagaagaatatatccaaccacatcaactacttgaattaattaaggtacaaagtaaaataaaaaacttttcatttgagcacatttgttgatacggatagaccaaagtcttatgctacaaatgtaacctaatttgtactaatttcctatatattaaagccggaaggaaacgtggcctgatatgcgtccacgtcatcctttttactctcagccatacgattcagatccaatggacgcgagctatcctcctccttccacctgtctccgcacaaaagaaaaaaaattcttgggtctccacgctaccagagccttccaggcgaagacgacatcgggagatttgcgctctctcttgctatggcgcttcctccccctctgagatgtgcttgcgctggcgccacgcccgcgtgaatggcctcgccgccgcttctcgcgctcgcacgtgctactgtgtctgcgcgcctctccctgcgttcaagcacgccgcctcttctcccaccccgtcgcccctgcgccgtggtggctcccgtggtcgcactcgcatctctctcgccgcagcgctttctctcctcccgagatccctctcctcgtgctcgccgccacgcccgggtgaacgccctcgctgccgcttcttgcactccccgcgcgcctctcctcgctttcgcccaagccgcctcctctccctctccgtcgcccataatcaagcgagactgcgtgcaggggtgcatgctgcacgcggtggcgacgagctacggcacgaccgcgacgtcgcgaatgactccgagttccgttcgtggggtgcaggctcaccggctccgcatgctgtaattgggcaaagcgtggggacgctacgctcgggtggtctacttcaatcttagcgcccagcgacatcgtcgtgcaccagggctggagcgactaggcgaccggtccagaacgaagtgatgatgagattctaagaagtaggtacgtgcttgcctagcaggtcagcctcatcgaacggtcttcaactactggcaaatgcaacgccgttagttgccgcatgtgactactcgcaaatcagatggtaaacacgagtaaattaaatagtaggattactttacggcatgtataaatagcacatagtgcatgacgaggtgcagcagtagcagcatgatgccaacaactgcactctggtttcttattttccagctggatcttgcacgcacatctaatttgtcttttttttggctggaatttccttcctgtctatacatgtagtatgtcgattatgttgtcttcctattttttatttactactaatagttgtatcacagaagtcccattcttctctactcctttatctaatttactgtttttttgtcttagttgatccaattagaccattttgttatgtgtatatgcaatgattctatctcttttaggattatgtaatgctaggaactgatgttacattttttgccaacttctaattgtgttcttggttatggatttatggtggaagcataatcgtttgtttcatacctaatgataagaataataataacctttaccattaacatttttctcaaaatctagcacagtgccaccagcccaccacgcgcgcctgggcgcgcgctagatactagtatcatatgaggattatgagctataccaaccaaacaaacattaaccggcaatgcatgattcattaactagctaatctaaacacacggattttcaccttcgatggtcagtgtaggagaggggcgagcggatcacgagttgctggagccggggaggaagaagcgggcatgagcttggaggggacgaggaaccaaggccagcaccaaggcgcggggcggcgctagggttggacggtgctgggtggcggcggtggtggcgcggggcggggcagcgacgaagttggttcggcggcgatgtaattggcgcgacggcggcgacggtggagatgcggcggcagtggagagggagtgtagaagaatggggctacgagccgtcggtcagggctaagtaaatgttctttgccgagtgcccgcaatctggcactcgacaatttttttattctataacttactttgtcgactgtcctggatctaacacttggcaaagaatactttgccgaatgcgtcctggtgggtactcggcaaagaatgtttaaattatttaaatttttctttgccgggtgttccctcatgttactcggcaaaacttgtctttgccactctttccgtgacactcgacaaattatgtttgtttttttctttttttctccaaactttttatggtgtgttcttatagtatggaggcctatatgttcaattttggcataattataaaagtgtttgctataactatcagatttagttcgtttaattgaatttcttcagataatttcaaatttgaactgcaagtcactcgaaaaatgaaaaatagtaaatgcaaaaatgatactcatgttatttagcataagttacgacctatttaaggaatagactagaattttcgaacaccatgctcacaaaacatgatcgcgaacttatgatccagttgttttaaaattgtataaaacacaaacaaagtcagaaaatcataaaacttgtcggcatgtcatgatatcctatgtagagactctaataaaaatttaagaccattttatgaaatttatcatgcactatgtgtagaaacctaatcggtctacatttaaattttgtgatttcacgtgaaggtactaaacaaaac

SEQ ID NO: 35098 - DNA, 2896 bp, Zea Mays
caaaaaacgtggacaattcgaaatagatacatttgtagatatgcaaagatctacatatctacatcgtatctctttcgaacgggagacgcattgggttacatgatctacgacaatgatgcagaaacagaggttatatctagggtggcggtggattcaggctagcgggattatgctaggtcggtgcagtggcgatgcgatgcggtgcaggcaaacccgcaacggctaggaagacctctacaaaaaaataaacaagcatgtcaacaaaaaaattcggcaacactacctctgcacggggaggtttccaaaacgtgcaaataaaagtaataggatgacagttgacatccacacatatacaacaaacgacacgatggccatcaatcacatatatattattaatcggtgcagaagaatatatccaaccacatcaactacttgaattaattaaggtacaaagtaaaataaaaaacttttcatttgagcacatttgttgatacggatagaccaaagtcttatgctacaaatgtaacctaatttgtactaatttcctatatattaaagccggaaggaaacgtggcctgatatgcgtccacgtcatcctttttactctcagccatacgattcagatccaatggacgcgagctatcctcctccttccacctgtctccgcacaaaagaaaaaaaattcttgggtctccacgctaccagagccttccaggcgaagacgacatcgggagatttgcgctctctcttgctatggcgcttcctccccctctgagatgtgcttgcgctggcgccacgcccgcgtgaatggcctcgccgccgcttctcgcgctcgcacgtgctactgtgtctgcgcgcctctccctgcgttcaagcacgccgcctcttctcccaccccgtcgcccctgcgccgtggtggctcccgtggtcgcactcgcatctctctcgccgcagcgctttctctcctcccgagatccctctcctcgtgctcgccgccacgcccgggctcaccggctccgcatgctgtaattgggcaaagcgtggggacgctacgctcgggtggtctacttcaatcttagcgcccagcgacatcgtcgtgcaccagggctggagcgactaggcgaccggtccagaacgaagtcagcctcatcgaacggtcttcaactactggcaaatgcaacgccgttagttgccgcatgtgactactcgcaaatcagatggtaaacacgagtaaattaaatagtaggattactttacggcatgtataaatagcacatagtgcatgacgaggtgcagcagtagcagcatgatgccaacaactgcactctggtttcttattttccagctggatcttgcacgcacatctaatttgtcttttttttggctggaatttccttcctgtctatacatgtagtatgtcgattatgttgtcttcctattttttatttactactaatagttgtatcacagaagtcccattcttctctactcctttatctaatttactgtttttttgtcttagttgatccaattagaccattttgttatgtgtatatgcaatgattctatctcttttaggattatgtaatgctaggaactgatgttacattttttgccaacttctaattgtgttcttggttatggatttatggtggaagcataatcgtttgtttcatacctaatgataagaataataataacctttaccattaacatttttctcaaaatctagcacagtgccaccagcccaccacgcgcgcctgggcgcgcgctagatactagtatcatatgaggattatgagctataccaaccaaacaaacattaaccggcaatgcatgattcattaactagctaatctaaacacacggattttcaccttcgatggtcagtgtaggagaggggcgagcggatcacgagttgctggagccggggaggaagaagcgggcatgagcttggaggggacgaggaaccaaggccagcaccaaggcgcggggcggcgctagggttggacggtgctgggtggcggcggtggtggcgcggggcggggcagcgacgaagttggttcggcggcgatgtaattggcgcgacggcggcgacggtggagatgcggcggcagtggagagggagtgtagaagaatggggctacgagccgtcggtcagggctaagtaaatgttctttgccgagtgcccgcaatctggcactcgacaatttttttattctataacttactttgtcgactgtcctggatctaacacttggcaaagaatactttgccgaatgcgtcctggtgggtactcggcaaagaatgtttaaattatttaaatttttctttgccgggtgttccctcatgttactcggcaaaacttgtctttgccactctttccgtgacactcgacaaattatgtttgtttttttctttttttctccaaactttttatggtgtgttcttatagtatggaggcctatatgttcaattttggcataattataaaagtgtttgctataactatcagatttagttcgtttaattgaatttcttcagataatttcaaatttgaactgcaagtcactcgaaaaatgaaaaatagtaaatgcaaaaatgatactcatgttatttagcataagttacgacctatttaaggaatagactagaattttcgaacaccatgctcacaaaacatgatcgcgaacttatgatccagttgttttaaaattgtataaaacacaaacaaagtcagaaaatcataaaacttgtcggcatgtcatgatatcctatgtagagactctaataaaaatttaagaccattttatgaaatttatcatgcactatgtgtagaaacctaatcggtctacatttaaattttgtgatttcacgtgaaggtactaaacaaaac

SEQ ID NO: 35099 - DNA, 2421 bp, Zea Mays
caaaaaacgtggacaattcgaaatagatacatttgtagatatgcaaagatctacatatctacatcgtatctctttcgaacgggagacgcattgggttacatgatctacgacaatgatgcagaaacagaggttatatctagggtggcggtggattcaggctagcgggattatgctaggtcggtgcagtggcgatgcgatgcggtgcaggcaaacccgcaacggctaggaagacctctacaaaaaaataaacaagcatgtcaacaaaaaaattcggcaacactacctctgcacggggaggtttccaaaacgtgcaaataaaagtaataggatgacagttgacatccacacatatacaacaaacgacacgatggccatcaatcacatatatattattaatcggtgcagaagaatatatccaaccacatcaactacttgaattaattaaggtacaaagtaaaataaaaaacttttcatttgagcacatttgttgatacggatagaccaaagtcttatgctacaaatgtaacctaatttgtactaatttcctatatattaaagccggaaggaaacgtggcctgatatgcgtccacgtcatcctttttactctcagccatacgattcagatccaatggacgcgagctatcctcctccttccacctgtctccgcacaaaagaaaaaaaattcttgggtctccacgctaccagagccttccaggcgaagacgacatcgggagatttgcgctctctcttgctatggcgcttcctccccctctgagatgtgcttgcgctggcgccacgcccgcgtgaatggcctcgccgccgcttctcgcgctcgcacgtgctactgtgtctgcgcgcctctccctgcgttcaagcacgccgcctcttctcccaccccgtcgcccctgcgccgtggtggctcccgtggtcgcactcgcatctctctcgccgcagcgctttctctcctcccgagatccctctcctcgtgctcgccgccacgcccgggtgaacgccctcgctgccgcttcttgcactccccgcgcgcctctcctcgctttcgcccaagccgcctcctctccctctccgtcgcccataatcaagcgagactgcgtgcaggggtgcatgctgcacgcggtggcgacgagctacggcacgaccgcgacgtcgcgaatgactccgagttccgttcgtggggtgcaggctcaccggctccgcatgctgtaattgggcaaagcgtggggacgctacgctcgggtggtctacttcaatcttagcgcccagcgacatcgtcgtgcaccagggctggagcgactaggcgaccggtccagaacgaagtcagcctcatcgaacggtcttcaactactggcaaatgcaacgccgttagttgccgcatgtgactactcgcaaatcagatgtgtaggagaggggcgagcggatcacgagttgctggagccggggaggaagaagcgggcatgagcttggaggggacgaggaaccaaggccagcaccaaggcgcggggcggcgctagggttggacggtgctgggtggcggcggtggtggcgcggggcggggcagcgacgaagttggttcggcggcgatgtaattggcgcgacggcggcgacggtggagatgcggcggcagtggagagggagtgtagaagaatggggctacgagccgtcggtcagggctaagtaaatgttctttgccgagtgcccgcaatctggcactcgacaatttttttattctataacttactttgtcgactgtcctggatctaacacttggcaaagaatactttgccgaatgcgtcctggtgggtactcggcaaagaatgtttaaattatttaaatttttctttgccgggtgttccctcatgttactcggcaaaacttgtctttgccactctttccgtgacactcgacaaattatgtttgtttttttctttttttctccaaactttttatggtgtgttcttatagtatggaggcctatatgttcaattttggcataattataaaagtgtttgctataactatcagatttagttcgtttaattgaatttcttcagataatttcaaatttgaactgcaagtcactcgaaaaatgaaaaatagtaaatgcaaaaatgatactcatgttatttagcataagttacgacctatttaaggaatagactagaattttcgaacaccatgctcacaaaacatgatcgcgaacttatgatccagttgttttaaaattgtataaaacacaaacaaagtcagaaaatcataaaacttgtcggcatgtcatgatatcctatgtagagactctaataaaaatttaagaccattttatgaaatttatcatgcactatgtgtagaaacctaatcggtctacatttaaattttgtgatttcacgtgaaggtactaaacaaaac

SEQ ID NO: 35100 - DNA, 1722 bp, Zea Mays
gtctatcgaatttttacaccctcactccgtcccaccgtaaataggcagacacatcagaagagagagggagcacccttccgaagccacgccaccgacatcgcctcgtgacccgacgcactgcgccagggacccagccagctagctacatccactgatccacgcgcattccccgtaccaccgccaccgcgccgcgtcacggaaggaggaggatgtcgtcgtctccctcgccggcggccacccgcctggatctggatggcaaccccatcgctcccctcaccatctgcatgatcggcgccggcggcttcatcggctcccacctctgcgagaagctaatggccgagacgcaccacaccgtcctcgctgttgacgtctactgcgacaagatccgccaccttgtcgaccccgcgccgccgcacctcgccgggcgcatctcattccaccgccttaacataaaaaacgactccaggctagaggggctcatcaagatggccgatctgaccataaacctggccgcgatctgcacgccggccgactacaacactcgcccacttgacaccatctacagcaacttcatcgacgcactcccagtggtcaagtactgctccgagaacagcaagcgtctcatccacttctccacctgcgaggtctacggcaagaccatcggcagcttcctccccaaagaccacccgctccgcaaggagcctgaattttatgttcttaaagaagatgagtcgccctgtatttttggtccaatcgtgaaacaaagatggtcctatgcatgcgcaaagcaacttattgagaggcttgtatttggtgcagaaaatggccttgatttcacaatcgtgagacctttcaattggattggaccaaggatggacttcattcctggtgttgatggtcctagtgaaggtgtgcctcgggttttggcttgcttcagtaacaatctgctccggagagagcccttgaagcttgttgatgggggtcagtctcagagaacctttgtctacatcaaggatgctatcgaagctgtagtgctgatgattgaaaatcctgctcgagccaatggccacatcttcaatgttgggaatccgaacaatgaagttaccgttagggagttggcccaaatgatgacagaggtctacgcaaatgtctcaggagaggcaccgctggatgagcccatgattgacgtgagctcgagtcagttctacggtgaaggatacgatgatagcgacaagaggatccccgacatgactataatcaacaagcagctaggttggaacccaaagacgcctctcaaggatctgctggagacaacactgacatatcagcacaagacatacaaagaagctgtgaaaaggcaaatgtcgcaggcttcagcgtcgacttagatagcgtgcccctggctctcgtctagagcctagtcgcagctgttaagatgtttcggaagcgcaggtcacacatacgctagtgatcttttttttgaggccctagatgtccgtgttgttagataaccaagggatgctgtatcagtatgatatatttgtggcagagttgatgtattccatcgttgagctgttatatattgctgtttgagtgtagaactagttgctcagttatatgttattggttcatgagattagcgcccacatcaatctgttgatagcacatacatactatagcagggcaatgatgaatctcattcgtcagccatcaagtttcaga

SEQ ID NO: 35101 - DNA, 579 bp, Zea Mays
aaaaggcatggtatttgttagcaaggaaaataaataaattatggtacaagtgtttccaatgaagaggttactgttactacagcgcatatacctgagcggcttcattggcagcattttttgtccaaatagcaattctttcctgcttcccacgcacactgacaactgcgccacaaatttcatcaccatagtcgaattgttcaccaatcatagccagcagctaaacaaaggacagttgaaagaatataaggtggaggacgtgttaaggagagatgtgcaaaacaaagttatctttctgataaaatagaattgcttacagtgtgcagccaaaatgtatcagattttcctcttccacagctgatggtccatttaccaccattcgcacaaatagggtcttcccattttggctcgatcttgttcttgaagcaatggaaatcagctcccacgatcaatttgctagggtgattaatgttattgtaaagcctagtaaagcacagatccattagttggaattggaatatcattaataaatggaagttaaagctgtacgaggatgtaaaaggaatgaagcagagatcagca

SEQ ID NO: 35102 - DNA, 1101 bp, Zea Mays
aaacttttttcacaggaacgaggaccaacggaaaagtttccgtttccctgctcgagccgctcccccgtcctcttccttcctctcgagtagcctgccctcgcaaaaccctaaccctagctgcggacgccgtcgccgcctccgcgcccaaccgatgtctgattctgaggcgtccccaccgcccactccggccgccgcaacgcccgcagcgctggtggagacctccccgtcctcggcgaggaaggaagaactgctgcctgtggaggaaaagatctcggaattaagtgaatcacaatcagagcttctagggaggctccgtgggcttaaggaggatttgctgagttggaggagtaatttagactcccaagtgacgaaatacaaagtggaactctctgacatcaagagtgcactcaataatgaaatagagcagcttcgctcagatttccaagagctgaggaccacccttaagaagcagcaggaagatgtgtcacttagcttgaagaatttggggcttcaagatgctaccgaaaatgatgggaacaaaggaaatggagacggcacaaatgaggtcttgtcagctaacttggggaacttgaaactggatggttcttctgaaaactatgatgaaagcagagagtcaaaggaggacaaggaaaacaccgacactgctggtgatggcatcgtcgacaaagctactaaggagacgagctcaactgatgaacaattctaacacaggaaactgaactacactgttcgtgtctcagctgtagaaattctaggaacatcgatacatgagttcctgtaagagagcgagtccatgctttgctatggctcagtcgggttggttatggaactctattgggacctgtgagtcgtgaggatccaaatctcctctagaattgtgtaccaattgaaagttacgatatggtatcatggacatttgctcacctgaatgcatttcagctggtttgtcgtttgcaatatccaagcctccaaggccatgattttattagacctacttgaaatggcggtaggtgatgtactgatgtggattttgtacgaggaatagtggaataaggtattctggtgggtttgttgttggtc

SEQ ID NO: 35103 - DNA, 2713 bp, Zea Mays
cagttccacacttccacccacctccagagccaaaagagccggcggtggccggcagccaaaacccacgtcggatttcgccgccgccgccaggagctaggggacaaggcaacgccggcaggtgcaacatttatgcgtgtaccgcccggcagccacgcgtacacttctgccgcagagctaaacgcgccactccgcggcaagctgatctgctgctcccaagtcccaccagccaccgcaccgagtgccaatggcgactgcagcgacttctacgccggcggcgtggcagtctactctggtctactctggtctacgccatgcagggacctgcccgtgcttctcgcccagccccgctcgctccccgtcatcgtcacctacaggccgaattgggagggaggccagtacgcaggcgaagatgagccacggtttgaggcgcttctactggcaatggagctgggagctgaatatgtcgatgtcgagttcaaggtcgccgacaaatttatgaagtatttgtctgggaagaaacctcaaaactgtaagctcatcatttcagcatacgactacaagaccactccatcggtacatgaacttctgaatttagtagctcagatacgagcaacgggggctgacattgtgaaaattgaaaccactgctgctgacattgtagacacatcaagaatgtttcaagtacttgcacattgccatgtgcctatcattgggctggtgaggaaagaacatggttttatttctcgtattatttgcgcaaaatatggcggataccttacttttgcatctcttgaaaatggaaaagaatctaccactgagcagccgacagtagcagacttgataaataagtacaaaatacggcagataggcccagatactaaggtctttggtattattggaaatccagttagccacagtaaaagcccaattgtgcaaaatcaagctttcagatcagtgggtttcgatgctgtgtttttgccatttttgtcagatgacttggttcagtttctttataccttctcagcaccagattatgccggcttcagttgcacaatgccccataaagaaactgcacttaggtgctgtgacgatgtcgaccctatcgccagggacatcggagctattaatacaatcattagaagacctgatggaaaacttgtaggctacaatacagattattctggtgctatttctgctattgaggatggaataagaggttgtcacgtgccaccctttgcaatattgtgttttgctgatctatatatggttcatataactgccttttagccccatgtgcagcatcacaaccaacagattcgatcacttcaccactggctggaagactttttgttgttattggggctggtggtgcaggaaaagcactagcatatggtgcaaaagagaagggagcaagagttgtgattgcaaaccgtacatttgcacgagctcaagaactcgcccacatcattggcgggactgctttgaccctgtcagagttggaaagctaccatccggagaaagggatgattcttgcaaacgcgacatctgtggggatgcatccaaacgtcgatgaaacccctttatctaagcacgcgctaaaatcctatgccgttgtcttcgacgcggtcttcgtgccgagagagaccagacttctccgagaagctgcagtgtgtggagccacagtcatcgacggtttggagatgctaatcaggctagtgatggttcagtttaagcttttcacggggggcatgacagctccagaaaggttgatgcgtgaggctatcctgacgaagacacattgagggtttgttcaaataacaagatctctacactacagatgtccctgcaaaaaaaaaggtcccagttgtacatgtcctccttcttgcttcttcctcggcgtctgggaagcaccgtatctcattttcaacccaagcaaggagaggaggtgcaggttcgggcctcgtcctgcttctcctgctgcctgccatgatgcagtgtcgtttgttgttcagtagacggtatgctctagttcaacagagtaaagatgttttgttttctcaggttgcaaaacaacgaatggtcatgttcaataaggaatggaatgtgatttggatcaacactagttttctgtcatatccattccacggtttggagataaaattggttggcaacccaacctgtgcagacgtgcaccagttccatattccccttcagatttggattcagagaagcctttcctgacatgagacgtctcattagacacgaactttcttttcccttaaaattcatttcagctggcccgaacttgtgcagtcttctcttctcctacactacaactgaaatgatttgtctctaaacaagtgttatgctataacatacaataaactgtatattattaactacgtttttgagaaacatagctcccaaacaggcccgaacttgtttgtcttgacttttctatctttttttagagatatttttagatatggattcagtgatcagtttgcctctcagccattgtaaaattagatgttccgagctcaaacattttggtttgccttattttgtatcagcataacgacatttgtgttcccctaccgtgcacatcaaagaaacagcatgaaagcttttgtatgtgattttgtactagtaggaaatagtatgcagttattcaaaaccaagcatggtgttgaagtgcggattttgatttgcg

SEQ ID NO: 35104 - DNA, 2537 bp, Zea Mays
cccagttccacacttccacccacctccagagccaaaagagccggcggtggccggcagccaaaacccacgtcggatttcgccgccgccgccaggagctaggggacaaggcaacgccggcaggtgcaacatttatgcgtgtaccgcccggcagccacgcgtacacttctgccgcagagctaaacgcgccactccgcggcaagctgatctgctgctcccaagtcccaccagccaccgcaccgagtgccaatggcgactgcagcgacttctacgccggcggcgtggcagtctactctggtctactctggtctacgccatgcagggacctgcccgtgcttctcgcccagccccgctcgctccccgtcatcgtcacctacaggccgaattgggagggaggccagtacgcaggcgaagatgagccacggtttgaggcgcttctactggcaatggagctgggagctgaatatgtcgatgtcgagttcaaggtcgccgacaaatttatgaagtatttgtctgggaagaaacctcaaaactgtaagctcatcatttcagcatacgactacaagaccactccatcggtacatgaacttctgaatttagtagctcagatacgagcaacgggggctgacattgtgaaaattgaaaccactgctgctgacattgtagacacatcaagaatgtttcaagtacttgcacattgccatgaaaagcaggtgcctatcattgggctggtgaggaaagaacatggttttatttctcgtattatttgcgcaaaatatggcggataccttacttttgcatctcttgaaaatggaaaagaatctaccactgagcagccgacagtagcagacttgataaataagtacaaaatacggcagataggcccagatactaaggtctttggtattattggaaatccagttagccacagtaaaagcccaattgtgcaaaatcaagctttcagatcagtgggtttcgatgctgtgtttttgccatttttgtcagatgacttggttcagtttctttataccttctcagcaccagattatgccggcttcagttgcacaatgccccataaagaaactgcacttaggtgctgtgacgatgtcgaccctatcgccagggacatcggagctattaatacaatcattagaagacctgatggaaaacttgtaggctacaatacagattattctggtgctatttctgctattgaggatggaataagagccccatgtgcagcatcacaaccaacagattcgatcacttcaccactggctggaagactttttgttgttattggggctggtggtgcaggaaaagcactagcatatggtgcaaaagagaagggagcaagagttgtgattgcaaaccgtacatttgcacgagctcaagaactcgcccacatcattggcgggactgctttgaccctgtcagagttggaaagctaccatccggagaaagggatgattcttgcaaacgcgacatctgtggggatgcatccaaacgtcgatgaaacccctttatctaagcacgcgctaaaatcctatgccgttgtcttcgacgcggtcttcgtgccgagagagaccagacttctccgagaagctgcagtgtgtggagccacagtcatcgacggtttggagatgctaatcaggctagtgatggttcagtttaagcttttcacggggggcatgacagaaaggttgatgcgtgaggctatcctgacgaagacacattgagggtttgttcaaataacaagatctctacactacagatgtccctgcaaaaaaaaaggtcccagttgtacatgtcctccttcttgcttcttcctcggcgtctgggaagcaccgtatctcattttcaacccaagcaaggagaggaggtgcaggttgcaaaacaacgaatggtcatgttcaataaggaatggaatgtgatttggatcaacactagttttctgtcatatccattccacggtttggagataaaattggttggcaacccaacctgtgcagacgtgcaccagttccatattccccttcagatttggattcagagaagcctttcctgacatgagacgtctcattagacacgaactttcttttcccttaaaattcatttcagctggcccgaacttgtgcagtcttctcttctcctacactacaactgaaatgatttgtctctaaacaagtgttatgctataacatacaataaactgtatattattaactacgtttttgagaaacatagctcccaaacaggcccgaacttgtttgtcttgacttttctatctttttttagagatatttttagatatggattcagtgatcagtttgcctctcagccattgtaaaattagatgttccgagctcaaacattttggtttgccttattttgtatcagcataacgacatttgtgttcccctaccgtgcacatcaaagaaacagcatgaaagcttttgtatgtgattttgtactagtaggaaatagtatgcagttattcaaaaccaagcatggtgttgaagtgcggattttgatttgcg

SEQ ID NO: 35105 - DNA, 2457 bp, Zea Mays
gtcccagttccacacttccacccacctccagagccaaaagagccggcggtggccggcagccaaaacccacgtcggatttcgccgccgccgccaggagctaggggacaaggcaacgccggcaggtgcaacatttatgcgtgtaccgcccggcagccacgcgtacacttctgccgcagagctaaacgcgccactccgcggcaagctgatctgctgctcccaagtcccaccagccaccgcaccgagtgccaatggcgactgcagcgacttctacgccggcggcgtggcagtctactctggtctactctggtctacgccatgcagggacctgcccgtgcttctcgcccagccccgctcgctccccgtcatcgtcacctacaggccgaattgggagggaggccagtacgcaggcgaagatgagccacggtttgaggcgcttctactggcaatggagctgggagctgaatatgtcgatgtcgagttcaaggtcgccgacaaatttatgaagtatttgtctgggaagaaacctcaaaactgtaagctcatcatttcagcatacgactacaagaccactccatcgacacatcaagaatgtttcaagtacttgcacattgccatgaaaagcaggtgcctatcattgggctggtgaggaaagaacatggttttatttctcgtattatttgcgcaaaatatggcggataccttacttttgcatctcttgaaaatggaaaagaatctaccactgagcagccgacagtagcagacttgataaataagtacaaaatacggcagataggcccagatactaaggtctttggtattattggaaatccagttagccacagtaaaagcccaattgtgcaaaatcaagctttcagatcagtgggtttcgatgctgtgtttttgccatttttgtcagatgacttggttcagtttctttataccttctcagcaccagattatgccggcttcagttgcacaatgccccataaagaaactgcacttaggtgctgtgacgatgtcgaccctatcgccagggacatcggagctattaatacaatcattagaagacctgatggaaaacttgtaggctacaatacagattattctggtgctatttctgctattgaggatggaataagagccccatgtgcagcatcacaaccaacagattcgatcacttcaccactggctggaagactttttgttgttattggggctggtggtgcaggaaaagcactagcatatggtgcaaaagagaagggagcaagagttgtgattgcaaaccgtacatttgcacgagctcaagaactcgcccacatcattggcgggactgctttgaccctgtcagagttggaaagctaccatccggagaaagggatgattcttgcaaacgcgacatctgtggggatgcatccaaacgtcgatgaaacccctttatctaagcacgcgctaaaatcctatgccgttgtcttcgacgcggtcttcgtgccgagagagaccagacttctccgagaagctgcagtgtgtggagccacagtcatcgacggtttggagatgctaatcaggctagtgatggttcagtttaagcttttcacggggggcatgacagctccagaaaggttgatgcgtgaggctatcctgacgaagacacattgagggtttgttcaaataacaagatctctacactacagatgtccctgcaaaaaaaaaggtcccagttgtacatgtcctccttcttgcttcttcctcggcgtctgggaagcaccgtatctcattttcaacccaagcaaggagaggaggtgcaggttgcaaaacaacgaatggtcatgttcaataaggaatggaatgtgatttggatcaacactagttttctgtcatatccattccacggtttggagataaaattggttggcaacccaacctgtgcagacgtgcaccagttccatattccccttcagatttggattcagagaagcctttcctgacatgagacgtctcattagacacgaactttcttttcccttaaaattcatttcagctggcccgaacttgtgcagtcttctcttctcctacactacaactgaaatgatttgtctctaaacaagtgttatgctataacatacaataaactgtatattattaactacgtttttgagaaacatagctcccaaacaggcccgaacttgtttgtcttgacttttctatctttttttagagatatttttagatatggattcagtgatcagtttgcctctcagccattgtaaaattagatgttccgagctcaaacattttggtttgccttattttgtatcagcataacgacatttgtgttcccctaccgtgcacatcaaagaaacagcatgaaagcttttgtatgtgattttgtactagtaggaaatagtatgcagttattcaaaaccaagcatggtgttgaagtgcggattttgatttgcg

SEQ ID NO: 35106 - DNA, 2435 bp, Zea Mays
taaaaaatgaggtcccagttccacacttccacccacctccagagccaaaagagccggcggtggccggcagccaaaacccacgtcggatttcgccgccgccgccaggagctaggggacaaggcaacgccggcaggtgcaacatttatgcgtgtaccgcccggcagccacgcgtacacttctgccgcagagctaaacgcgccactccgcggcaagctgatctgctgctcccaagtcccaccagccaccgcaccgagtgccaatggcgactgcagcgacttctacgccggcggcgtggcagtctactctggtctactctggtctacgccatgcagggacctgcccgtgcttctcgcccagccccgctcgctccccgtcatcgtcacctacaggccgaattgggagggaggccagtacgcaggcgaagatgagccacggtttgaggcgcttctactggcaatggagctgggagctgaatatgtcgatgtcgagttcaaggtcgccgacaaatttatgaagtatttgtctgggaagaaacctcaaaactgtaagctcatcatttcagcatacgactacaagaccactccatcggtacatgaacttctgaatttagtagctcagatacgagcaacgggggctgacattgtgaaaattgaaaccactgctgctgacattgtagacacatcaagaatgtttcaagtacttgcacattgccatgaaaagcaggtgcctatcattgggctggtgaggaaagaacatggttttatttctcgtattatttgcgcaaaatatggcggataccttacttttgcatctcttgaaaatggaaaagaatctaccactgagcagccgacagtagcagacttgataaataagtacaaaatacggcagataggcccagatactaaggtctttggtattattggaaatccagttagccacagtaaaagcccaattgtgcaaaatcaagctttcagatcagtgggtttcgatgctgtgtttttgccatttttgtcagatgacttggttcagtttctttataccttctcagcaccagattatgccggcttcagtattttcttcgatccaattaattgggctgtagttgcacaatgccccataaagaaactgcacttaggtgctgtgacgatgtcgaccctatcgccagggacatcggagctattaatacaatcattagaagacctgatggaaaacttgtaggctacaatacagattattctggtgctatttctgctattgaggatggaataagagcacgagctcaagaactcgcccacatcattggcgggactgctttgaccctgtcagagttggaaagctaccatccggagaaagggatgattcttgcaaacgcgacatctgtggggatgcatccaaacgtcgatgaaacccctttatctaagcacgcgctaaaatcctatgccgttgtcttcgacgcggtcttcgtgccgagagagaccagacttctccgagaagctgcagtgtgtggagccacagtcatcgacggtttggagatgctaatcaggctagtgatggttcagtttaagcttttcacggggggcatgacagctccagaaaggttgatgcgtgaggctatcctgacgaagacacattgagggtttgttcaaataacaagatctctacactacagatgtccctgcaaaaaaaaaggtcccagttgtacatgtcctccttcttgcttcttcctcggcgtctgggaagcaccgtatctcattttcaacccaagcaaggagaggaggtgcaggttgcaaaacaacgaatggtcatgttcaataaggaatggaatgtgatttggatcaacactagttttctgtcatatccattccacggtttggagataaaattggttggcaacccaacctgtgcagacgtgcaccagttccatattccccttcagatttggattcagagaagcctttcctgacatgagacgtctcattagacacgaactttcttttcccttaaaattcatttcagctggcccgaacttgtgcagtcttctcttctcctacactacaactgaaatgatttgtctctaaacaagtgttatgctataacatacaataaactgtatattattaactacgtttttgagaaacatagctcccaaacaggcccgaacttgtttgtcttgacttttctatctttttttagagatatttttagatatggattcagtgatcagtttgcctctcagccattgtaaaattagatgttccgagctcaaacattttggtttgccttattttgtatcagcataacgacatttgtgttcccctaccgtgcacatcaaagaaacagcatgaaagcttttgtatgtgattttgtactagtaggaaatagtatgcagttattcaaaaccaagcatggtgttgaagtgcggattttgatttgcg

SEQ ID NO: 35107 - DNA, 3240 bp, Zea Mays
taaaaaatgaggtcccagttccacacttccacccacctccagagccaaaagagccggcggtggccggcagccaaaacccacgtcggatttcgccgccgccgccaggagctaggggacaaggcaacgccggcaggtgcaacatttatgcgtgtaccgcccggcagccacgcgtacacttctgccgcagagctaaacgcgccactccgcggcaagctgatctgctgctcccaagtcccaccagccaccgcaccgagtgccaatggcgactgcagcgacttctacgccggcggcgtggcagtctactctggtctactctggtctacgccatgcagggacctgcccgtgcttctcgcccagccccgctcgctccccgtcatcgtcacctacaggccgaattgggagggaggccagtacgcaggcgaagatgagccacggtttgaggcgcttctactggcaatggagctgggagctgaatatgtcgatgtcgagttcaaggtcgccgacaaatttatgaagtatttgtctgggaagaaacctcaaaactgtaagctcatcatttcagcatacgactacaagaccactccatcggtacatgaacttctgaatttagtagctcagatacgagcaacgggggctgacattgtgaaaattgaaaccactgctgctgacattgtagacacatcaagaatgtttcaagtacttgcacattgccatgaaaagcaggtgcctatcattgggctggtgaggaaagaacatggttttatttctcgtattatttgcgcaaaatatggcggataccttacttttgcatctcttgaaaatggaaaagaatctaccactgagcagccgacagtagcagacttgataaataagtacaaaatacggcagataggcccagatactaaggtctttggtattattggaaatccagttagccacagtaaaagcccaattgtgcaaaatcaagctttcagatcagtgggtttcgatgctgtgtttttgccatttttgtcagatgacttggttcagtttctttataccttctcagcaccagattatgccggcttcagtattttcttcgatccaattaattgggctgtagttgcacaatgccccataaagaaactgcacttaggtgctgtgacgatgtcgaccctatcgccagggacatcggagctattaatacaatcattagaagacctgatggaaaacttgtaggctacaatacagattattctggtgctatttctgctattgaggatggaataagaggttgtcacgtgccaccctttgcaatattgtgttttgctgatctatatatggttcatataactgccttttagccccatgtgcagcatcacaaccaacagattcgatcacttcaccactggctggaagactttttgttgttattggggctggtggtgcaggaaaagcactagcatatggtgcaaaagagaagggagcaagagttgtgattgcaaaccgtacatttggtattttcttgatcaggatgcttctactcaagaaatttgaccatatatctgcttagcttacatgataggcatccacatttacagtgtctaggacgcaatcttataagcaatttattgcactgaatactgatatgttgtgatgttttaaccaaattttagtattttacaatgcccggtctttgggcattgtcatctatctcaaagctaagcattcaaattatatgaactcctcgatgacaacttttctactacctccgttcccgaatatttgtcgtctactagtttatttttgaacttaaacgcgggaaataaaaagaaacggagggagtatttgatttctaaaatgaggccacgatctatgagttaggcccgcagactttaacctatttttggtccaaacttcaaagttagcgactattcccagtttgcaggctagatgcttattggcctttggaatttcgattacgttctagtcatgttttctagcatttattttgctgtgatacttttcttggtctcctaatatcctttagtaaagacaaaaaatgtgattgataacattaagaggccaaactttccagcacgagctcaagaactcgcccacatcattggcgggactgctttgaccctgtcagagttggaaagctaccatccggagaaagggatgattcttgcaaacgcgacatctgtggggatgcatccaaacgtcgatgaaacccctttatctaagcacgcgctaaaatcctatgccgttgtcttcgacgcggtcttcgtgccgagagagaccagacttctccgagaagctgcagtgtgtggagccacagtcatcgacggtttggagatgctaatcaggctagtgatggttcagtttaagcttttcacggggggcatgacagctccagaaaggttgatgcgtgaggctatcctgacgaagacacattgagggtttgttcaaataacaagatctctacactacagatgtccctgcaaaaaaaaaggtcccagttgtacatgtcctccttcttgcttcttcctcggcgtctgggaagcaccgtatctcattttcaacccaagcaaggagaggaggtgcaggttgcaaaacaacgaatggtcatgttcaataaggaatggaatgtgatttggatcaacactagttttctgtcatatccattccacggtttggagataaaattggttggcaacccaacctgtgcagacgtgcaccagttccatattccccttcagatttggattcagagaagcctttcctgacatgagacgtctcattagacacgaactttcttttcccttaaaattcatttcagctggcccgaacttgtgcagtcttctcttctcctacactacaactgaaatgatttgtctctaaacaagtgttatgctataacatacaataaactgtatattattaactacgtttttgagaaacatagctcccaaacaggcccgaacttgtttgtcttgacttttctatctttttttagagatatttttagatatggattcagtgatcagtttgcctctcagccattgtaaaattagatgttccgagctcaaacattttggtttgccttattttgtatcagcataacgacatttgtgttcccctaccgtgcacatcaaagaaacagcatgaaagcttttgtatgtgattttgtactagtaggaaatagtatgcagttattcaaaaccaagcatggtgttgaagtgcggattttgatttgcg

SEQ ID NO: 35108 - DNA, 2588 bp, Zea Mays
taaaaaatgaggtcccagttccacacttccacccacctccagagccaaaagagccggcggtggccggcagccaaaacccacgtcggatttcgccgccgccgccaggagctaggggacaaggcaacgccggcaggtgcaacatttatgcgtgtaccgcccggcagccacgcgtacacttctgccgcagagctaaacgcgccactccgcggcaagctgatctgctgctcccaagtcccaccagccaccgcaccgagtgccaatggcgactgcagcgacttctacgccggcggcgtggcagtctactctggtctactctggtctacgccatgcagggacctgcccgtgcttctcgcccagccccgctcgctccccgtcatcgtcacctacaggccgaattgggagggaggccagtacgcaggcgaagatgagccacggtttgaggcgcttctactggcaatggagctgggagctgaatatgtcgatgtcgagttcaaggtcgccgacaaatttatgaagtatttgtctgggaagaaacctcaaaactgtaagctcatcatttcagcatacgactacaagaccactccatcggtacatgaacttctgaatttagtagctcagatacgagcaacgggggctgacattgtgaaaattgaaaccactgctgctgacattgtagacacatcaagaatgtttcaagtacttgcacattgccatgaaaagcaggtgcctatcattgggctggtgaggaaagaacatggttttatttctcgtattatttgcgcaaaatatggcggataccttacttttgcatctcttgaaaatggaaaagaatctaccactgagcagccgacagtagcagacttgataaataagtacaaaatacggcagataggcccagatactaaggtctttggtattattggaaatccagttagccacagtaaaagcccaattgtgcaaaatcaagctttcagatcagtgggtttcgatgctgtgtttttgccatttttgtcagatgacttggttcagtttctttataccttctcagcaccagattatgccggcttcagtattttcttcgatccaattaattgggctgtagttgcacaatgccccataaagaaactgcacttaggtgctgtgacgatgtcgaccctatcgccagggacatcggagctattaatacaatcattagaagacctgatggaaaacttgtaggctacaatacagattattctggtgctatttctgctattgaggatggaataagagccccatgtgcagcatcacaaccaacagattcgatcacttcaccactggctggaagactttttgttgttattggggctggtggtgcaggaaaagcactagcatatggtgcaaaagagaagggagcaagagttgtgattgcaaaccgtacatttgcacgagctcaagaactcgcccacatcattggcgggactgctttgaccctgtcagagttggaaagctaccatccggagaaagggatgattcttgcaaacgcgacatctgtggggatgcatccaaacgtcgatgaaacccctttatctaagcacgcgctaaaatcctatgccgttgtcttcgacgcggtcttcgtgccgagagagaccagacttctccgagaagctgcagtgtgtggagccacagtcatcgacggtttggagatgctaatcaggctagtgatggttcagtttaagcttttcacggggggcatgacagctccagaaaggttgatgcgtgaggctatcctgacgaagacacattgagggtttgttcaaataacaagatctctacactacagatgtccctgcaaaaaaaaaggtcccagttgtacatgtcctccttcttgcttcttcctcggcgtctgggaagcaccgtatctcattttcaacccaagcaaggagaggaggtgcaggttgcaaaacaacgaatggtcatgttcaataaggaatggaatgtgatttggatcaacactagttttctgtcatatccattccacggtttggagataaaattggttggcaacccaacctgtgcagacgtgcaccagttccatattccccttcagatttggattcagagaagcctttcctgacatgagacgtctcattagacacgaactttcttttcccttaaaattcatttcagctggcccgaacttgtgcagtcttctcttctcctacactacaactgaaatgatttgtctctaaacaagtgttatgctataacatacaataaactgtatattattaactacgtttttgagaaacatagctcccaaacaggcccgaacttgtttgtcttgacttttctatctttttttagagatatttttagatatggattcagtgatcagtttgcctctcagccattgtaaaattagatgttccgagctcaaacattttggtttgccttattttgtatcagcataacgacatttgtgttcccctaccgtgcacatcaaagaaacagcatgaaagcttttgtatgtgattttgtactagtaggaaatagtatgcagttattcaaaaccaagcatggtgttgaagtgcggattttgatttgcg

SEQ ID NO: 35109 - DNA, 3371 bp, Zea Mays
ccacaagccccgtactattagaaaaaactataaaattcatgtaaaaataagttattgagtccatctaggcttctggccgtgacacgcccgacgtcaggtcgatttttagttagttttgaaaagttacgcatcttatttcactgccagccctctgaaaaaaaattaaaaaatgaggtcccagttccacacttccacccacctccagagccaaaagagccggcggtggccggcagccaaaacccacgtcggatttcgccgccgccgccaggagctaggggacaaggcaacgccggcaggtgcaacatttatgcgtgtaccgcccggcagccacgcgtacacttctgccgcagagctaaacgcgccactccgcggcaagctgatctgctgctcccaagtcccaccagccaccgcaccgagtgccaatggcgactgcagcgacttctacgccggcggcgtggcagtctactctggtctactctggtctacgccatgcagggacctgcccgtgcttctcgcccagccccgctcgctccccgtcatcgtcacctacaggccgaattgggagggaggccagtacgcaggcgaagatgagccacggtttgaggcgcttctactggcaatggagctgggagctgaatatgtcgatgtcgagttcaaggtcgccgacaaatttatgaagtatttgtctgggaagaaacctcaaaactgtaagctcatcatttcagcatacgactacaagaccactccatcggtacatgaacttctgaatttagtagctcagatacgagcaacgggggctgacattgtgaaaattgaaaccactgctgctgacattgtagacacatcaagaatgtttcaagtacttgcacattgccatgaaaagcaggtgcctatcattgggctggtgaggaaagaacatggttttatttctcgtattatttgcgcaaaatatggcggataccttacttttgcatctcttgaaaatggaaaagaatctaccactgagcagccgacagtagcagacttgataaataagtacaaaatacggcagataggcccagatactaaggtctttggtattattggaaatccagttagccacagtaaaagcccaattgtgcaaaatcaagctttcagatcagtgggtttcgatgctgtgtttttgccatttttgtcagatgacttggttcagtttctttataccttctcagcaccagattatgccggcttcagttgcacaatgccccataaagaaactgcacttaggtgctgtgacgatgtcgaccctatcgccagggacatcggagctattaatacaatcattagaagacctgatggaaaacttgtaggctacaatacagattattctggtgctatttctgctattgaggatggaataagaggttgtcacgtgccaccctttgcaatattgtgttttgctgatctatatatggttcatataactgccttttagccccatgtgcagcatcacaaccaacagattcgatcacttcaccactggctggaagactttttgttgttattggggctggtggtgcaggaaaagcactagcatatggtgcaaaagagaagggagcaagagttgtgattgcaaaccgtacatttggtattttcttgatcaggatgcttctactcaagaaatttgaccatatatctgcttagcttacatgataggcatccacatttacagtgtctaggacgcaatcttataagcaatttattgcactgaatactgatatgttgtgatgttttaaccaaattttagtattttacaatgcccggtctttgggcattgtcatctatctcaaagctaagcattcaaattatatgaactcctcgatgacaacttttctactacctccgttcccgaatatttgtcgtctactagtttatttttgaacttaaacgcgggaaataaaaagaaacggagggagtatttgatttctaaaatgaggccacgatctatgagttaggcccgcagactttaacctatttttggtccaaacttcaaagttagcgactattcccagtttgcaggctagatgcttattggcctttggaatttcgattacgttctagtcatgttttctagcatttattttgctgtgatacttttcttggtctcctaatatcctttagtaaagacaaaaaatgtgattgataacattaagaggccaaactttccagcacgagctcaagaactcgcccacatcattggcgggactgctttgaccctgtcagagttggaaagctaccatccggagaaagggatgattcttgcaaacgcgacatctgtggggatgcatccaaacgtcgatgaaacccctttatctaagcacgcgctaaaatcctatgccgttgtcttcgacgcggtcttcgtgccgagagagaccagacttctccgagaagctgcagtgtgtggagccacagtcatcgacggtttggagatgctaatcaggctagtgatggttcagtttaagcttttcacggggggcatgacagctccagaaaggttgatgcgtgaggctatcctgacgaagacacattgagggtttgttcaaataacaagatctctacactacagatgtccctgcaaaaaaaaaggtcccagttgtacatgtcctccttcttgcttcttcctcggcgtctgggaagcaccgtatctcattttcaacccaagcaaggagaggaggtgcaggttgcaaaacaacgaatggtcatgttcaataaggaatggaatgtgatttggatcaacactagttttctgtcatatccattccacggtttggagataaaattggttggcaacccaacctgtgcagacgtgcaccagttccatattccccttcagatttggattcagagaagcctttcctgacatgagacgtctcattagacacgaactttcttttcccttaaaattcatttcagctggcccgaacttgtgcagtcttctcttctcctacactacaactgaaatgatttgtctctaaacaagtgttatgctataacatacaataaactgtatattattaactacgtttttgagaaacatagctcccaaacaggcccgaacttgtttgtcttgacttttctatctttttttagagatatttttagatatggattcagtgatcagtttgcctctcagccattgtaaaattagatgttccgagctcaaacattttggtttgccttattttgtatcagcataacgacatttgtgttcccctaccgtgcacatcaaagaaacagcatgaaagcttttgtatgtgattttgtactagtaggaaatagtatgcagttattcaaaaccaagcatggtgttgaagtgcggattttgatttgcg

SEQ ID NO: 35110 - DNA, 876 bp, Zea Mays
gcgctacatggactatggaaatcttgtttcagtgtgacaaatgtgatttcaagccggagctcggtttccttccagagccacaggatgacttctgtatccatccgttcaagaccaagttctcttcgtttcaagatttgctgttcggctaagaaggagacagtcgacaaggtctgtagtatagtgaaggagcagctggctcttcccgatgggactgctatcactggcgaatcaaaattcgccgaacttggtgctgattcactggatacggttgaaattgtgatgggcctcgaggaggcgttcaacataaccgtcgacgaaacaagcgcacaggacatcgcgacggtgcaggacgctgcagacctcatcgagaaactcatgctggaagcgcctccaaaggttgtctagatcgatccatcagtcttgcgattggcgacttggcgttttatgttaaattgttcatgttacccaatttgttctttattgatggttcaagataagatttttgtatggatgttgctgaggtataaattagatgctccaaaggctgcatggagcagatgaagacgatgtattccacttcccatttgcatgttgtacttccatagagagatcaatgaactgttatgaagagtcactgcaactgtggcttttgatctttgtgaagtcacatacagtaattgttgttagatttgcaaatacaaggctgtctgtcaggtgctaacgcattgtggtgtttcaccacaagcgttgatgaattcccttcgttgtgattgattggctgattgctcgataacaacttgacttttggtaaatcagatcggataggatcacgttggatttatgggattcaattaaattatagaaaaatcacaaaaa

SEQ ID NO: 35111 - DNA, 912 bp, Zea Mays
cccaaaactgccgtttcaacgagatacgactctattctccagtcatccgtcaggtcagctgagacgcaggtgacaaatgtgatttcaagccggagctcggtttccttccagagccacaggatgacttctgtatccatccgttcaagaccaagttctcttcgtttcaagatttgctgttcggctaagaaggagacagtcgacaaggtctgtagtatagtgaaggagcagctggctcttcccgatgggactgctatcactggcgaatcaaaattcgccgaacttggtgctgattcactggatacggttgaaattgtgatgggcctcgaggaggcgttcaacataaccgtcgacgaaacaagcgcacaggacatcgcgacggtgcaggacgctgcagacctcatcgagaaactcatgctggaagcgcctccaaaggttgtctagatcgatccatcagtcttgcgattggcgacttggcgttttatgttaaattgttcatgttacccaatttgttctttattgatggttcaagataagatttttgtatggatgttgctgaggtataaattagatgctccaaaggctgcatggagcagatgaagacgatgtattccacttcccatttgcatgttgtacttccatagagagatcaatgaactgttatgaagagtcactgcaactgtggcttttgatctttgtgaagtcacatacagtaattgttgttagatttgcaaatacaaggctgtctgtcaggtgctaacgcattgtggtgtttcaccacaagcgttgatgaattcccttcgttgtgattgattggctgattgctcgataacaacttgacttttggtaaatcagatcggataggatcacgttggatttatgggattcaattaaattatagaaaaatcacaaaaa

SEQ ID NO: 35112 - DNA, 3743 bp, Zea Mays
aaacaatcaaggcctcactttaacacacagcttccatagttcagctccagccacacatctcaccgcctctccacagtcgccaccgcctcaataatacttcttcctcaagaaaacaatcccgtaatccacactcatcgctaacgactcacacaaatcgaatctggaaattcttcccccaatccgtcccaaactcgcctcctcacggccgccgccgccgccgccgccgccgctgctcggtaatccctcatcctccccacctgtccgctcgtcagcgtcatgtccggcaccaccccgacccctacacctacaccgacgccgctaccgccgccgccgccgccgccgccagccgctcgccccgcacggtacgacttcctcaactccaagccaccgcccaactacgtcgcggggctcggccgtggcgccaccggcttcaccacccgctcggatatcggaccggcccgcgccgcacccgacctacccgaccgctccgcctccgccgccgccgccggtcccgccgtcggccggggccgcgggaagcctcccggcgaggatgacggcgacgacgacggcggcgacgaggagaagggctacgacgaaaaccagaagttcgacgagttcgagggcaacgacgccggcctcttctccaacgccgactacgacgacgacgaccgcgaggcggatgcggtgtgggagagcatcgaccagaggatggactcgcgccgcaaggaccgccgcgaggcgcgcctcaagcaggagattgagaagtaccgcgcgtcaaaccctaagatcaccgagcagtttgctgatctcaagaggaagctggccgatctgtccgcgcaggaatgggagagcataccggagattggggactactcgctgcgcaacaagaagaagcggtttgagagcttcgtgcccgtgccggacaccctgcttgagaaggcccggcaggagcaggagcatgtcacagcacttgaccctaagagccgtgcggctggtggcacagagacgccatgggcgcagactcctgttaccgatttgacagctgtgggcgagggtcgtggcactgtgctctcgctcaagttagataggctgtcagattcagtttctgggctcactgtagtcgatcccaaggggtatttgacagacctgaaaagtatgaagattactagtgatgctgagatttctgacatcaagaaggcacggctattgctcaagtcggtgacacagacgaaccctaaacatccacctggttggattgccgctgctaggctcgaagagattgctggcaagcttcaggttgctcggcagctcatccagcgtggttgtgaggagtgccccaagaacgaagatgtttggcttgaggcatgccgtttggccagtccagatgaggcaaaggctgtaattgcccgtggcgtgatgtcaattccaaattctgtgaagctatggttgcaggcagcaaaactggagggtagtgatctgaataagagtagggttttgaggaaagggctggagcacattcctgattcagtccggctatggaaggctgtagttgagcttgcaaatgaagaggatgcaaggctgttgcttcacagggctgtggagtgttgcccgttgcatgttgagctttggcttgcccttgcaaggctggagacctatgaccaagcaaggaaagtacttaacaaggcgagggagaagctccccaaggagcctgccatttggattacagctgcgaagctagaggaggctaatgggaacacacaatctgttaacaaggtgattgagagaggtattaggtctcttcagagagaaggaatggatattgatagggaagcatggttaaaggaagcagaagccgcagaacgtgctgggtctgttttaacttgccaggctattgtgaagaacactgtaggcattggtgttgatgatgaggatcggaagcgtacatgggttgctgatgctgaggaatgcaagaagcgcggttcaattgagacagcgcgtgctatctatgcacatgcgcttactgtgttccttactaagaagagtatttggctgaaagcagctcagcttgagaagagccacgggactagggagtcacttgatgctctcctcaagaaggctgtgaattacaatccacgagctgaggtattgtggcttatggctgccaaggagaaatggttggctggggatgtgcctgcagctcgtgccattcttcaggaagcttatgctgctatccccaattcagaagagatctggctggccgcattcaagctcgagtttgagaacaatgagccagagagagcaagaatgctcttggccaaggccagggaaagaggagggacagagagggtctggatgaaatctgccattgttgagagggaattggggaatgttggtgaggaaaggagattgttggaggaaggtttgaagctattcccttcattcttcaaattgtggttaatgcttggacagatggaggaccggcttgataacggagcgaaggccaaggaggtttttgagaatggcctcaagcactgccccagttgcatccctctttggctctctctagctaacctagaggagaagattagtggattgagtaaatcacgtgctgtcctcacaatggctagaaagaagaaccctgctacacctgaactctggctagcggcaattcgagctgagttgaggaatgggaacaaaaaggaagctgatgctctactggccaaggcattacaagagtgtcccacaagtggtattttgtgggctgccgctattgagatggcgccacgcccacagcgcaaaggaaagagtacagatgctattaagcgaagtgatcatgatccacatgtcattgcaactgtggccaaacttttctggcttgacaggaaggtcgataaagctaggagttggttgaacagagctgttactcttgctcctgatgttggtgatttttgggcattgtactacaaatttgaacttcagcatggaaatgtggacacacagaaggatgttctgaaaagatgtgttgcagcagaaccaaagcatggtgaaaaatggcaagcaatatccaagtctgttgaaaactcacacctgcctgttgaggctcttctaaagaaagctgttgtggtgcttgatgtagaagaaaatgccaatccggcaggagcctagactcactctttttacaagatgtttggtgaatgtgttttgtactaccatccttaatttatgttcacttcaatatgaggactgagacaacaatacccctagacaagcatggagaggggtgaagatcctgacgtccatggctcgtcctcatctatgccgaatccaacgcaaaagccccggggcaaacgacaaacggaatcagcagaagaacattggattgggcacacggcgtcggcaacaacagacacaactttctaaaatcaacatgttgatgcaagagagaatccatggatgaaatgaactggcacatgtacagagcagtaattatattgttcaggaccttcatccccaagtgaccctggctatgtcatagaaaccatcgctagctcacatatggtttccatgtaacaaacacgtaaaaaagtgaagcgtcctcaatcctctgggaatcaaatgtgatacaattactagtcccaggaggctagtaaacacatttatatattagatgattccagatatgtttaaacgagacaaacctataaaggtggcgatcaactttaagagttggtccacaactcggg

SEQ ID NO: 35113 - DNA, 3733 bp, Zea Mays
gaaaactatagctcaaacaatcaaggcctcactttaacacacagcttccatagttcagctccagccacacatctcaccgcctctccacagtcgccaccgcctcaataatacttcttcctcaagaaaacaatcccgtaatccacactcatcgctaacgactcacacaaatcgaatctggaaattcttcccccaatccgtcccaaactcgcctcctcacggccgccgccgccgccgccgccgccgctgctcggtaatccctcatcctccccacctgtccgctcgtcagcgtcatgtccggcaccaccccgacccctacacctacaccgacgccgctaccgccgccgccgccgccgccgccagccgctcgccccgcacggtacgacttcctcaactccaagccaccgcccaactacgtcgcggggctcggccgtggcgccaccggcttcaccacccgctcggatatcggaccggcccgcgccgcacccgacctacccgaccgctccgcctccgccgccgccgccggtcccgccgtcggccggggccgcgggaagcctcccggcgaggatgacggcgacgacgacggcggcgacgaggagaagggctacgacgaaaaccagaagttcgacgagttcgagggcaacgacgccggcctcttctccaacgccgactacgacgacgacgaccgcgaggcggatgcggtgtgggagagcatcgaccagaggatggactcgcgccgcaaggaccgccgcgaggcgcgcctcaagcaggagattgagaagtaccgcgcgtcaaaccctaagatcaccgagcagtttgctgatctcaagaggaagctggccgatctgtccgcgcaggaatgggagagcataccggagattggggactactcgctgcgcaacaagaagaagcggtttgagagcttcgtgcccgtgccggacaccctgcttgagaaggcccggcaggagcaggagcatgtcacagcacttgaccctaagagccgtgcggctggtggcacagagacgccatgggcgcagactcctgttaccgatttgacagctgtgggcgagggtcgtggcactgtgctctcgctcaagttagataggctgtcagattcagtttctgggctcactgtagtcgatcccaaggggtatttgacagacctgaaaagtatgaagattactagtgatgctgagatttctgacatcaagaaggcacggctattgctcaagtcggtgacacagacgaaccctaaacatccacctggttggattgccgctgctaggctcgaagagattgctggcaagcttcaggttgctcggcagctcatccagcgtggttgtgaggagtgccccaagaacgaagatgtttggcttgaggcatgccgtttggccagtccagatgaggcaaaggctgtaattgcccgtggcgtgatgtcaattccaaattctgtgaagctatggttgcaggcagcaaaactggagggtagtgatctgaataagagtagggttttgaggaaagggctggagcacattcctgattcagtccggctatggaaggctgtagttgagcttgcaaatgaagaggatgcaaggctgttgcttcacagggctgtggagtgttgcccgttgcatgttgagctttggcttgcccttgcaaggctggagacctatgaccaagcaaggaaagtacttaacaaggcgagggagaagctccccaaggagcctgccatttggattacagctgcgaagctagaggaggctaatgggaacacacaatctgttaacaaggtgattgagagaggtattaggtctcttcagagagaaggaatggatattgatagggaagcatggttaaaggaagcagaagccgcagaacgtgctgggtctgttttaacttgccaggctattgtgaagaacactgtaggcattggtgttgatgatgaggatcggaagcgtacatgggttgctgatgctgaggaatgcaagaagcgcggttcaattgagacagcgcgtgctatctatgcacatgcgcttactgtgttccttactaagaagagtatttggctgaaagcagctcagcttgagaagagccacgggactagggagtcacttgatgctctcctcaagaaggctgtgaattacaatccacgagctgaggtattgtggcttatggctgccaaggagaaatggttggctggggatgtgcctgcagctcgtgccattcttcaggaagcttatgctgctatccccaattcagaagagatctggctggccgcattcaagctcgagtttgagaacaatgagccagagagagcaagaatgctcttggccaaggccagggaaagaggagggacagagagggtctggatgaaatctgccattgttgagagggaattggggaatgttggtgaggaaaggagattgttggaggaaggtttgaagctattcccttcattcttcaaattgtggttaatgcttggacagatggaggaccggcttgataacggagcgaaggccaaggaggtttttgagaatggcctcaagcactgccccagttgcatccctctttggctctctctagctaacctagaggagaagattagtggattgagtaaatcacgtgctgtcctcacaatggctagaaagaagaaccctgctacacctgaactctggctagcggcaattcgagctgagttgaggaatgggaacaaaaaggaagctgatgctctactggccaaggcattacaagagtgtcccacaagtggtattttgtgggctgccgctattgagatggcgccacgcccacagcgcaaaggaaagagtacagatgctattaagcgaagtgatcatgatccacatgtcattgcaactgtggccaaacttttctggcttgacaggaaggtcgataaagctaggagttggttgaacagagctgttactcttgctcctgatgttggtgatttttgggcattgtactacaaatttgaacttcagcatggaaatgtggacacacagaaggatgttctgaaaagatgtgttgcagcagaaccaaagcatggtgaaaaatggcaagcaatatccaagtctgttgaaaactcacacctgcctgttgaggctcttctaaagaaagctgttgtggtgcttgatgtagaagaaaatgccaatccggcaggagcctagactcactctttttacaagatgtttggtgaatgtgttttgtactaccatccttaatttatgttcacttcaatatgagggctgctatttctatccagaactacctggaaagtggaaaaaatctagaaacctagtagtaccccgtttcactttttttggaagtatgtcaatatgccatctggttcatgttcacctgaaaatctgaagtttaggagtgaaccaaaatgaattaaggcagggaggctgtaaaatattgttttgcactggagtggagagtttgaaatagtgtgggataagaggtaagataggaaggctggaggcagcctgttatttgtgtttccctcgttaaaggccactccacttgatgtattttgcaacccttgtctgcgttgatttcatggtttctgtgagaaataatgtgtgtgttcaaaatataacactatggccgtaagaggcttaattgtatctcattttgtattgataaactagtaaaatcagtctcatacatttgtgcagaacatgttctttcttttaatatatatggtggtgattcttac

SEQ ID NO: 35114 - DNA, 3435 bp, Zea Mays
ctcaaacaatcaaggcctcactttaacacacagcttccatagttcagctccagccacacatctcaccgcctctccacagtcgccaccgcctcaataatacttcttcctcaagaaaacaatcccgtaatccacactcatcgctaacgactcacacaaatcgaatctggaaattcttcccccaatccgtcccaaactcgcctcctcacggccgccgccgccgccgccgccgccgctgctcggtaatccctcatcctccccacctgtccgctcgtcagcgtcatgtccggcaccaccccgacccctacacctacaccgacgccgctaccgccgccgccgccgccgccgccagccgctcgccccgcacggtacgacttcctcaactccaagccaccgcccaactacgtcgcggggctcggccgtggcgccaccggcttcaccacccgctcggatatcggaccggcccgcgccgcacccgacctacccgaccgctccgcctccgccgccgccgccggtcccgccgtcggccggggccgcgggaagcctcccggcgaggatgacggcgacgacgacggcggcgacgaggagaagggctacgacgaaaaccagaagttcgacgagttcgagggcaacgacgccggcctcttctccaacgccgactacgacgacgacgaccgcgaggcggatgcggtgtgggagagcatcgaccagaggatggactcgcgccgcaaggaccgccgcgaggcgcgcctcaagcaggagattgagaagtaccgcgcgtcaaaccctaagatcaccgagcagtttgctgatctcaagaggaagctggccgatctgtccgcgcaggaatgggagagcataccggagattggggactactcgctgcgcaacaagaagaagcggtttgagagcttcgtgcccgtgccggacaccctgcttgagaaggcccggcaggagcaggagcatgtcacagcacttgaccctaagagccgtgcggctggtggcacagagacgccatgggcgcagactcctgttaccgatttgacagctgtgggcgagggtcgtggcactgtgctctcgctcaagttagataggctgtcagattcagtttctgggctcactgtagtcgatcccaaggggtatttgacagacctgaaaagtatgaagattactagtgatgctgagatttctgacatcaagaaggcacggctattgctcaagtcggtgacacagacgaaccctaaacatccacctggttggattgccgctgctaggctcgaagagattgctggcaagcttcaggttgctcggcagctcatccagcgtggttgtgaggagtgccccaagaacgaagatgtttggcttgaggcatgccgtttggccagtccagatgaggcaaaggctgtaattgcccgtggcgtgatgtcaattccaaattctgtgaagctatggttgcaggcagcaaaactggagggtagtgatctgaataagagtagggttttgaggaaagggctggagcacattcctgattcagtccggctatggaaggctgtagttgagcttgcaaatgaagaggatgcaaggctgttgcttcacagggctgtggagtgttgcccgttgcatgttgagctttggcttgcccttgcaaggctggagacctatgaccaagcaaggaaagtacttaacaaggcgagggagaagctccccaaggagcctgccatttggattacagctgcgaagctagaggaggctaatgggaacacacaatctgttaacaaggtgattgagagaggtattaggtctcttcagagagaaggaatggatattgatagggaagcatggttaaaggaagcagaagccgcagaacgtgctgggtctgttttaacttgccaggctattgtgaagaacactgtaggcattggtgttgatgatgaggatcggaagcgtacatgggttgctgatgctgaggaatgcaagaagcgcggttcaattgagacagcgcgtgctatctatgcacatgcgcttactgtgttccttactaagaagagtatttggctgaaagcagctcagcttgagaagagccacgggactagggagtcacttgatgctctcctcaagaaggctgtgaattacaatccacgagctgaggtattgtggcttatggctgccaaggagaaatggttggctggggatgtgcctgcagctcgtgccattcttcaggaagcttatgctgctatccccaattcagaagagatctggctggccgcattcaagctcgagtttgagaacaatgagccagagagagcaagaatgctcttggccaaggccagggaaagaggagggacagagagggtctggatgaaatctgccattgttgagagggaattggggaatgttggtgaggaaaggagattgttggaggaaggtttgaagctattcccttcattcttcaaattgtggttaatgcttggacagatggaggaccggcttgataacggagcgaaggccaaggaggtttttgagaatggcctcaagcactgccccagttgcatccctctttggctctctctagctaacctagaggagaagattagtggattgagtaaatcacgtgctgtcctcacaatggctagaaagaagaaccctgctacacctgaactctggctagcggcaattcgagctgagttgaggaatgggaacaaaaaggaagctgatgctctactggccaaggcattacaagagtgtcccacaagtggtattttgtgggctgccgctattgagatggcgccacgcccacagcgcaaaggaaagagtacagatgctattaagcgaagtgatcatgatccacatgtcattgcaactgtggccaaacttttctggcttgacaggaaggtcgataaagctaggagttggttgaacagagctgttactcttgctcctgatgttggtgatttttgggcattgtactacaaatttgaacttcagcatggaaatgtggacacacagaaggatgttctgaaaagatgtgttgcagcagaaccaaagcatggtgaaaaatggcaagcaatatccaagtctgttgaaaactcacacctgcctgttgaggctcttctaaagaaagctgttgtggtgcttgatgtagaagaaaatgccaatccggcaggagcctagactcactctttttacaagatgtttggtgaatgtgttttgtactaccatccttaatttatgttcacttcaatatgagcttctcccactcggcttaggtgcgggagcaaggcgagtgcacttttgtatacattcaataccatctacccttgctacagattgtcactaaacttatgcttaatatagtttactggcaatcctttcttctctgcaaattgttcttctgaatttctaacagtcagtgggagaattgttgaagatatgctaata

SEQ ID NO: 35115 - DNA, 1233 bp, Zea Mays
tatttatcaattcgatgttggatatggactacattttgaaataagttcctgaagcctttgctctatggagggaaaatagatgtcacaagccagctgaaaagttcaagaaacgaggtaaaagagagaagtgtaatgaagttagttagagatactggggtgcaacaaagaaatagccttttgggcgatcttggtacctcaaagaagcatgcaactgggaaaaggagcaatgctctaatttctggaatggaaaatgcaaatgaaactggtactagaaacagatcatttgcacagaaacaatctcattctagtcaggtggagaaccatggaactgctgactctcctgatagcttgaagccatcattgctcaaactcaaatttaagcgtccacattttgagcagctaaacacccaggcctctcaaccagaggagccgacctcctgggtttctcagcaggaggagcagttaaatgttgctaaaggccagagatcaaagaggaagaggccttcgatggagaaggcagatggtttggacggtataactccagccaagaggcatcagcagagcacagatgaagtgatggacgcaaactggattctacgcaagttgggcaaggatgcgatcggaaagaggattgaggtccatctaacttctgatggcaaatggcatcaagggatggtgtctaatgtcatgggtggcacactgtgtattcggttagataatggcaggtctgagaacgtggagctggggaagcaggccatccgcttgattgcttcaagatcgaagggcgggaagcgatgaaaccttttccccataatatgcagcttaggacctgttctcgctcaatacattgcgccatgattatggcaggtagagtcctccccccctgaggtttgacatccgctggagcacagcctctcagcctttgctgactggacgagatactgagcgcaacttccatctgttgcgccatgtttcgctagcctagcgtgtaacagacatcgttttttggtgttggaagccccattggctttcgactagattctgttagggtagggaatgaggttttagatcaccttggatgtaagagaagcaggtagcgccgtgtctggagtgttttgtatgtttagttttccgacgagtttctcgacaatttgttattcacttatatttggttgctggtgttatttgctggccaatcaatgtctttttgtgatagtaataatttgtctacaa

SEQ ID NO: 35116 - DNA, 2606 bp, Zea Mays
cctcgccccccgtcgctcccttccatggcgtttcacgtcgcgtgccccatcacttggaagcaggagaagatgaagacgagtgggatcgagaggatcaaggaaatgctgctgtcaaggttatgtgccgtttatgcttttcaggagaaaatgagggcagcacgaaagctgccaaaatgcttccttgcaaactctgcagcaaacggtatcatagaaactgtttgaaaagctggggggaacatagagaccttttccattggagttcatgggtatgtccttcttgccgcagttgtgaggtatgccgacgtcctggtgaccccaacaagttgatgttctgtaaaaggtgtgatggcgcttatcattgttactgtcagcaaccatcacacaagaatgttactcatggaccatatttatgtccaaaacatacaaggtgccacagctgtggatctggtgtgcctggtagtggacacagcacaaggtggtttttggggtacacatgctgtgatgcgtgtggacgattgtttgtgaaaggaaactactgtccaatctgcttgaaggtttatagagactctgaagtgatacctatggtttgctgcgatgtttgtgaaaagtgggtgcatattgagtgtgatggcatcagtgaggaaaagtaccaacaattccaagctgatcaaaaccttcagtacacatgtgcagcatgccgtggtgaatgctcccagatcagagacactgaggatgcaatccgggagctttggaagaggagggatgttgccgatcatgagcttatggctactttacgggctgctgctgcactgccttctcttgaagatgtctcaccaccttatcaaaactctgatgatgagaaactcggtgcatatgcattgaaaaatgagagtagaaatactctaaagttttcattgaaaagtaacagtagtaaacctccaccagatacacctgagcaagagaagattgtttttaagagctctggatcaaataagaagccttccaaaaagaaaagtggtcaggctaataaaacagttgatggccatgatgaaatatttctggagagaaggcatgctgttaaatcatcaaatagctgtttgggagatcaaactataaatgagaatcatgacaggagcccttttaaaaatgatgataatgtctatgtttcatcttcaactcgaagtttagaaaagaatttgaaatctccatccatgaaagctgtggcaaacaatgctgatatgatacccaaagtcaagattaaaggcagtaaggtttcgagtttgcattacaaagatggtgaagaaaatactcctaagaatgacactggaaaagctaccaagttggttatccatcttggttcacggcataaaactaggagtggctctcctaagtcggaactgtccaattctcaaagagagcaagatttgggttcaatacatggagggaaaatagatgtcacaagccagctgaaaagttcaagaaacgaggtaaaagagagaagtgtaatgaagttagttagagatactggggtgcaacaaagaaatagccttttgggcgatcttggtacctcaaagaagcatgcaactgggaaaaggagcaatgctctaatttctggaatggaaaatgcaaatgaaactggtactagaaacagatcatttgcacagaaacaatctcattctagtcaggtggagaaccatggaactgctgactctcctgatagcttgaagccatcattgctcaaactcaaatttaagcgtccacattttgagcagctaaacacccaggcctctcaaccagaggagccgacctcctgggtttctcagcaggaggagcagttaaatgttgctaaaggccagagatcaaagaggaagaggccttcgatggagaaggcagatggtttggacggtataactccagccaagaggcatcagcagagcacagatgaagtgatggacgcaaactggattctacgcaagttgggcaaggatgcgatcggaaagaggattgaggtccatctaacttctgatggcaaatggcatcaagggatggtgtctaatgtcatgggtggcacactgtgtattcggttagataatggcaggtctgagaacgtggagctggggaagcaggccatccgcttgattgcttcaagatcgaagggcgggaagcgatgaaaccttttccccataatatgcagcttaggacctgttctcgctcaatacattgcgccatgattatggcaggtagagtcctccccccctgaggtttgacatccgctggagcacagcctctcagcctttgctgactggacgagatactgagcgcaacttccatctgttgcgccatgtttcgctagcctagcgtgtaacagacatcgttttttggtgttggaagccccattggctttcgactagattctgttagggtagggaatgaggttttagatcaccttggatgtaagagaagcaggtagcgccgtgtctggagtgttttgtatgtttagttttccgacgagtttctcgacaatttgttattcacttatatttggttgctggtgttatttgctggccaatcaatgtctttttgtgatagtaataatttgtctacaa

SEQ ID NO: 35117 - DNA, 3550 bp, Zea Mays
cttcacctctcccctccccgccgctcgcgcctccgaagtccgaacccaattccaaacgcaaattacaccaaaccatccccgaatcatgtcaaaatttccccaatacgcgtccaaaccccacccgaccaccctcccccaaattcgtttcgaatcagattaccgacgcgaccacccatctgggctctggccgcctcgccccccgtcgctcccttccatggcgtttcacgtcgcgtgccccatcacttgcaggagggtgtgcgactgcgagctagggttcggcgccgcagcggcgaggaagggaggagggggtggtgctgcggcggcggtatgggcgggcacggcggcggtgctcgaggggttcctcgtggatccgtggctgctgcggccggctggggccgtggacgaggatgcggcgacggtgcaggtggaagtgccgcccctggagccggaccctgaggatggggaggacgaggcgcgccgggcggcagcgcagcgcggcgccgccgcggcagaggacctcgccaggcgcttcgagagcggtgcctacggatcgccggaagcaggagaagatgaagacgagtgggatcgagaggatcaaggaaatgctgctgtcaaggttatgtgccgtttatgcttttcaggagaaaatgagggcagcacgaaagctgccaaaatgcttccttgcaaactctgcagcaaacggtatcatagaaactgtttgaaaagctggggggaacatagagaccttttccattggagttcatgggtatgtccttcttgccgcagttgtgaggtatgccgacgtcctggtgaccccaacaagttgatgttctgtaaaaggtgtgatggcgcttatcattgttactgtcagcaaccatcacacaagaatgttactcatggaccatatttatgtccaaaacatacaaggtgccacagctgtggatctggtgtgcctggtagtggacacagcacaaggtggtttttggggtacacatgctgtgatgcgtgtggacgattgtttgtgaaaggaaactactgtccaatctgcttgaaggtttatagagactctgaagtgatacctatggtttgctgcgatgtttgtgaaaagtgggtgcatattgagtgtgatggcatcagacgtcatgttcaacagataagtcgtgcggagaaatgcatatgttgtgttagatttgtggctatacaagaagggattgtgttcagaacgatgatatacatgataggctaaggaagcaccaattcaacactgattgagatagtttggacatgtccagagacatcaagatgcaccaatgcgtagtgggatcgtaagaaacggtagtaatgggaagagaggcagaggaaggccaaagttgtcttgggaagaggcaagacttaaaggatgaaatatatccaaaggtttagccttgaataggagcgaatggaaaaaaactattcacacgtctgaacctttttgtggcttctgtttggttcaactctagcctaccccaacttttttgggattaaaaggttttgttgttgttgttgggtgtatgctttactgttgttccatatgttatgcagtgaggaaaagtaccaacaattccaagctgatcaaaaccttcagtacacatgtgcagcatgccgtggtgaatgctcccagatcagagacactgaggatgcaatccgggagctttggaagaggagggatgttgccgatcatgagcttatggctactttacgggctgctgctgcactgccttctcttgaagatgtctcaccaccttatcaaaactctgatgatgagaaactcggtgcatatgcattgaaaaatgagagtagaaatactctaaagttttcattgaaaagtaacagtagtaaacctccaccagatacacctgagcaagagaagattgtttttaagagctctggatcaaataagaagccttccaaaaagaaaagtggtcaggctaataaaacagttgatggccatgatgaaatatttctggagagaaggcatgctgttaaatcatcaaatagctgtttgggagatcaaactataaatgagaatcatgacaggagcccttttaaaaatgatgataatgtctatgtttcatcttcaactcgaagtttagaaaagaatttgaaatctccatccatgaaagctgtggcaaacaatgctgatatgatacccaaagtcaagattaaaggcagtaaggtttcgagtttgcattacaaagatggtgaagaaaatactcctaagaatgacactggaaaagctaccaagttggttatccatcttggttcacggcataaaactaggagtggctctcctaagtcggaactgtccaattctcaaagagagcaagatttgggttcaatacatggagggaaaatagatgtcacaagccagctgaaaagttcaagaaacgaggtaaaagagagaagtgtaatgaagttagttagagatactggggtgcaacaaagaaatagccttttgggcgatcttggtacctcaaagaagcatgcaactgggaaaaggagcaatgctctaatttctggaatggaaaatgcaaatgaaactggtactagaaacagatcatttgcacagaaacaatctcattctagtcaggtggagaaccatggaactgctgactctcctgatagcttgaagccatcattgctcaaactcaaatttaagcgtccacattttgagcagctaaacacccaggcctctcaaccagaggagccgacctcctgggtttctcagcaggaggagcagttaaatgttgctaaaggccagagatcaaagaggaagaggccttcgatggagaaggcagatggtttggacggtataactccagccaagaggcatcagcagagcacagatgaagtgatggacgcaaactggattctacgcaagttgggcaaggatgcgatcggaaagaggattgaggtccatctaacttctgatggcaaatggcatcaagggatggtgtctaatgtcatgggtggcacactgtgtattcggttagataatggcaggtctgagaacgtggagctggggaagcaggccatccgcttgattgcttcaagatcgaagggcgggaagcgatgaaaccttttccccataatatgcagcttaggacctgttctcgctcaatacattgcgccatgattatggcaggtagagtcctccccccctgaggtttgacatccgctggagcacagcctctcagcctttgctgactggacgagatactgagcgcaacttccatctgttgcgccatgtttcgctagcctagcgtgtaacagacatcgttttttggtgttggaagccccattggctttcgactagattctgttagggtagggaatgaggttttagatcaccttggatgtaagagaagcaggtagcgccgtgtctggagtgttttgtatgtttagttttccgacgagtttctcgacaatttgttattcacttatatttggttgctggtgttatttgctggccaatcaatgtctttttgtgatagtaataatttgtctacaa

SEQ ID NO: 35118 - DNA, 3125 bp, Zea Mays
cttaccctcctcgtcttggtgctccttcacctctcccctccccgccgctcgcgcctccgaagtccgaacccaattccaaacgcaaattacaccaaaccatccccgaatcatgtcaaaatttccccaatacgcgtccaaaccccacccgaccaccctcccccaaattcgtttcgaatcagattaccgacgcgaccacccatctgggctctggccgcctcgccccccgtcgctcccttccatggcgtttcacgtcgcgtgccccatcacttgcaggagggtgtgcgactgcgagctagggttcggcgccgcagcggcgaggaagggaggagggggtggtgctgcggcggcggtatgggcgggcacggcggcggtgctcgaggggttcctcgtggatccgtggctgctgcggccggctggggccgtggacgaggatgcggcgacggtgcaggtggaagtgccgcccctggagccggaccctgaggatggggaggacgaggcgcgccgggcggcagcgcagcgcggcgccgccgcggcagaggacctcgccaggcgcttcgagagcggtgcctacggatcgccggaagcaggagaagatgaagacgagtgggatcgagaggatcaaggaaatgctgctgtcaaggttatgtgccgtttatgcttttcaggagaaaatgagggcagcacgaaagctgccaaaatgcttccttgcaaactctgcagcaaacggtatcatagaaactgtttgaaaagctggggggaacatagagaccttttccattggagttcatgggtatgtccttcttgccgcagttgtgaggtatgccgacgtcctggtgaccccaacaagttgatgttctgtaaaaggtgtgatggcgcttatcattgttactgtcagcaaccatcacacaagaatgttactcatggaccatatttatgtccaaaacatacaaggtgccacagctgtggatctggtgtgcctggtagtggacacagcacaaggtggtttttggggtacacatgctgtgatgcgtgtggacgattgtttgtgaaaggaaactactgtccaatctgcttgaaggtttatagagactctgaagtgatacctatggtttgctgcgatgtttgtgaaaagtgggtgcatattgagtgtgatggcatcagtgaggaaaagtaccaacaattccaagctgatcaaaaccttcagtacacatgtgcagcatgccgtggtgaatgctcccagagacactgaggatgcaatccgggagctttggaagaggagggatgttgccgatcatgagcttatggctactttacgggctgctgctgcactgccttctcttgaagatgtctcaccaccttatcaaaactctgatgatgagaaactcggtgcatatgcattgaaaaatgagagtagaaatactctaaagttttcattgaaaagtaacagtagtaaacctccaccagatacacctgagcaagagaagattgtttttaagagctctggatcaaataagaagccttccaaaaagaaaagtggtcaggctaataaaacagttgatggccatgatgaaatatttctggagagaaggcatgctgttaaatcatcaaatagctgtttgggagatcaaactataaatgagaatcatgacaggagcccttttaaaaatgatgataatgtctatgtttcatcttcaactcgaagtttagaaaagaatttgaaatctccatccatgaaagctgtggcaaacaatgctgatatgatacccaaagtcaagattaaaggcagtaaggtttcgagtttgcattacaaagatggtgaagaaaatactcctaagaatgacactggaaaagctaccaagttggttatccatcttggttcacggcataaaactaggagtggctctcctaagtcggaactgtccaattctcaaagagagcaagatttgggttcaatacatggagggaaaatagatgtcacaagccagctgaaaagttcaagaaacgaggtaaaagagagaagtgtaatgaagttagttagagatactggggtgcaacaaagaaatagccttttgggcgatcttggtacctcaaagaagcatgcaactgggaaaaggagcaatgctctaatttctggaatggaaaatgcaaatgaaactggtactagaaacagatcatttgcacagaaacaatctcattctagtcaggtggagaaccatggaactgctgactctcctgatagcttgaagccatcattgctcaaactcaaatttaagcgtccacattttgagcagctaaacacccaggcctctcaaccagaggagccgacctcctgggtttctcagcaggaggagcagttaaatgttgctaaaggccagagatcaaagaggaagaggccttcgatggagaaggcagatggtttggacggtataactccagccaagaggcatcagcagagcacagatgaagtgatggacgcaaactggattctacgcaagttgggcaaggatgcgatcggaaagaggattgaggtccatctaacttctgatggcaaatggcatcaagggatggtgtctaatgtcatgggtggcacactgtgtattcggttagataatggcaggtctgagaacgtggagctggggaagcaggccatccgcttgattgcttcaagatcgaagggcgggaagcgatgaaaccttttccccataatatgcagcttaggacctgttctcgctcaatacattgcgccatgattatggcaggtagagtcctccccccctgaggtttgacatccgctggagcacagcctctcagcctttgctgactggacgagatactgagcgcaacttccatctgttgcgccatgtttcgctagcctagcgtgtaacagacatcgttttttggtgttggaagccccattggctttcgactagattctgttagggtagggaatgaggttttagatcaccttggatgtaagagaagcaggtagcgccgtgtctggagtgttttgtatgtttagttttccgacgagtttctcgacaatttgttattcacttatatttggttgctggtgttatttgctggccaatcaatgtctttttgtgatagtaataatttgtctacaa

SEQ ID NO: 35119 - DNA, 1188 bp, Zea Mays
cctcgccccccgtcgctcccttccatggcgtttcacgtcgcgtgccccatcacttgcaggagggtgtgcgactgcgagctagggttcggcgccgcagcggcgaggaagggaggagggggtggtgctgcggcggcggtatgggcgggcacggcggcggtgctcgaggggttcctcgtggatccgtggctgctgcggccggctggggccgtggacgaggatgcggcgacggtgcaggtggaagtgccgcccctggagccggaccctgaggatggggaggacgaggcgcgccgggcggcagcgcagcgcggcgccgccgcggcagaggacctcgccaggcgcttcgagagcggtgcctacggatcgccggaagcaggagaagatgaagacgagtgggatcgagaggatcaaggaaatgctgctgtcaaggttatgtgccgtttatgcttttcaggagaaaatgagggcagcacgaaagctgccaaaatgcttccttgcaaactctgcagcaaacggtatcatagaaactgtttgaaaagctggggggaacatagagaccttttccattggagttcatgggtatgtccttcttgccgcagttgtgaggtatgccgacgtcctggtgaccccaacaagttgatgttctgtaaaaggtgtgatggcgcttatcattgttactgtcagcaaccatcacacaagaatgttactcatggaccatatttatgtccaaaacatacaaggtgccacagctgtggatctggtgtgcctggtagtggacacagcacaaggtggtttttggggtacacatgctgtgatgcgtgtggacgattgtttgtgaaaggaaactactgtccaatctgcttgaaggtttatagagactctgaagtgatacctatggtttgctgcgatgtttgtgaaaagtgggtgcatattgagtgtgatggcatcagataagtcgtgcggagaaatgcatatgttgtgttagatttgtggctatacaagaagggattgtgttcagaacgatgatatacatgataggctaaggaagcaccaattcaacactgattgagatagtttggacatgtccagagacatcaagatgcaccaatgcgtagtgggatcgtaagaaacggtagtaatgggaagagaggcagaggaaggccaaagttgtcttgggaagaggcaagactt

SEQ ID NO: 35120 - DNA, 2508 bp, Zea Mays
gccaaattgggacgtcgtctccgactccgacgctgctcgatcgagcaaaccgacaaccccctctccgccgccgcgcacctacgctgccctccgtttggtcgtccgcccgcttcgacgggactggtccggccgtcggcgctcggcctgtcgacccaccagcccgctcccgtggcagtggtaacagatgtttgtaatgcttcaagcacacctcaagaaaataggcttgctggtgacagcaacaccatttcagaaaatgcccaggaatcattgagttctttaccagaacaagagtcaaatgatgctagtgttaacacagaaaagcaggaacctggcatttcaaaatgcaaatctgtggacgaaattccaaaaacagtaactgtaaagagatgcaagaacgttgattcaaaaaaagtctcctcaaataacaataataatccaagatttactggcagtccagctctgaaaaagcatcccacaaagggggaccatctttttgaactatgtgaaaatggcatggctcaagacacaaagcctcctagcacaaggatatgcataaattcagcctgcaaagctgtcttcaactcagataacacattttgtaagaggtgttcatgttgtatttgccatggttttgatgataacaaagatcctagtctttggctggtatgctcatcagagactggtgatcaggattgctgtggatcatccttccacgttgagtgtgcactcaagcaccgaaaggcaggatgcatagaacttgcacaatctatacagcttgatggtaactactgctgtgctgcatgcggcaaggttattggaatacttgggttctggaagaggcagctagtagttgctaaagatgctcgtagagttgatagtctctgttcccgcatatatctgagccatagacttttggatggcacaacacgttttaaagagttgcatcagatcgtagaggatgcaaaagcaaagttggaaagtgaagttggcccccttgatggtttaaatttgaagatattacagcttcatctttggtgttggttctcaaggaagctgtttcctcgcagtatcatgctatcaaaggctataaactctggtactggaatagcagagaagcgccttacacaggggagcctgctgttttccccaaagaccaaagaaggattctaatatccaatcttcagccctgcacagagtattccttccgtattatttcatttactgaggatggtgaactgggccattctgaatcaaagatctttaccaagagtgtggaaatcattcataagaacacagagcatggagcagaaggttgctcatcttctgccaagagagctggtaagagacaaaatgctaggtcatcaggcttccaggtgcgccagttgggtaatgtcttccgaagagcacagactgagaatggttaccccagtacgttgtgtaaatatgagattgaagattcatgtgatcagagtgagtccgtgataccagataaggaccagtttcgatgtggtgcctcccgcaaactcgatcttaatgagacctcagtcccggacctaaatgcagaggtagtcatgccaacagagtgctgccagaatgagaacggctgtacttctggaaagaatgcattcacaaagtcgaacggttgtggtgactctgagacctgtgcagaggggcatgtaggggatgcaccagccatggaatcccggtcccagagtcgcaagcaggcatcagatttggagcaggagacctgtcttgatgacagcaatttggtggcccgtgcagctaggctcttcgccccgaggttaggacagttagatgacaactacgagtactgcgtgaagattatccgttggttggaatgttcaggcctcattgagaaggatttcaggatgaaatttctaacatggttcagtttgagatcgacagagcaggagcgaagagttgttatcaccttcatccgcaccctaattgatgaacccagtagtctggctgcgcagcttttggattcctttgaagaaattgttaccagtaagaggccaagaacaggtttctgtactaagttgtggcactagccaggtaacaaaggggcaccaagcattaaaaggatcagccaagtttacatcatacactggagcaatacattcaaccgaggtgttggataaagaccattgtttcagctttcggctcagcatcctccagggccatgatctctgagatttttctgcaagaaacctctggtctgtctgctccaagatcacgctccaaccgacgcaagaaaccttcttcaacctcactcagatgatcgtcgacctcttgttcgctgtcaaaacagcattcggcgtcatcatgcttactggatgatgctggagatgagtatggtgtgtactctccggtggtggctgcatcatcgcgctcccgaagcgtcctcaagatcagtgtcttgagaaagttcatgacttggacggcatgcatgagtgctgtcagtggatctgacatctaacatagaac

SEQ ID NO: 35121 - DNA, 3169 bp, Zea Mays
ccgaaaccaagttgccaaattgggacgtcgtctccgactccgacgctgctcgatcgagcaaaccgacaaccccctctccgccgccgcgcacctacgctgccctccgtttggtcgtccgcccgcttcgacgggactggtccggccgtcggcgctcggcctgtcgacccaccagcccgctcccgtggcaggcgagttcgtccatcctccgaccccatccgtcggtcgccgggatggcggcgtcgggcgggaacgagccggaactcgccgtggtaacagatgtttgtaatgcttcaagcacacctcaagaaaataggcttgctggtgacagcaacaccatttcagaaaatgcccaggaatcattgagttctttaccagaacaagagtcaaatgatgctagtgttaacacagaaaagcaggaacctggcatttcaaaatgcaaatctgtggacgaaattccaaaaacagtaactgtaaagagatgcaagaacgttgattcaaaaaaagtctcctcaaataacaataataatccaagatttactggcagtccagctctgaaaaagcatcccacaaagggggaccatctttttgaactatgtgaaaatggcatggctcaagacacaaagcctcctagcacaaggatatgcataaattcagcctgcaaagctgtcttcaactcagataacacattttgtaagaggtgttcatgttgtatttgccatggttttgatgataacaaagatcctagtctttggctggtatgctcatcagagactggtgatcaggattgctgtggatcatccttccacgttgagtgtgcactcaagcaccgaaaggcaggatgcatagaacttgcacaatctatacagcttgatggtaactactgctgtgctgcatgcggcaaggttattggaatacttgggtgagtgattttgcatctaccttggggaattatcttaggttcagatgaaaaaggttttatatgtggcttgtttgtaagtagacatgcatgctacatgaagcattgctggctactctaacctccatatgtcattttacctatattatccttacccctcattgaactggtgggctttaaaatacatattgtggatgttcttcatataggtgaaccttgttgcattcaaaacattggttgaaccatttatcaaattgatatttcatatctgtagttacttacagcattatgtgcatatgatgtctgctatgtttaactcttattcctgtctccttttccttttttttttgtttttggcaaacactctttgttatattttggatctaacagtgtctttgagtattttgagcaggttctggaagaggcagctagtagttgctaaagatgctcgtagagttgatagtctctgttcccgcatatatctgagccatagacttttggatggcacaacacgttttaaagagttgcatcagatcgtagaggatgcaaaagcaaagttggaaagtgaagttggcccccttgatggtacgtcatccaagatggctcgtggtattgtaggccggctgcctgttgctgctgatgtgcagcaactttgctctttagcaattgaaaaagctgatgagtggcttagttcaaacattcaatctgaaactaaacaaaatgatacacttccttctgcctgcaggtttaaatttgaagatattacagcttcatctttggtgttggttctcaaggaagctgtttcctcgcagtatcatgctatcaaaggctataaactctggtactggaatagcagagaagcgccttacacaggggagcctgctgttttccccaaagaccaaagaaggattctaatatccaatcttcagccctgcacagagtattccttccgtattatttcatttactgaggatggtgaactgggccattctgaatcaaagatctttaccaagagtgtggaaatcattcataagaacacagagcatggagcagaaggttgctcatcttctgccaagagagctggtaagagacaaaatgctaggtcatcaggcttccaggtgcgccagttgggtaatgtcttccgaagagcacagactgagaatggttaccccagtacgttgtgtaaatatgagattgaagattcatgtgatcagagtgagtccgtgataccagataaggaccagtttcgatgtggtgcctcccgcaaactcgatcttaatgagacctcagtcccggacctaaatgcagaggtagtcatgccaacagagtgctgccagaatgagaacggctgtacttctggaaagaatgcattcacaaagtcgaacggttgtggtgactctgagacctgtgcagaggggcatgtaggggatgcaccagccatggaatcccggtcccagagtcgcaagcaggcatcagatttggagcaggagacctgtcttgatgacagcaatttggtggcccgtgcagctaggctcttcgccccgaggttaggacagttagatgacaactacgagtactgcgtgaagattatccgttggttggaatgttcaggcctcattgagaaggatttcaggatgaaatttctaacatggttcagtttgagatcgacagagcaggagcgaagagttgttatcaccttcatccgcaccctaattgatgaacccagtagtctggctgcgcagcttttggattcctttgaagaaattgttaccagtaagaggccaagaacaggtttctgtactaagttgtggcactagccaggtaacaaaggggcaccaagcattaaaaggatcagccaagtttacatcatacactggagcaatacattcaaccgaggtgttggataaagaccattgtttcagctttcggctcagcatcctccagggccatgatctctgagatttttctgcaagaaacctctggtctgtctgctccaagatcacgctccaaccgacgcaagaaaccttcttcaacctcactcagatgatcgtcgacctcttgttcgctgtcaaaacagcattcggcgtcatcatgcttactggatgatgctggagatgagtatggtgtgtactctccggtggtggctgcatcatcgcgctcccgaagcgtcctcaagatcagtgtcttgagaaagttcatgacttggacggcatgcatgagtgctgtcagtggatctgacatctaacatagaac

SEQ ID NO: 35122 - DNA, 3184 bp, Zea Mays
caagcagggccaatctcggtcagatatacctccagtgctgtcgtgcgcatcaaaatccatcgtgcgaaaaaagagaggaggaaagagcaaaagaatctgaccgaaaccaagttgccaaattgggacgtcgtctccgactccgacgctgctcgatcgagcaaaccgacaaccccctctccgccgccgcgcacctacgctgccctccgtttggtcgtccgcccgcttcgacgggactggtccggccgtcggcgctcggcctgtcgacccaccagcccgctcccgtggcagtggtaacagatgtttgtaatgcttcaagcacacctcaagaaaataggcttgctggtgacagcaacaccatttcagaaaatgcccaggaatcattgagttctttaccagaacaagagtcaaatgatgctagtgttaacacagaaaagcaggaacctggcatttcaaaatgcaaatctgtggacgaaattccaaaaacagtaactgtaaagagatgcaagaacgttgattcaaaaaaagtctcctcaaataacaataataatccaagatttactggcagtccagctctgaaaaagcatcccacaaagggggaccatctttttgaactatgtgaaaatggcatggctcaagacacaaagcctcctagcacaaggatatgcataaattcagcctgcaaagctgtcttcaactcagataacacattttgtaagaggtgttcatgttgtatttgccatggttttgatgataacaaagatcctagtctttggctggtatgctcatcagagactggtgatcaggattgctgtggatcatccttccacgttgagtgtgcactcaagcaccgaaaggcaggatgcatagaacttgcacaatctatacagcttgatggtaactactgctgtgctgcatgcggcaaggttattggaatacttgggtgagtgattttgcatctaccttggggaattatcttaggttcagatgaaaaaggttttatatgtggcttgtttgtaagtagacatgcatgctacatgaagcattgctggctactctaacctccatatgtcattttacctatattatccttacccctcattgaactggtgggctttaaaatacatattgtggatgttcttcatataggtgaaccttgttgcattcaaaacattggttgaaccatttatcaaattgatatttcatatctgtagttacttacagcattatgtgcatatgatgtctgctatgtttaactcttattcctgtctccttttccttttttttttgtttttggcaaacactctttgttatattttggatctaacagtgtctttgagtattttgagcaggttctggaagaggcagctagtagttgctaaagatgctcgtagagttgatagtctctgttcccgcatatatctgagccatagacttttggatggcacaacacgttttaaagagttgcatcagatcgtagaggatgcaaaagcaaagttggaaagtgaagttggcccccttgatggtacgtcatccaagatggctcgtggtattgtaggccggctgcctgttgctgctgatgtgcagcaactttgctctttagcaattgaaaaagctgatgagtggcttagttcaaacattcaatctgaaactaaacaaaatgatacacttccttctgcctgcaggtttaaatttgaagatattacagcttcatctttggtgttggttctcaaggaagctgtttcctcgcagtatcatgctatcaaaggctataaactctggtactggaatagcagagaagcgccttacacaggggagcctgctgttttccccaaagaccaaagaaggattctaatatccaatcttcagccctgcacagagtattccttccgtattatttcatttactgaggatggtgaactgggccattctgaatcaaagatctttaccaagagtgtggaaatcattcataagaacacagagcatggagcagaaggttgctcatcttctgccaagagagctggtaagagacaaaatgctaggtcatcaggcttccaggtgcgccagttgggtaatgtcttccgaagagcacagactgagaatggttaccccagtacgttgtgtaaatatgagattgaagattcatgtgatcagagtgagtccgtgataccagataaggaccagtttcgatgtggtgcctcccgcaaactcgatcttaatgagacctcagtcccggacctaaatgcagaggtagtcatgccaacagagtgctgccagaatgagaacggctgtacttctggaaagaatgcattcacaaagtcgaacggttgtggtgactctgagacctgtgcagaggggcatgtaggggatgcaccagccatggaatcccggtcccagagtcgcaagcaggcatcagatttggagcaggagacctgtcttgatgacagcaatttggtggcccgtgcagctaggctcttcgccccgaggttaggacagttagatgacaactacgagtactgcgtgaagattatccgttggttggaatgttcaggcctcattgagaaggatttcaggatgaaatttctaacatggttcagtttgagatcgacagagcaggagcgaagagttgttatcaccttcatccgcaccctaattgatgaacccagtagtctggctgcgcagcttttggattcctttgaagaaattgttaccagtaagaggccaagaacaggtttctgtactaagttgtggcactagccaggtaacaaaggggcaccaagcattaaaaggatcagccaagtttacatcatacactggagcaatacattcaaccgaggtgttggataaagaccattgctttcggctcagcatcctccagggccatgatctctgagatttttctgcaagaaacctctggtctgtctgctccaagatcacgctccaaccgacgcaagaaaccttcttcaacctcactcagatgatcgtcgacctcttgttcgctgtcaaaacagcattcggcgtcatcatgcttactggatgatgctggagatgagtatggtgtgtactctccggtggtggctgcatcatcgcgctcccgaagcgtcctcaagatcagtgtcttgagaaagttcatgacttggacggcatgcatgagtgctgtcagtggatctgacatctaacatagaac

SEQ ID NO: 35123 - DNA, 2521 bp, Zea Mays
ccgaaaccaagttgccaaattgggacgtcgtctccgactccgacgctgctcgatcgagcaaaccgacaaccccctctccgccgccgcgcacctacgctgccctccgtttggtcgtccgcccgcttcgacgggactggtccggccgtcggcgctcggcctgtcgacccaccagcccgctcccgtggcaggcgagttcgtccatcctccgaccccatccgtcggtcgccgggatggcggcgtcgggcgggaacgagccggaactcgccgtggtaacagatgtttgtaatgcttcaagcacacctcaagaaaataggcttgctggtgacagcaacaccatttcagaaaatgcccaggaatcattgagttctttaccagaacaagagtcaaatgatgctagtgttaacacagaaaagcaggaacctggcatttcaaaatgcaaatctgtggacgaaattccaaaaacagtaactgtaaagagatgcaagaacgttgattcaaaaaaagtctcctcaaataacaataataatccaagatttactggcagtccagctctgaaaaagcatcccacaaagggggaccatctttttgaactatgtgaaaatggcatggctcaagacacaaagcctcctagcacaaggatatgcataaattcagcctgcaaagctgtcttcaactcagataacacattttgtaagaggtgttcatgttgtatttgccatggttttgatgataacaaagatcctagtctttggctggtatgctcatcagagactggtgatcaggattgctgtggatcatccttccacgttgagtgtgcactcaagcaccgaaaggcaggatgcatagaacttgcacaatctatacagcttgatggtaactactgctgtgctgcatgcggcaaggttattggaatacttgggttctggaagaggcagctagtagttgctaaagatgctcgtagagttgatagtctctgttcccgcatatatctgagccatagacttttggatggcacaacacgttttaaagagttgcatcagatcgtagaggatgcaaaagcaaagttggaaagtgaagttggcccccttgatggtacgtcatccaagatggctcgtggtattgtaggccggctgcctgttgctgctgatgtgcagcaactttgctctttagcaattgaaaaagctgatgagtggcttagttcaaacattcaatctgaaactaaacaaaatgatacacttccttctgcctgcaggtttaaatttgaagatattacagcttcatctttggtgttggttctcaaggaagctgtttcctcgcagtatcatgctatcaaaggctataaactctggtactggaatagcagagaagcgccttacacaggggagcctgctgttttccccaaagaccaaagaaggattctaatatccaatcttcagccctgcacagagtattccttccgtattatttcatttactgaggatggtgaactgggccattctgaatcaaagatctttaccaagagtgtggaaatcattcataagaacacagagcatggagcagaaggttgctcatcttctgccaagagagctggtaagagacaaaatgctaggtcatcaggcttccaggtgcgccagttgggtaatgtcttccgaagagcacagactgagaatggttaccccagtacgttgtgtaaatatgagattgaagattcatgtgatcagagtgagtccgtgataccagataaggaccagtttcgatgtggtgcctcccgcaaactcgatcttaatgagacctcagtcccggacctaaatgcagaggtagtcatgccaacagagtgctgccagaatgagaacggctgtacttctggaaagaatgcattcacaaagtcgaacggttgtggtgactctgagacctgtgcagaggggcatgtaggggatgcaccagccatggaatcccggtcccagagtcgcaagcaggcatcagatttggagcaggagacctgtcttgatgacagcaatttggtggcccgtgcagctaggctcttcgccccgaggttaggacagttagatgacaactacgagtactgcgtgaagattatccgttggttggaatgttcaggcctcattgagaaggatttcaggatgaaatttctaacatggttcagtttgagatcgacagagcaggagcgaagagttgttatcaccttcatccgcaccctaattgatgaacccagtagtctggctgcgcagcttttggattcctttgaagaaattgttaccagtaagaggccaagaacaggtttctgtactaagttgtggcactagccaggtaacaaaggggcaccaagcattaaaaggatcagccaagtttacatcatacactggagcaatacattcaaccgaggtgttggataaagaccattgctttcggctcagcatcctccagggccatgatctctgagatttttctgcaagaaacctctggtctgtctgctccaagatcacgctccaaccgacgcaag

SEQ ID NO: 35124 - DNA, 2484 bp, Zea Mays
atcgtgcgaaaaaagagaggaggaaagagcaaaagaatctgaccgaaaccaagttgccaaattgggacgtcgtctccgactccgacgctgctcgatcgagcaaaccgacaaccccctctccgccgccgcgcacctacgctgccctccgtttggtcgtccgcccgcttcgacgggactggtccggccgtcggcgctcggcctgtcgacccaccagcccgctcccgtggcagtggtaacagatgtttgtaatgcttcaagcacacctcaagaaaataggcttgctggtgacagcaacaccatttcagaaaatgcccaggaatcattgagttctttaccagaacaagagtcaaatgatgctagtgttaacacagaaaagcaggaacctggcatttcaaaatgcaaatctgtggacgaaattccaaaaacagtaactgtaaagagatgcaagaacgttgattcaaaaaaagtctcctcaaataacaataataatccaagatttactggcagtccagctctgaaaaagcatcccacaaagggggaccatctttttgaactatgtgaaaatggcatggctcaagacacaaagcctcctagcacaaggatatgcataaattcagcctgcaaagctgtcttcaactcagataacacattttgtaagaggtgttcatgttgtatttgccatggttttgatgataacaaagatcctagtctttggctggtatgctcatcagagactggtgatcaggattgctgtggatcatccttccacgttgagtgtgcactcaagcaccgaaaggcaggatgcatagaacttgcacaatctatacagcttgatggtaactactgctgtgctgcatgcggcaaggttattggaatacttgggttctggaagaggcagctagtagttgctaaagatgctcgtagagttgatagtctctgttcccgcatatatctgagccatagacttttggatggcacaacacgttttaaagagttgcatcagatcgtagaggatgcaaaagcaaagttggaaagtgaagttggcccccttgatggtacgtcatccaagatggctcgtggtattgtaggccggctgcctgttgctgctgatgtgcagcaactttgctctttagcaattgaaaaagctgatgagtggcttagttcaaacattcaatctgaaactaaacaaaatgatacacttccttctgcctgcaggtttaaatttgaagatattacagcttcatctttggtgttggttctcaaggaagctgtttcctcgcagtatcatgctatcaaaggctataaactctggtactggaatagcagagaagcgccttacacaggggagcctgctgttttccccaaagaccaaagaaggattctaatatccaatcttcagccctgcacagagtattccttccgtattatttcatttactgaggatggtgaactgggccattctgaatcaaagatctttaccaagagtgtggaaatcattcataagaacacagagcatggagcagaaggttgctcatcttctgccaagagagctggtaagagacaaaatgctaggtcatcaggcttccaggtgcgccagttgggtaatgtcttccgaagagcacagactgagaatggttaccccagtacgttgtgtaaatatgagattgaagattcatgtgatcagagtgagtccgtgataccagataaggaccagtttcgatgtggtgcctcccgcaaactcgatcttaatgagacctcagtcccggacctaaatgcagaggtagtcatgccaacagagtgctgccagaatgagaacggctgtacttctggaaagaatgcattcacaaagtcgaacggttgtggtgactctgagacctgtgcagaggggcatgtaggggatgcaccagccatggaatcccggtcccagagtcgcaagcaggcatcagatttggagcaggagacctgtcttgatgacagcaatttggtggcccgtgcagctaggctcttcgccccgaggttaggacagttagatgacaactacgagtactgcgtgaagattatccgttggttggaatgttcaggcctcattgagaaggatttcaggatgaaatttctaacatggttcagtttgagatcgacagagcaggagcgaagagttgttatcaccttcatccgcaccctaattgatgaacccagtagtctggctgcgcagcttttggattcctttgaagaaattgttaccagtaagaggccaagaacaggtttctgtactaagttgtggcactagccaggtaacaaaggggcaccaagcattaaaaggatcagccaagtttacatcatacactggagcaatacattcaaccgaggtgttggataaagaccattgctttcggctcagcatcctccagggccatgatctctgagatttttctgcaagaaacctctggtctgtctgctccaagatcacgctccaaccgacgcaag

SEQ ID NO: 35125 - DNA, 2968 bp, Zea Mays
gccaaattgggacgtcgtctccgactccgacgctgctcgatcgagcaaaccgacaaccccctctccgccgccgcgcacctacgctgccctccgtttggtcgtccgcccgcttcgacgggactggtccggccgtcggcgctcggcctgtcgacccaccagcccgctcccgtggcagtggtaacagatgtttgtaatgcttcaagcacacctcaagaaaataggcttgctggtgacagcaacaccatttcagaaaatgcccaggaatcattgagttctttaccagaacaagagtcaaatgatgctagtgttaacacagaaaagcaggaacctggcatttcaaaatgcaaatctgtggacgaaattccaaaaacagtaactgtaaagagatgcaagaacgttgattcaaaaaaagtctcctcaaataacaataataatccaagatttactggcagtccagctctgaaaaagcatcccacaaagggggaccatctttttgaactatgtgaaaatggcatggctcaagacacaaagcctcctagcacaaggatatgcataaattcagcctgcaaagctgtcttcaactcagataacacattttgtaagaggtgttcatgttgtatttgccatggttttgatgataacaaagatcctagtctttggctggtatgctcatcagagactggtgatcaggattgctgtggatcatccttccacgttgagtgtgcactcaagcaccgaaaggcaggatgcatagaacttgcacaatctatacagcttgatggtaactactgctgtgctgcatgcggcaaggttattggaatacttgggtgagtgattttgcatctaccttggggaattatcttaggttcagatgaaaaaggttttatatgtggcttgtttgtaagtagacatgcatgctacatgaagcattgctggctactctaacctccatatgtcattttacctatattatccttacccctcattgaactggtgggctttaaaatacatattgtggatgttcttcatataggtgaaccttgttgcattcaaaacattggttgaaccatttatcaaattgatatttcatatctgtagttacttacagcattatgtgcatatgatgtctgctatgtttaactcttattcctgtctccttttccttttttttttgtttttggcaaacactctttgttatattttggatctaacagtgtctttgagtattttgagcaggttctggaagaggcagctagtagttgctaaagatgctcgtagagttgatagtctctgttcccgcatatatctgagccatagacttttggatggcacaacacgttttaaagagttgcatcagatcgtagaggatgcaaaagcaaagttggaaagtgaagttggcccccttgatggtacgtcatccaagatggctcgtggtattgtaggccggctgcctgttgctgctgatgtgcagcaactttgctctttagcaattgaaaaagctgatgagtggcttagttcaaacattcaatctgaaactaaacaaaatgatacacttccttctgcctgcaggtttaaatttgaagatattacagcttcatctttggtgttggttctcaaggaagctgtttcctcgcagtatcatgctatcaaaggctataaactctggtactggaatagcagagaagcgccttacacaggggagcctgctgttttccccaaagaccaaagaaggattctaatatccaatcttcagccctgcacagagtattccttccgtattatttcatttactgaggatggtgaactgggccattctgaatcaaagatctttaccaagagtgtggaaatcattcataagaacacagagcatggagcagaaggttgctcatcttctgccaagagagctggtaagagacaaaatgctaggtcatcaggcttccaggtgcgccagttgggtaatgtcttccgaagagcacagactgagaatggttaccccagtacgttgtgtaaatatgagattgaagattcatgtgatcagagtgagtccgtgataccagataaggaccagtttcgatgtggtgcctcccgcaaactcgatcttaatgagacctcagtcccggacctaaatgcagaggtagtcatgccaacagagtgctgccagaatgagaacggctgtacttctggaaagaatgcattcacaaagtcgaacggttgtggtgactctgagacctgtgcagaggggcatgtaggggatgcaccagccatggaatcccggtcccagagtcgcaagcaggcatcagatttggagcaggagacctgtcttgatgacagcaatttggtggcccgtgcagctaggctcttcgccccgaggttaggacagttagatgacaactacgagtactgcgtgaagattatccgttggttggaatgttcaggcctcattgagaaggatttcaggatgaaatttctaacatggttcagtttgagatcgacagagcaggagcgaagagttgttatcaccttcatccgcaccctaattgatgaacccagtagtctggctgcgcagcttttggattcctttgaagaaattgttaccagtaagaggccaagaacaggtttctgtactaagttgtggcactagccaggtagagaaagcatggaactgatatctaatgatactctagcgttcttacatcagcaagattaactgggatgacagtgtaatagtaattttatttattttctgataaatgtagttaaactgatgttgctgagctttgatatttgccatgatgatatattcttcagggctagtttagaaacttaaaccccctccaggattcctagggattgagtggaaaattagcttatttccccctcaattcttgggaatcttggagtagatttaagtttccaaactagcccttaggggatttaagcttccaaactaagtgtaatggtgctttta

SEQ ID NO: 35126 - DNA, 2968 bp, Zea Mays
ccgaaaccaagttgccaaattgggacgtcgtctccgactccgacgctgctcgatcgagcaaaccgacaaccccctctccgccgccgcgcacctacgctgccctccgtttggtcgtccgcccgcttcgacgggactggtccggccgtcggcgctcggcctgtcgacccaccagcccgctcccgtggcaggcgagttcgtccatcctccgaccccatccgtcggtcgccgggatggcggcgtcgggcgggaacgagccggaactcgccgtggtaacagatgtttgtaatgcttcaagcacacctcaagaaaataggcttgctggtgacagcaacaccatttcagaaaatgcccaggaatcattgagttctttaccagaacaagagtcaaatgatgctagtgttaacacagaaaagcaggaacctggcatttcaaaatgcaaatctgtggacgaaattccaaaaacagtaactgtaaagagatgcaagaacgttgattcaaaaaaagtctcctcaaataacaataataatccaagatttactggcagtccagctctgaaaaagcatcccacaaagggggaccatctttttgaactatgtgaaaatggcatggctcaagacacaaagcctcctagcacaaggatatgcataaattcagcctgcaaagctgtcttcaactcagataacacattttgattgctgtggatcatccttccacgttgagtgtgcactcaagcaccgaaaggcaggatgcatagaacttgcacaatctatacagcttgatggtaactactgctgtgctgcatgcggcaaggttattggaatacttgggtgagtgattttgcatctaccttggggaattatcttaggttcagatgaaaaaggttttatatgtggcttgtttgtaagtagacatgcatgctacatgaagcattgctggctactctaacctccatatgtcattttacctatattatccttacccctcattgaactggtgggctttaaaatacatattgtggatgttcttcatataggtgaaccttgttgcattcaaaacattggttgaaccatttatcaaattgatatttcatatctgtagttacttacagcattatgtgcatatgatgtctgctatgtttaactcttattcctgtctccttttccttttttttttgtttttggcaaacactctttgttatattttggatctaacagtgtctttgagtattttgagcaggttctggaagaggcagctagtagttgctaaagatgctcgtagagttgatagtctctgttcccgcatatatctgagccatagacttttggatggcacaacacgttttaaagagttgcatcagatcgtagaggatgcaaaagcaaagttggaaagtgaagttggcccccttgatggtacgtcatccaagatggctcgtggtattgtaggccggctgcctgttgctgctgatgtgcagcaactttgctctttagcaattgaaaaagctgatgagtggcttagttcaaacattcaatctgaaactaaacaaaatgatacacttccttctgcctgcaggtttaaatttgaagatattacagcttcatctttggtgttggttctcaaggaagctgtttcctcgcagtatcatgctatcaaaggctataaactctggtactggaatagcagagaagcgccttacacaggggagcctgctgttttccccaaagaccaaagaaggattctaatatccaatcttcagccctgcacagagtattccttccgtattatttcatttactgaggatggtgaactgggccattctgaatcaaagatctttaccaagagtgtggaaatcattcataagaacacagagcatggagcagaaggttgctcatcttctgccaagagagctggtaagagacaaaatgctaggtcatcaggcttccaggtgcgccagttgggtaatgtcttccgaagagcacagactgagaatggttaccccagtacgttgtgtaaatatgagattgaagattcatgtgatcagagtgagtccgtgataccagataaggaccagtttcgatgtggtgcctcccgcaaactcgatcttaatgagacctcagtcccggacctaaatgcagaggtagtcatgccaacagagtgctgccagaatgagaacggctgtacttctggaaagaatgcattcacaaagtcgaacggttgtggtgactctgagacctgtgcagaggggcatgtaggggatgcaccagccatggaatcccggtcccagagtcgcaagcaggcatcagatttggagcaggagacctgtcttgatgacagcaatttggtggcccgtgcagctaggctcttcgccccgaggttaggacagttagatgacaactacgagtactgcgtgaagattatccgttggttggaatgttcaggcctcattgagaaggatttcaggatgaaatttctaacatggttcagtttgagatcgacagagcaggagcgaagagttgttatcaccttcatccgcaccctaattgatgaacccagtagtctggctgcgcagcttttggattcctttgaagaaattgttaccagtaagaggccaagaacaggtttctgtactaagttgtggcactagccaggtagagaaagcatggaactgatatctaatgatactctagcgttcttacatcagcaagattaactgggatgacagtgtaatagtaattttatttattttctgataaatgtagttaaactgatgttgctgagctttgatatttgccatgatgatatattcttcagggctagtttagaaacttaaaccccctccaggattcctagggattgagtggaaaattagcttatttccccctcaattcttgggaatcttggagtagatttaagtttccaaactagcccttaggggatttaagcttccaaactaagtgtaatggtgctttta

SEQ ID NO: 35127 - DNA, 4366 bp, Zea Mays
atgatgcaccaagagcgaaaacagacagcttccatgccactctggactagcgcacgatggtgtgcgcaggctgcctcctatagagctggaggattggagcacaggcggcgacgattccaagtgcttgacaagcattatggttccagcttcaaggagacgacacgggacttcctgttctgcttggctgccctcacgaacactatggagaggcatgccggcgcccaccatggcctgcggacttcttgctcccctttgaggcaggcgactttaatgcgcctcaactctttgcacagtgtgataaagtctccccatttcatatggcaccgcctaataaaacgcagaatctgctcagtagtaaacatggacaagctttctagatattctccgttgacaccattttcttcaaatacttgtctgtagccaccaaggttaatttcttccagccataatccaacatcctgaaagaaaatagttaaactattaggtgaatggtcaaacatcttgaggtgacaatatagccttgaactctttcattggaccttaccaattgtagtcataataaactaaacgtactatgctgatccaaatatgattctaaactataaagcttaacatacggcatgattccagatcagaaactcctgaaattcaaggatgaaattatactaaactgcaaaagatgctgtggtgtaataaacaaataagcaatttgtacttgggcaaaagatgctgtggtgtaataaacaaataagcaaagaagccagagaatttcaacttttcaagcctcagataatttgacttaggaaactgaaaagagagcataggagtgtcttgaaggcatagaagaaagggtcaacacgaaggcagacttctaacagaaaacaacaatgcatttatggtacaactagtttggcatttcgaaataataagtgatacataaagaaaaagacagttacaaagtgatttagtgtgtgtatcttttttttccaaaaacacaggagagttgtgcatcgtttcattaagaaggaaacaacaggggtttacaccccagggcaaacataaaaggacctattacagaaaagacacaaaaactacttgaccagggaaccaccaggccggacagggctaaccaagtctatccaacatccccttaacaagaaccgaaggtccttggctccagccgcacaccacagcgatccttcattggtgatgtttagaagaaccaccagggcctccagactgacgctttcaaacacacaagcattccggtgcatccaaatctcccataccattacaaaaaagagcgttgagtcctttctttagttcctttgatgccatgcatacagcattactccaccatcccttaaaacttcctccctagggttgaggcaaaacggacagtcccaggccatgtaggattagaaaccaaacttgtttggcaaaaacacatgaaactagaagatgttgtatcaactctgcctcctggtcacaaagcgggcaggctgctaggtgcggcagccctctcttcgcaagacgatccacagtccaaactctatttttcagcaccaaccacataaaaaggttgcatttgggggtagcccaggacctccagaccctcttccaaggtgcaaaatgtattgttcccacaaagaaagcattataggcagatttggtagagtaagaaccattctttaggtgttgatcagcagcctcttgctgcaagtgccagttatgcactaagtcccaaagcagaaggtactcacttagaacttggacagtgagtgcacctttgatgtcgacaatccaccccctgttcagcagcgcttgggacatagtccgatgcttgattattctcttggggatggctttgaagaggttgggggccaactcttggattgtatttccctccagccatttgtctacccaaaacaagagtttgcccatcccccattattgtttggactgccatattagagagctcgggcattatttggcacatggatgggtaatcctttccaaggtctgcaagaatctgttttttccagccaaatccaccagacatgaagggcccaactcattacctctaaattcagaacacccagcccaccatattggagaggtcgttgtattgaatccgaagatatcatacagtttcctccattagctttatcttttccgacccaaagaaagcctctgcgcttcttgtcaattgccttgaacacccatttaggtagatcaagggcagtcatgtgataaatatttagggcggacaggacagcctttacagtgaccagtcaggcagccttgtttatgagtgctcccttccattttgggaggttgtctgccaccttgtcaacaatcttgtgaagttcagctcttgagagtttatgaacgctcaagggtaggcccaaataggaacatggaaattccttgatgtcacaagccaggatgttagtaattagggaccaatcttcatcatgtgggtttctgaagaagtaaattataaataaaactattgctgtggcaagaaatgagagaaaacaaaacatatatgttgtaacaatacaatccctaacaatcacctcaaccttggtctactttaacctggatcccagtccatggtcagtctaatataacacagcccaagcaccacctgagcttctaggtccaacctaactttagcctgaacaaggaccaatcacagcccaaaccactttccgtttgaggatggagtatagtcttgctcagaaaatgtctacgagtattagctggtcaatcaaagtaccaaactaatgatgttaatttaataatctgacatgacataataatgaagcccaatttggacttaagttcggacgaataatatatataatagataaagaagtagaaccaaatatctttgagaagtggagcttcattctgtagaatattaatatcttatctaaagtttgattgtctgtcacatcgtcaaataaaataaaacaaacaaaagtttgactgactaagcaataataatctgcccattcaacaccaaacactccagattggactatgatttggtcttatgaagctagagcaggttgggtgttgagcttgggattgatggacttgagtcatcctttggccagggcaggccttgactgggccaagatctgcaaagcctatgttgggtaggacgtgggacaatattttagtaaacgttaaactgagcttagttgtaaggttgaacattcataatctaagtcaaacactcaaaactgctcatttataattctatagatgaaatatatttttttaaattcaggataaggataagcaccccattggcttataagattcaattaaggatatacagtacggtcactattcaccctaaatgaaggacaatcgtgtcatttggcccctgaaaggttggactgttaaaacccatttaaacagtctaaacgatccaagcagcataaaaagatagagttcatgattaaatggactaaatgactatttaactcactgtttagtcaataaaaggattacgaccaccacatcggtacccaactaatcaatgttttaaatatataaggtggagtcagatttagtttcttcctaaaaaaatatttgctagcatagatatttttatatagacaaatgtgtatactttcttgtatattaaaattttgcatacatatatatatgtacattttagtggtactatacaaaaccgtttagaccatttaactccatttaaacaccgactaactaaacagcataaacagtaaactactatttacggtttagcatttaggataacactgagtatgatagcctctctagtgtgcaagttccaaagccatcaaatgaaagaatccagggacaataaaaggtgcaaaaaaaagatctaataaataacatgtaggaaaagacaaacaaactgaaacctcaatgctcagtggtcactagaactgacagtacattaaaatgaaagggacaacaacatataaaatattaagttcctaagaaatcacactactgatttcccaaatgcctaacaaagtgatagcttaaaagctagccttataaccaacaatatcaccaaacccactccaaaatggttgaaactcactgggtaaacattaagaactatgttacactatagtggattccttccccatggagcctgacaacaactcaaggatggtcagaatgaaaacactgtctcaccgatttcccaatctcctagctaattctcccaaactaaagcctatgcacaagaataagaccactagtttccgcaacaataacatttgcagcagcacggcaaaagagggggacacagatgagcaacctcgacagtccatatgaagaaatcgag

SEQ ID NO: 35128 - DNA, 1993 bp, Zea Mays
agcaaagcacactgagaaatcttgttggagcgcagttaatgcatgcacacagagctccgtccgtcactttcccctcgttccattcatggagaatatgctccacctagccccgtcgtcccaggcccaggcattggccttggaccgctcctccgtcttctcgcgtgagcacgtgccgccggccgtctccgctgtcacctccctgccagttatcgacatgtctcgcagccgcgacgaggtccgccgcgctatcctcgacgccggcatggagttcggcttcttcctggtggtggagcacggcatcccagaggaggtgatgcgcgacatgctggaggtgtgcgaggagttcttccagctgccggcggcgagcaaggcgtacatgtactcggaggacagtcagagacccaaccggatcttctccggcacaacctacgacacgggcggcgacaagtactggcgggactgcctccgcctcgcctgcccctcgtccttcccggtcggcagcggcacaagggacgactggccgcacacgccccagcggctgaggggtgtcgtggagcgtttcaccgctctgacgagagggctgggggtggagctgctgcggctgctgtccgaggccatggggatccggcccgactacttcgagggcgacatcagcgccggcgacgtggtcctcaacgtcaaccactaccctccgtgccccagcccggagaagacgctcggcctgccgccacattgcgaccgcaacctcatcaccctcctcctccaaggctccgtctatggcctcgacgtcgcctacaggggagagtggataaaggtcgagcccatgcccggtgccttggtcgtcaacttcggccagcaactcgaggtggtgaccaacggattgctgaagagcgttgagcaccgcgtggtgaccagctcgacgctggcgcggacggcggtggccacattcatcatgcccaccccagactgcctcatcggcccgtcaaaggagttcctcgccggggacaagccaccgtgctaccgcaccatcaggttcggtgacttcatgcgcatgtacaacactgtcaagctggggtcatccatcaaccagactacagatcttaagaatatccagaagaagatatgagcatatttatttaccagagagatcgtccggccagcaggggtcctccaagattttattcctttaataaaacgtacgacgagcatatttatgtcaagcaataaaacgtacgacggacaacttttaaaaatattattattaatcggaggcagcatggacgccattcctttatgagatatgctaaaaaaacaaatgtgctgaaatatctcaaagatgagagacatgcatgtggcgatatatgctgtggtataatctaatcattattgtcgttagtatcactgggtttatttctgttttaaaaacaattacccccatgtgcgatattagaaaataatgaaaaatacataacattttaaatttatttctgagctatccacgtatgtcacaatagcacaacggttcattttcgacggcgacggccgagtgggggtatttctatctcgtgactctgtgcgcacagagaagcgagagggcagatgcctccgaagccggtgccgttcgagaccttgcacgggggattggcaattatatttttagagagcgtctacgcgactgcccaacgtctgtcattgtcttcatcgctggttcctggcgtcttcatctcgatcggatgacaagagaagttggacaaggatcaggatcctcggagcgcatgggagggtaagatcaatacagttcgttactgttttatattctgcatattatatatgtcgtatgtagctctgttctatcgtattataatatgttatatctgtctgtcttatttttacagtcatcatgtttatattgttatctgtttatttccagttgttccataataatccatggaccatgtttatatacttattttatttatatgatttacatgct

SEQ ID NO: 35129 - DNA, 536 bp, Zea Mays
ttgccatgccgggtctgtgcgaaccctcatggactgatcaggaagtacgggctgatgtgctgcaggcagtgcttccgcagcaacgccaaggacattggcttcatcaagtcagctgggcgggctatctgaatgccatctcttggacagtgtagtagaggcgatgccacaattttaattactgtcatttagatgttcccttcagaactctgctatttaagtccgccatgtttgtgatggagaactgaagctttgtttgttatactgattatgagttacctgtgctttgcctaagctttcttgtcttctactctcatatttggatggctaaggtgtcataatagttgtacgtggattagatgccttcattttagaaggctgcagtcattgttcgtattaactcgcagcaatagtataattcggacggattagactgattagtagtttgctgcagcatcatgcatagcagagtctgggctctgaactgcagagctcgcttccgttgtgaaaacagcgtaccaccaaggcagcaactgtgg

SEQ ID NO: 35130 - DNA, 2082 bp, Zea Mays
atccttgatagtttaattgcacatcaattatatgggaagattgattgtacaacacttttatccgaaaatggttccaattaagccaaacaacacatgcatgcatggggaagccaccactgtaggcaaaaatctttctgccgaaagccctggctgtggctgcttcttgttcaattattcttcgcctcagatcagaccagaccaggaccagacagtggagcacgccttcgcctcatccatgtttgttaatttcctgctagctgtaatggattgcaatgcgagaaccattatttgtcattccactcacatgcatcatcagcacctgaggggacttttttttctttctcgtctctcattgagttttattgggaaaactacacatgaataagtaaaatttcaagcagcctgcaaaaaagcattgttgctgcatgcagtccggtcatatatatcacagatgtttctgaattatatatatgtacattgggaaacaaatttgtattttcaatatgtttagaaaacgtaatacatgaccaaaattattcaaaacatacaccctgtatatataattagttttatcacagagctctcctgcatccaatagccacatgcattgttgtagatacagtgaacacacagccacaggctgctagctatatatgagccaaactcaaaattatatatgcaaaactcaaaagacaaacagctgactgccaattcagcaacatcacactttttagaagattagaatatgcatcctcccactttattcatttaaataaaaactatttaaaaattcaagaaaaaaaacaaatcttccagatgtccttgagaaattgtaaaatcgagattagaaaaatggcatgtctgagaaaacgccaaaagagattcattccaaactatttctaacgcgataaactatttgagagactcttggatcacaagcaggagactgaaatttctaaggataaactatttgaagtcatcatacacgaaagctaccggccagaggtagtggaatgaactgctcatgttgcagaaaagaaagaaagattggccggcagggaagaggaattgtgcaagcatgtctctcgtagaaagttcggtcaaaaaagagtgaatgaatcagtttgctgcaaaaagaggctagggttccagaagcaataatatcactagcctactctcctgttgctcactgtctgcgttgtcgatccggaattattatttctgggtgcctccaatacatttgtgcagtgatcaaaagaagggtcgggagaccacacgctgtagctatcatggttcatgactcatctcttatctactaccttttctgctaaggtagacagcaggtacggcaaccattttgtgatggatggtgtacatattaaatcattaccgtccatatcagatctaatgtctctagttactctatattttgcaaggaaagccttccactactttcaccatgtttggagtatcaaccacaaacactagatctatattacaaatacattagcattgattacagacagatctatattagacatgagacacgtacaaaaattggtccagtagagcccacttccatcatggcatttggcaagctacgtatggcacaaatggtccccaaagcgttagctaaacctgcacagacgtatggttgcagttgaaacatctgacaacgtctcagtctaaactggtgcagtcaggttgcactagatctagtccgccaaagcaaatcaagatagcatgaaaaccttttcctcggcctaaaaatcacacctgaacatgttcccttctttttggcaaatattatgacgcgtttcatcgtcacaagcaacaaaatagcaaccggagttcaaataaacaaatggaattcaaaagtcaccagagcataagctttattgaccgtcccaatttctcatcagatatattcatccataataataataataatgatacatgaaaggcatgccgtacctgttcaagtgaaagtcagaggatctgattccgttgatgttgacattcaccagttaatgggagtccttagtgcacaacctgctgtgcatctgacatggacatctgacc

SEQ ID NO: 35131 - DNA, 2004 bp, Zea Mays
gtgattaatttgcttttttttggtgggagacgattaatctgctattcttttctgaaggttgtaagcgtggattagatatcttaacttgttgaattgaactagcggggtccttttttggattctgaattgttgatttcctgtagtgttggctgtatttggcggtacacatggctatcaaattatggacaggacaagcatgtggctgcagaatgcctcttaacatgttcggcttgggtatcggtgggggttgtggatttggtcttggactaggatggggctttggaaatgcttttggttgtcagtatcgatcttcaagagttcagttccaaggcattgaatttcagaagaaggcggaaggagatgatgcaccaaaagttgtttcaccggagcttgctcaaaagtctcgtccttatggctagtatgcctgctaccataaaaattcagagactgttttgtgtgatgaatcacagtttaattacatacctacgtgttccttgttagtaatgttatgctacacttattttcgtttctgttgtaaccaggatgaagttaatcgatgggattttcaattaggaagaaatgacactaatgtttgccctacatgctatccatttacttttcatggctgaaggatcttcgctatgatttgtcgctgtgctttatgctgtacagctaccatatcgtgacttggtctgaaatttgaattggcagaaaaatattgaaaataaatttgctgaaaccatcagtattatgatctttcatgtttgcctctcctttaacagtatgagaaccaaagctttgattggtttcttttcttaggacaagcttaaaaataaaataaaataactgctgctctaaaggtacagtttaggacaggtctttcaagttgaaccaacagaaggttaagaaaaaaatacaaaagaaaggcggacattgtttccgatctgtaggtggttgctgcgactgcaccctgggaatcagaacaactgtgcaaagcctctcatatatcaagcaaatggatggtcaaaggaagtagaatcattctttgatgtaatagagcttgctggctctgcctccccagtcctgaaccagtatgactgctggaatgaagctgcgctgctggggacatcctccatgacccattcaaagcccttggggtagtagatccctgtccttgggtgtggtacccacaatgatgtttgtggagacctcgcttctgtaggctccagtcgcttcacaaggttcagagtggatcaaagttaccggagcagagctgccgatttcgcaagcgcatggcgacccatgaatgcaggctggggtgtttatcaggatgcactggtggttatccttggtagcaaccagctgatgccagttcctccttgtttggtacctccctcatcctcaaaccagcttctgattgggcaactaaaatgatggttttgagcctctgattggactcctctggacaaaacaccgccggaactgattctcccaaaatctgaagacaattttgccgaggagtgcagtcttggattgcaatgttttgctactttgtggaatcatgcgactcaccaccaatgctgtagctagcattattagtaaagtggaaccttggccttttgaacaaaagatggaagcaggacacaatcattagaaaactgcacagtaatacacaaattccactatgaagggttgatagctgcaaattgttttgttataaactcattcctcacgcatatttcaagatacatatatctccatggtgaagtttttttttttactttactggatggctgtccccataatttctgtggatggtactcgttacctgatccatcttgccccaaacattctacctgccaccggtggtctgtttcttgtgcacaataatggagatcatgggatctgattctccccttccagaacgcatagctacggtgtaaaactaaagacatagcattttatcgcaccgtggttctgtttctcaggccctccggatttgac

SEQ ID NO: 35132 - DNA, 2289 bp, Zea Mays
gagcctggcctaaaagcgacgggaaagcctatcagccagtgaagcccactacggtccgaccgatgtctcgctgacgtcacctcgtgttcaccagttaccaccggagtccggagtgaagcgcaggtcgggttcgcttttttcctcggcttcttctctctcgtccatcaacccagggggaaggagcgggagggagcgagccatggtagtcagcacgttcaatggacccgggattgggatcgggttcggtgtcggctgcgggttcggcgtcgggtgggggttcggaggaatgcctcttaacatgttcggcttgggtatcggtgggggttgtggatttggtcttggactaggatggggctttggaaatgcttttggttgtcagtatcgatcttcaagagttcagttccaaggcattgaatttcagaagaaggcggaaggagatgatgcaccaaaagttgtttcaccggagcttgctcaaaagtctcgtccttatggctagtatgcctgctaccataaaaattcagagactgttttgtgtgatgaatcacagtttaattacatacctacgtgttccttgttagtaatgttatgctacacttattttcgtttctgttgtaaccaggatgaagttaatcgatgggattttcaattaggaagaaatgacactaatgtttgccctacatgctatccatttacttttcatggctgaaggatcttcgctatgatttgtcgctgtgctttatgctgtacagctaccatatcgtgacttggtctgaaatttgaattggcagaaaaatattgaaaataaatttgctgaaaccatcagtattatgatctttcatgtttgcctctcctttaacagtatgagaaccaaagctttgattggtttcttttcttaggacaagcttaaaaataaaataaaataactgctgctctaaaggtacagtttaggacaggtctttcaagttgaaccaacagaaggttaagaaaaaaatacaaaagaaaggcggacattgtttccgatctgtaggtggttgctgcgactgcaccctgggaatcagaacaactgtgcaaagcctctcatatatcaagcaaatggatggtcaaaggaagtagaatcattctttgatgtaatagagcttgctggctctgcctccccagtcctgaaccagtatgactgctggaatgaagctgcgctgctggggacatcctccatgacccattcaaagcccttggggtagtagatccctgtccttgggtgtggtacccacaatgatgtttgtggagacctcgcttctgtaggctccagtcgcttcacaaggttagtcctttgcttgttcttaacttccctgcaaatggcaatttaatcacttacttcaaagaactgaaatgatggtgcgtgtgccaatacaagccttttgcagtataatatgagatcaatccttgttgttcagccatacttcaagctcatcaaggcggaagcaaccagaatgaacacctatctaatcactgttggtttgacattgcaggttcagagtggatcaaagttaccggagcagagctgccgatttcgcaagcgcatggcgacccatgaatgcaggctggggtgtttatcaggatgcactggtggttatccttggtagcaaccagctgatgccagttcctccttgtttggtacctccctcatcctcaaaccagcttctgattgggcaactaaaatgatggttttgagcctctgattggactcctctggacaaaacaccgccggaactgattctcccaaaatctgaagacaattttgccgaggagtgcagtcttggattgcaatgttttgctactttgtggaatcatgcgactcaccaccaatgctgtagctagcattattagtaaagtggaaccttggccttttgaacaaaagatggaagcaggacacaatcattagaaaactgcacagtaatacacaaattccactatgaagggttgatagctgcaaattgttttgttataaactcattcctcacgcatatttcaagatacatatatctccatggtgaagtttttttttttactttactggatggctgtccccataatttctgtggatggtactcgttacctgatccatcttgccccaaacattctacctgccaccggtggtctgtttcttgtgcacaataatggagatcatgggatctgattctccccttccagaacgcatagctacggtgtaaaactaaagacatagcattttatcgcaccgtggttctgtttctcaggccctccggatttgac

SEQ ID NO: 35133 - DNA, 2077 bp, Zea Mays
ctccgtttccgcttccgaaggcagtctgcagaggggaaggtagccaaagtcagactctgttcatccaaccccaaaaaaacctacctacacaaaccaaagtcaacgccgaaaaccaagaacaggggaatcctttctctttctccctctagaattcctctcttgcctcctgcgaccatgtccgcgcgcccgccgccgccgccgcgcccgcgtctggcgctgccaccgcgctcaacggcggagtcgctctttacgggcgccggcgacgccagccccggcccgctcacgctcgcctcagcgctcttcccatctgatgccgacggcggcggtggccccggaggcgcctcctcctccgcggccggggccgcaaccttcacgcagctccttactggctccctcgcgccgcctccgcagcagcagcagcatgaagcgcagacgggaggaggaggggtcgcgagggccggcccggcgctctcggtggcgccgccggcgtcctcgttcgctggcgcgtccctgttcacggtgccccccggcctcagcccctccggtttgctcgactcccctgggctgctcttctcgccggccatgggggggtttggaatgtcgcaccagcaggctctggctcaagttacagcccaagcaacccattctccactcagaatgtttgatcaccttgaacagccatctttctccacagctgcaacaacttctggagctctacaccatatgaattctgcagccagtatggcaggaatttcagatatgacaatggcaacagcaaacaatgagaatccatcctttcagtctgctgaggcatcccaaaggtatcaagttaatgcccctgttgataagccagctgatgatggctataactggcggaaatatggtcagaaggtggtaaagggcagtgattgtccaaggagctattacaaatgcacccatcccaattgtcctgtcaagaaaaaggtgccaagagagatcaggacaatatatacgggatgtctgagcaagcatatggtttaagtgatggagatgatatggatgatggtgaatcaaggccacacgaagtggatgacgctgataatgagagtaaaagaaggaatatacaaatttcttcacaaaggaccttgtcagagtctaagatcattgtgcaaacaactagtgaggttgatcttttggatgatggttatagatggcgcaagtatgggcagaaggtagtcaaagggaattctcatccaaggagttactacaaatgcacatttgctggatgcaatgtccggaagcacattgagagggcttcgtcagaccccagggctgtcataacaacctatgaaggaaaacatgaccatgaaccgccggttggtcggggcaacaaccagaatgcaggaataccacaacagaaagaagggcagaacaatatatcaagtaatcaagcttcacttttcgaggccagattttagcaacgctaaccagatgccaattggaatcttacaattcaagagcgagcaatagtgacatccatttttgactctgctgggaaccttgctgctcgctgttgtttggatgacgttcttttggtaaataccggatgcctgcaattcgtacagtcatatggcatcaaagtttcttaaaagcctgataatcaaatggtatcagtttgcagtttttcccccatagttacacatgatagcgggtacggcaccatccatttctagtatgtacatgttattaagtcgaagcatgcagaatgtgatatcagctagatggaagttgtttatttatatgtgcttatgatgttctatagatggatcagtggtatagtacatgttcatcttctgattttattcctgacatccaacaagatcttgtatgtgtattgtaataagattgaaaagagaaatttgaatgtacagatgtttttcagttacattttgcttcctgtaatttgtaacttcaaagatgttctagttttctatgtccttttcctttcctcccaaatttggtttgctcttagtcttctgtgatcactattatcaacaatacgttgaaggtactacaataaagcaccattttgcatctg

SEQ ID NO: 35134 - DNA, 1832 bp, Zea Mays
tgtaacttgtcagctcctctgcatgtgtacttccgaggccaatatggaggcacactatactatagtagccaaagcatcaacttcggcaatcatggaccacagtgtgtactactgccttgtagctcttcttccacttgtttacttccttctcaagtcgtcgtggaagaaagctcccttcggatctggtagccgccatggactaaagctccctccaggcccatggcagctccctgtcatcggcagcatccaccatctccgcggctccctcgtgcaccacgctctgagggacctatcgctccgccatgggcctctcatgttcctcaagctgggcgaggtcccagtggtcgtagcatccacgccggaggctgcgaaagaggtgatgaagacccacgacgccatcttctcgaccaggccactgagctcaaccattaggacggtctccaaggatggcctgggcatcgtctgggctccgtacggcgaccactggcggcagctccgcaagatctgcaccatgcagctgctcggcgcgcggcgcgtccagtccctgcggcccgcgcgcgaggaggaggcgttccggctggtccgagccgtcatgtcctcgtccaccgcggcaggaggagctgcgccgccgccgctcgtggacctcggcaagctggccgccgtgtacgtcgccgaggcgtcgttgcgcgccatcttgggcagacggttcaaggtcgaggaccgggacacgctgctgcgctacgtggatgacggcgtccggctggccggcgggttcacgcccagagacctgttcccgtcgtcgtggctcgtccgcgccctgacccaccgggccgtgcgcgaggtggatgcctaccgagactccttgttcgccttcatggatgtagtggtaggtgagcgcttggatcgacgagaaggtcaactgaagaagaggaggaggagggagaggatctgattgacgttctcctccggagccacaaggaaggaaacctcccgttccctctcaccatgaggacaatcgaagcggtcatatttgatctgatcggagggggtatcgagacagcaacaacaacgctgcagtgggcgatggctgagctgatgaggaatccaggcatcatggccaaggcacaggccgaggtcaggggattgttcatgggccaaaccaaggtaaccgaagaccggctaggtgagctaccctacctgcagctggtcatcaaggagacgctgaggctgcatgtcccggggccgctgctgatcccaagggagtgccaggagcagtgccggatactgggctacgacgtgcccaggggagccatggtgctcgtgaacgcctgggccatcgctcggagcccggatcactgggaggagccagacgcgttcgtccctgagaggttcgtcggtgacgcgagggatttcaagggcaacgacttggagttcatcccgtttggcgccgggaggaggatctgccctgggatgtcgttcgggctggccagtggccaacgtcgagctcggtctcgccagcttgctcttctacttcgactggagtctcccggcgggcgtccttcctgctgagatggacatggccgagaccatggggatcactgctaggaggaaagcagacctcttcttgtctgctactctgcgtgtcaaactgccttaattttcatctgatctgatggtactctatgcctatgagatatgcagtgactgttacgggacgggctatctgtgctgcagcgtgtggagcagagtatttccagtttttctcccttagaccgtcttccacagttcaccgcctaaaacactattttacgttgtatatcccaattttcgtg

SEQ ID NO: 35135 - DNA, 1396 bp, Zea Mays
cttatatctgacgatatatcgataggggctctctttccctgtctttcctcttcctccttttcttcctccatccttcacttgccggctgcttgattcttacgaccggtgttttaagaccaactgaggaaaggtccaaatgatgacatatgttggcaagaactggcccatggctgatgcaatcaaaggatcttcagaaagagcttcgaaccaatcccacagagatgtcactcgatccagaagcggaggtccagagagatggagaggccagacatctggagaagttgctgagatgaacggacgacgtcctcctccatgcagtggcacggctcctgccaccgccggtcgagcttcagagcaatcaacccggcgcagtcgagatccaaggctagcagcagctgcatctctacacaccccgcggccgccacccattcagcaagaaacacccatggccataatccaaccacctagccggcaacaagtcgttgtattaaagatagcaatcgatcctcgccatggcctcccgttgctcttgtcccactcggttgagcaaccagcagccattccgcagcagcaggcagccactccatctggcctgccggttcatacgttcagggtagcgactgaccctagggacggccacattgcgatcttgtctcacacagttgaagcaacgactcggcatcatgctgctgccagctctgtggccgccgctgatcaacccggtggcagcggtgtgatgagggccagagaagctcgtgatggcaacagccagaccacgacgcggatggtgtttagaaccgcgctgaaagagttcgtgacgaaacaaatcgcggaaacaaggggccagcaagctagcctcacaacagaagagctccgtggtttcgttgtgcgcaaggccgtggacaatatcatgcggtcagagaaacacatccccggcacacaagagaggattgggaagtacctgaggttctgcagggggaaaataaggaagctcatacaggagtactttcacaagtacgagggaagatttcctcggtgaaacaacaaaatgatgaacatgagcactagcttgaggaggaatgtttggacaacctgttcacagaggcagggttactgtgcttgtttgtttctgtggtcggtctttatgatgaacatcgatcgataatgttgggtctaacggttataaaaaactctggtgtggtgtgttttcattttccatcttaataccacctcaaacttgtgtttggattcggtcaggtgtgatcagaacttcagtcatatcttaccctcattaattattgatgtggtcactgcaatgcaaactggttttcaaccaggaatataatgctactctcttcttttcaatttatatatcgttttgactttttaaatacat

SEQ ID NO: 35136 - DNA, 1081 bp, Zea Mays
tcaccgccctcggcagttgaatagcaagtattgaatggacggctgatccagcggcgcttgatcctatcggacggtcgcgaggatcccaggagccctatatccccatcctcgccccccacctccttcgcttcactcgcgtccgcccccgccgccgcctttcgtcccagcccctaaaccattctccattcctctcctcagtttagcacaatggcactggctaataagcttggtggtctgctcaagaaagccacaagttcaaatccgtctgtctaccaagcaatcagatgcatgtcatccaagctctttgttggagggatttcttatcaaactgatgatcacagtctcagggacgagtttgccaaatatgggcaagtcattgaagctaggattatcattgaccgtgagtctgggaggtctagaggttttggctttgtaacttacacgtcttctgaggaggcttcagctgccattactgccttggatggaaagactctcgatggacggagcatacgggttaatcatgctaacgagaagaccggtggctttcgtggcggcaactttactgctggaggtagcgacagctttgccaacagtaactttggttctgacagtagttttggtggaaacggtgctggtggctttgatgcaaccggcggttccacaggcgatgatgggttctctggcacacctgatgataactttggtggtaacaagaatgaagaaaccatggatgatatcttcaaggacgatgagccggacagctacgccgacaagaggagctagtttgtgccttctccaaagagtgctcatcaatacgattccagaacgatatgtattggctagtgtttgctgttaacatcatagcggcctgtatgttcaaataatggagcgagtaattctgatgagtttgagttgtcgggggctgtggaactttcaaacatggcgtgcatccacgttataatgtcgttttgctagatgctatgctttcatcgtggcttggaaatcggggtcttgtcaagcttcagctcagacggatctgtaaatggtaccgtaagtcaaattcaaattatgtgcaaaggca

SEQ ID NO: 35137 - DNA, 1155 bp, Zea Mays
ccagccttagtagccttgatataaacagtttagcacaatggcactggctaataagcttggtggtctgctcaagaaagccacaagttcaaatccgtctgtctaccaagcaatcagatgcatgtcatccaagctctttgttggagggatttcttatcaaactgatgatcacagtctcagggacgagtttgccaaatatgggcaagtcattgaagctaggattatcattgaccgtgagtctgggaggtctagaggttttggctttgtaacttacacgtcttctgaggaggcttcagctgccattactgccttggatggaaagactctcgatggacggagcatacgggttaatcatgctaacgagaagaccggtggctttcgtggcggcggtggctatggtggcggcggctatggtggtggtggaggctatggtggtgctggtggaggcggtggatacggtggcggccactatggtggtggtggtggcagcggtggatacggtggcggcgactatggtggcaactacagcaacaggggtggtggtggtgattatggagttgctggtggaggtggaggcaactttactgctggaggtagcgacagctttgccaacagtaactttggttctgacagtagttttggtggaaacggtgctggtggctttgatgcaaccggcggttccacaggcgatgatgggttctctggcacacctgatgataactttggtggtaacaagaatgaagaaaccatggatgatatcttcaaggacgatgagccggacagctacgccgacaagaggagctagtttgtgccttctccaaagagtgctcatcaatacgattccagaacgatatgtattggctagtgtttgctgttaacatcatagcggcctgtatgttcaaataatggagcgagtaattctgatgagtttgagttgtcgggggctgtggaactttcaaacatggcgtgcatccacgttataatgtcgttttgctagatgctatgctttcatcgtggcttggaaatcggggtcttgtcaagcttcagctcagacggatctgtaaatggtactgaaccctacattttatgttttctgtggatgctctgcgtatgtgacaaaaaagcagtaaaaatgaagtgtgagtttaatttcagtac

SEQ ID NO: 35138 - DNA, 669 bp, Zea Mays
cacctccttcttgaattggtgggaggaggtttcaaaggtggtctcaggtgtcaccagaaaaggccttaactccctcattatactgggtgcttggactattcggattcatcgaaacaaatgtgtctttgatggattgtctcctttgcctcacctatatcctggcttgggcagacgaggagagaagtcgttgggaggcagctggggcgaaggccctatgttctctggctgcttctgcagctgctccctagagtggtgtgttggtagatgagttcttttttgtatgctattttctggcccccgtgaggaggcctgctgttgtttggtctattttagacatttttcctatcttcttaatatataaaggggcgcagctctcctgcgcgttttcgagaaaaaaaatatttagatgaagcattcactagacttctctcagaaaaacaatagtgaaaaaaaggttaagaacattcttgtcaggtttgcatcatattgagtttgagaaaacaaaatattagttaaatatgcaaaatttagccttcctttcccaaatatacaagtccttttttatattacgtttctgcatttacggtagtttctttcaaaacatatttacgtgtttatttgcatatagtagttctatgaatcacgttggtgaaatggacaaaactagac

SEQ ID NO: 35139 - DNA, 288 bp, Zea Mays
atggagcagctgtcagcctgtcattgtctgaattggaacctgggtggttcactgtcactggaggatggtggagggaggagggggggcagagaagaggagaggctgctggaagggggcagaggagaggagaggcggggtgctggctgctggaggatgtgggcggttgccggcagcgacgatggaggagagggagtcggggcggcggcgctggtccgctggaggccggccggcggcggcgctggaggagatgagggcggctgcggcctggtgctcgctgctcccacgtag

SEQ ID NO: 35140 - DNA, 314 bp, Zea Mays
aagaacagttctgagaatggcttccctctccaatgagagcagcatccaaagatgatagttgtccaaagggctatttaacatgagcacatgccaacatggcacgatttttcaaagcaatttcactaacttggcacatggctttctcatcgttcccataaacatgtttccaccagctctgctccattgtattaggacaccgaagaaatggtgactatcagaccttgcaaaagatttgaatcaacatagtttcctataagcctggtagtacatactagggccataaaggttgtgcaggcctcccagttgatttcctg

SEQ ID NO: 35141 - DNA, 2146 bp, Zea Mays
attgccatctctttcaatcaccttcttcgtttcatcctctgattctccccctgctggtctgctctgctcccatcccatggagcccgacgccgcccaaaaccctagccccagccccgtccccccgcccatctccgcctactaccagacgcgcgccgaacaccacgccgtcgtaactagcgactggctcgcccacgccgccgccgcagccgcagccttccccggcgccgataccgccgatgccgccccgcccccgtcccccgggggcggcggcgtgatcgaggagttcaacttctggcgccgcaagcccgaggccgccgaggcggtggccgccatcatggctctcgccgccgtcatccgctccagcagggccaccaccatgatggagctcgagatcgagctcaagaaggcatctgacaagctcaaggttgataacccggccgattcacctgctcggctgctctgtcgttcccgcttgctgtgctagcgtatattctatatttctattattctttgttgatcagcatgattccctgagctgttcttgcattctgtgtgctgatggcttatccgttgcggaaatttaagcaggatagtaaatcagaatttcgtttgcataaaagtggctcagaccttaattagtgcttctgccctagtttttagtggcacactctcacctttattacaatgctctgaatgacatgtatagtcgattgaccacacattatactatggaaagccaagcatttatttgttataagcattctaattataatacacaaaagtcctcacgttatgccgttaatactcatggttactggccccatcatgagaagcttgagttgtgtgcacatctattcctgaacagtaatgtcagctcttgttttttgcactgtcttcctttatagcttttatcagcgtattctatcataattattgtattgatttatcattgtgaatgacatatcattcattatgctgctccgggttctagattaaatttttgtgtacactttccatgggaattgacactaacagtgcttatgtattccagtcctgggatgctacatccatttctctttctgctgcttgtgatttgttcatgcggtttgtaacgaggacctcacatctggagcatgagaagtttgatgcagcaaaatcgcggctaattgagcgaggagaaaaatttggggagatatctttaaaggctcgcaagacaattgcaatgcttagtcaggattttatttatgatgggtgtactatacttgtccatgggtattccagagtagtactggaagttctaaagcttgctgcatccaatcgcaagctcttccgggtactatgcacagagggcaggccagacagaactggtttaaggatgtcaaatgaacttgcagcattagggatccctgttaaggttctaattgattcagctgttgcttattccattgatgaagttgacatggtttttgttggcgctgatggggttgttgagagcggaggaataatcaatatgatgggcacttatcagatagctcttgtggctcatactatggacaaacctgtttatgtggcagctgaaagctacaagtttgctcggctatatcccttggatcaaaaggacatgacgccagctcaccgaccaatagattttggagtcccaatacccattggtgtggaagtggagacatctgcaagagactacacacctccccaatatctcacactcctcctgaccgaccttggtgttctgacgccgtctgttgttagtgatgagctcatccaactgtatctatgatctttgcggcaggcgccgttgtttcattggcatgtaacatctacagttgagtccagggtttgccctatcagttttgactatgatgtatgcttgactttgtggtgctgatgcgatgtagaagaatttctcggaacgattatgctgagagaaatcaacagtttgtaagagcttaaagtacagtcatggttacgaatctgccccagaccattttcagcactaacctatttgtaggacatgctctgttaaaattatggttccctcaaacagtaagtgtaaatggatctccacaacagaatatgaatccattagtattgcctatatacttgtatgcttgctggaaatataatttag

SEQ ID NO: 35142 - DNA, 1594 bp, Zea Mays
atataaaagctgccctcgcgacctagcaccagcccagccactccactcctaccccacacagaagcggcggcggcggagcaaacgcaggcgaaggcgagggtgtgagggaaggagcaccagccatggtgcacgtcaacttctaccgcaactatggtaagacgttcaagaaaccaaggcgtccttatgagaaggagcgtcttgatgctgaactgaagctggttggtgagtatgggctgaggtgcaagcgtgagctttggagggtccagtatgcactgagcaggatccgtaatgctgcaaggcacttgctcacccttgacgagaagaacccccgtcgtatctttgagggtgaggcacttcttcgccgcatgaaccgctatgggctgcttgctgagggtcagaacaagcttgattatgttcttgccctcaccgctgagaacttcctcgcaaggcggcttcaaacacttgtcttcaaggctggcatggccaagtccattcaccatgctcgtgtcttgatcaagcagcgtcacatcaggtacgcttacatggctgcttgtagtacgcttgctcttggtattgtttatttaaaaacctccatttcaatggaagcgcctgatatgagcatggagtattaatgatgctgcctatgttgtaataaatgaattgtcagtgattacttgcatgtcttgtgaaacatttcatgatttctttgttctctgtttgactctgtaaatgcttgtgcctatggattaacttctcaaaatagcacataactttagtttatgtttttaagttcattgcttcgtttgcctgtccctaaatgttttcttgggtttataatgattttctgtagtcatttcaggcagtgattagaataacactattgaagtatatatctgtgtttatcttaagctgtttctgtaacattaaagaactcatgatataccatttttggaatctactatcttgtatagattagactagcatggttagttgtcccctgaatctattatcttgctgaaattatttttaaactatgatgttaaaggagatatcaatgtttgtttgtggaaccttgcagggttggcaggcaaattgtcaacgtcccatcattcatggtgagggtggagtctgagaagcacattgacttttcactgtcaagcccattcggtggaggccccgcaggaagggtgaagagaaagaatcagaagaaggcaagcggtggcggggatgctggtgatgaggatgaggagtgaggatggacaagtagtgttacaccaatataataatattatctagttttcttgaacttgttcgaatgatgagtgcttagctgtgtcatggatggtccattttatcttgtggtattatcagcctttacataactgctatgtttggatatgttcaattctgttgcaattttatgtggttgtttttttgcgttttgttgctattaagctgttctttcaatcggctaatgatttgcttaaatgttatttataatctgcttcagcttgttgtactgattgggtatatgatacgcttaaaattttgttgctgtgacagtattgacaactggtctgtgaacatttgatat

SEQ ID NO: 35143 - DNA, 955 bp, Zea Mays
gtaacttgctcggcccactagggttttggggtggcatataaaagctgccctcgcgacctagcaccagcccagccactccactcctaccccacacagaagcggcggcggcggagcaaacgcaggcgaaggcgagggtgtgagggaaggagcaccagccatggtgcacgtcaacttctaccgcaactatggtaagacgttcaagaaaccaaggcgtccttatgagaaggagcgtcttgatgctgaactgaagctggttggtgagtatgggctgaggtgcaagcgtgagctttggagggtccagtatgcactgagcaggatccgtaatgctgcaaggcacttgctcacccttgacgagaagaacccccgtcgtatctttgagggctggcatggccaagtccattcaccatgctcgtgtcttgatcaagcagcgtcacatcagggttggcaggcaaattgtcaacgtcccatcattcatggtgagggtggagtctgagaagcacattgacttttcactgtcaagcccattcggtggaggccccgcaggaagggtgaagagaaagaatcagaagaaggcaagcggtggcggggatgctggtgatgaggatgaggagtgaggatggacaagtagtgttacaccaatataataatattatctagttttcttgaacttgttcgaatgatgagtgcttagctgtgtcatggatggtccattttatcttgtggtattatcagcctttacataactgctatgtttggatatgttcaattctgttgcaattttatgtggttgtttttttgcgttttgttgctattaagctgttctttcaatcggctaatgatttgcttaaatgttatttataatctgcttcagcttgttgtactgattgggtatatgatacgcttaaaattttgttgctgtgacagtattgacaactggtctgtgaacatttgatat

SEQ ID NO: 35144 - DNA, 1181 bp, Zea Mays
cttccgtctgcgctgctctcctgccgccgtcggtaatcaagtgcctaggacttggtccctgctgttgtctaggagattcaacctccacccccaccggcaatcaaggcaacttgtggcacctcatggatcctaggcagccatcaacgagaggtcgcaggtcttcgttgcatgctgccataagtgccattggaggagtctgacctgcacttcgccaagaatctagaagaagcccaatggattttagtactgctgcaaccccaccagcctgcacacaacatctatctcaacatgagtcgacagtcggcggtgggaatccctcctggatgtctgattatagatctgatgttgttgaggaccttgataatgaagtgaaagaattgccagggctgaatgaaataaactcacagccgattaagaggggtcgatccaagaatttcagtgtagaagaggacctaatgttggtttctgcttatcttaataaggaagtgaatatttttcaaggttactatgatgccatagaaaggaaagatcaaagtggcaagacgagtgatgacaagcttgctgaagcaaaggcagaatttcgggaaagacaacatgggagggcattctctgtcttccatgtgtggatgattcttaggcatgagccaaagtgggcattcagagaatcaaagctaaaagacccacaagaaacaaataatgctagtagtgatgctcctatcaacattgatagaccaccagggagaaaagctgagaaggaaaaagcacgggctagaaagcatggtgcctgtgatgttgatggtgatcctttctttgaagaattaaaaaagatgagagaatcccaggaagaaaatgacaaagaccgaaaggcccttgatgagaagttctatgagttggaaaagattaaggttgaagcagagcaagatcgtcaagtcaaagagataatgcaaactgacacaagcacaatggatgacgaatcaaaacaatacttcaagttgatgaaaaaagagattttgattcgtcgttttgggagtagtcagccataggtgatttagtttttagaattttagttcattattgccataagtctgcatgtaagtacttgaacaatctgaggttaacaatgttcaaaactcataaaaataatgaagtgcatttgctaagtttagcattacattcttttg

SEQ ID NO: 35145 - DNA, 1264 bp, Zea Mays
aaattattctgaggaaacttccgtctgcgctgctctcctgccgccgtcggtaatcaagtgcctaggacttggtccctgctgttgtctaggagattcaacctccacccccaccggcaatcaaggcaacttgtggcacctcatggatcctaggcagccatcaacgagaggtcgcaggtcttcgttgcatgctgccataagtgccattggaggagtctgacctgcacttcgccaagaatctagaagaagcccaatggattttagtactgctgcaaccccaccagcctgcacacaacatctatctcaacatgagtcgacagtcggcggtgggaatccctcctggatgtctgattatagcactaccacctcctagggggattattacacttctctactcaaccaggaggatgcaaatgttttcagatctgatgttgttgaggaccttgataatgaagtgaaagaattgccagggctgaatgaaataaactcacagccgattaagaggggtcgatccaagaatttcagtgtagaagaggacctaatgttggtttctgcttatcttaataaggaagtgaatatttttcaaggttactatgatgccatagaaaggaaagatcaaagtggcaagacgagtgatgacaagcttgctgaagcaaaggcagaatttcgggaaagacaacatgggagggcattctctgtcttccatgtgtggatgattcttaggcatgagccaaagtgggcattcagagaatcaaagctaaaagacccacaagaaacaaataatgctagtagtgatgctcctatcaacattgatagaccaccagggagaaaagctgagaaggaaaaagcacgggctagaaagcatggtgcctgtgatgttgatggtgatcctttctttgaagaattaaaaaagatgagagaatcccaggaagaaaatgacaaagaccgaaaggcccttgatgagaagttctatgagttggaaaagattaaggttgaagcagagcaagatcgtcaagtcaaagagataatgcaaactgacacaagcacaatggatgacgaatcaaaacaatacttcaagttgatgaaaaaagagattttgattcgtcgttttgggagtagtcagccataggtgatttagtttttagaattttagttcattattgccataagtctgcatgtaagtacttgaacaatctgaggttaacaatgttcaaaactcataaaaataatgaagtgcatttgctaagtttagcattacattcttttg

SEQ ID NO: 35146 - DNA, 1686 bp, Zea Mays
attattacccgctaatggttaataatggtgaagtacaaagccaacttcttataatgggtaaaattctaaatttctgccttagaaagatagtggatccaatctttgaagtggtaaacggaggaagtccaatattaaaactggtaataattggcagaaatctcatgaaatcaaaatttactcctagatgacttgctaattggtgctaaattcatcgaggcacgcgaactcaaatcaagatctcttcttatgagtttgcttggcggagctcgattcgctgcgtcgctgagcctgagtaatcgattcgtgctgggcggtggcgtggtcggagggatctgaatcctagcgccgtccgtatctgaaacccgcgccggcgagctgctcggcgcctcggtggcatgggtggctggaaagcgggggagaggagaagcagcggagatatgaacggaggcggcggcagcagccgggacgagttcgggcgggcggtggcgcgggccgcggtggcgcaggcactgcaggccgcggggttcgattgcgcgcaccgctccgcggtggacgcggtcgtcgacaccgtcctgcgctatatcacccacctgggccggtctgccgccttccacgccaacctcgccggccgcgcgcacgctaatgagctagacgtcatccaggcgctcgaggaggtcggcgccgacacgtatggtttcgctggcgcggcaaccacgggccactgcctcgtcggctctggcgtcgtcaaggacctcatggcgtttgtccattccaaggacgaggtgccgttcgcgcggccgctgcctaggttccccatccagcgcgtggagccgcagccttctgccagcttcactgtgactgggagggagactgggatgaagcacgtgccggagtggctgcctgctttcccagatccgcacacctatgtgacgacggaggtgtgggttgagccgccggcgaccaaggacagggttgacaaagtggagcaggtgcggcaacgaaggaaagctgagaagtccctgctcagcctgcagcgaaggctggctatggctggtgcggataggtttcgtccagctgtggcacatgataatgcgctgaaggggaaggagatacaggcagctgggacgaagagaaatccatttcttgagccagcattgttacctggacagaaggatgtatcagaggttgatatgcctccggaaaagaagaaattctctgtccttgaggcatttgcaccagctattcaagctagaaccatcagggagattgatgctagtgctgggttggatcaaaatcaaaggaacattgttccaaaagagagggctccagttcatcttaagattggatttagtaataagtcattagcagcagctcagaattcaagagccctggatctgagggatgatcttttcttcttgaaagaggaaacaaaggatgataagaagcggagagcgggcatgatattaagggcatcaatggagaacccacaagaacttcctcagctctaaagttgtttatggaggaagtctggtactaatagtggagtcgcatcgtgttgttgtgatcatggaacttcagtttctagaatcttgaggccatgtgtctgtgatgcaaccttcctcagaagcttaacctgcacccatctcccgactttacattttcctcgaatcaccaggcgttgataat

SEQ ID NO: 35147 - DNA, 1003 bp, Zea Mays
ccagaagtcgtgcgctgctatcgatttcctgttgtgctcccggacaacgacctctgccccaactagaaggagaacttatgtttatatggacttcctaatgagacatgggaaataaacttgcctgctgaagaggtccctcctgaactgccagagccagctcttggaattaattttgctcgtgatgggatggatgaaaaagattggctatcacttgttgcagtgcatagtgattcttggctaatgtctgttgcattttattttggagcaaggtttggattcgataaagaatccaggaaacgtctcttcaccatgatcaataaccttcccagcatatatgaggttgtcacaggaacagccaagaaagagcccaaagaaaaaactcctaaaagcaacattaagactaacaaatctggctcaaagccctcgcgccatgcggaacccaactcaagggtcccaaagatgccacctccaaaggacgaggagagtgaagaggaggaaggggaaccacaggaagaccaggagagtgcgctgtgtggcgcatgtggcctaggttatgacgacttctggatctgctgcgacctatgcgagacatggttccacggcaagtgtgttaagatcaccccagctaaagcggaccacatcaagcagtataagtgcccctcctgcacgggaagcaagagggccaaggtttgatccacgatccaaggagcctttgacgagagctgtaagctgactcttcgtgctagggcagctaatagattcgaatgcttgttttgatacaaattatgagtactgacgaaccgtaaactgatgtagtttgtgtggccctcaaagcatctatgtcctgacttgtgtggtttaggtttcctttggcacagtttctaagagctgattgtctatgaatctaatatgagttttgtcaattagagagaagttgctatgctgaatttatgagctgattttataaagtgatgatataaaataaactaaaagaccagagccg

SEQ ID NO: 35148 - DNA, 1168 bp, Zea Mays
cctaattcacgtcctcgtcctgaagctctcctcgcccctccctcccaaactccagcggcccccctgaccaagctccggggacggatggacggaggagccggctttccgggcacgcagccggtctcccgctcgccggaggacgtcttccgggactaccgcgcgcgccaggccggcctgatcagggcgctcaccaccgatgtggagaagttctacgtgatgtgcgacccagagaaggagaacttatgtttatatggacttcctaatgagacatgggaaataaacttgcctgctgaagaggtccctcctgaactgccagagccagctcttggaattaattttgctcgtgatgggatggatgaaaaagattggctatcacttgttgcagtgcatagtgattcttggctaatgtctgttgcattttattttggagcaaggtttggattcgataaagaatccaggaaacgtctcttcaccatgatcaataaccttcccagcatatatgaggttgtcacaggaacagccaagaaagagcccaaagaaaaaactcctaaaagcaacattaagactaacaaatctggctcaaagccctcgcgccatgcggaacccaactcaagggtcccaaagatgccacctccaaaggacgaggagagtgaagaggaggaaggggaaccacaggaagaccaggagagtgcgctgtgtggcgcatgtggcctaggttatgacgacttctggatctgctgcgacctatgcgagacatggttccacggcaagtgtgttaagatcaccccagctaaagcggaccacatcaagcagtataagtgcccctcctgcacgggaagcaagagggccaaggtttgatccacgatccaaggagcctttgacgagagctgtaagctgactcttcgtgctagggcagctaatagattcgaatgcttgttttgatacaaattatgagtactgacgaaccgtaaactgatgtagtttgtgtggccctcaaagcatctatgtcctgacttgtgtggtttaggtttcctttggcacagtttctaagagctgattgtctatgaatctaatatgagttttgtcaattagagagaagttgctatgctgaatttatgagctgattttataaagtgatgatataaaataaactaaaagaccagagccg

SEQ ID NO: 35149 - DNA, 1937 bp, Zea Mays
cgaaatgttaatatctacggactatattgagaaaagcaatggagcagggccattcagctttgagtcatcaggagggtcagctgggagcctgccaaagcttcatctcaacccttatagctggtctaaggtgtcgagtgtgatatacttggactcccctgccggcgtcgggctttcctactcaaacaacgtttcggactacgagactggcgacttcaagaccgccgccgattcgcacactttcctgctcaagtggttccagctctaccctgagttcttggcaaatccgttctacatagccggagagtcgtacgctggcgtttatgtccctaccctttcaagcgaagtcgtcaaaggaatccacaaaggagtgaagccagttataaactttaagggctacatggtcggcaatggtgtgtgcgacaccgtctttgatggtaatgctcttgtgccgtttgcgcacgggatggctctcatttcagagagtatatacaaggaagccagcactgcatgtcaagggaattactggaactctagcagtgcaaaatgcgacgaggcgctgtcaaaagtcgagacggaaatcgacggattaaatatctacgacatccttgagccatgttaccacgccccagctgataccaaacaagcagcagtgaccccacaggcacagagtactagcgagctgcctcagagtttcaaagacctcggcgtgaccagcaacaagcctctccctgtaaggacaagaatgcacggacgggcgtggcctttgagagctccggtaagagacggccgcgttccgtcgtggcaggagctggcggctgatgtagcttcgacttccagtggagttccgtgtatgagcgatgaggttgcgacagcgtggctaaacaacaatagcgtcagatccgctatccatgccgaaccagtcagttcaatcggaccctgggaattatgcacggataaactggattttgatcatgatgccggcagcatgatcatctatcacaagaacctcacgagtcagggctaccgtgctttcatctacagcggcgaccatgacatgtgtgtaccttacaccgggactgaagcatggactgcgtctttaggctacgccgtcgttgatccgtggcgacagtggattgtcgacgaacaagttgccgggtacacccaaggatatgaaaagggccttacttttgccactattaagggtgctgggcacacagttcctgagtacaaaccacaggaagcactagctttctacagccgttggcttgccggtgctaaactgtgaggaggcctattttgtgtgcaaaggtcatgcagtactgaatcaaacagaagttggataaagcatgcagcaataaggcagtcgaaggatcaaagtatccaacgcgccaactacaatgttgcattcattttcacatgttataccaatgcagttgctaattacctgcattgttcatgagttcacagtccatctaattggttgaccacaccgtctcatcttgcaccactatatacgttaactttattttagccttttaataccatttgactgcacccacacatacgccagaaaacgtcgtatctggccagccaacatcttacgaacctgcacctgagcgcacaaccatccaatcatgttgagtgtgaccaaacatttgtgaaaattttcccgtgattttttttaataatagtatatacggtggttgggctgtgcggctgtgcctcttggtgtccatgtctctgatttattctgatcgttcgacagcgtaaataaagttattacggtaatacaacagtccctccaccccccaatgttgtggcagcgtggtggtcgatgaggagtacgcagaggagagtagctcgagattaggaacgcagaatgtagcgaggacgaagaggaggactgtcgtcgccgacggctgaataggcgccaccat

SEQ ID NO: 35150 - DNA, 2066 bp, Zea Mays
accaaactagctatatacatatagtactctactccgtttttagcatgacacgacgagctactagttagcgtggggttatatgtatatggacatagatattcaattctagacgccagaacaagtagtgacgaacaaagatgcccatgggggaaaaaggcatattgcaatagctacggggccattcagctttgagtcatcaggagggtcagctgggagcctgccaaagcttcatctcaacccttatagctggtctaaggtgtcgagtgtgatatacttggactcccctgccggcgtcgggctttcctactcaaacaacgtttcggactacgagactggcgacttcaagaccgccgccgattcgcacactttcctgctcaagtggttccagctctaccctgagttcttggcaaatccgttctacatagccggagagtcgtacgctggcgtttatgtccctaccctttcaagcgaagtcgtcaaaggaatccacaaaggagtgaagccagttataaactttaagggctacatggtcggcaatggtgtgtgcgacaccgtctttgatggtaatgctcttgtgccgtttgcgcacgggatggctctcatttcagagagtatatacaaggaagccagcactgcatgtcaagggaattactggaactctagcagtgcaaaatgcgacgaggcgctgtcaaaagtcgagacggaaatcgacggattaaatatctacgacatccttgagccatgttaccacgccccagctgataccaaacaagcagcagtgaccccacaggcacagagtactagcgagctgcctcagagtttcaaagacctcggcgtgaccagcaacaagcctctccctgtaaggacaagaatgcacggacgggcgtggcctttgagagctccggtaagagacggccgcgttccgtcgtggcaggagctggcggctgatgtagcttcgacttccagtggagttccgtgtatgagcgatgaggttgcgacagcgtggctaaacaacaatagcgtcagatccgctatccatgccgaaccagtcagttcaatcggaccctgggaattatgcacggataaactggattttgatcatgatgccggcagcatgatcatctatcacaagaacctcacgagtcagggctaccgtgctttcatctacagcggcgaccatgacatgtgtgtaccttacaccgggactgaagcatggactgcgtctttaggctacgccgtcgttgatccgtggcgacagtggattgtcgacgaacaagttgccgggtacacccaaggatatgaaaagggccttacttttgccactattaagggtgctgggcacacagttcctgagtacaaaccacaggaagcactagctttctacagccgttggcttgccggtgctaaactgtgaggaggcctattttgtgtgcaaaggtcatgcagtactgaatcaaacagaagttggataaagcatgcagcaataaggcagtcgaaggatcaaagtatccaacgcgccaactacaatgttgcattcattttcacatgttataccaatgcagttgctaattacctgcattgttcatgagttcacagtccatctaattggttgaccacaccgtctcatcttgcaccactatatacgttaactttattttagccttttaataccatttgactgcacccacacatacgccagaaaacgtcgtatctggccagccaacatcttacgaacctgcacctgagcgcacaaccatccaatcatgttgagtgtgaccaaacatttgtgaaaattttcccgtgattttttttaataatagtatatacggtggttgggctgtgcggctgtgcctcttggtgtccatgtctctgatttattctgatcgttcgacagcgtaaataaagttattacggtaatacaacagtccctccaccccccaatgttgtggcagcgtggtggtcgatgaggagtacgcagaggagagtagctcgagattaggaacgcagaatgtagcgaggacgaagaggaggactgtcgtcgccgacggctgaataggcgccaccat

SEQ ID NO: 35151 - DNA, 275 bp, Zea Mays
cttgtgcattcgtgtcagccaagatgacgagagcctgcgcaaggaaacccaaggagaacacaagccatggagaaagctccatttttggagagttcatggagatgttgccgaattcttcttagctgctcatcatcttcttcttcctccttcgaaggcaagaagctttggcagaagtgcagtaggtcatattagttggcaggcatgtaaggtaggaaatgagccttgaattgtatattcattgaactggtcaagatatccatccatatagttcatca

SEQ ID NO: 35152 - DNA, 2979 bp, Zea Mays
tttgaacataaataatcatttgtgtatttgatgacatacatgaaatatattagcatgtcaacaatccaattgcatatctatcttaaatacatagcaaccaaaattatcatgtaaacaatcgttatcaagaaatcagttcttaatccaatcgcacacctatcatagtaaccaaaattataacactaataattacaataccctgtacattcagagctagcttttgttgaagagtgaagcttttccgcatgtactcgcggcgcgcgctgtagattcacttgggctcaaccctcgcggacggcaacccgctgttgctgtggtcgaaggggctgtcgccgccgtaggggtgacgcggcgtccggctggcgtagctcatggagttggacgcggactcgggccccgggccgccggccatcttgagcacccgctcgatctcgccgaccacctcgcccatcgatggccggtcggcgccggcctcctcgacgcagcgcagcgccagatccacgtactgctccagcccggccagcgcggacggcgacgagcccagcaccgggtccagcaggtcgtgcaggccgtacaggtccttggtacggtccagcgccaccttcatctccctgacaatgtaccggccgcgctccagcggcttcctcgccgtggccatctccagcatcagcacgccgaagctgtacacgtcgctcttgtccgtaagctgctgcgtcatgtagtactcaggatcaaggtagccctgcaacatcacatccatcaacgttagcttgtctgaacgagtgaattagttcgttgtgtgtgtgtgtgtgatgactgatgaatgaagcaggcaatgccagcctgaccatcgtgcccttgacttgcgtggtgacttgtcccctgccgtcctctccgaggggcttggagaggccgaagtcggagaccttggcgttgaggcgctcgtcaaggaggacgttgctggacttgatgtcgcggtgcacgataggcgggtcggctagctcgtggaggtaggcgatgcccttggcggcgccgagcagcacccggaggcgccgccgccagtccagacgcacgccggacttgcccgtgaggctctccttgagcgtgccgttggggacgtactcgtagacgaggatctgctccgcctggtccaggcagaagcccactaggctgaccacgttcttgtggtgcacccgggagagcagctcgatctccgtcctgaattcgaggctcccctgcagggacccctgctggcacctcttcacggccaccagctgcccgctaggcagggtccctctgtacaccttcccgtagccgccgttgccgatgtcgttcgcctccgagaagttgctggtgatcttcctcagctcgtcgaagttgaacgtgcgcgcgccgcgcagctgggggacgctgctgccgctcgtgctcttcatgtcccaagaaactgtagcagcagcagagatggttcatggttgtggacttgtggttacattatagatagaactctactcctgtcagtaacaagcactacagagaaactgtgaaccaaataaaggcaaaatggcaacaagggtacagtactacgaagtacgaaccaaaagactggctcctctcttcgttctgctttggtctcttcttcctccttgcgacgatggtaacaagagcaagaactattgcaacaagaaccgctccacccaccgaggctccgacgatcagaggtaagcggttgttcgccttcgatttggaaggtattagcaccactacgtccatgaaaaaaaagcagtaaatagtaaaaaaagcagcaggaggtgtaactactttcctttcgtgaatgaaaatgaatgatcttgttgttaccattggcaaagctgtacggctggccaagaaaatagtacggaccgaatactgagggtggcttatacgtctggttgctgagtatgaacccgatgtcagagatgtcctgctcactaaactgggtcttgccgctggggaacacctccagcgcgagctgcaggttgttgaccgagttgacggacggatcgtggagcgcaaccgagtcgacggggacgctgagactccggaacttggctctgatgccggtctccagctggccccagtacgagccgttgctgaggtcagagaaggacggcgacctgaagaacagggtgcccctgtagggcacggcgcagacgcagcctgggctcacgagctggtccgagaggcacggcggcggcagccccgagcagttcatcggggtgctgtacggcggcggcgccgcctggttggactgccccggcgacgcgcagtatttctcgctgctccccgtccccgggctgcagatggggttcccgactagtctgtggaagaagacagcagatgcacgcgtgcgatttgtgaggaacgaacgatgaactgcaaaataagctgttgcttgctacatgatgagctcggttcctctcttcctacatgagctgcttgttgtactgtgatccgccgacagttatctggctgatttggttgtctcgcagatcgattagctggagctgagtgctgtagtctgatccgatagttagcgtgccgttgaaacggtttccccggagcctcctgcaaactctatatatgatcgatcgttttctacatggtcagctcgttttttttggagaaggaaacactactgactcacagtgtctgaactgcaggaaggctgaacagggcttggggcagctgccctgtgacacgcaggttttcaaggtacctgtatgtaatgtaaccgacaaacaaagattcagacacaggttctggacttgagtaggaggagtgcagagagacagaattacagtgaggtcaaagatggcagagtggtgaaccaggaaggaacaccagatgcattgaagctgttgttgctcatgtccctgccacagagttgcaacagcttcacaagctactcatgtcttgggctcaagaaaaggagaaactagc

SEQ ID NO: 35153 - DNA, 1222 bp, Zea Mays
tgaagtttaaaatataagttataataaaaaatatatatatgatacgttggagatggcccctacaagtcgtaaaggccctggcccccaccgttgcttccagtaggtcatgatgcagcgcacctgtcctcccgcgctgctccaccccttcccactcctcccatttgcaagtcccagtaccaggttttcaaaaccgccttcacgcagtccacagataaaataccggcctcctcctccctttccccctccgattcccgcgcccgcccctacgctgccaaaagcgggggacaccgcccgtccccctccccgtccgggtctccacaagcgcacctgcgcgcgcgcgcccggcttccgttgcgcagcagggcagctgggcagggcagggcaggtcgccatttagtcctctgcgctttttggcgttggttcttcttgcacaactcttctgctggattccagctctgtttttctttctcctgtcctgctgtcactcggtcgggacgagatcaataaaaaggaagaaagaagcagcgcggcaagccggcggcgtcgcgaagcttaagatcagagacaccgttggttgggcgttgcttcagatataatctacaagaccaagctcagattccatcagtcggtacgtacgtcggaacagcctcacttcgctcgctgctgcgcgttagatgccggttgcttcgtcgctaatggcgatggagttggagacggaccaactcgcctgggcggagcagcagcggcagcagaataggaggcagaccatggtcgtctgcagaaagagcgacgcagcggtggccaaagggcagcagcgtcagaacgcttcgccgccgtcgcccaagcctccgcccgcgggcgggctcagcgcggaggcgttcttggttctggcgtgcgtcgccgtgtcgctcatcgtgctgccgctggtcctgccgccgctgtcgcccccgccgcctctgctgctgctggtgccggtgtgcctgctcctgctcctcgccgcgctcgccaccttcgtgccgtcggatgtcaggagcatgccatcctccaacttgtaactactagttgttttgctagtcaatatccataaattctttttgttcaagtcggcatttatgtctgtgcatatggcataaaatgagtgtaatgaaatggaaatcttgtcttatctttctttttttggcaaacagacgttcaccgttagatcgaacaaactactacgtac

SEQ ID NO: 35154 - DNA, 1013 bp, Zea Mays
aggaagactatactaagattaaatttgatcatgataatcttcttgttgaaaatgaacttttatcttgcaatacacatgaggctattaaccatgttgttaagattgatgtagcaacctcatgtgatgatttgagtcaaggagatcaaatgtaacactccgggttccacaaacaacccgcaatgctactgaactacacttccgacgtccatatataaaatttcgacagcatcccctttgcaagattgcataaaagtgggggcaacagagtataaacatataacatgactaaaacatactaagtattattaatcgactagcaagggaagataaacatatgacctgaactgaattaaccagtgcgcacgaccatataaagaaaataaacttcctttgacaataagtttctaattaaataatggctgcgcctgggcagcgttattgtgagagtaaaagtggacgtgctgctactcccctcattcccaacatgtaccaagtacctgcattgagtaatgcaagagtgagatgacacatctcagcaagtaaaataatatcaaacagtttaaccacataagaacattgttttaccaccacttgattccacaaccttcttattacgaaggtgcagcacgtatacaacgtacaacacacctagttaccacacctcgcaggtagaaaccacaatagtaacatagtaatgtcacacttcatatattcctcatgagtgcaaatgtctgcaaatgcaaggatgacttctgccttcataccactaaggatatgaagccgcatcgtacccctcctcgggcaacgtacgatgctaaaaatgtaccggtacggtcggaccataagatcacgacataacttcaaaatgcaagatggatgatgtgatgtgcatgtcatgcctacaacacttcatataacatgattcaaaaagatacttcaacttcatccaagatgggaatcaaccacatatatcattaccaaattatgatcatccacaatattagacaattgag

SEQ ID NO: 35155 - DNA, 1480 bp, Zea Mays
atacaaactaaaaaaacgaacacccccgttcaccgaatcaccgcctcgtcacactccagcccttccccccgcgccggcgcggcgaggccaccgaccggctggcgggtgttgcttcttcttctcccggcccacccggcctgcccgcaccaccgacccctccgctgagcgcgctcccacgcccattgaatcatagcgcgccgctcagtcgagcgaggatttctctaggatagcagccgccatcacctcctcgcctcgccgcgctccgctggtgctgctgggtcgctgctgagcggagcgggaatcggaccggactcggttcgaattcgtcctcaccttttcgtcgttcggatgccagaagccgagtggaatgatgaacacactaggattgtctgcgaactctttgaagaacaagttcgggctgggaacaggccaaacacgcatctgaacaacattggttaccgccaagttgcggctaagtttcagcagaggacagagcttctctatacaaaattgcagcttaagaacaaatgggacaagtttaagaatgattacatcacctggaggaagttgcttgtagtagggaagggtttaccctgggacacagcaaaggggacatttgttgctgacgaagaatggtggaagaagatcaataaggagctgccgggtgcaaggaaatttcgacatggcggtctacatcatgaggataagttgaatgtaatgtttgactacatcaccagtaatggtgtggatccttcaccgcctgcgccggaaagcccgaagaatggggtgaatcattcgccaccggctgcaactggtttgccatctgctccagactgcgcgctcaatggagtggatcattcgcctgtgactgcacatggtttgccatctggtccatacagccccatgaatgggatggatcagttgccactacccgcacatgatttgcgaagtgttcaagaaatccccatgaatggtgtgaacctcgatggattggacaacaacactgaagataatgatgacatttatcaagagcctgtgtttcagtatacttcaaacaggaagaagagaccgattagtttcagtgctacaaagaagaacaagaaaaacaaggctgaaactgctctgctcatgcaagctcatttgtatcgcataactgagctggctcagaaagcacaggatactttcaaaaagttcagctcccaagctgacttggtgccatggcctagcatccaggatgttatgacacttgtctgggaatgcggagcacggtgtggaagcaatgagcatttcatcgcaactgaactgtttgtcagtagagaacagagggagatgttcctgaccatggaaacggctgaggaacggttccagtggcttcgaagaaagtacattgtcaagtatttgtcaggcgcagggccatgggtcggcatcgctcgctgcactgctgaggcaggcatccgatggggaggcatcgtctttatgc

SEQ ID NO: 35156 - DNA, 1485 bp, Zea Mays
atacaaactaaaaaaacgaacacccccgttcaccgaatcaccgcctcgtcacactccagcccttccccccgcgccggcgcggcgaggccaccgaccggctggcgggtgttgcttcttcttctcccggcccacccggcctgcccgcaccaccgacccctccgctgagcgcgctcccacgcccattgaatcatagcgcgccgctcagtcgagcgaggatttctctaggatagcagccgccatcacctcctcgcctcgccgcgctccgctggtgctgctgggtcgctgctgagcggagcgggaatcggaccggactcggttcgaattcgtcctcaccttttcgtcgttcggtgcagatgccagaagccgagtggaatgatgaacacactaggattgtctgcgaactctttgaagaacaagttcgggctgggaacaggccaaacacgcatctgaacaacattggttaccgccaagttgcggctaagtttcagcagaggacagagcttctctatacaaaattgcagcttaagaacaaatgggacaagtttaagaatgattacatcacctggaggaagttgcttgtagtagggaagggtttaccctgggacacagcaaaggggacatttgttgctgacgaagaatggtggaagaagatcaataaggagctgccgggtgcaaggaaatttcgacatggcggtctacatcatgaggataagttgaatgtaatgtttgactacatcaccagtaatggtgtggatccttcaccgcctgcgccggaaagcccgaagaatggggtgaatcattcgccaccggctgcaactggtttgccatctgctccagactgcgcgctcaatggagtggatcattcgcctgtgactgcacatggtttgccatctggtccatacagccccatgaatgggatggatcagttgccactacccgcacatgatttgcgaagtgttcaagaaatccccatgaatggtgtgaacctcgatggattggacaacaacactgaagataatgatgacatttatcaagagcctgtgtttcagtatacttcaaacaggaagaagagaccgattagtttcagtgctacaaagaagaacaagaaaaacaaggctgaaactgctctgctcatgcaagctcatttgtatcgcataactgagctggctcagaaagcacaggatactttcaaaaagttcagctcccaagctgacttggtgccatggcctagcatccaggatgttatgacacttgtctgggaatgcggagcacggtgtggaagcaatgagcatttcatcgcaactgaactgtttgtcagtagagaacagagggagatgttcctgaccatggaaacggctgaggaacggttccagtggcttcgaagaaagtacattgtcaagtatttgtcaggcgcagggccatgggtcggcatcgctcgctgcactgctgaggcaggcatccgatggggaggcatcgtctttatgc

SEQ ID NO: 35157 - DNA, 1489 bp, Zea Mays
atacaaactaaaaaaacgaacacccccgttcaccgaatcaccgcctcgtcacactccagcccttccccccgcgccggcgcggcgaggccaccgaccggctggcgggtgttgcttcttcttctcccggcccacccggcctgcccgcaccaccgacccctccgctgagcgcgctcccacgcccattgaatcatagcgcgccgctcagtcgagcgaggatttctctaggatagcagccgccatcacctcctcgcctcgccgcgctccgctggtgctgctgggtcgctgctgagcggagcgggaatcggaccggactcggttcgaattcgtcctcaccttttcgtcgttcggtgcagatgccagaagccgagtggaatgatgaacacactaggattgtctgcgaactctttgaagaacaagttcgggctgggaacaggccaaacacgcatctgaacaacattggttaccgccaagttgcggctaagtttcagcagaggacagagcttctctatacaaaattgcagcttaagaacaaatgggacaagtttaagaatgattacatcacctggaggaagttgcttgtagtagggaagggtttaccctgggacacagcaaaggggacatttgttgctgacgaagaatggtggaagaagatcaataaggagctgccgggtgcaaggaaatttcgacatggcggtctacatcatgaggataagttgaatgtaatgtttgactacatcaccagtaatggtgtggatccttcaccgcctgcgccggaaagcccgaagaatggggtgaatcattcgccaccggctgcaactggtttgccatctgctccagactgcgcgctcaatggagtggatcattcgcctgtgactgcacatggtttgccatctggtccatacagccccatgaatgggatggatcagttgccactacccgcacatgatttgcgaagtgttcaagaaatccccatgaatggtgtgaacctcgatggattggacaacaacactgaagataatgatgacatttatcaagagcctgtgtttcagtatacttcaaacaggaagaagagaccgattagtttcagtgctacaaagaagaacaagaaaaacaaggctgaaactgctctgctcatgcaagctcatttgtatcgcataactgagctggctcagaaagcacaggatactttcaaaaagttcagctcccaagctgacttggtgccatggcctagcatccaggatgttatgacacttgtctgggaatgcggagcacggtgtggaagcaatgagcatttcatcgcaactgaactgtttgtcagtagagaacagagggagatgttcctgaccatggaaacggctgaggaacggttccagtggcttcgaagaaagtacattgtcaagtatttgtcaggtacgcgcagggccatgggtcggcatcgctcgctgcactgctgaggcaggcatccgatggggaggcatcgtctttatgc

SEQ ID NO: 35158 - DNA, 1255 bp, Zea Mays
cttctgctacttccttccagtgttgaagaagctgctggaagaacgaagagatgagctttctcttgaaggaaaaagagatgatcattgctgctggtatcgccagcatgggtaggggaaggattgagatcaagaggatcgagaacaacacgagccggcaggtcaccttctgcaagcgccgcaatgggctcctcaagaaggcgtatgagctctccgtcctctgcgacgctgaggtggccctcatcgtcttctctagccgtggtcgcctctacgagtatgccaacaacagtgtcaaggctactattgagaggtacaagaaggcacacaccgttggctcttcctctgggccaccgctcctagagcacaatgcccagcaattctaccagcaagaatcagcaaaactgcgcaaccagatccagatgctgcaaaacactaacaggcacttggttggtgattccgtgggaaacctgtcactcaaggagctgaagcagctggagagccgccttgagaaaggcatctctaagatcagggccaggaagagtgagctgctggctgcggagatcagttacatggccaaaagggagactgagcttcagaatgaccacatgaccctcaggaccaagattgaggagggagagcaacagctgcagcaggtgaccgtggcacggtcagttgcagcagcagcagcagctgccaccaacttggagctgaacccattcttagagatggataccaaatgcttcttcactggcggccccttcgcaacgctggacatgaagtgctttctccccggcagcttgcagcagatgctggaggcacagcagcgccagatgctcgccaccgagctgaacctcggctaccaactggcgccgcctggttctgacgctgccgacaataaccctcatcatcagttctaaactggatgcatgcacgagaagcttttcaagcgaactgtgaacgatggaagctggctgttgcctctagatgttcttggcttccatgacctagcttattatggtgtgtattgttgttgccttttgtgtgtgattctccttgctactctactgatggagaactaaacctaatcgattggacataatgatcaaatgctacagatcctgtgatgctgtgatcaggttaaggcaaaacatgtatactgattgcttaaatgggtttacgagtgacgacaatgctatttgttgcttctattactgctcaactctctcttgcttccggttttggacacaatttgtttgac

SEQ ID NO: 35159 - DNA, 1185 bp, Zea Mays
gccagcttcttctgctacttctggtatcgccagcatgggtaggggaaggattgagatcaagaggatcgagaacaacacgagccggcaggtcaccttctgcaagcgccgcaatgggctcctcaagaaggcgtatgagctctccgtcctctgcgacgctgaggtggccctcatcgtcttctctagccgtggtcgcctctacgagtatgccaacaacagtgtcaaggctactattgagaggtacaagaaggcacacaccgttggctcttcctctgggccaccgctcctagagcacaatgcccagcaattctaccagcaagaatcagcaaaactgcgcaaccagatccagatgctgcaaaacactaacaggcacttggttggtgattccgtgggaaacctgtcactcaaggagctgaagcagctggagagccgccttgagaaaggcatctctaagatcagggccaggaagagtgagctgctggctgcggagatcagttacatggccaaaagggagactgagcttcagaatgaccacatgaccctcaggaccaagattgaggagggagagcaacagctgcagcaggtgaccgtggcacggtcagttgcagcagcagcagcagctgccaccaacttggagctgaacccattcttagagatggataccaaatgcttcttcactggcggccccttcgcaacgctggacatgaagtgctttctccccggcagcttgcagcagatgctggaggcacagcagcgccagatgctcgccaccgagctgaacctcggctaccaactggcgccgcctggttctgacgctgccgacaataaccctcatcatcagttctaaactggatgcatgcacgagaagcttttcaagcgaactgtgaacgatggaagctggctgttgcctctagatgttcttggcttccatgacctagcttattatggtgtgtattgttgttgccttttgtgtgtgattctccttgctactctactgatggagaactaaacctaatcgattggacataatgatcaaatgctacagatcctgtgatgctgtgatcaggttaaggcaaaacatgtatactgattgcttaaatgggtttacgagtgacgacaatgctatttgttgcttctattactgctcaactctctcttgcttccggttttggacacaatttgtttgac

SEQ ID NO: 35160 - DNA, 1107 bp, Zea Mays
ctcgtttgtactttctccctttgaggaaagagtttccccttttctgtgcttcaagttcttccttccagtgttgaagaagctgctggaagaacgaagagatgagctttctcttgaaggaaaaagagatgatcattgctgtgtcaaggctactattgagaggtacaagaaggcacacaccgttggctcttcctctgggccaccgctcctagagcacaatgcccagcaattctaccagcaagaatcagcaaaactgcgcaaccagatccagatgctgcaaaacactaacaggcacttggttggtgattccgtgggaaacctgtcactcaaggagctgaagcagctggagagccgccttgagaaaggcatctctaagatcagggccaggaagagtgagctgctggctgcggagatcagttacatggccaaaagggagactgagcttcagaatgaccacatgaccctcaggaccaagattgaggagggagagcaacagctgcagcaggtgaccgtggcacggtcagttgcagcagcagcagcagctgccaccaacttggagctgaacccattcttagagatggataccaaatgcttcttcactggcggccccttcgcaacgctggacatgaagtgctttctccccggcagcttgcagcagatgctggaggcacagcagcgccagatgctcgccaccgagctgaacctcggctaccaactggcgccgcctggttctgacgctgccgacaataaccctcatcatcagttctaaactggatgcatgcacgagaagcttttcaagcgaactgtgaacgatggaagctggctgttgcctctagatgttcttggcttccatgacctagcttattatggtgtgtattgttgttgccttttgtgtgtgattctccttgctactctactgatggagaactaaacctaatcgattggacataatgatcaaatgctacagatcctgtgatgctgtgatcaggttaaggcaaaacatgtatactgattgcttaaatgggtttacgagtgacgacaatgctatttgttgcttctattactgctcaactctctcttgcttccggttttggacacaatttgtttgac

SEQ ID NO: 35161 - DNA, 1315 bp, Zea Mays
ctcgtttgtactttctccctttgaggaaagagtttccccttttctgtgcttcaagttctttgctccgcaaagccttccagtgttgaagaagctgctggaagaacgaagagatgagctttctcttgaaggaaaaagagatgatcattgctgctggtatcgccagcatgggtaggggaaggattgagatcaagaggatcgagaacaacacgagccggcaggtcaccttctgcaagcgccgcaatgggctcctcaagaaggcgtatgagctctccgtcctctgcgacgctgaggtggccctcatcgtcttctctagccgtggtcgcctctacgagtatgccaacaacagtgtcaaggctactattgagaggtacaagaaggcacacaccgttggctcttcctctgggccaccgctcctagagcacaatgcccagcaattctaccagcaagaatcagcaaaactgcgcaaccagatccagatgctgcaaaacactaacaggcacttggttggtgattccgtgggaaacctgtcactcaaggagctgaagcagctggagagccgccttgagaaaggcatctctaagatcagggccaggaagagtgagctgctggctgcggagatcagttacatggccaaaagggagactgagcttcagaatgaccacatgaccctcaggaccaagattgaggagggagagcaacagctgcagcaggtgaccgtggcacggtcagttgcagcagcagcagcagctgccaccaacttggagctgaacccattcttagagatggataccaaatgcttcttcactggcggccccttcgcaacgctggacatgaagtgctttctccccggcagcttgcagcagatgctggaggcacagcagcgccagatgctcgccaccgagctgaacctcggctaccaactggcgccgcctggttctgacgctgccgacaataaccctcatcatcagttctaaactggatgcatgcacgagaagcttttcaagcgaactgtgaacgatggaagctggctgttgcctctagatgttcttggcttccatgacctagcttattatggtgtgtattgttgttgccttttgtgtgtgattctccttgctactctactgatggagaactaaacctaatcgattggacataatgatcaaatgctacagatcctgtgatgctgtgatcaggttaaggcaaaacatgtatactgattgcttaaatgggtttacgagtgacgacaatgctatttgttgcttctattactgctcaactctctcttgcttccggttttggacacaatttgtttgac

SEQ ID NO: 35162 - DNA, 1345 bp, Zea Mays
atccggcatatgtatagttcctgctaactgatcgagatcgctctcgtttgtactttctccctttgaggaaagagtttccccttttctgtgcttcaagttcttccttccagtgttgaagaagctgctggaagaacgaagagatgagctttctcttgaaggaaaaagagatgatcattgctgctggtatcgccagcatgggtaggggaaggattgagatcaagaggatcgagaacaacacgagccggcaggtcaccttctgcaagcgccgcaatgggctcctcaagaaggcgtatgagctctccgtcctctgcgacgctgaggtggccctcatcgtcttctctagccgtggtcgcctctacgagtatgccaacaacagtgtcaaggctactattgagaggtacaagaaggcacacaccgttggctcttcctctgggccaccgctcctagagcacaatgcccagcaattctaccagcaagaatcagcaaaactgcgcaaccagatccagatgctgcaaaacactaacaggcacttggttggtgattccgtgggaaacctgtcactcaaggagctgaagcagctggagagccgccttgagaaaggcatctctaagatcagggccaggaagagtgagctgctggctgcggagatcagttacatggccaaaagggagactgagcttcagaatgaccacatgaccctcaggaccaagattgaggagggagagcaacagctgcagcaggtgaccgtggcacggtcagttgcagcagcagcagcagctgccaccaacttggagctgaacccattcttagagatggataccaaatgcttcttcactggcggccccttcgcaacgctggacatgaagtgctttctccccggcagcttgcagcagatgctggaggcacagcagcgccagatgctcgccaccgagctgaacctcggctaccaactggcgccgcctggttctgacgctgccgacaataaccctcatcatcagttctaaactggatgcatgcacgagaagcttttcaagcgaactgtgaacgatggaagctggctgttgcctctagatgttcttggcttccatgacctagcttattatggtgtgtattgttgttgccttttgtgtgtgattctccttgctactctactgatggagaactaaacctaatcgattggacataatgatcaaatgctacagatcctgtgatgctgtgatcaggttaaggcaaaacatgtatactgattgcttaaatgggtttacgagtgacgacaatgctatttgttgcttctattactgctcaactctctcttgcttccggttttggacacaatttgtttgac

SEQ ID NO: 35163 - DNA, 1331 bp, Zea Mays
aaaaatttcagccgtatttcgttctccatcagtcctgcgataatatatacgcgcgtcttgtgtgatccggcatatgtatagttcctgctaactgatcgagatcgctctcgtttgtactttctccctttgaggaaagagtttccccttttctgtgcttcaagttcttctggtatcgccagcatgggtaggggaaggattgagatcaagaggatcgagaacaacacgagccggcaggtcaccttctgcaagcgccgcaatgggctcctcaagaaggcgtatgagctctccgtcctctgcgacgctgaggtggccctcatcgtcttctctagccgtggtcgcctctacgagtatgccaacaacagtgtcaaggctactattgagaggtacaagaaggcacacaccgttggctcttcctctgggccaccgctcctagagcacaatgcccagcaattctaccagcaagaatcagcaaaactgcgcaaccagatccagatgctgcaaaacactaacaggcacttggttggtgattccgtgggaaacctgtcactcaaggagctgaagcagctggagagccgccttgagaaaggcatctctaagatcagggccaggaagagtgagctgctggctgcggagatcagttacatggccaaaagggagactgagcttcagaatgaccacatgaccctcaggaccaagattgaggagggagagcaacagctgcagcaggtgaccgtggcacggtcagttgcagcagcagcagcagctgccaccaacttggagctgaacccattcttagagatggataccaaatgcttcttcactggcggccccttcgcaacgctggacatgaagtgctttctccccggcagcttgcagcagatgctggaggcacagcagcgccagatgctcgccaccgagctgaacctcggctaccaactggcgccgcctggttctgacgctgccgacaataaccctcatcatcagttctaaactggatgcatgcacgagaagcttttcaagcgaactgtgaacgatggaagctggctgttgcctctagatgttcttggcttccatgacctagcttattatggtgtgtattgttgttgccttttgtgtgtgattctccttgctactctactgatggagaactaaacctaatcgattggacataatgatcaaatgctacagatcctgtgatgctgtgatcaggttaaggcaaaacatgtatactgattgcttaaatgggtttacgagtgacgacaatgctatttgttgcttctattactgctcaactctctcttgcttccggttttggacacaatttgtttgac

SEQ ID NO: 35164 - DNA, 1485 bp, Zea Mays
gtcatcagtagtagtggccttttgcccttgcccctctctctcacctctcttttctcagccttgcttccgatggatcccatcccactgccatcctttctttcccttgcgcgcattgcctagccggccggccggcctgctattaaaccactttacccgccccctctcgctcacgctcgacgcagctcccttttccttgtttgcttattgcaagtctctgcaagaacctgctagagaggaacaagccttccagtgttgaagaagctgctggaagaacgaagagatgagctttctcttgaaggaaaaagagatgatcattgctgctggtatcgccagcatgggtaggggaaggattgagatcaagaggatcgagaacaacacgagccggcaggtcaccttctgcaagcgccgcaatgggctcctcaagaaggcgtatgagctctccgtcctctgcgacgctgaggtggccctcatcgtcttctctagccgtggtcgcctctacgagtatgccaacaacagtgtcaaggctactattgagaggtacaagaaggcacacaccgttggctcttcctctgggccaccgctcctagagcacaatgcccagcaattctaccagcaagaatcagcaaaactgcgcaaccagatccagatgctgcaaaacactaacaggcacttggttggtgattccgtgggaaacctgtcactcaaggagctgaagcagctggagagccgccttgagaaaggcatctctaagatcagggccaggaagagtgagctgctggctgcggagatcagttacatggccaaaagggagactgagcttcagaatgaccacatgaccctcaggaccaagattgaggagggagagcaacagctgcagcaggtgaccgtggcacggtcagttgcagcagcagcagcagctgccaccaacttggagctgaacccattcttagagatggataccaaatgcttcttcactggcggccccttcgcaacgctggacatgaagtgctttctccccggcagcttgcagcagatgctggaggcacagcagcgccagatgctcgccaccgagctgaacctcggctaccaactggcgccgcctggttctgacgctgccgacaataaccctcatcatcagttctaaactggatgcatgcacgagaagcttttcaagcgaactgtgaacgatggaagctggctgttgcctctagatgttcttggcttccatgacctagcttattatggtgtgtattgttgttgccttttgtgtgtgattctccttgctactctactgatggagaactaaacctaatcgattggacataatgatcaaatgctacagatcctgtgatgctgtgatcaggttaaggcaaaacatgtatactgattgcttaaatgggtttacgagtgacgacaatgctatttgttgcttctattactgctcaactctctcttgcttccggttttggacacaatttgtttgac

SEQ ID NO: 35165 - DNA, 1211 bp, Zea Mays
gtcatcagtagtagtggccttttgcccttgcccctctctctcacctctcttttctcagccttgcttccgatggatcccatcccactgccatcctttctttcccttgcgcgcattgcctagccggccggccggcctgctattaaaccactttacccgccccctctcgctcacgctcgacgcagctcccttttccttgtttgcttattgcaagtctctgcaagaacctgctagagaggaacaagtgtcaaggctactattgagaggtacaagaaggcacacaccgttggctcttcctctgggccaccgctcctagagcacaatgcccagcaattctaccagcaagaatcagcaaaactgcgcaaccagatccagatgctgcaaaacactaacaggcacttggttggtgattccgtgggaaacctgtcactcaaggagctgaagcagctggagagccgccttgagaaaggcatctctaagatcagggccaggaagagtgagctgctggctgcggagatcagttacatggccaaaagggagactgagcttcagaatgaccacatgaccctcaggaccaagattgaggagggagagcaacagctgcagcaggtgaccgtggcacggtcagttgcagcagcagcagcagctgccaccaacttggagctgaacccattcttagagatggataccaaatgcttcttcactggcggccccttcgcaacgctggacatgaagtgctttctccccggcagcttgcagcagatgctggaggcacagcagcgccagatgctcgccaccgagctgaacctcggctaccaactggcgccgcctggttctgacgctgccgacaataaccctcatcatcagttctaaactggatgcatgcacgagaagcttttcaagcgaactgtgaacgatggaagctggctgttgcctctagatgttcttggcttccatgacctagcttattatggtgtgtattgttgttgccttttgtgtgtgattctccttgctactctactgatggagaactaaacctaatcgattggacataatgatcaaatgctacagatcctgtgatgctgtgatcaggttaaggcaaaacatgtatactgattgcttaaatgggtttacgagtgacgacaatgctatttgttgcttctattactgctcaactctctcttgcttccggttttggacacaatttgtttgac

SEQ ID NO: 35166 - DNA, 1230 bp, Zea Mays
catgccaacaaaatgcaagaacattacttatttctctggtggcaatacattagaacaacatttgtgcaatatgctataacaatgagaagcgcatagtaaagaaattttccaaacacaaaataatctcccgtgccatggcttgcataagtccacggcaataacatctgctattggagcattcaagtggaccaacactcgcggtacaagcgttaaacaacttggtagttagcagtgagcaaacgagcccgctgagaaaacttgggagggttgccttccttcagaggaagaattccaccaaccttcagatcactgaaagtactcgatgcagaaaatccaacggagatggggaaaaacgatgatgggtcagctgggggaacaacaaattccatggaaccactgcaaacggcacagatggaaatagtcaatctacaagattggatgacagtcaaaagctaaacagtcgaatatttcagacctgcgattcgactgatcgataaggagaatagaccattccaacacagagtttcttgagtcgaacctgtttgcatgatgaataaaaaaaaactaagacaacatgcacaggctgaagcgcccgattctataaaacaacgaaggtattgtgcaataccacgaagaaatgaagtaatgcagtaacacatcttattcagatctatatcgcacatcttactcagacctagtgtactaccatctaggatacagcagtcaagttcgactgtaacagtttgatataccagttataacagcaaaagtcttggggatatcacatttagctcagtcggtagagcgcaaggctcttaaccttgtgccacatttgacttgttaacactaataataaaaaggcatcacataaaaaccagtggcataaggttatgcactagtcacaaagagtcttgatgggggcgcagtgcgtattggaatgctacgacccgatagtaatgagaagagaggcagggaaaagctgaagttgacatggcaagagtcaacaaaaagaagacttgaaattatagaatatacccaaagctttagccttcaataaaaacgaatggaaaacagctatccatgtgcctgagcattgatttgtggcttccgttgtgtttcaactctagcctatcccaacttgcttatgagactaaaaggctttgttgttgttgttgttgttgttgttgttgttgtaagttgtaacatgctttagtaaaacataagcatgaa

SEQ ID NO: 35167 - DNA, 240 bp, Zea Mays
ttctactacgacttgctgcaagaaactgtgaacaaattaggcatgtatcattggaacctcttatgtaccaatgaatgtcaggaaaaaggggagataaaacctaggtgccataaatttatccagcaatgtggctataaaattatcataaggaaacaagaggaaaagaaatcctagtcataggaacaagcaatttgataaaaatagtcatcatgatcttgaagaaatattagaatgtagcag

SEQ ID NO: 35168 - DNA, 2219 bp, Zea Mays
cgcacggtcgcacggcacggggaggagcaagaacacccagcccactgcccacgccgtgctggaagtggtccgtgctccggcagcggcggcgggaggaagagggaagcgaggggatggcgcagccgagcaaggagccgtgcaagaaggaggcgtgcgacatccaggcctgcctctccaagaacatgttcgactccaggaagtgtgtgagagttattcagttacttcagtcatgttgtgagcagtgtgagtacaaatcaacacactgtggttccttgtccggattactcaagaacatttctaagtgaggaacaataccgacatactttactgcagccattgaataaaagtttcttttaggttagtttagtactttatggggctcacggcaatctctcttacggatcaagacacccctcaacctgcagaatgatgctctggtcgctgagttgtatggtaccgagtggaaacagcaaagtggtttgttaatgatcgattttaatgcctgtatacctatggtatccttcgtagttcgtgtgctcttctacacatgtaaccccatgttcccgtcttgaaccgcaaaataagtgaaccccatgcacatggagatattttggtgaccccaaagttgtgtataccatttcattgctttaccctaccatgttctgtggcaagagaatcaaatctggataaacatctgggatgataatttatctcttgggcaagaacttgtgatgtaagatatgattcaaataaacaactttgtggggtcatttcagtatcacagttggcaaaaaaaaatggcaggtccaggtttctgggaaataccagttgaagcaattcagtttttgtgttgtactgccacgtacatgcgttgtctaagccaacaaaccttttggcttttgcttgtgaaatgaaacttgtgtgttctgtgtgatgcaatacctaccactagcaggcaagtgtataagctggtatgcatgcgatggcttgaagctgacacgctcagtacattctctacaactaattcttgttgtctacttgggaccaaccagttggttggtgtgtcgtctaccgccacggctgcactccacatgtcccttctttatcatgttgctcatcttcgatagatgtcatgattcagtgaattaagcatttatatttgagaaaggggaccggttttatgaataaaaaaaatgacaggattgtatatttgtatacgcaaaccgctttaattcttctttagacgggctagcgacatctaaacggccgaaagcagcagcagaaaaaggtgtgactaggagtccatattttgaatttgggaaatgcggatcctccccccttttttttgtcattttcgcaactgtagcagagtcagatattcttaatttgtgcacagttcactacttcactctaacagttgtgtcttcacttgagctgatgatgttgagttggagttgagcagattacacagcacgctttgcaaggcggcattctaacgagttgtgtagctttggaaaaagctaaggaacttgacaaaggatgcaaaaatgtgactgattttacaaataatattgttcaatgcagaattctggtagctgccctccctgatttcagtaacatgttgcagctcgtcaaagtttaagcaaaacccaaggcataaccagactctcgacagtgactcagctgcgtcagatgggcggcgccttccgcgacggggcggcgccggacttgtgcgccaggaagagcttcttgagcagcctgagcatcatgaggaggcccatcctccgccggcggacgacggcgtgcttgcgcgtctccaaggcgccgtcgagccagggctccctcgcggccgcccacgacggcgtccccctggtgagcgggcagggctgcgcggcccgtgcgagctcctcgttgaagtcctcccacagcatgtccatcttgtcctccaccgcgaacctcgccgagccgtggcggccacccagctgctgctggtcgccgcccgcggcttgctgctccacggccgagacgctcctccggtggtcgtgctcgtgcactgccgccgtgccaacaacgccgccgggaacgagcagccacggcgacgcggaggcggagaagtcggcgttgcattgctcgagtgggaagctggggaatgcgaactcttccattgcaaatctctttctctctctctaggtctgagctgtgagctctgactctattgt

SEQ ID NO: 35169 - DNA, 419 bp, Zea Mays
tcgacgtgtcttcatcatcaccatggcgcctcttgtgtgcttgcaactccaccaatacagcaacccgaccataactaaatctacctcggctatcttcagcacaacttcttcgaccatgtcaaatgctcccttaagctcagctacctcgacattagcacaaaggctaccaccttgcatgatggcttcttccccagccacagcatacatggtgcatcacctgttatcgttgtgggggacattagcttgtcaatttcttctccaagtctccgtagttactgccaggggatgttagggtaaataggaattatatcacattgtctacccacgtggggtgttaatcctatgtaccctatataatcagcccattaggctcaatgcaatacatccatccaattacaccaattctattctcatacact

SEQ ID NO: 35170 - DNA, 824 bp, Zea Mays
aaaatctaaaaaaaacttctagatttcttttgtcagcaaatctagtttagaaagctaaaccaaacatatccttagtttctagcatgcaaaaactttgtctctataaattgcagttcaaacagatgactttaatctaaagcgaacaggatatctcaggatccttgaacttccatcatctgctataaataatgcacaggacatgtcttttataaaaggtatagaaaatatttcttgcaatataagttcgtgatatatggcaatcaacaaaatcaatcgtgatcccatctacttccacctctctcctaccaccaatttgtccttccttgaaacaaagccaagccagaatatggattgcaagtacaccatcaacctgtttatttaagaactaatcagagagtagcacagtcatgaaatgaaaaaggtaactgatgtttctgtcgccgaaggaaagaaagccacgtagaactacaccccaattttatactctctctgtcctaaattaaaatttgttttagctaattaattaataaattcacacaatacttcgcgtatttttaagtatttttatatatttatctagatttatcgactactacctctgtcccaaattaaaattcgttttagaccatatttatttccgtcataaattatataagttagattatagtataaggttagaagattaaaataccactttataattacaaataagataaaataagctacccaataatagcttatttcagtttatttatagtcataatataatattttactctcctactattccatcataatccaacatatataatctaaaagggaaa

SEQ ID NO: 35171 - DNA, 957 bp, Zea Mays
aactgcctccgcagcatggatccagcaaacgaacagaagagaagtctccagcaggcagcagcccatcgtcccacaccaagaacaaccagagaggcaagcaggggagaatcgcggaggtctgggaaacaccatcctgcagagatgacagtgctgctctccccgagctcctccctgttcctcgccaaaccttctgccgtcgccaagggcagggcggcggctgtgacgtgcttcagcgggccctccctgtcagtggggcgtgaagatcaggagggtgtagcagtggtggtggggaggcgtgcgttggcttccgcagcagctgtcgcctcagtgcttgggtttgcaggccgtggtctggcggccaaccagggcctgctcgccgggagggtccccggcttgtctgaacctgacgaaaatggttggagaacgtaccgcaggccagacgacaagtccggtggccacggagttggctggagccccatcatcccgtacagcttcaaagttccagacggctgggatgagaacgtggaagggaaggtcctgtcctcggagacggcggcgcattcgggaagaacttactaccagttcgagctggagccgccccatgtgttcatcaccgccacggcagctgggaacaggctctacctcttcagtgtaactgcaaacggtctgcagtggaagaggcattacaaagacctcaaacagatagcacaatcatttcgagtcgtgtagggttccaattcctactactactttttttttacagcgcctggctcttgttgatatgattagaggacatgggagacggtaatacggagagaggacaagtgagcatcgcttctgatgaccactctaactctgtaaggttacaaagctgcagcagcagttcaacagcttgtgtaaacctgctcgctaaggctaaatgcttttactatattttttttccccctgatgttgcct

SEQ ID NO: 35172 - DNA, 1133 bp, Zea Mays
cccatgtcttgtggtcgaaaactgcctccgcagcatggatccagcaaacgaacagaagagaagtctccagcaggcagcagcccatcgtcccacaccaagaacaaccagagaggcaagcaggggagaatcgcggaggtctgggaaacaccatcctgcagagatgacagtgctgctctccccgagctcctccctgttcctcgccaaaccttctgccgtcgccaagggcagggcggcggctgtgacgtgcttcagcgggccctccctgtcagtggggcgtgaagatcaggagggtgtagcagtggtggtggggaggcgtgcgttggcttccgcagcagctgtcgcctcagtgcttgggtttgcaggccgtggtctggcggccaaccagggcctgctcgccgggagggtccccggcttgtctgaacctgacgaaaatggttggagaacgtaccgcaggccagacgacaagtccggtggccacggagttggctggagccccatcatcccgtacagcttcaaagttccagacggctgggatgaggtcccggtgtccattgctgatctgggcggcacggagatcgacctgcgcttcgcaaaccccaaggaaggccggctatgacctggacgacgcgaccatcgagaagatcggcagcccggagaaggtgatcaccgccttcggtccggaggtcatcggagagaacgtggaagggaaggtcctgtcctcggagacggcggcgcattcgggaagaacttactaccagttcgagctggagccgccccatgtgttcatcaccgccacggcagctgggaacaggctctacctcttcagtgtaactgcaaacggtctgcagtggaagaggcattacaaagacctcaaacagatagcacaatcatttcgagtcgtgtagggttccaattcctactactactttttttttacagcgcctggctcttgttgatatgattagaggacatgggagacggtaatacggagagaggacaagtgagcatcgcttctgatgaccactctaactctgtaaggttacaaagctgcagcagcagttcaacagcttgtgtaaacctgctcgctaaggctaaatgcttttactatattttttttccccctgatgttgcct

SEQ ID NO: 35173 - DNA, 1988 bp, Zea Mays
gaaaaaaagtttcactcctccatccccattcccgaagtcataaacctccactcgcggacttgccatgacgtccgtaccgctaccacccctctccgccgccctcgcccaatatcgcccctccgcggccgccacccttcgcttccgcaccccctcttccgcgcccggcgtttcggcttcttcgtctacccgggcgcgcaggttctcggttatcgcgtcggcgcgcgagatgccgtggccgcacgtgctgacggtggccggctccgactccagcgccggcgcgggcatccaggcggacatcaaggcgtgcgcggccctaggagcctactgctcctccgtaatcactgctgtcaccgcgcagaacaccgtcggcgtccaggggatccatgctgtgccggagaagttcgtgggagagcagctcaggtcggttctctcggacatgtcggtggacgtggtgaaaacagggatgctcccttcagctggagtagtcaaagttctgtgtgagagtcttaggaagtttccagtcaaaggcagctctagtggtggatccggtcatggtgtccaccagcggtgatactctttcaggaccatctactctcgctacatatagatatgtgcttgtgaaaggcggggatatgccagattcatcagatgcaattgatgtgttatttgatggtaaggagttcactgagcttcgtggtctgcgtataaagacccgtaacacacatggaactggttgcacattagcttcatgtattgctgctgaattagcaaaaggcgcaacgatgctgcatgctgtccaggctgcgaagaaatttgtggaatctgctctttatcacagcaaagatcttgtgattggaaatggacctcagggcccttttgaccaccacttcgagctcaagtctccatcatacaagatgggatcactgcaaaagttcaatccagatgacctcttcctgtacgcagtgacagactctgggatgaacaagaagtggggtcgttcgataaaagatgccgtgaaagctgccattgaaggtggcgctaccattgtccaactgaggttatctttcttgaaaacgaccaaagttcctctagtgattcagtctgtcttcattcgatttcgttgaccgtgctttgagtgtccaatgttcagagaaaaagacgccgagacacgggagttcttggaagctgccaaggcctgtgtggaaatctgcaagtccagtggagtgccgctactgatcaatgaccgcgtagatgttgctctggcatgcgacgcagatggcgtccacgttggccaatcagacatgccagcatgggaagtacgacggctcctaggacctggaaaaatcatcggcgtctcatgtaaaaccccggcccaggccgagcaggcatggaaggatggcgcagactacatcggctgtggcggtgtcttcccgaccacgacgaaggcaaacaaccctaccttagggttcgagggcttgaggactgtgtgcttagcttcgaagctacctgtggtggccatcggcggcatcaatgctggaaatgcaggctcggtgatggagcttgggctcccaaatctgaaaggtgtggctgtggtctctgctctgtttgaccgggaacgtgtcgcggctgagacaagaaacctcagatccatcctgatgaagaatgcttactcaaggtcttagagcaagttgggatatgccgcctgttcatttactttctttgtttaggcccgaaataagtttgtaatcaatcactttgtcataaggagaaaccaaacaggcgctgcaatcttcaataaaccggagtcattatttctctggaaaagaacaattctgtgacatttccgaagtgtgatacatttcaaaggcactgaactgtgtaataagaaatcaataatgtaccagaactatatttgatgcaagtactaacttggaaataatccacgggctgaaatgagctatgtctaattgtctatgcgtgatttgctg

SEQ ID NO: 35174 - DNA, 1952 bp, Zea Mays
gaaaaaaagtttcactcctccatccccattcccgaagtcataaacctccactcgcggacttgccatgacgtccgtaccgctaccacccctctccgccgccctcgcccaatatcgcccctccgcggccgccacccttcgcttccgcaccccctcttccgcgcccggcgtttcggcttcttcgtctacccgggcgcgcaggttctcggttatcgcgtcggcgcgcgagatgccgtggccgcacgtgctgacggtggccggctccgactccagcgccggcgcgggcatccaggcggacatcaaggcgtgcgcggccctaggagcctactgctcctccgtaatcactgctgtcaccgcgcagaacaccgtcggcgtccaggtgaaaacagggatgctcccttcagctggagtagtcaaagttctgtgtgagagtcttaggaagtttccagtcaaagctctagtggtggatccggtcatggtgtccaccagcggtgatactctttcaggaccatctactctcgctacatatagggatgaactattttctatggctgatatagtcactcccaaatgtgaaagaagcatctaagttacttggtgatgtatcattgcatacaatttctgacatgtgcaatgcagctgaatccatttataaacttggtcccaaatatgtgcttgtgaaaggcggggatatgccagattcatcagatgcaattgatgtgttatttgatggtaaggagttcactgagcttcgtggtctgcgtataaagacccgtaacacacatggaactggttgcacattagcttcatgtattgctgctgaattagcaaaaggcgcaacgatgctgcatgctgtccaggctgcgaagaaatttgtggaatctgctctttatcacagcaaagatcttgtgattggaaatggacctcagggcccttttgaccaccacttcgagctcaagtctccatcatacaagatgggatcactgcaaaagttcaatccagatgacctcttcctgtacgcagtgacagactctgggatgaacaagaagtggggtcgttcgataaaagatgccgtgaaagctgccattgaaggtggcgctaccattgtccaactgagagaaaaagacgccgagacacgggagttcttggaagctgccaaggcctgtgtggaaatctgcaagtccagtggagtgccgctactgatcaatgaccgcgtagatgttgctctggcatgcgacgcagatggcgtccacgttggccaatcagacatgccagcatgggaagtacgacggctcctaggacctggaaaaatcatcggcgtctcatgtaaaaccccggcccaggccgagcaggcatggaaggatggcgcagactacatcggctgtggcggtgtcttcccgaccacgacgaaggcaaacaaccctaccttagggttcgagggcttgaggactgtgtgcttagcttcgaagctacctgtggtggccatcggcggcatcaatgctggaaatgcaggctcggtgatggagcttgggctcccaaatctgaaaggtgtggctgtggtctctgctctgtttgaccgggaacgtgtcgcggctgagacaagaaacctcagatccatcctgatgaagaatgcttactcaaggtcttagagcaagttgggatatgccgcctgttcatttactttctttgtttaggcccgaaataagtttgtaatcaatcactttgtcataaggagaaaccaaacaggcgctgcaatcttcaataaaccggagtcattatttctctggaaaagaacaattctgtgacatttccgaagtgtgatacatttcaaaggcactgaactgtgtaataagaaatcaataatgtaccagaactatatttgatgcaagtactaacttggaaataatccacgggctgaaatgagctatgtctaattgtctatgcgtgatttgctg

SEQ ID NO: 35175 - DNA, 2049 bp, Zea Mays
gaaaaaaagtttcactcctccatccccattcccgaagtcataaacctccactcgcggacttgccatgacgtccgtaccgctaccacccctctccgccgccctcgcccaatatcgcccctccgcggccgccacccttcgcttccgcaccccctcttccgcgcccggcgtttcggcttcttcgtctacccgggcgcgcaggttctcggttatcgcgtcggcgcgcgagatgccgtggccgcacgtgctgacggtggccggctccgactccagcgccggcgcgggcatccaggcggacatcaaggcgtgcgcggccctaggagcctactgctcctccgtaatcactgctgtcaccgcgcagaacaccgtcggcgtccaggtgaaaacagggatgctcccttcagctggagtagtcaaagttctgtgtgagagtcttaggaagtttccagtcaaaggcagctctagtggtggatccggtcatggtgtccaccagcggtgatactctttcaggaccatctactctcgctacatatagggatgaactattttctatggctgatatagtcactcccaaatgtgaaagaagcatctaagttacttggtgatgtatcattgcatacaatttctgacatgtgcaatgcagctgaatccatttataaacttggtcccaaatatgtgcttgtgaaaggcggggatatgccagattcatcagatgcaattgatgtgttatttgatggtaaggagttcactgagcttcgtggtctgcgtataaagacccgtaacacacatggaactggttgcacattagcttcatgtattgctgctgaattagcaaaaggcgcaacgatgctgcatgctgtccaggctgcgaagaaatttgtggaatctgctctttatcacagcaaagatcttgtgattggaaatggacctcagggcccttttgaccaccacttcgagctcaagtctccatcatacaagatgggatcactgcaaaagttcaatccagatgacctcttcctgtacgcagtgacagactctgggatgaacaagaagtggggtcgttcgataaaagatgccgtgaaagctgccattgaaggtggcgctaccattgtccaactgaggttatctttcttgaaaacgaccaaagttcctctagtgattcagtctgtcttcattcgatttcgttgaccgtgctttgagtgtccaatgttcagagaaaaagacgccgagacacgggagttcttggaagctgccaaggcctgtgtggaaatctgcaagtccagtggagtgccgctactgatcaatgaccgcgtagatgttgctctggcatgcgacgcagatggcgtccacgttggccaatcagacatgccagcatgggaagtacgacggctcctaggacctggaaaaatcatcggcgtctcatgtaaaaccccggcccaggccgagcaggcatggaaggatggcgcagactacatcggctgtggcggtgtcttcccgaccacgacgaaggcaaacaaccctaccttagggttcgagggcttgaggactgtgtgcttagcttcgaagctacctgtggtggccatcggcggcatcaatgctggaaatgcaggctcggtgatggagcttgggctcccaaatctgaaaggtgtggctgtggtctctgctctgtttgaccgggaacgtgtcgcggctgagacaagaaacctcagatccatcctgatgaagaatgcttactcaaggtcttagagcaagttgggatatgccgcctgttcatttactttctttgtttaggcccgaaataagtttgtaatcaatcactttgtcataaggagaaaccaaacaggcgctgcaatcttcaataaaccggagtcattatttctctggaaaagaacaattctgtgacatttccgaagtgtgatacatttcaaaggcactgaactgtgtaataagaaatcaataatgtaccagaactatatttgatgcaagtactaacttggaaataatccacgggctgaaatgagctatgtctaattgtctatgcgtgatttgctg

SEQ ID NO: 35176 - DNA, 953 bp, Zea Mays
ctgcgattgagatcttcaatggtgtgttcctcaaagtcaacaaggcgactattaacatgctacgcagggttgagccatatgttgcatatgggtacccaaacttgaagagtgtcagggagttgatctacaagaggggctatggaaagctgaacaagcagaggatccctctgtccaacaaccaagtcatcgaggagggcttgggcaagcacaacatcatctgcgtcgaggatcttgttcacgagatcatgactgttggcccacacttcaaggaggcaaacaacttcctgtgcagggcggtgatgccgggcggtgatcaagtggaaggaaacaaactccaaataggtggtgtggcagagcacgaagaagacgctggtgaaggagccccacaggccacggtgttgcagaacacaggagccttccagaactctgaaagaattggacggtcgcatcgacgccaggttccagcagaggagtttttgaagatcatccatttactcaacaacagcttccagcttgcaagactatacttgcgactcagacagtcattcttgtacttctgtttatggtggaaccagcacggcctaggcggtgacaacgtgttcggtagctgccgtcctctccataacgggctcgtcagcctcatgcactggtctgggaagggcaagccatgggaccgtctcgacgccgacaagccttgcgcactggaccacacctggaaggtgtacgacctctacattggcgagaatgattcatcatcagcatcaacttcatcgggcgtggtcttgctgtatcgctcgcaaggcaaggtgatgaactgcggtggcggcggaagttgtggcacttgcatcgtcgagataatcgatggaaaggagctcctgaatgagaggacgagcaccgagaatcgatacctgaagaaggttgtcgtccaacggctgccccagtggaagagatga

SEQ ID NO: 35177 - DNA, 4313 bp, Zea Mays
gtaatttgagcatggcagccacgtagatgtgtccaggtactgctggcaccatgggaatacgaccttgctgcatgttgaacaggttttaggggcatctgtccattccagttgcttaaaaggcaaaattaattgaaggtcgccctccgtgccttgagttccacctacagaccactgcaaggtgtggagctacttgtattctattttgtgtagcctctccccagtccctaggtttgcctgaccctgaaccgagcacaacaatccctgagtggtgaccacaaccagcagttcacctatatcaccgtggccagaacggagtcaagtcatcgtggaactggtgctgcgggcagcctcaccgtggaccgatcgactggagtcatccctggtcaatctcgcgcacgcaccgagactttggaaggagcaaattggacccaatttggatgaacactttgatgcagacatccacaagtgaattggatctaagtccatacaccacttcatgtaaacacttatcagacatggtatcaattcttcaggataggttcctcaacctacaggcactcctgtcatgccatcatctactggtctaagtttaggaaatattagggtggcattgaaaaccaaacttccaaatttctcaattagcgaagatcttacacttatttcctaatggctaaacatgagcctaaacctagtgggtagtggctggtaagtaggtaaacatagtcttttggaatgtggtatgagtttagtacgttgatcattagtgtatcacaatgtgagaatatctagttgtaggtatgagacaacataagtcttccttttggaaaggtatataaagagagtacaaaacctaaagggagcattgtaccccaactaaaaattatgtagcttggaaggccaatgggatcttaccaaagagcaagtgaccaagttcatgtcgtaccactgccaagtcataaacaaaaacgacagtagcctacaagactgtttttgccatgaccttgtacaatagcttagagaaaaggcccttctctacttctcattgttgggaggttctaaagaatgaagcaaaatggttagacttggagtagggatcaaaaaatgttgatgtgttagtggactaaggtgcagattctatccccatgggcaatggtaacatgtgtctggtttcttaatctaataacaagagtcgactcaagagagacaatgacaagactaccaagaagaagacatcaacatacccgacatttgacagcactgagtacatctccaagatgtcaaatttgacaatgaagaagattgagtacttgtagaggtccgatggaacacttggcactaacattcactaacttgttcaaatagaggaaaagaagatggaaatggagaaaggcatctaaccatcaaggccaataaggaggagagtgaagctgagctcacgacaatggcaagggccaaggaagacgagcagatcatgggaattgacctagaatcttgcaatctagcaaaacgatcattttatgatgccatgcaacatgacattctagaaatatgggtggctaccacgaaaagctacaatatatctttccaagcaagctatattaacatgcaccaagggggaaaaaggaaagagtattggcgcaaaccttgggcttgctggagcaatccccaaagccgggttagcagcaggagcgacgagcccaaaccttcctacccctcgtcgtcctcggctaatccgccgcgcctccgatactcccaaggcagcgcccgccagctgcaacaacagcatcagcaagcgaggagtagccaccagcccaccacgatctcatcagactcctctcaaatcctcccgcccactctccatttccctcccctcccccgccaccctgcaatggccggtctcctccacctccagtccacgcttctcccatcggcgtccgcgctccgccgccgtgcaggcgtgccggtgccatcctcgtcccgccgccgatgccggattgaggccaagatccgggaaatcttcatgccagcgctcagctccaccatgaccgagggcaagatcgtctcctggaccgccgctgagggcgaccgccttgccaagggcgaccccgtcgtcgtcgtcgagtccgacaaggccgacatggacgtcgagaccttctacgacggcttcctcgccgccgtcctcgtgcccgctggcgactcagcgcccgtcggctccgccatcgcgctgcttgccgagtcagaggaggacatcccagtggcccagtcacaggctgcctccttctcctccacgtcccccttaccgtcgcctccgcaagaaactgctgctcaagaagcatccccttccccgccgccacctcctcccccagggccggtgtcagtctctgctcccacgccgcctttgccagcaacacaaggcgagcgtgtggttgcttcaccctacgccaagaagctcgccaaggacctcggcgttgatcttttctcagtcacggggtcaggcccctgtgggcgaattgtggccaaggatgtcgaggctgcgcttgctgcgcccaagaaggccgcaccagtgactgctccacggccggatgtgccattggggtcgacggtaccattcacgacaatgcagggtgctgtcagcaagaacatggtggagagccttgccatcccgacattcagggtcggatacaccatcacaactgatgctcttgatcagctctacaaaaaaattaagtcgaagggggttacaatgacagcactgttggctaaggcgacagcaatggcgctggttcagcatcctgtggtgaactccagctgcagggatgggaagagcttcacctacagcagtagtatcaacattgccgtggcagtggccatagatggtgggttgattacaccagttcttcaagatgctgataagcttgacatttattcattgtcaaggaaatggaaagagttagttgataaggcgcgagcaaagcagttgcagccccatgagtacaactctggcacgtttactctctcgaatcttggtatgtttggagttgataggtttgatgcaatactgccacctggaactggagcaatcatggccgtcggggcatcagaacccaccattgttggtacaaaagatggtagaattgggatcaagaatcaaatgcaggtaaatgttaccgccgatcatcgggttatttatggagctgaccttgctgcttttctgcaaacacttgccaagataattgaggatcccaaggatcttacattctgaatgtcccaactgattgtttttccctgaggcaatcaaaaccgggtgcttcttacctatcagtagatgtgtagtttgtcttctgtttatgtgattaggtgttttaagctgtcaccaatgtcagcatcaggtaaattttccctgttggttaccttattatcatcggtttgtgtttcaataaaattcttttttttgtcttgcttaactaaaataggtgtatctaccatttttactggacgtttcatggatagtggattttgttgagctcctcaatgtaccgtatccttgtgggatacaaagaatgaaatgtaccttgtaccaccctgtggttgatttctcatgcttgtcaaacagaaatatggttgacgctcttgcaagggtgctgacgctatatcttcagggagatctgtaaaaacgggtcacatatctgtttgttttacatgtgaaggagacggatcatggtttctccaaaccactccaatatgccaaggctgtagggtatcggatatcctgacctgctgttgtacattcctgggatagcacaagcgcgggcgggagggagacggtgccgcccggacacgggcgagaggcggccccttggcgacgcagctcacgcccggtgagagcccgtgctggagcgcatgcccgggcgacagggaggcgaggcgctggttgggcgagagcacggggcgagagcgagctggcgccatttgattggtccacgtggcgccacgtgtgctagccgttgcaactagttgattttgacctaaaaattcaaaaaaactgcaaaaaatcacaaatttcatcctcaatgcccttataaatacccctatccgggtggagctcattgtacacactacatctcaaattttctcttccaaactctcctccacacaacgtcaggttgctccccagatttgaacacgttcatggatctcttgcagtccgatgggtcacctacaacccttccgtttgatgagtcttctccactatatcgttgctttgatgtttcaggctcagtaccccgtgcactatttccggctgtgcgtcaacc

SEQ ID NO: 35178 - DNA, 4190 bp, Zea Mays
gtaatttgagcatggcagccacgtagatgtgtccaggtactgctggcaccatgggaatacgaccttgctgcatgttgaacaggttttaggggcatctgtccattccagttgcttaaaaggcaaaattaattgaaggtcgccctccgtgccttgagttccacctacagaccactgcaaggtgtggagctacttgtattctattttgtgtagcctctccccagtccctaggtttgcctgaccctgaaccgagcacaacaatccctgagtggtgaccacaaccagcagttcacctatatcaccgtggccagaacggagtcaagtcatcgtggaactggtgctgcgggcagcctcaccgtggaccgatcgactggagtcatccctggtcaatctcgcgcacgcaccgagactttggaaggagcaaattggacccaatttggatgaacactttgatgcagacatccacaagtgaattggatctaagtccatacaccacttcatgtaaacacttatcagacatggtatcaattcttcaggataggttcctcaacctacaggcactcctgtcatgccatcatctactggtctaagtttaggaaatattagggtggcattgaaaaccaaacttccaaatttctcaattagcgaagatcttacacttatttcctaatggctaaacatgagcctaaacctagtgggtagtggctggtaagtaggtaaacatagtcttttggaatgtggtatgagtttagtacgttgatcattagtgtatcacaatgtgagaatatctagttgtaggtatgagacaacataagtcttccttttggaaaggtatataaagagagtacaaaacctaaagggagcattgtaccccaactaaaaattatgtagcttggaaggccaatgggatcttaccaaagagcaagtgaccaagttcatgtcgtaccactgccaagtcataaacaaaaacgacagtagcctacaagactgtttttgccatgaccttgtacaatagcttagagaaaaggcccttctctacttctcattgttgggaggttctaaagaatgaagcaaaatggttagacttggagtagggatcaaaaaatgttgatgtgttagtggactaaggtgcagattctatccccatgggcaatggtaacatgtgtctggtttcttaatctaataacaagagtcgactcaagagagacaatgacaagactaccaagaagaagacatcaacatacccgacatttgacagcactgagtacatctccaagatgtcaaatttgacaatgaagaagattgagtacttgtagaggtccgatggaacacttggcactaacattcactaacttgttcaaatagaggaaaagaagatggaaatggagaaaggcatctaaccatcaaggccaataaggaggagagtgaagctgagctcacgacaatggcaagggccaaggaagacgagcagatcatgggaattgacctagaatcttgcaatctagcaaaacgatcattttatgatgccatgcaacatgacattctagaaatatgggtggctaccacgaagcaccaagggggaaaaaggaaagagtattggcgcaaaccttgggcttgctggagcaatccccaaagccgggttagcagcaggagcgacgagcccaaaccttcctacccctcgtcgtcctcggctaatccgccgcgcctccgatactcccaaggcagcgcccgccagctgcaacaacagcatcagcaagcgaggagtagccaccagcccaccacgatctcatcagactcctctcaaatcctcccgcccactctccatttccctcccctcccccgccaccctgcaatggccggtctcctccacctccagtccacgcttctcccatcggcgtccgcgctccgccgccgtgcaggcgtgccggtgccatcctcgtcccgccgccgatgccggattgaggccaagatccgggaaatcttcatgccagcgctcagctccaccatgaccgagggcaagatcgtctcctggaccgccgctgagggcgaccgccttgccaagggcgaccccgtcgtcgtcgtcgagtccgacaaggccgacatggacgtcgagaccttctacgacggcttcctcgccgccgtcctcgtgcccgctggcgactcagcgcccgtcggctccgccatcgcgctgcttgccgagtcagaggaggacatcccagtggcccagtcacaggctgcctccttctcctccacgtcccccttaccgtcgcctccgcaagaaactgctgctcaagaagcatccccttccccgccgccacctcctcccccagggccggtgtcagtctctgctcccacgccgcctttgccagcaacacaaggcgagcgtgtggttgcttcaccctacgccaagaagctcgccaaggacctcggcgttgatcttttctcagtcacggggtcaggcccctgtgggcgaattgtggccaaggatgtcgaggctgcgcttgctgcgcccaagaaggccgcaccagtgactgctccacggccggatgtgccattggggtcgacggtaccattcacgacaatgcagggtgctgtcagcaagaacatggtggagagccttgccatcccgacattcagggtcggatacaccatcacaactgatgctcttgatcagctctacaaaaaaattaagtcgaagggggttacaatgacagcactgttggctaaggcgacagcaatggcgctggttcagcatcctgtggtgaactccagctgcagggatgggaagagcttcacctacagcagtagtatcaacattgccgtggcagtggccatagatggtgggttgattacaccagttcttcaagatgctgataagcttgacatttattcattgtcaaggaaatggaaagagttagttgataaggcgcgagcaaagcagttgcagccccatgagtacaactctggcacgtttactctctcgaatcttggtatgtttggagttgataggtttgatgcaatactgccacctggaactggagcaatcatggccgtcggggcatcagaacccaccattgttggtacaaaagatggtagaattgggatcaagaatcaaatgcaggtaaatgttaccgccgatcatcgggttatttatggagctgaccttgctgcttttctgcaaacacttgccaagataattgaggatcccaaggatcttacattctgaatgtcccaactgattgtttttccctgaggcaatcaaaaccgggtgcttcttacctatcagtagatgtgtagtttgtcttctgtttatgtgattaggtgttttaagctgtcaccaatgtcagcatcaggtgtatctaccatttttactggacgtttcatggatagtggattttgttgagctcctcaatgtaccgtatccttgtgggatacaaagaatgaaatgtaccttgtaccaccctgtggttgatttctcatgcttgtcaaacagaaatatggttgacgctcttgcaagggtgctgacgctatatcttcagggagatctgtaaaaacgggtcacatatctgtttgttttacatgtgaaggagacggatcatggtttctccaaaccactccaatatgccaaggctgtagggtatcggatatcctgacctgctgttgtacattcctgggatagcacaagcgcgggcgggagggagacggtgccgcccggacacgggcgagaggcggccccttggcgacgcagctcacgcccggtgagagcccgtgctggagcgcatgcccgggcgacagggaggcgaggcgctggttgggcgagagcacggggcgagagcgagctggcgccatttgattggtccacgtggcgccacgtgtgctagccgttgcaactagttgattttgacctaaaaattcaaaaaaactgcaaaaaatcacaaatttcatcctcaatgcccttataaatacccctatccgggtggagctcattgtacacactacatctcaaattttctcttccaaactctcctccacacaacgtcaggttgctccccagatttgaacacgttcatggatctcttgcagtccgatgggtcacctacaacccttccgtttgatgagtcttctccactatatcgttgctttgatgtttcaggctcagtaccccgtgcactatttccggctgtgcgtcaacc

SEQ ID NO: 35179 - DNA, 3150 bp, Zea Mays
attctaagtgtggctgtgcacctgtgagtaatttgagcatggcagccacgtagatgtgtccaggtactgctggcaccatgggaatacgaccttgctgcatgttgaacaggttttaggggcatctgtccattccagttgcttaaaaggcaaaattaattgaaggtcgccctccgtgccttgagttccacctacagaccactgcaaggtgtggagctacttgtattctattttgtgtagcctctccccagtccctaggtttgcctgaccctgaaccgagcacaacaatccctgagtggtgaccacaaccagcagttcacctatatcaccgtggccagaacggagtcaagtcatcgtggaactggtgctgcgggcagcctcaccgtggaccgatcgactggagtcatccctggtcaatctcgcgcacgcaccgagactttggaaggcaccaagggggaaaaaggaaagagtattggcgcaaaccttgggcttgctggagcaatccccaaagccgggttagcagcaggagcgacgagcccaaaccttcctacccctcgtcgtcctcggctaatccgccgcgcctccgatactcccaaggcagcgcccgccagctgcaacaacagcatcagcaagcgaggagtagccaccagcccaccacgatctcatcagactcctctcaaatcctcccgcccactctccatttccctcccctcccccgccaccctgcaatggccggtctcctccacctccagtccacgcttctcccatcggcgtccgcgctccgccgccgtgcaggcgtgccggtgccatcctcgtcccgccgccgatgccggattgaggccaagatccgggaaatcttcatgccagcgctcagctccaccatgaccgagggcaagatcgtctcctggaccgccgctgagggcgaccgccttgccaagggcgaccccgtcgtcgtcgtcgagtccgacaaggccgacatggacgtcgagaccttctacgacggcttcctcgccgccgtcctcgtgcccgctggcgactcagcgcccgtcggctccgccatcgcgctgcttgccgagtcagaggaggacatcccagtggcccagtcacaggctgcctccttctcctccacgtcccccttaccgtcgcctccgcaagaaactgctgctcaagaagcatccccttccccgccgccacctcctcccccagggccggtgtcagtctctgctcccacgccgcctttgccagcaacacaaggcgagcgtgtggttgcttcaccctacgccaagaagctcgccaaggacctcggcgttgatcttttctcagtcacggggtcaggcccctgtgggcgaattgtggccaaggatgtcgaggctgcgcttgctgcgcccaagaaggccgcaccagtgactgctccacggccggatgtgccattggggtcgacggtaccattcacgacaatgcagggtgctgtcagcaagaacatggtggagagccttgccatcccgacattcagggtcggatacaccatcacaactgatgctcttgatcagctctacaaaaaaattaagtcgaagggggttacaatgacagcactgttggctaaggcgacagcaatggcgctggttcagcatcctgtggtgaactccagctgcagggatgggaagagcttcacctacagcagtagtatcaacattgccgtggcagtggccatagatggtgggttgattacaccagttcttcaagatgctgataagcttgacatttattcattgtcaaggaaatggaaagagttagttgataaggcgcgagcaaagcagttgcagccccatgagtacaactctggcacgtttactctctcgaatcttggtatgtttggagttgataggtttgatgcaatactgccacctggaactggagcaatcatggccgtcggggcatcagaacccaccattgttggtacaaaagatggtagaattgggatcaagaatcaaatgcaggtaaatgttaccgccgatcatcgggttatttatggagctgaccttgctgcttttctgcaaacacttgccaagataattgaggatcccaaggatcttacattctgaatgtcccaactgattgtttttccctgaggcaatcaaaaccgggtgcttcttacctatcagtagatgtgtagtttgtcttctgtttatgtgattaggtgttttaagctgtcaccaatgtcagcatcaggtaaattttccctgttggttaccttattatcatcggtttgtgtttcaataaaattcttttttttgtcttgcttaactaaaataggtgtatctaccatttttactggacgtttcatggatagtggattttgttgagctcctcaatgtaccgtatccttgtgggatacaaagaatgaaatgtaccttgtaccaccctgtggttgatttctcatgcttgtcaaacagaaatatggttgacgctcttgcaagggtgctgacgctatatcttcagggagatctgtaaaaacgggtcacatatctgtttgttttacatgtgaaggagacggatcatggtttctccaaaccactccaatatgccaaggctgtagggtatcggatatcctgacctgctgttgtacattcctgggatagcacaagcgcgggcgggagggagacggtgccgcccggacacgggcgagaggcggccccttggcgacgcagctcacgcccggtgagagcccgtgctggagcgcatgcccgggcgacagggaggcgaggcgctggttgggcgagagcacggggcgagagcgagctggcgccatttgattggtccacgtggcgccacgtgtgctagccgttgcaactagttgattttgacctaaaaattcaaaaaaactgcaaaaaatcacaaatttcatcctcaatgcccttataaatacccctatccgggtggagctcattgtacacactacatctcaaattttctcttccaaactctcctccacacaacgtcaggttgctccccagatttgaacacgttcatggatctcttgcagtccgatgggtcacctacaacccttccgtttgatgagtcttctccactatatcgttgctttgatgtttcaggctcagtaccccgtgcactatttccggctgtgcgtcaacc

SEQ ID NO: 35180 - DNA, 2175 bp, Zea Mays
tgtaaacacttatcagacatggcaccaagggggaaaaaggaaagagtattggcgcaaaccttgggcttgctggagcaatccccaaagccgggttagcagcaggagcgacgagcccaaaccttcctacccctcgtcgtcctcggctaatccgccgcgcctccgatactcccaaggcagcgcccgccagctgcaacaacagcatcagcaagcgaggagtagccaccagcccaccacgatctcatcagactcctctcaaatcctcccgcccactctccatttccctcccctcccccgccaccctgcaatggccggtctcctccacctccagtccacgcttctcccatcggcgtccgcgctccgccgccgtgcaggcgtgccggtgccatcctcgtcccgccgccgatgccggattgaggccaagatccgggaaatcttcatgccagcgctcagctccaccatgaccgagggcaagatcgtctcctggaccgccgctgagggcgaccgccttgccaagggcgaccccgtcgtcgtcgtcgagtccgacaaggccgacatggacgtcgagaccttctacgacggcttcctcgccgccgtcctcgtgcccgctggcgactcagcgcccgtcggctccgccatcgcgctgcttgccgagtcagaggaggacatcccagtggcccagtcacaggctgcctccttctcctccacgtcccccttaccgtcgcctccgcaagaaactgctgctcaagaagcatccccttccccgccgccacctcctcccccagggccggtgtcagtctctgctcccacgccgcctttgccagcaacacaaggcgagcgtgtggttgcttcaccctacgccaagaagctcgccaaggacctcggcgttgatcttttctcagtcacggggtcaggcccctgtgggcgaattgtggccaaggatgtcgaggctgcgcttgctgcgcccaagaaggccgcaccagtgactgctccacggccggatgtgccattggggtcgacggtaccattcacgacaatgcagggtgctgtcagcaagaacatggtggagagccttgccatcccgacattcagggtcggatacaccatcacaactgatgctcttgatcagctctacaaaaaaattaagtcgaagggggttacaatgacagcactgttggctaaggcgacagcaatggcgctggttcagcatcctgtggtgaactccagctgcagggatgggaagagcttcacctacagcagtagtatcaacattgccgtggcagtggccatagatggtgggttgattacaccagttcttcaagatgctgataagcttgacatttattcattgtcaaggaaatggaaagagttagttgataaggcgcgagcaaagcagttgcagccccatgagtacaactctggcacgtttactctctcgaatcttggtatgtttggagttgataggtttgatgcaatactgccacctggaactggagcaatcatggccgtcggggcatcagaacccaccattgttggtacaaaagatggtagaattgggatcaagaatcaaatgcaggtaaatgttaccgccgatcatcgggttatttatggagctgaccttgctgcttttctgcaaacacttgccaagataattgaggatcccaaggatcttacattctgaatgtcccaactgattgtttttccctgaggcaatcaaaaccgggtgcttcttacctatcagtagatgtgtagtttgtcttctgtttatgtgattaggtgttttaagctgtcaccaatgtcagcatcaggtaaattttccctgttggttaccttattatcatcggtttgtgtttcaataaaattcttttttttgtcttgcttaactaaaataggtgtatctaccatttttactggacgtttcatggatagtggattttgttgagctcctcaatgtaccgtatccttgtgggatacaaagaatgaaatgtaccttgtaccaccctgtggttgatttctcatgcttgtcaaacagaaatatggttgacgctcttgcaagggtgctgacgctatatcttcagggagatctgtaaaaacgggtcacatatctgtttgttttacatgtgaaggagacggatcatggtttctccaaaccactccaatatgccaaggctgtagggt

SEQ ID NO: 35181 - DNA, 4850 bp, Zea Mays
gaaataggtgtatgcctaattccctttcagccactcgtcgcccgcggattgcgtggccgaccgttgcgctggcggccgttggctcaccggatagtccggtgaattataatcgtacgccgccaaactttctcgagagtggccagttcgccggaagccagcctggcgcaccggacactgtccggtgcaccatcggacagtccggtgtgccagactgagctgagtgttggctgcttagagccaagtccttttcttcttctcttttttttttgtttctagcacttagacaaaacatgttagtactcaaaacaatgtactaagtctagaaacgtatcttgttacatgatttgcacttctcttttcatttggcatatactcaactcacttagtatgtgttggacacttaatcaccaaaatataatagaaatggcccaatggcacatttccctttcacaacgcttgagcccatagagggtgaaccgactgtaagggtgattttgtccattaacggtggtgacattgtattgctcgagttagtcggagaataagacatgtcggcgacgtgccgagggtggtggcgcgtgttattcttgaatagtcggcgatgacagcaagtggcgcgtggaagagagagagtcggttgagaaaatgagaggcttggaaagcgcaaaaaccctagcaacgatcattcccttctataatcatagtaaaataaagggcaatgataataacatcagtcgtttcacacactatacaaactccgagtaaaaactccagtgtaattaagtcagggtcgatactattgcgtaattaccccattgtacattattttccaagaatgtagcaagtaaccaggggttcaaacgtacttaggctccctgattaccctataaatacatccatctgcaccccagatgataggcacttgacaagacattcgtgcaccctagcctcttgatttgttgagcaatgttgcctcacttgctcccaagtgcttgggcccacatgtcaagatccaacaatcatgccaactaattgggtaccaattgatgactctacatgctatgattctgacaactcataccaccatgtcaatatcgaccatgacaatgatctatgagtgttgttggtgtcacccgttgatagatgagtgcttatgttatgaacttttgggaactatagtctctacatttgaagccagtctataattcaaagtttggtcacatgttttagtagttgaacatcaacaataactttgtagtttgttgcagctatgtgtaaattaactactgtaatgatctaatgtgtttctatccttgaattattgagtacttgagtatatcattgcattagaaaagtaatgtgtggttatgattggtgcctatttcattgtctactaagtactataatcgttgcacttcaatgttgtataaagtatacactttgattgttgttgcatcgaatacaggagcaaattggacccaatttggatgaacactttgatgcagacatccacaagtgaattggatctaagtccatacaccacttcatgtaaacacttatcagacatggtatcaattcttcaggataggttcctcaacctacaggcactcctgtcatgccatcatctactggtctaagtttaggaaatattagggtggcattgaaaaccaaacttccaaatttctcaattagcgaagatcttacacttatttcctaatggctaaacatgagcctaaacctagtgggtagtggctggtaagtaggtaaacatagtcttttggaatgtggtatgagtttagtacgttgatcattagtgtatcacaatgtgagaatatctagttgtaggtatgagacaacataagtcttccttttggaaaggtatataaagagagtacaaaacctaaagggagcattgtaccccaactaaaaattatgtagcttggaaggccaatgggatcttaccaaagagcaagtgaccaagttcatgtcgtaccactgccaagtcataaacaaaaacgacagtagcctacaaggtaatgtaacattatttcagtctattgtgcatgaaagtagtaccttgtacatgaccatagtgacatgatttattttgtagactgtttttgccatgaccttgtacaatagcttagagaaaaggcccttctctacttctcattgttgggaggttctaaagaatgaagcaaaatggttagacttggagtagggatcaaaaaatgttgatgtgttagtggactaaggtgcagattctatccccatgggcaatggtaacatgtgtctggtttcttaatctaataacaagagtcgactcaagagagacaatgacaagactaccaagaagaagacatcaacatacccgacatttgacagcactgagtacatctccaagatgtcaaatttgacaatgaagaagattgagtacttgtagaggtccgatggaacacttggcactaacattcactaacttgttcaaatagaggaaaagaagatggaaatggagaaaggcatctaaccatcaaggccaataaggaggagagtgaagctgagctcacgacaatggcaagggccaaggaagacgagcagatcatgggaattgacctagaatcttgcaatctagcaaaacgatcattttatgatgccatgcaacatgacattctagaaatatgggtggctaccacgaagcaccaagggggaaaaaggaaagagtattggcgcaaaccttgggcttgctggagcaatccccaaagccgggttagcagcaggagcgacgagcccaaaccttcctacccctcgtcgtcctcggctaatccgccgcgcctccgatactcccaaggcagcgcccgccagctgcaacaacagcatcagcaagcgaggagtagccaccagcccaccacgatctcatcagactcctctcaaatcctcccgcccactctccatttccctcccctcccccgccaccctgcaatggccggtctcctccacctccagtccacgcttctcccatcggcgtccgcgctccgccgccgtgcaggcgtgccggtgccatcctcgtcccgccgccgatgccggattgaggccaagatccgggaaatcttcatgccagcgctcagctccaccatgaccgagggcaagatcgtctcctggaccgccgctgagggcgaccgccttgccaagggcgaccccgtcgtcgtcgtcgagtccgacaaggccgacatggacgtcgagaccttctacgacggcttcctcgccgccgtcctcgtgcccgctggcgactcagcgcccgtcggctccgccatcgcgctgcttgccgagtcagaggaggacatcccagtggcccagtcacaggctgcctccttctcctccacgtcccccttaccgtcgcctccgcaagaaactgctgctcaagaagcatccccttccccgccgccacctcctcccccagggccggtgtcagtctctgctcccacgccgcctttgccagcaacacaaggcgagcgtgtggttgcttcaccctacgccaagaagctcgccaaggacctcggcgttgatcttttctcagtcacggggtcaggcccctgtgggcgaattgtggccaaggatgtcgaggctgcgcttgctgcgcccaagaaggccgcaccagtgactgctccacggccggatgtgccattggggtcgacggtaccattcacgacaatgcagggtgctgtcagcaagaacatggtggagagccttgccatcccgacattcagggtcggatacaccatcacaactgatgctcttgatcagctctacaaaaaaattaagtcgaagggggttacaatgacagcactgttggctaaggcgacagcaatggcgctggttcagcatcctgtggtgaactccagctgcagggatgggaagagcttcacctacagcagtagtatcaacattgccgtggcagtggccatagatggtgggttgattacaccagttcttcaagatgctgataagcttgacatttattcattgtcaaggaaatggaaagagttagttgataaggcgcgagcaaagcagttgcagccccatgagtacaactctggcacgtttactctctcgaatcttggtatgtttggagttgataggtttgatgcaatactgccacctggaactggagcaatcatggccgtcggggcatcagaacccaccattgttggtacaaaagatggtagaattgggatcaagaatcaaatgcaggtaaatgttaccgccgatcatcgggttatttatggagctgaccttgctgcttttctgcaaacacttgccaagataattgaggatcccaaggatcttacattctgaatgtcccaactgattgtttttccctgaggcaatcaaaaccgggtgcttcttacctatcagtagatgtgtagtttgtcttctgtttatgtgattaggtgttttaagctgtcaccaatgtcagcatcaggtaaattttccctgttggttaccttattatcatcggtttgtgtttcaataaaattcttttttttgtcttgcttaactaaaataggtgtatctaccatttttactggacgtttcatggatagtggattttgttgagctcctcaatgtaccgtatccttgtgggatacaaagaatgaaatgtaccttgtaccaccctgtggttgatttctcatgcttgtcaaacagaaatatggttgacgctcttgcaagggtgctgacgctatatcttcagggagatctgtaaaaacgggtcacatatctgtttgttttacatgtgaaggagacggatcatggtttctccaaaccactccaatatgccaaggctgtagggt

SEQ ID NO: 35182 - DNA, 2545 bp, Zea Mays
gttgcttaaaaggcaaaattaattgaaggtcgccctccgtgccttgagttccacctacagaccactgcaaggtgtggagctacttgtattctattttgtgtagcctctccccagtccctaggtttgcctgaccctgaaccgagcacaacaatccctgagtggtgaccacaaccagcagttcacctatatcaccgtggccagaacggagtcaagtcatcgtggaactggtgctgcgggcagcctcaccgtggaccgatcgactggagtcatccctggtcaatctcgcgcacgcaccgagactttggaaggagcaaattggacccaatttggatgaacactttgatgcagacatccacaagtgaattggatctaagtccatacaccacttcatgcaccaagggggaaaaaggaaagagtattggcgcaaaccttgggcttgctggagcaatccccaaagccgggttagcagcaggagcgacgagcccaaaccttcctacccctcgtcgtcctcggctaatccgccgcgcctccgatactcccaaggcagcgcccgccagctgcaacaacagcatcagcaagcgaggagtagccaccagcccaccacgatctcatcagactcctctcaaatcctcccgcccactctccatttccctcccctcccccgccaccctgcaatggccggtctcctccacctccagtccacgcttctcccatcggcgtccgcgctccgccgccgtgcaggcgtgccggtgccatcctcgtcccgccgccgatgccggattgaggccaagatccgggaaatcttcatgccagcgctcagctccaccatgaccgagggcaagatcgtctcctggaccgccgctgagggcgaccgccttgccaagggcgaccccgtcgtcgtcgtcgagtccgacaaggccgacatggacgtcgagaccttctacgacggcttcctcgccgccgtcctcgtgcccgctggcgactcagcgcccgtcggctccgccatcgcgctgcttgccgagtcagaggaggacatcccagtggcccagtcacaggctgcctccttctcctccacgtcccccttaccgtcgcctccgcaagaaactgctgctcaagaagcatccccttccccgccgccacctcctcccccagggccggtgtcagtctctgctcccacgccgcctttgccagcaacacaaggcgagcgtgtggttgcttcaccctacgccaagaagctcgccaaggacctcggcgttgatcttttctcagtcacggggtcaggcccctgtgggcgaattgtggccaaggatgtcgaggctgcgcttgctgcgcccaagaaggccgcaccagtgactgctccacggccggatgtgccattggggtcgacggtaccattcacgacaatgcagggtgctgtcagcaagaacatggtggagagccttgccatcccgacattcagggtcggatacaccatcacaactgatgctcttgatcagctctacaaaaaaattaagtcgaagggggttacaatgacagcactgttggctaaggcgacagcaatggcgctggttcagcatcctgtggtgaactccagctgcagggatgggaagagcttcacctacagcagtagtatcaacattgccgtggcagtggccatagatggtgggttgattacaccagttcttcaagatgctgataagcttgacatttattcattgtcaaggaaatggaaagagttagttgataaggcgcgagcaaagcagttgcagccccatgagtacaactctggcacgtttactctctcgaatcttggtatgtttggagttgataggtttgatgcaatactgccacctggaactggagcaatcatggccgtcggggcatcagaacccaccattgttggtacaaaagatggtagaattgggatcaagaatcaaatgcaggtaaatgttaccgccgatcatcgggttatttatggagctgaccttgctgcttttctgcaaacacttgccaagataattgaggatcccaaggatcttacattctgaatgtcccaactgattgtttttccctgaggcaatcaaaaccgggtgcttcttacctatcagtagatgtgtagtttgtcttctgtttatgtgattaggtgttttaagctgtcaccaatgtcagcatcaggtaaattttccctgttggttaccttattatcatcggtttgtgtttcaataaaattcttttttttgtcttgcttaactaaaataggtgtatctaccatttttactggacgtttcatggatagtggattttgttgagctcctcaatgtaccgtatccttgtgggatacaaagaatgaaatgtaccttgtaccaccctgtggttgatttctcatgcttgtcaaacagaaatatggttgacgctcttgcaagggtgctgacgctatatcttcagggagatctgtaaaaacgggtcacatatctgtttgttttacatgtgaaggagacggatcatggtttctccaaaccactccaatatgccaaggctgtagggt

SEQ ID NO: 35183 - DNA, 1890 bp, Zea Mays
gcatgcctaccttgatatccatacctttatagatacttaatgaagtatcaaaatatgatttacaaaaatgcttagccctgcttagatcttgtggatagaggctatcttttgcaataatgcctagctcaagggttatcctgaggaaggatgacttctacctgcaagaatattttcattgggagcatggtgggatcttactgcaaagttccctataatgctcttttcatcctaaggaacacaaacaatcctaaggatggaagtacttaaatcgggacttgggctatgaacaggtgatgttctacccaggttaattaaggattggatgcgtatgtaggcctgtatgatcaaggactatcttaactggccacatgccctggatatgggacaggataagcttgaacccggctattccatacatgaaaagacaatcgcgcactgggagtggagagatggcgagagtggcacgtaccctcctggcaaaggaccgcctaaaaagggtggtgtgctctcgggtggcgcggacctgttcatgcagtggaggatccgtgggaatggttgacatatgtaagggttaagtgctacatatgtcgtgtggttagagatcctcagctgagtaaatcgattcggatcgccgttatatccccggagagttgagacttgatcgctgccctgcaacctaagtcaggatgtaaacattatgaataaaaatgaggttgtattgatgagatggtgaaattagactagatgcaactggagtctattaatttttaatctggccttaaaatattgaaagtaaggactcactttagtaagctatttctgcaaaagtatctaatttgattcttgctaaagcctctccttgattcctatttaaccagcatatccttgagagtctttttccttagtcgggtaagacttgcgaaagtacactccgtactcagggttttcgaacccatgttgttgtaggtgatgaggagtattctaggagttcctgtggctggagggcgtttccagttctagaggaagattagttaggcttatgtataagctttggagggttcctaccttcctgctattgtaataagttatgcactttgagtatatcaggacttgtaataaatataactcttcctatgtaataaccttgagttttagaaatgaaaagaatgttttataaagtcttccgctcttatctccgaagtgtgtgtgtatcgaatgtgattactgtaatatgcatgtatggtgggagatccttgggatgatgagttcaagtggttgaactcgtgatagccttgttaagttacctggtacacgtgcatagccatctgagaccatcaaggcaaggattggtgcatgtgggcctgataacttgggagggctgccacaaagacagcaaggatcttcccaagaactggcaagtccccgatgtgctctttctattgattttgcaccccgcccaatcggcatccgaataaccaatcaaatcaaatgtggatcccctaggataccaaagcccaaacttaggagtgtaaactaaatatctcaagattcattttacagccgtaaggtgagcttccttagggtcggcttggaatctttcgcacatgcatacggaaagcataatgtccggtcgagatgcacataaatagagtaaagaacctatcatcgaccggtataccttttgatccacggacttaccttccgtgtcgagatcgagatgcccattggttcccatgggtgtcttgatgggtttggcatccttcatcccaaacttgtttagaatgtcttgagtatacttcgtttggctaatgaaggtgccctcttggagttgcttcacttgaaatcctaagaaatacttcaactcccccatcattgacatctcgaattttt

SEQ ID NO: 35184 - DNA, 541 bp, Zea Mays
tttaggggtgagcttgactaaattcagtattctaagtgtggctgtgcacctgtgagtaatttgagcatggcagccacgtagatgtgtccaggtactgctggcaccatgggaatacgaccttgctgcatgttgaacaggttttaggggcatctgtccattccagttgcttaaaaggcaaaattaattgaaggtcgccctccgtgccttgagttccacctacagaccactgcaaggtgtggagctacttgtattctattttgtgtagcctctccccagtccctaggtttgcctgaccctgaaccgagcacaacaatccctgagtggtgaccacaaccagcagttcacctatatcaccgtggccagaacggagtcaagtcatcgtggaactggtgctgcgggcagcctcaccgtggaccgatcgactggagtcatccctggtcaatctcgcgcacgcaccgagactttggaaggtgatgaggagtattctaggagttcctgtggctggagggcgtttccagttctagaggaagattagttaggc

SEQ ID NO: 35185 - DNA, 3496 bp, Zea Mays
cactgctatcgcacgtgcttcccgaccaaccgccgtggtcccctcactcgcggacactctccgggcgcccaccacctccgcctcttccgccgccgtgtgtgccggcgacgatgccgcgcaaggcctcctccaactcagatgcgcgggccaagtcgcggaagcggaagcgcgccgccgccagcgcctccccgtccaagcagccggacgaccactcagacgactccgacaccgccgcggcggcgaacggcgacgatgagacgtcccgcgcagcatccgttaacgggggcggaggaaccctagccggcgtcggcggcgatgacgaccccgtgctcgaccttcgtgcggcggaggtgctctcctcctccgccgagcccgtttccgccttccccgccgccgtccgccgtgccgtgagccggcctcacccctcggtgctggctgtaatcgccgccgagcgtgcggcggccagttccgacgatgctccggtcaccccagcctcggtacccgttctcgagaatatttcgcacgggcaactccaggtgatctcggcgatgctgcccgaccatccgtccctgtcctacgaccctgacaagccgtccacgtatgtctgcaccccacctccactgatggagggatgcggagtgcacaaacagttctatgacaaacttcacatcgtgcccaggcactcagattggtttgtgccacagacagtgcacaggttggagaggcaggttgtgccacagtacttctctggaaaatctcaggggcaaacaccagagaagtacatcatgttgaggaacaaggtgattgcgaaatatttggagcgacctgggaaaaggcttgtgtttgctgagtgccaggggcttgtcacaagcacacctgaattgtatgatcttagtaggatagttaggttcttggaatcttgggggatcattaattaccttgcaacagggtcagtgtaccgtggcccgaggacggcatcatctctgatcaaggaagagacaacaggggagcttcagctggtctctgcaccaatgaaatcaattgatggtttgattttgtttgatcggcccaaatgcagtatccaggcaaatgatatatcttcgttggtgtcaacttcatctgctccatttgtggttaatcatgacggtgattcagcaaatttggatgagaagatttgggagcgcttatcagagagttcttgtagtttctgctcacaacctttacccagcatgcactatgagtcacaaaaggagacagacattgctctttgttcagactgcttccacaatgcaaaatttgttactgggcattcaagcttagattttcagagagtggatgcgatgaaagatggatcagacactgatggggacagatggacagatcaggaaactttgctgttgttggagggcatagaaaagttcaatgataactggaatcatatcgcaggtcatgttgggacaaaatcaaaagcacaatgtattcaccatttcattcgtctcccggtggcagatggtttgttagagaacattgaagtgccagaagcatcccttccatctggaatgcaaagcagtggatttttgcattcagattccaatggcagtacttcaggtagccaacctggaaaccagattccattcattaattctgctaatccagtcatgtcactggttgcatttttagctgctgaagtaggaccaagagttgcagcatcctgtgcaagtgcagcattatcggttttgacaagggaagattccaggatgaatgcagaaggcattgatgctatgggccatggtactcatctcaactatggaccctcatcatccatttcttctgaaactgtgaaaaatgctgcaagctgtggcttgtcagcagcagcaacaaagtccaagctttttgcagaccaggaggagcgtgaaattcagagattatctgccaccatcataaatcatcagttaaagagactggagttgaaactgaagcagtttgcggaggttgagacaatgctcttgaaggaaagtgagcggttagatctgatgaggcagcagctggtaactcagcgtatccggatgttatcaacccggttcacttccacaggtggtacaatacctggaggcagcagcggtatggtttcaaacctgatgaatcaggccagcggccttagaccgccgctgatgatgccaggctcggtgacccagtccagcatgccggcaatgtatgcaaataacatgcaggggcatccccagatggctctgctgcaacagcggcaacagatgctctcgttcggacctcgtttgcctctctcggccatcaaccccggctcatcctcgtcggcacccaacatgatgttcaaccatggcatgcccaactcggcagctcctaatcatcaccctttgctgagatcaccctcaggggacaattcaaatgtagaaatatcttcatgaccaagctagcaatgaatttctaccgtcattataactaggagaagtgaagcgagaagtgaatcttgatgtctcccagatcatatgccagtcattgttacatcttctaggactatattgcgtcacctgcaggttgatggaaggcattccagtgatgggtgatgaaattttctaccctaccaaatattgtaggttttatatagtcctcactcctcagtcctcacctgcttaaatttgatctgttctgttttgaaattttcaaaatttgtctaagagcactaaaatgtggcttacatctctctgataactatagacctaagcatccatagattgtgttttaacacatgctgatctgcaccgcacagtcttcagtctacacacatacaataggaagtgtgatgcctactgctcttgtattcctgttatgcaccaggacaagtgtttttgggcaattgtttggtctttttatgttggtgtatgcaggttcttaaaggcaagcccatacaataggaagtgtgatgcctacaacttcgacatatgcttaatgcttgtgggaaatctacttctgtgacatgccatatccggacctcatccaccgttgttcatcagaacctgtgacctgacatccttgttgttgcccaagcccaatggcaaacatcatccgcaagtgctgggacccgaacctggataagcgccctgacatggatgaggtggtgcagttgttggaggccctcgacacaagaaagcgcgatggcatgacaccaaaaggccaggcgggcgggtataaaccttttggatcttattaaccaaagagatacgactttgggctatggttagctcagctccaatctagaatccccagggaaccccaagaattcttggtatacgttcattccaatcctcaattctcttttcgagatttagcgatagtgaatcaattgaacgtgttttgaaaatttgttctacttttggaagaccttgcattatatcactggatctcgatttttcatatataaatgtaactaacctatcgcctttataaagtccttagaaccaac

SEQ ID NO: 35186 - DNA, 2686 bp, Zea Mays
cactgctatcgcacgtgcttcccgaccaaccgccgtggtcccctcactcgcggacactctccgggcgcccaccacctccgcctcttccgccgccgtgtgtgccggcgacgatgccgcgcaaggcctcctccaactcagatgcgcgggccaagtcgcggaagcggaagcgcgccgccgccagcgcctccccgtccaagcagccggacgaccactcagacgactccgacaccgccgcggcggcgaacggcgacgatgagacgtcccgcgcagcatccgttaacgggggcggaggaaccctagccggcgtcggcggcgatgacgaccccgtgctcgaccttcgtgcggcggaggtgctctcctcctccgccgagcccgtttccgccttccccgccgccgtccgccgtgccgtgagccggcctcacccctcggtgctggctgtaatcgccgccgagcgtgcggcggccagttccgacgatgctccggtcaccccagcctcggtacccgttctcgagaatatttcgcacgggcaactccaggtgatctcggcgatgctgcccgaccatccgtccctgtcctacgaccctgacaagccgtccacgtatgtctgcaccccacctccactgatggagggatgcggagtgcacaaacagttctatgacaaacttcacatcgtgcccaggcactcagattggtttgtgccacagacagtgcacaggttggagaggcaggttgtgccacagtacttctctggaaaatctcaggggcaaacaccagagaagtacatcatgttgaggaacaaggtgattgcgaaatatttggagcgacctgggaaaaggcttgtgtttgctgagtgccaggggcttgtcacaagcacacctgaattggtcagtgtaccgtggcccgaggacggcatcatctctgatcaaggaagagacaacaggggagcttcagctggtctctgcaccaatgaaatcaattgatggtttgattttgtttgatcggcccaaatgcagtatccaggcaaatgatatatcttcgttggtgtcaacttcatctgctccatttgtggttaatcatgacggtgattcagcaaatttggatgagaagatttgggagcgcttatcagagagttcttgtagtttctgctcacaacctttacccagcatgcactatgagtcacaaaaggagacagacattgctctttgttcagactgcttccacaatgcaaaatttgttactgggcattcaagcttagattttcagagagtggatgcgatgaaagatggatcagacactgatggggacagatggacagatcaggaaactttgctgttgttggagggcatagaaaagttcaatgataactggaatcatatcgcaggtcatgttgggacaaaatcaaaagcacaatgtattcaccatttcattcgtctcccggtggcagatggtttgttagagaacattgaagtgccagaagcatcccttccatctggaatgcaaagcagtggatttttgcattcagattccaatggcagtacttcaggtagccaacctggaaaccagattccattcattaattctgctaatccagtcatgtcactggttgcatttttagctgctgaagtaggaccaagagttgcagcatcctgtgcaagtgcagcattatcggttttgacaagggaagattccaggatgaatgcagaaggcattgatgctatgggccatggtactcatctcaactatggaccctcatcatccatttcttctgaaactgtgaaaaatgctgcaagctgtggcttgtcagcagcagcaacaaagtccaagctttttgcagaccaggaggagcgtgaaattcagagattatctgccaccatcataaatcatcagttaaagagactggagttgaaactgaagcagtttgcggaggttgagacaatgctcttgaaggaaagtgagcggttagatctgatgaggcagcagctggtaactcagcgtatccggatgttatcaacccggttcacttccacaggtggtacaatacctggaggcagcagcggtatggtttcaaacctgatgaatcaggccagcggccttagaccgccgctgatgatgccaggctcggtgacccagtccagcatgccggcaatgtatgcaaataacatgcaggggcatccccagatggctctgctgcaacagcggcaacagatgctctcgttcggacctcgtttgcctctctcggccatcaaccccggctcatcctcgtcggcacccaacatgatgttcaaccatggcatgcccaactcggcagctcctaatcatcaccctttgctgagatcaccctcaggggacaattcaaatgtaggttagtgagatgagtttttcatttttttgggtcttagattcctgagctgtagcccttgactcgtgatcattaaccattgtaattcgattgcacaatcacatatagaggttgttaccagcgataggttctcattttctcttaggctgtggaccgtgtgtgcgtgactgtttgctcggatgagattgatgttgctagtggcttaggcgatgcacagaggatgtagagtttctttcaccctgactaattgttattactgcgccaccttagaatgatgtaaaaaatgaatccgcatgaattccccattcttcatcttggtttgcatct

SEQ ID NO: 35187 - DNA, 2679 bp, Zea Mays
cactgctatcgcacgtgcttcccgaccaaccgccgtggtcccctcactcgcggacactctccgggcgcccaccacctccgcctcttccgccgccgtgtgtgccggcgacgatgccgcgcaaggcctcctccaactcagatgcgcgggccaagtcgcggaagcggaagcgcgccgccgccagcgcctccccgtccaagcagccggacgaccactcagacgactccgacaccgccgcggcggcgaacggcgacgatgagacgtcccgcgcagcatccgttaacgggggcggaggaaccctagccggcgtcggcggcgatgacgaccccgtgctcgaccttcgtgcggcggaggtgctctcctcctccgccgagcccgtttccgccttccccgccgccgtccgccgtgccgtgagccggcctcacccctcggtgctggctgtaatcgccgccgagcgtgcggcggccagttccgacgatgctccggtcaccccagcctcggtacccgttctcgagaatatttcgcacgggcaactccaggtgatctcggcgatgctgcccgaccatccgtccctgtcctacgaccctgacaagccgtccacgtatgtctgcaccccacctccactgatggagggatgcggagtgcacaaacagttctatgacaaacttcacatcgtgcccaggcactcagattggtttgtgccacagacagtgcacaggttggagaggcaggttgtgccacagtacttctctggaaaatctcaggggcaaacaccagagaagtacatcatgttgaggaacaaggtgattgcgaaatatttggagcgacctgggaaaaggcttgtgtttgctgagtgccaggggcttgtcacaagcacacctgaattgtatgatcttagtaggatagttaggttcttggaatcttgggggatcattaattaccttgcaacagggtcagtgtaccgtggcccgaggacggcatcatctctgatcaaggaagagacaacaggggagcttcagctggtctctgcaccaatgaaatcaattgatggtttgattttgtttgatcggcccaaatgcagtatccaggcaaatgatatatcttcgttggtgtcaacttcatctgctccatttgtggttaatcatgacggtgattcagcaaatttggatgagaagatttgggagcgcttatcagagagttcttgtagtttctgctcacaacctttacccagcatgcactatgagtcacaaaaggagacagacattgctctttgttcagactgcttccacaatgcaaaatttgttactgggcattcaagcttagattttcagagagtggatgcgatgaaagatggatcagacactgatggggacagatggacagatcaggaaactttgctgttgttggagggcatagaaaagttcaatgataactggaatcatatcgcaggtcatgttgggacaaaatcaaaagcacaatgtattcaccatttcattcgtctcccggtggcagatggtttgttagagaacattgaagtgccagaagcatcccttccatctggaatgcaaagcagtggatttttgcattcagattccaatggcagtacttcagctgctgaagtaggaccaagagttgcagcatcctgtgcaagtgcagcattatcggttttgacaagggaagattccaggatgaatgcagaaggcattgatgctatgggccatggtactcatctcaactatggaccctcatcatccatttcttctgaaactgtgaaaaatgctgcaagctgtggcttgtcagcagcagcaacaaagtccaagctttttgcagaccaggaggagcgtgaaattcagagattatctgccaccatcataaatcatcagttaaagagactggagttgaaactgaagcagtttgcggaggttgagacaatgctcttgaaggaaagtgagcggttagatctgatgaggcagcagctggtaactcagcgtatccggatgttatcaacccggttcacttccacaggtggtacaatacctggaggcagcagcggtatggtttcaaacctgatgaatcaggccagcggccttagaccgccgctgatgatgccaggctcggtgacccagtccagcatgccggcaatgtatgcaaataacatgcaggggcatccccagatggctctgctgcaacagcggcaacagatgctctcgttcggacctcgtttgcctctctcggccatcaaccccggctcatcctcgtcggcacccaacatgatgttcaaccatggcatgcccaactcggcagctcctaatcatcaccctttgctgagatcaccctcaggggacaattcaaatgtaggttagtgagatgagtttttcatttttttgggtcttagattcctgagctgtagcccttgactcgtgatcattaaccattgtaattcgattgcacaatcacatatagaggttgttaccagcgataggttctcattttctcttaggctgtggaccgtgtgtgcgtgactgtttgctcggatgagattgatgttgctagtggcttaggcgatgcacagaggatgtagagtttctttcaccctgactaattgttattactgcgccaccttagaatgatgtaaaaaatgaatccgcatgaattccccattcttcatcttggtttgcatct

SEQ ID NO: 35188 - DNA, 2736 bp, Zea Mays
cactgctatcgcacgtgcttcccgaccaaccgccgtggtcccctcactcgcggacactctccgggcgcccaccacctccgcctcttccgccgccgtgtgtgccggcgacgatgccgcgcaaggcctcctccaactcagatgcgcgggccaagtcgcggaagcggaagcgcgccgccgccagcgcctccccgtccaagcagccggacgaccactcagacgactccgacaccgccgcggcggcgaacggcgacgatgagacgtcccgcgcagcatccgttaacgggggcggaggaaccctagccggcgtcggcggcgatgacgaccccgtgctcgaccttcgtgcggcggaggtgctctcctcctccgccgagcccgtttccgccttccccgccgccgtccgccgtgccgtgagccggcctcacccctcggtgctggctgtaatcgccgccgagcgtgcggcggccagttccgacgatgctccggtcaccccagcctcggtacccgttctcgagaatatttcgcacgggcaactccaggtgatctcggcgatgctgcccgaccatccgtccctgtcctacgaccctgacaagccgtccacgtatgtctgcaccccacctccactgatggagggatgcggagtgcacaaacagttctatgacaaacttcacatcgtgcccaggcactcagattggtttgtgccacagacagtgcacaggttggagaggcaggttgtgccacagtacttctctggaaaatctcaggggcaaacaccagagaagtacatcatgttgaggaacaaggtgattgcgaaatatttggagcgacctgggaaaaggcttgtgtttgctgagtgccaggggcttgtcacaagcacacctgaattgtatgatcttagtaggatagttaggttcttggaatcttgggggatcattaattaccttgcaacagggtcagtgtaccgtggcccgaggacggcatcatctctgatcaaggaagagacaacaggggagcttcagctggtctctgcaccaatgaaatcaattgatggtttgattttgtttgatcggcccaaatgcagtatccaggcaaatgatatatcttcgttggtgtcaacttcatctgctccatttgtggttaatcatgacggtgattcagcaaatttggatgagaagatttgggagcgcttatcagagagttcttgtagtttctgctcacaacctttacccagcatgcactatgagtcacaaaaggagacagacattgctctttgttcagactgcttccacaatgcaaaatttgttactgggcattcaagcttagattttcagagagtggatgcgatgaaagatggatcagacactgatggggacagatggacagatcaggaaactttgctgttgttggagggcatagaaaagttcaatgataactggaatcatatcgcaggtcatgttgggacaaaatcaaaagcacaatgtattcaccatttcattcgtctcccggtggcagatggtttgttagagaacattgaagtgccagaagcatcccttccatctggaatgcaaagcagtggatttttgcattcagattccaatggcagtacttcagccaacctggaaaccagattccattcattaattctgctaatccagtcatgtcactggttgcatttttagctgctgaagtaggaccaagagttgcagcatcctgtgcaagtgcagcattatcggttttgacaagggaagattccagaaggcattgatgctatgggccatggtactcatctcaactatggaccctcatcatccatttcttctgaaactgtgaaaaatgctgcaagctgtggcttgtcagcagcagcaacaaagtccaagctttttgcagaccaggaggagcgtgaaattcagagattatctgccaccatcataaatcatcagttaaagagactggagttgaaactgaagcagtttgcggaggttgagacaatgctcttgaaggaaagtgagcggttagatctgatgaggcagcagctggtaactcagcgtatccggatgttatcaacccggttcacttccacaggtggtacaatacctggaggcagcagcggtatggtttcaaacctgatgaatcaggccagcggccttagaccgccgctgatgatgccaggctcggtgacccagtccagcatgccggcaatgtatgcaaataacatgcaggggcatccccagatggctctgctgcaacagcggcaacagatgctctcgttcggacctcgtttgcctctctcggccatcaaccccggctcatcctcgtcggcacccaacatgatgttcaaccatggcatgcccaactcggcagctcctaatcatcaccctttgctgagatcaccctcaggggacaattcaaatgtaggttagtgagatgagtttttcatttttttgggtcttagattcctgagctgtagcccttgactcgtgatcattaaccattgtaattcgattgcacaatcacatatagaggttgttaccagcgataggttctcattttctcttaggctgtggaccgtgtgtgcgtgactgtttgctcggatgagattgatgttgctagtggcttaggcgatgcacagaggatgtagagtttctttcaccctgactaattgttattactgcgccaccttagaatgatgtaaaaaatgaatccgcatgaattccccattcttcatcttggtttgcatct

SEQ ID NO: 35189 - DNA, 2673 bp, Zea Mays
cactgctatcgcacgtgcttcccgaccaaccgccgtggtcccctcactcgcggacactctccgggcgcccaccacctccgcctcttccgccgccgtgtgtgccggcgacgatgccgcgcaaggcctcctccaactcagatgcgcgggccaagtcgcggaagcggaagcgcgccgccgccagcgcctccccgtccaagcagccggacgaccactcagacgactccgacaccgccgcggcggcgaacggcgacgatgagacgtcccgcgcagcatccgttaacgggggcggaggaaccctagccggcgtcggcggcgatgacgaccccgtgctcgaccttcgtgcggcggaggtgctctcctcctccgccgagcccgtttccgccttccccgccgccgtccgccgtgccgtgagccggcctcacccctcggtgctggctgtaatcgccgccgagcgtgcggcggccagttccgacgatgctccggtcaccccagcctcggtacccgttctcgagaatatttcgcacgggcaactccaggtgatctcggcgatgctgcccgaccatccgtccctgtcctacgaccctgacaagccgtccacgtatgtctgcaccccacctccactgatggagggatgcggagtgcacaaacagttctatgacaaacttcacatcgtgcccaggcactcagattggtttgtgccacagacagtgcacaggttggagaggcaggttgtgccacagtacttctctggaaaatctcaggggcaaacaccagagaagtacatcatgttgaggaacaaggtgattgcgaaatatttggagcgacctgggaaaaggcttgtgtttgctgagtgccaggggcttgtcacaagcacacctgaattgtatgatcttagtaggatagttaggttcttggaatcttgggggatcattaattaccttgcaacagggtcagtgtaccgtggcccgaggacggcatcatctctgatcaaggaagagacaacaggggagcttcagctggtctctgcaccaatgaaatcaattgatggtttgattttgtttgatcggcccaaatgcagtatccaggcaaatgatatatcttcgttggtgtcaacttcatctgctccatttgtggttaatcatgacggtgattcagcaaatttggatgagaagatttgggagcgcttatcagagagttcttgtagtttctgctcacaacctttacccagcatgcactatgagtcacaaaaggagacagacattgctctttgttcagactgcttccacaatgcaaaatttgttactgggcattcaagcttagattttcagagagtggatgcgatgaaagatggatcagacactgatggggacagatggacagatcaggaaactttgctgttgttggagggcatagaaaagttcaatgataactggaatcatatcgcaggtcatgttgggacaaaatcaaaagcacaatgtattcaccatttcattcgtctcccggtggcagatggtttgttagagaacattgaagtgccagaagcatcccttccatctggaatgcaaagcagtggatttttgcattcagattccaatggcagtacttcagccaacctggaaaccagattccattcattaattctgctaatccagtcatgtcactggttgcatttttagctgctgaagtaggaccaagagttgcagcatcctgtgcaagtgcagcattatcggttttgacaagggaagattccaggatgaatgcagaaggcattgatgctatgggccatggtactcatctcaactatggaccctcatcatccatttcttctgaaactgtgaaaaatgctgcaagctgtggcttgtcagcagcagcaacaaagtccaagctttttgcagaccaggaggagcgtgaaattcagagattatctgccaccatcataaatcatcagttaaagagactggagttgaaactgaagcagtttgcggaggttgagacaatgctcttgaaggaaagtgagcggttagatctgatgaggcagcagcggtatggtttcaaacctgatgaatcaggccagcggccttagaccgccgctgatgatgccaggctcggtgacccagtccagcatgccggcaatgtatgcaaataacatgcaggggcatccccagatggctctgctgcaacagcggcaacagatgctctcgttcggacctcgtttgcctctctcggccatcaaccccggctcatcctcgtcggcacccaacatgatgttcaaccatggcatgcccaactcggcagctcctaatcatcaccctttgctgagatcaccctcaggggacaattcaaatgtaggttagtgagatgagtttttcatttttttgggtcttagattcctgagctgtagcccttgactcgtgatcattaaccattgtaattcgattgcacaatcacatatagaggttgttaccagcgataggttctcattttctcttaggctgtggaccgtgtgtgcgtgactgtttgctcggatgagattgatgttgctagtggcttaggcgatgcacagaggatgtagagtttctttcaccctgactaattgttattactgcgccaccttagaatgatgtaaaaaatgaatccgcatgaattccccattcttcatcttggtttgcatct

SEQ ID NO: 35190 - DNA, 2558 bp, Zea Mays
cactgctatcgcacgtgcttcccgaccaaccgccgtggtcccctcactcgcggacactctccgggcgcccaccacctccgcctcttccgccgccgtgtgtgccggcgacgatgccgcgcaaggcctcctccaactcagatgcgcgggccaagtcgcggaagcggaagcgcgccgccgccagcgcctccccgtccaagcagccggacgaccactcagacgactccgacaccgccgcggcggcgaacggcgacgatgagacgtcccgcgcagcatccgttaacgggggcggaggaaccctagccggcgtcggcggcgatgacgaccccgtgctcgaccttcgtgcggcggaggtgctctcctcctccgccgagcccgtttccgccttccccgccgccgtccgccgtgccgtgagccggcctcacccctcggtgctggctgtaatcgccgccgagcgtgcggcggccagttccgacgatgctccggtcaccccagcctcggtacccgttctcgagaatatttcgcacgggcaactccaggtgatctcggcgatgctgcccgaccatccgtccctgtcctacgaccctgacaagccgtccacgtatgtctgcaccccacctccactgatggagggatgcggagtgcacaaacagttctatgacaaacttcacatcgtgcccaggcactcagattggtttgtgccacagacagtgcacaggttggagaggcaggttgtgccacagtacttctctggaaaatctcaggggcaaacaccagagaagtacatcatgttgaggaacaaggtgattgcgaaatatttggagcgacctgggaaaaggcttgtgtttgctgagtgccaggggcttgtcacaagcacacctgaattgtatgatcttagtaggatagttaggttcttggaatcttgggggatcattaattaccttgcaacagggtcagtgtaccgtggcccgaggacggcatcatctctgatcaaggaagagacaacaggggagcttcagctggtctctgcaccaatgaaatcaattgatggtttgattttgtttgatcggcccaaatgcagtatccaggcaaatgatatatcttcgttggtgtcaacttcatctgctccatttgtggttaatcatgacggtgattcagcaaatttggatgagaagatttgggagcgcttatcagagagttcttgtagtttctgctcacaacctttacccagcatgcactatgagtcacaaaaggaggtcatgttgggacaaaatcaaaagcacaatgtattcaccatttcattcgtctcccggtggcagatggtttgttagagaacattgaagtgccagaagcatcccttccatctggaatgcaaagcagtggatttttgcattcagattccaatggcagtacttcaggtagccaacctggaaaccagattccattcattaattctgctaatccagtcatgtcactggttgcatttttagctgctgaagtaggaccaagagttgcagcatcctgtgcaagtgcagcattatcggttttgacaagggaagattccaggatgaatgcagaaggcattgatgctatgggccatggtactcatctcaactatggaccctcatcatccatttcttctgaaactgtgaaaaatgctgcaagctgtggcttgtcagcagcagcaacaaagtccaagctttttgcagaccaggaggagcgtgaaattcagagattatctgccaccatcataaatcatcagttaaagagactggagttgaaactgaagcagtttgcggaggttgagacaatgctcttgaaggaaagtgagcggttagatctgatgaggcagcagctggtaactcagcgtatccggatgttatcaacccggttcacttccacaggtggtacaatacctggaggcagcagcggtatggtttcaaacctgatgaatcaggccagcggccttagaccgccgctgatgatgccaggctcggtgacccagtccagcatgccggcaatgtatgcaaataacatgcaggggcatccccagatggctctgctgcaacagcggcaacagatgctctcgttcggacctcgtttgcctctctcggccatcaaccccggctcatcctcgtcggcacccaacatgatgttcaaccatggcatgcccaactcggcagctcctaatcatcaccctttgctgagatcaccctcaggggacaattcaaatgtaggttagtgagatgagtttttcatttttttgggtcttagattcctgagctgtagcccttgactcgtgatcattaaccattgtaattcgattgcacaatcacatatagaggttgttaccagcgataggttctcattttctcttaggctgtggaccgtgtgtgcgtgactgtttgctcggatgagattgatgttgctagtggcttaggcgatgcacagaggatgtagagtttctttcaccctgactaattgttattactgcgccaccttagaatgatgtaaaaaatgaatccgcatgaattccccattcttcatcttggtttgcatct

SEQ ID NO: 35191 - DNA, 1087 bp, Zea Mays
atgggcaatgtgagcggtcgagcggaagacctcgtggacgccgacattgatgacggcaacaacatgcgacgtgcctcttcctcctctgcgggctacgtccggggcggtgggtcatcatcatccccgccggcgagcccgccgaggccgcattcaccgcggatgttcgtgccccagcaggaggattctgatggcccgcctcaaaagaaaattcccacgttgctcacgtgcactcttggagggaggaatatctacgtagaaggatcatgggacaactggacatcaaagaaactagttgagaaatccggaaaagatcacaccattctattgatgctttcatctggagttcaccgttatagattcattgtagatggagaaagaagatttatacctgaccttccctgcgaaactgataatgtgggtcagattttgaacctagtagatgtccatgacttcgttcctgacagcgtggaaagtgtatctgagctcatggcccctccctccccggactccagctacggtttccatgttcccggcgaaaaggagttctccaaggagcctcctcagctgccggcccagctctacctcggcgtgctgaattctcggagcactgaagaaggctgcgcgaggccgaggcacgtcgtcctagaccatctctacatcgagaagggctggggcgcacatccgttggtggccctcagctacacccacaggttccgctccaagtacgtgacctgcgtcctgtacaaggccatcgagcggtagcctgaccattgctgtgttgtgggccggcaactatagctagatgtggtggacttagcatttcattcaggtttagaagtctctcctgcataattcgttcatctgctaaactaaagaggtgggtgcaaatccatgtgaatcttgttttttagctgctagagcttacatattgttattattattcgattgttttcttgggagataattgtaaactagtgactaacgtgcgcctagcgcgcgtagtttgcatgattttgtcaaagttgtgcgtataaaataagagagtattatatataaggatatttttggcagtggcaaacatcgatac

SEQ ID NO: 35192 - DNA, 1129 bp, Zea Mays
ggggatccccaagccagaccagagatgggcaatgtgagcggtcgagcggaagacctcgtggacgccgacattgatgacggcaacaacatgcgacgtgcctcttcctcctctgcgggctacgtccggggcggtgggtcatcatcatccccgccggcgagcccgccgaggccgcattcaccgcggatgttcgtgccccagatattgatgaatcaacagcaggaggattctgatggcccgcctcaaaagaaaattcccacgttgctcacgtgcactcttggagggaggaatatctacgtagaaggatcatgggacaactggacatcaaagaaactagttgagaaatccggaaaagatcacaccattctattgatgctttcatctggagttcaccgttatagattcattgtagatggagaaagaagatttatacctgaccttccctgcgaaactgataatgtgggtcagattttgaacctagtagatgtccatgacttcgttcctgacagcgtggaaagtgtatctgagctcatggcccctccctccccggactccagctacggtttccatgttcccggcgaaaaggagttctccaaggagcctcctcagctgccggcccagctctacctcggcgtgctgaattctcggagcactgaagaaggctgcgcgaggccgaggcacgtcgtcctagaccatctctacatcgagaagggctggggcgcacatccgttggtggccctcagctacacccacaggttccgctccaagtacgtgacctgcgtcctgtacaaggccatcgagcggtagcctgaccattgctgtgttgtgggccggcaactatagctagatgtggtggacttagcatttcattcaggtttagaagtctctcctgcataattcgttcatctgctaaactaaagaggtgggtgcaaatccatgtgaatcttgttttttagctgctagagcttacatattgttattattattcgattgttttcttgggagataattgtaaactagtgactaacgtgcgcctagcgcgcgtagtttgcatgattttgtcaaagttgtgcgtataaaataagagagtattatatataaggatatttttggcagtggcaaacatcgatac

SEQ ID NO: 35193 - DNA, 571 bp, Zea Mays
cttattctaatgaggtgatggcacgcgcagcggagaattacatgcgtatatcagacggtcacttgatgcttgccgaaacaaatagcttctggctcaacggcttctgtttcactcgagctttgaatcagaattaggcctttttcaaaacctcccacaccacgccgccgccgccaccgcaacattaggcctccacctccgttgcctgccagccggttgtcctactacaaatgcatgacacaaaaatcagttccaggagcatagcatagcttttgtttggacgacaagcaagaaacaaacccattgcttcatgagctcttcctaaatatgaagtggctaaaggtagtatttcactgcaaagacaagaagcacagatggagagatttgtttgtagatccattgagaggatcaaattatgatgatgagtgatttgtcaattaatccatgtgtagtagataaaatgcatgtaatttttttggatgaatgtacatttcgttcctgcaacgattttatcatgcatgatttgtaatggttcaaagatgatattgttttgaaataaatattgaattgtgaa

SEQ ID NO: 35194 - DNA, 2044 bp, Zea Mays
cataatattatgtagctttaatgcccattctgcccctcgttaaatcgaacctacatgttttatgtggggtgcgttactatctatatgtgcgattagtaggatgaaatggactcatgggcggacgtagtcacaaagttcctgggacgattaggtcgtggaacaggggatgaggaacatgatatgctccttaaaaaaggtttttcacttcggggatgatattgttcctggaacggaaacggcgttcccggtgacgaacatgtgatggtgctcatgggattgagtatgcataatgaaagattttgaggaaccatcatgtggatgtgctggactatggcaacattctcggtttaatgtccaatcacatgtctaaagcatgctggtgatttttataagaattcagacataaacattggcgcccaaaggtttgagcattggtctttgttgtgaactgcattctatcctgtggcgagatcagatggtgatgcagtttgaatggagttctgcattgcagtctttcaggtatatttgtacaatatggctgaaaggaagtaaaagtaacagcattgttctgttgatgaaaaaatagcttcagaattcagaatgttgtgccatgagttagttgggttgtcggatcttcttgttgataatgtttgacaccaaagacgaccgtgtcctgtgaagtcagctagctacattggcaaactgctctttctccatggtaacatggagtgaacactcggcaggccacatgtgcaaatttggagaccattaacatgtgcaaatttggagaccattgtgcaagtttggcaatttctttgtaggaataacattatggcaattttatcgagccctcaagcatgtttacttctttaggtcgtacctagcctaccagtaccagcgtattagaattttgctagcacagtttgaaaaccatgcgtgtgcaggtttgccaaatcaagattgcaaaggctgctgcttacatatacggtctggagaggtagagcagcctgagctatgcatgggctgtatggtggcatgctgctacttatttcttgcaagaatcttgtagcgaggaaatttctggaccttgatgcattgctatcacatgcttatgatacatgcaaggccggtttgaagacaaaacacttggggtttcacaaagcactgtgtgttctgatggggtggaattggcatgttgctccagacacatctaaatcacatcactccattccatctgaggaagtaaatgccatgaggggagacctcatgctgtggcctccagttgttgtgatacataacagctcgactggtcatgaggcaaaggatactgatgcaaagattgtgtccatagaagaaatcgaaggtgtattggcagatattggggtagcgcatgagaaggctagggttagccatggaagatcagccaatcagagcgtgttcctggtgaagttccagccaacaatatctgggttccaagaagccatgagagtgcatacccatttctccaccagaaaccatggcaaggaagagttccagctgatgaaaggcagcaaaggtaagaaggctgcctccactgatagcctggaagagctgctgtatgcgcatattggggtcgtggaagacctggggctgctggatgagggaacaaagaagagatgcaaggtcatgaggaagaaggaaattgaggcaaatgcagaggcaacactgaatttagaagtttattaggtctagtactaggatccgaaccatttgaagtggtcctcttttgcttcatcttgcagctgcttgcttgtccttgcggctgtaacgtcaaaagaagaaaagaagtgtaaattctgcttttgccattaaagagtgacgaaactcagttggcttctgtctgctggggaaggcctgcctcggtttgcatggcatggcaaggacataattttgtggctagatggggacaccttaacggcaaaagcagaattacctggtcgaagaaccgagtttaatctttatattatggaatcccttctttttttaagtcttttgctgcgtgaag

SEQ ID NO: 35195 - DNA, 1223 bp, Zea Mays
ccgccctccgcacgccgcctccgaaccccatcgcccatcctcactacggcgacggctattgccacagccgccgccatcttgacgcgtacgagattctgaggccttgatctgaaacccgcctcgatcccacagccattcacccaccgttccaccggtcacggtagcggcgatccctactctcaggccgtagctacgacctagccggcgccatgcgacacggaggcggaggcaggggaggtggagtgtagcgaggaaatttctggaccttgatgcattgctatcacatgcttatgatacatgcaaggccggtttgaagacaaaacacttggggtttcacaaagcactgtgtgttctgatggggtggaattggcatgttgctccagacacatctaaatcacatcactccattccatctgaggaagtaaatgccatgaggggagacctcatgctgtggcctccagttgttgtgatacataacagctcgactggtcatgaggcaaaggatactgatgcaaagattgtgtccatagaagaaatcgaaggtgtattggcagatattggggtagcgcatgagaaggctagggttagccatggaagatcagccaatcagagcgtgttcctggtgaagttccagccaacaatatctgggttccaagaagccatgagagtgcatacccatttctccaccagaaaccatggcaaggaagagttccagctgatgaaaggcagcaaaggtaagaaggctgcctccactgatagcctggaagagctgctgtatgcgcatattggggtcgtggaagacctggggctgctggatgagggaacaaagaagagatgcaaggtcatgaggaagaaggaaattgaggcaaatgcagaggcaacactgaatttagaagtttattaggtctagtactaggatccgaaccatttgaagtggtcctcttttgcttcatcttgcagctgcttgcttgtccttgcggctgtaacgtcaaaagaagaaaagaagtgtaaattctgcttttgccattaaagagtgacgaaactcagttggcttctgtctgctggggaaggcctgcctcggtttgcatggcatggcaaggacataattttgtggctagatggggacaccttaacggcaaaagcagaattacctggtcgaagaaccgagtttaatctttatattatggaatcccttctttttttaagtcttttgctgcgtgaag

SEQ ID NO: 35196 - DNA, 1313 bp, Zea Mays
ccctcccctccgccctccgcacgccgcctccgaaccccatcgcccatcctcactacggcgacggctattgccacagccgccgccatcttgacgcgtacgagattctgaggccttgatctgaaacccgcctcgatcccacagccattcacccaccgttccaccggtcacggtagcggcgatccctactctcaggccgtagctacgacctagccggcgccatgcgacacggaggcggaggcaggggaggtggaggtaaaagaggtcgaggaagaggagcgggctccggacgcagagacgcgcgccccggcaacgattcgtaccgcggcgaccgtgtgtagcgaggaaatttctggaccttgatgcattgctatcacatgcttatgatacatgcaaggccggtttgaagacaaaacacttggggtttcacaaagcactgtgtgttctgatggggtggaattggcatgttgctccagacacatctaaatcacatcactccattccatctgaggaagtaaatgccatgaggggagacctcatgctgtggcctccagttgttgtgatacataacagctcgactggtcatgaggcaaaggatactgatgcaaagattgtgtccatagaagaaatcgaaggtgtattggcagatattggggtagcgcatgagaaggctagggttagccatggaagatcagccaatcagagcgtgttcctggtgaagttccagccaacaatatctgggttccaagaagccatgagagtgcatacccatttctccaccagaaaccatggcaaggaagagttccagctgatgaaaggcagcaaaggtaagaaggctgcctccactgatagcctggaagagctgctgtatgcgcatattggggtcgtggaagacctggggctgctggatgagggaacaaagaagagatgcaaggtcatgaggaagaaggaaattgaggcaaatgcagaggcaacactgaatttagaagtttattaggtctagtactaggatccgaaccatttgaagtggtcctcttttgcttcatcttgcagctgcttgcttgtccttgcggctgtaacgtcaaaagaagaaaagaagtgtaaattctgcttttgccattaaagagtgacgaaactcagttggcttctgtctgctggggaaggcctgcctcggtttgcatggcatggcaaggacataattttgtggctagatggggacaccttaacggcaaaagcagaattacctggtcgaagaaccgagtttaatctttatattatggaatcccttctttttttaagtcttttgctgcgtgaag

SEQ ID NO: 35197 - DNA, 5842 bp, Zea Mays
ccctcccctccgccctccgcacgccgcctccgaaccccatcgcccatcctcactacggcgacggctattgccacagccgccgccatcttgacgcgtacgagattctgaggccttgatctgaaacccgcctcgatcccacagccattcacccaccgttccaccggtcacggtagcggcgatccctactctcaggccgtagctacgacctagccggcgccatgcgacacggaggcggaggcaggggaggtggaggtaaaagaggtcgaggaagaggagcgggctccggacgcagagacgcgcgccccggcaacgattcgtaccgcggcgaccgtggtaggcgccacgactaccgctcccgccgcaccgcttccccggaccaccgcccacgccgcccgaggggcgaggacaacgaccgcgatccgccccgcggcggtcgcatcggctacggcgaccgtagccctccccgcggcggccgcaccggctacggcgaccgtagccctcccggcggcggccgcaccggctacggcgaccgtagccctcccggcggcggccgcaccggcccgccccggcgcgagcgcgctggctacggccaccttgacgcgtcgccccgccgcgggcatgcgccgtacaaggacgccttcggctcgccgggcggcgaccgccacgcttctccccgcgggcgcagggaatacggagatagccgcgtctcgccccccgggggtagggactacgaaagggcgccctgccgcgaggagcgcgaccggtacggccgccctggccgcggtgccgatctcgggcacaactccccgccagcccacatgctcccagaccacccgtccgacctgggacgttcagcatccctacgcgctgacgaccatagccttctcaaggacgactaccctaggggaggccctcatcggagcatcagaaaggagaacgagttgtttgcgaacggtgacctgactctcagaataagtgcaactgaaatgggaaggactagcgccatgtactcccaagaccgcaggctctcacctccaccacctatttatccctatgtgccacgtgagacgggattcttgacaggcggatctgccatgaaggccagtgatggttatggtgctggaactggaagcgcccagcggctgcatgatgatgacgattttaagtaccacaaggatgccccacacattgagaggagtagagatattgataggcattattctggcagtagggacttagttgttgagaaaggtggagttgctgaaaggtatgcttctgctgatgatctgccttctgggaggattcgagaaacagagagtctttactctagtagaggtatgctggagtctgacctggtgccgtgtaggcagttgaaggttcttggtgatccttcctcagctttgcctgccaaggaccaccatccatacaggatgtacactgaacctggctacgagacaagcaacagatacatcatggagggccttggcaggtcatctcatgactcactggggcatgggagtgaccatcctcataggttttcaggaggttcattagagcatgtaagcggtcatggtgatgaaacattattggatattgcaaggcaggcacactctaagcatacaccaagagctgcatcattggagtacgatgtacatgatacgcatagtgaaccagagaacttacgtgggaatgtctcaatgacttcaaggcacacatctgtctcaacatctttgagaggtcttagggatgaaaggattaacgacaatctgaggttatcccgtaggattgaagaagatgagggtagcattgaatccatgcatcaggacacagagcacttaattcgtcattgttacaacggtgacgcttctgtacagtaccaaacagcaaggggtggtgatgatcactattcccactcccctggaactgaacctattggaattgcaaggcggctagctcatcaacatgagtttgattcctttggttactcaagtgatcaagaagcttcccttatggtttctaggaaaagatgcaggagtcctgaatatcatgatcatgagattgatatgtatcaagctgatcatgggtttgcaggacatgagcactatgatgatgatgttgttgatgaatatgatatacccccaccaagaatgtcacggtttgatgatgaatatgatgaaatacatgatgtgctagctaatcgtgatgttttctcaaggatttctttgccacatgaaaccaatcaggaatggactgatatggatcaggggaaccatcctcattctaacatcttgggttacgggtgttcaaaacacgtacctatgcatcagaggttgtctaaacccaattaccactcacaatttggggaaactcccatgcatggaagaggaagaggaagaggaggattgactaaaagtgccaaaaagggactgagaactgctcctcatcagttgcatgatgggtacccatcaggtagaaatgaatttgttagaccaaataaattttcaaagtcgtcaaaagatgaacttaatggttctgaagtgaagcatgaagatgctccagagtatgaggatgttcctctgcagaaagatccaccagaaggttcagaggagttcagtaaacaggttgatgaagcctttcttaagtacacaaagatattaaatgagagtccagctatgcagaagaaataccgggaggcgccaaaaggatctttgccatgctgtgtctgtggcaggtttgtcttcctttgcctgcgaactaaacagttcctcctctaacttcgttagcagttgcctacttgctggtatggttactggaatggagaaatccaaggaaaagttatgtcttctgtagtcacattaaaatgcacctcatactgtagataaactttataatttaatcatacagtttaagctaacatactgagttattgacatctttaggaaactggcataatattatgtagctttaatgcccattctgcccctcgttaaatcgaacctacatgttttatgtggggtgcgttactatctatatgtgcgattagtaggatgaaatggactcatgggcggacgtagtcacaaagttcctgggacgattaggtcgtggaacaggggatgaggaacatgatatgctccttaaaaaaggtttttcacttcggggatgatattgttcctggaacggaaacggcgttcccggtgacgaacatgtgatggtgctcatgggattgagtatgcataatgaaagattttgaggaaccatcatgtggatgtgctggactatggcaacattctcggtttaatgtccaatcacatgtctaaagcatgctggtgatttttataagaattcagacataaacattggcgcccaaaggtttgagcattggtctttgttgtgaactgcattctatcctgtggcgagatcagatggtgatgcagtttgaatggagttctgcattgcagtctttcaggtatatttgtacaatatggctgaaaggaagtaaaagtaacagcattgttctgttgatgaaaaaatagcttcagaattcagaatgttgtgccatgagttagttgggttgtcggatcttcttgttgataatgtttgacaccaaagacgaccgtgtcctgtgaagtcagctagctacattggcaaactgctctttctccatggtaacatggagtgaacactcggcaggccacatgtgcaaatttggagaccattaacatgtgcaaatttggagaccattgtgcaagtttggcaatttctttgtaggaataacattatggcaattttatcgagccctcaagcatgtttacttctttaggtcgtacctagcctaccagtaccagcgtattagaattttgctagcacagtttgaaaaccatgcgtgtgcaggtttgccaaatcaagattgcaaaggctgctgcttacatatacggtctggagaggtagagcagcctgagctatgcatgggctgtatggtggcatgctgctacttatttcttgcaagaatctgtaggttgaactattcgtctgaactaaccaagggttttgtttaaactataagtagggttttagggttctatttttatatcttacatatattgtttccctggttattggaacatgaattctcttgcatttgaaatccatgaaatctaattagttttactatggtattctatactaatacagtacagatcagctccatgtagactgctgtccttttcatgtcctatgttttaaatagtgtttgtagtggcatatcaactagtgccaagacaccacaccacgtatacatgtgtatcacttggttatagttatctatttataccaattttctatgagtgattatcgtaacctttgttttatcaaataaaaatgtgtttgctttattttttcaacaataactttagattactaagtgaagtatgctgttaatttgatttattttgcttgtgcaaactagatggcactgcattttgattaatttacatcaaatataagctcaggcacaggtccaaatgtttttttattggagcaggagcagtgtcccattatttcttctagttagtgcggcagagacttggggatcaatttttaacaaagttttatcttctgatgatttagtttgctatttgctctttgtgttccacttgatttttgtttgtgaaaattggtgactacacccttgtgaatcgttttaaatactgggatgtgaatgaccatgatcatggtgccctcaggaggattgttgaaatgtagtttcttttatctgcatggtttgattgactgaacaatcatttgagattctaacctgaagaaatactctgttcatttctttttttgtttacttcctacaacagtgtagcgaggaaatttctggaccttgatgcattgctatcacatgcttatgatacatgcaaggccggtttgaagacaaaacacttggggtttcacaaagcactgtgtgttctgatggggtggaattggcatgttgctccagacacatctaaatcacatcactccattccatctgaggaagtaaatgccatgaggggagacctcatgctgtggcctccagttgttgtgatacataacagctcgactggtcatgaggcaaaggatactgatgcaaagattgtgtccatagaagaaatcgaaggtgtattggcagatattggggtagcgcatgagaaggctagggttagccatggaagatcagccaatcagagcgtgttcctggtgaagttccagccaacaatatctgggttccaagaagccatgagagtgcatacccatttctccaccagaaaccatggcaaggaagagttccagctgatgaaaggcagcaaaggtaagaaggctgcctccactgatagcctggaagagctgctgtatgcgcatattggggtcgtggaagacctggggctgctggatgagggaacaaagaagagatgcaaggtcatgaggaagaaggaaattgaggcaaatgcagaggcaacactgaatttagaagtttattaggtctagtactaggatccgaaccatttgaagtggtcctcttttgcttcatcttgcagctgcttgcttgtccttgcggctgtaacgtcaaaagaagaaaagaagtgtaaattctgcttttgccattaaagagtgacgaaactcagttggcttctgtctgctggggaaggcctgcctcggtttgcatggcatggcaaggacataattttgtggctagatggggacaccttaacggcaaaagcagaattacctggtcgaagaaccgagtttaatctttatattatggaatcccttctttttttaagtcttttgctgcgtgaag

SEQ ID NO: 35198 - DNA, 3711 bp, Zea Mays
ccctcccctccgccctccgcacgccgcctccgaaccccatcgcccatcctcactacggcgacggctattgccacagccgccgccatcttgacgcgtacgagattctgaggccttgatctgaaacccgcctcgatcccacagccattcacccaccgttccaccggtcacggtagcggcgatccctactctcaggccgtagctacgacctagccggcgccatgcgacacggaggcggaggcaggggaggtggaggtaaaagaggtcgaggaagaggagcgggctccggacgcagagacgcgcgccccggcaacgattcgtaccgcggcgaccgtggtaggcgccacgactaccgctcccgccgcaccgcttccccggaccaccgcccacgccgcccgaggggcgaggacaacgaccgcgatccgccccgcggcggtcgcatcggctacggcgaccgtagccctccccgcggcggccgcaccggctacggcgaccgtagccctcccggcggcggccgcaccggctacggcgaccgtagccctcccggcggcggccgcaccggcccgccccggcgcgagcgcgctggctacggccaccttgacgcgtcgccccgccgcgggcatgcgccgtacaaggacgccttcggctcgccgggcggcgaccgccacgcttctccccgcgggcgcagggaatacggagatagccgcgtctcgccccccgggggtagggactacgaaagggcgccctgccgcgaggagcgcgaccggtacggccgccctggccgcggtgccgatctcgggcacaactccccgccagcccacatgctcccagaccacccgtccgacctgggacgttcagcatccctacgcgctgacgaccatagccttctcaaggacgactaccctaggggaggccctcatcggagcatcagaaaggagaacgagttgtttgcgaacggtgacctgactctcagaataagtgcaactgaaatgggaaggactagcgccatgtactcccaagaccgcaggctctcacctccaccacctatttatccctatgtgccacgtgagacgggattcttgacaggcggatctgccatgaaggccagtgatggttatggtgctggaactggaagcgcccagcggctgcatgatgatgacgattttaagtaccacaaggatgccccacacattgagaggagtagagatattgataggcattattctggcagtagggacttagttgttgagaaaggtggagttgctgaaaggtatgcttctgctgatgatctgccttctgggaggattcgagaaacagagagtctttactctagtagaggtatgctggagtctgacctggtgccgtgtaggcagttgaaggttcttggtgatccttcctcagctttgcctgccaaggaccaccatccatacaggatgtacactgaacctggctacgagacaagcaacagatacatcatggagggccttggcaggtcatctcatgactcactggggcatgggagtgaccatcctcataggttttcaggaggttcattagagcatgtaagcggtcatggtgatgaaacattattggatattgcaaggcaggcacactctaagcatacaccaagagctgcatcattggagtacgatgtacatgatacgcatagtgaaccagagaacttacgtgggaatgtctcaatgacttcaaggcacacatctgtctcaacatctttgagaggtcttagggatgaaaggattaacgacaatctgaggttatcccgtaggattgaagaagatgagggtagcattgaatccatgcatcaggacacagagcacttaattcgtcattgttacaacggtgacgcttctgtacagtaccaaacagcaaggggtggtgatgatcactattcccactcccctggaactgaacctattggaattgcaaggcggctagctcatcaacatgagtttgattcctttggttactcaagtgatcaagaagcttcccttatggtttctaggaaaagatgcaggagtcctgaatatcatgatcatgagattgatatgtatcaagctgatcatgggtttgcaggacatgagcactatgatgatgatgttgttgatgaatatgatatacccccaccaagaatgtcacggtttgatgatgaatatgatgaaatacatgatgtgctagctaatcgtgatgttttctcaaggatttctttgccacatgaaaccaatcaggaatggactgatatggatcaggggaaccatcctcattctaacatcttgggttacgggtgttcaaaacacgtacctatgcatcagaggttgtctaaacccaattaccactcacaatttggggaaactcccatgcatggaagaggaagaggaagaggaggattgactaaaagtgccaaaaagggactgagaactgctcctcatcagttgcatgatgggtacccatcaggtagaaatgaatttgttagaccaaataaattttcaaagtcgtcaaaagatgaacttaatggttctgaagtgaagcatgaagatgctccagagtatgaggatgttcctctgcagaaagatccaccagaaggttcagaggagttcagtaaacaggttgatgaagcctttcttaagtacacaaagatattaaatgagagtccagctatgcagaagaaataccgggaggcgccaaaaggatctttgccatgctgtgtctgtggcagtgtagcgaggaaatttctggaccttgatgcattgctatcacatgcttatgatacatgcaaggccggtttgaagacaaaacacttggggtttcacaaagcactgtgtgttctgatggggtggaattggcatgttgctccagacacatctaaatcacatcactccattccatctgaggaagtaaatgccatgaggggagacctcatgctgtggcctccagttgttgtgatacataacagctcgactggtcatgaggcaaaggatactgatgcaaagattgtgtccatagaagaaatcgaaggtgtattggcagatattggggtagcgcatgagaaggctagggttagccatggaagatcagccaatcagagcgtgttcctggtgaagttccagccaacaatatctgggttccaagaagccatgagagtgcatacccatttctccaccagaaaccatggcaaggaagagttccagctgatgaaaggcagcaaaggtaagaaggctgcctccactgatagcctggaagagctgctgtatgcgcatattggggtcgtggaagacctggggctgctggatgagggaacaaagaagagatgcaaggtcatgaggaagaaggaaattgaggcaaatgcagaggcaacactgaatttagaagtttattaggtctagtactaggatccgaaccatttgaagtggtcctcttttgcttcatcttgcagctgcttgcttgtccttgcggctgtaacgtcaaaagaagaaaagaagtgtaaattctgcttttgccattaaagagtgacgaaactcagttggcttctgtctgctggggaaggcctgcctcggtttgcatggcatggcaaggacataattttgtggctagatggggacaccttaacggcaaaagcagaattacctggtcgaagaaccgagtttaatctttatattatggaatcccttctttttttaagtcttttgctgcgtgaag

SEQ ID NO: 35199 - DNA, 1348 bp, Zea Mays
gtgtgaatggcttgtgtagttttatttttttgggaaatatacccacatatgtgtttcccttgttatgctctttatcgtctatccacatattttatgttttgtgctatttgccagtcatgactcatgcttgtgctgcttgacaactaagttttctgactgctgctcagcctcaattctcacagcttaaaatatgttgctactaaacttctaatggtcactggttgtcttccatctgccattggttgttcatgcttaacagctcagatggaaaatatctattaacaggtggtgaagatgatcttgtgcaggtatggggcatggatgatagaaagatagttgcttggggtgaaggacataattcatgggtcagtggagttgcttttgattcatattggtccccaccaagttctgatggaaatggagaaaatgtatatcgctttggttctgttgggcaggacacccaactacttctgtgggacctggcactggatgagattgttgtcccactacggcatccttcaagtgcctcacctacgtttagcagcgggagcccttccacacactgggacaatgcatgccctccaacaggtgttcttcaaccttctcctagaatgcgagatgtcccaaaactatcgcccctagttgcccaccgagtacatgccgatcccctatctggtatggtgttcaccagtgaatctatcctcaccatctgccgcgagggcctcatcaaaatctgggttcgaccagagcagagcgaaaacaatcagcaatcgaattcttcagaatttgctttaggccctgcttcgaaggatagggcgatcacatcttccaataaagcaagtagctccagctttaagaagctgccgcctgttcttgtcacatgatgaatcaacgggatggttcttgtggatatttctgcttcacgtggcattagtggtggatatgaatcttactccatggttgatggggatgaaactctcatatggagtctgcagactgcaagtaatgagggtgagcatttgatggttgatgttcccaggaagcagggccagcgttgccagtttttttggcacgaaagagtaaatgggagctcttgtacagacacatacttaatgataaaattgtaaaaactcactgtccgtttcataatattcaatagccaccgaaagatgattggacgaccatgttatcgattttagctggtgggttgatagtatccttaaactttggtacttcggagacttgtaattatggaccataatatctgaggaatgcttcagtcttacctggtgtaagttgtgttactatttccttctgccttttgtcaattattagatctagtttggca

SEQ ID NO: 35200 - DNA, 2471 bp, Zea Mays
ttttatctcttttatgtgtttccccgtttcgttgttttcggttctcctttgcctttgtttcccttttctgttctttgggggttgagctctgaggttttcatacggggtttcatctctagcctaccccaacgtgcttgggacaaaaaaggctttgttgttgttgttgttgttgttgttgttgtataaatagaatgtatattccgtctccaaagtccaaagcagttgttcctcgccgtctcggggtctcggcctctcctcggtctctcctcccagatcgggccatccaggtgctaccgctcttcgccccctccacttcaccgccgccgcgtagatccgtctccgcctcctggaagcgctaccagtggaccaacgccgagccggcggagttagcggcgttagggttgcggttgggaattgattgcgggggacgcagcggtggcgcctggcatggcgggggcgcccggggtcgggccgggtgcggggggtgggggcggcgccgctgcggggctcaagacttacttcaagacgcccgaggggaggtacaagctgcagtacgagaaggcgcactccgcggtgctgcactacagccacggcggcaagaccgtctcgcagttgacagtggcatacctcaaggagaagcctgctagccagggctctcagccatcaacaccaagcgccagcagtgggatgcggtctgcagcagcaaggctgctgggcactgggaatgggagcaaggcacttagctttggtggcggtaatggtgcaagccgagctgttgctggaagcagccgtgtaggaggcggccttggtacacctacaggccttggtggatcacaggggggcacaaattatgatggcaagggtacatatattgtattcaatgctgctgatacactattcatcagtgatctcaattcccaggagaaggatccactaaagtccatccatttcagcaactcaaacccactgtgccatgcattcgacccagaggccaaagagggacacgacctgatcattgggatgggatcaggggatgtctattcaatgtcgctgaggcaacagttacaagatcctggaagaaaacccgtggcagctctacattacaataagggtgataaagatgtctcacccaatggaagacatgatcaaggtagcataggtacatgtctgaacaaggatgggaacacagactgtacgtttccagctgtcaaggatcagtctcagtttatggttgcacatgcaaagtcgagtaagagcaacccagtcgctaggtggcatatatgtcaaggttcgatcaatgcaatttccttttcaccagatggcgcatacttggcgactgttgggagagatggttatttgagagtattcgatttttcaaaggaacaactaatatttggtggaagaagttattatggtgcactgttgtgttgcacttggagctcagatggaaaatatctattaacaggtggtgaagatgatcttgtgcaggtcagtggagttgcttttgattcatattggtccccaccaagttctgatggaaatggagaaaatgtatatcgctttggttctgttgggcaggacacccaactacttctgtgggacctggcactggatgagattgttgtcccactacggcatccttcaagtgcctcacctacgtttagcagcgggagcccttccacacactgggacaatgcatgccctccaacaggtgttcttcaaccttctcctagaatgcgagatgtcccaaaactatcgcccctagttgcccaccgagtacatgccgatcccctatctggtatggtgttcaccagtgaatctatcctcaccatctgccgcgagggcctcatcaaaatctgggttcgaccagagcagagcgaaaacaatcagcaatcgaattcttcagaatttgctttaggccctgcttcgaaggatagggcgatcacatcttccaataaagcaagtagctccagctttaagaagctgccgcctgttcttgtcacatgatgaatcaacgggatggttcttgtggatatttctgcttcacgtggcattagtggtggatatgaatcttactccatggttgatggggatgaaactctcatatggagtctgcagactgcaagtaatgagggtgagcatttgatggttgatgttcccaggaagcagggccagcgttgccagtttttttggcacgaaagagtaaatgggagctcttgtacagacacatacttaatgataaaattgtaaaaactcactgtccgtttcataatattcaatagccaccgaaagatgattggacgaccatgttatcgattttagctggtgggttgatagtatccttaaactttggtacttcggagacttgtaattatggaccataatatctgaggaatgcttcagtcttacctggtgtaagttgtgttactatttccttctgccttttgtcaattattagatctagtttggca

SEQ ID NO: 35201 - DNA, 2239 bp, Zea Mays
ttttatctcttttatgtgtttccccgtttcgttgttttcggttctcctttgcctttgtttcccttttctgttctttgggggttgagctctgaggttttcatacggggtttcatctctagcctaccccaacgtgcttgggacaaaaaaggctttgttgttgttgttgttgttgttgttgttgtataaatagaatgtatattccgtctccaaagtccaaagcagttgttcctcgccgtctcggggtctcggcctctcctcggtctctcctcccagatcgggccatccagttgacagtggcatacctcaaggagaagcctgctagccagggctctcagccatcaacaccaagcgccagcagtgggatgcggtctgcagcagcaaggctgctgggcactgggaatgggagcaaggcacttagctttggtggcggtaatggtgcaagccgagctgttgctggaagcagccgtgtaggaggcggccttggtacacctacaggccttggtggatcacaggggggcacaaattatgatggcaagggtacatatattgtattcaatgctgctgatacactattcatcagtgatctcaattcccaggagaaggatccactaaagtccatccatttcagcaactcaaacccactgtgccatgcattcgacccagaggccaaagagggacacgacctgatcattgggatgggatcaggggatgtctattcaatgtcgctgaggcaacagttacaagatcctggaagaaaacccgtggcagctctacattacaataagggtgataaagatgtctcacccaatggaagtcgttgcacttctgtcgcatggggtgccagagcgtgaaggcattttcgtttgttagccatttctgatggaaatttgtacgtgtatgataaaaacaaggatgggaacacagactgtacgtttccagctgtcaaggatcagtctcagtttatggttgcacatgcaaagtcgagtaagagcaacccagtcgctaggtggcatatatgtcaaggttcgatcaatgcaatttccttttcaccagatggcgcatacttggcgactgttgggagagatggttatttgagagtattcgatttttcaaaggaacaactaatatttggtggaagaagttattatggtgcactgttgtgttgcacttggagaggtggtgaagatgatcttgtgcaggtatggggcatggatgatagaaagatagttgcttggggtgaaggacataattcatgggtcagtggagttgcttttgattcatattggtccccaccaagttctgatggaaatggagaaaatgtatatcgctttggttctgttgggcaggacacccaactacttctgtgggacctggcactggatgagattgttgtcccactacggcatccttcaagtgcctcacctacgtttagcagcgggagcccttccacacactgggacaatgcatgccctccaacaggtgttcttcaaccttctcctagaatgcgagatgtcccaaaactatcgcccctagttgcccaccgagtacatgccgatcccctatctggtatggtgttcaccagtgaatctatcctcaccatctgccgcgagggcctcatcaaaatctgggttcgaccagagcagagcgaaaacaatcagcaatcgaattcttcagaatttgctttaggccctgcttcgaaggatagggcgatcacatcttccaataaagcaagtagctccagctttaagaagctgccgcctgttcttgtcacatgatgaatcaacgggatggttcttgtggatatttctgcttcacgtggcattagtggtggatatgaatcttactccatggttgatggggatgaaactctcatatggagtctgcagactgcaagtaatgagggtgagcatttgatggttgatgttcccaggaagcagggccagcgttgccagtttttttggcacgaaagagtaaatgggagctcttgtacagacacatacttaatgataaaattgtaaaaactcactgtccgtttcataatattcaatagccaccgaaagatgattggacgaccatgttatcgattttagctggtgggttgatagtatccttaaactttggtacttcggagacttgtaattatggaccataatatctgaggaatgcttcagtcttacctggtgtaagttgtgttactatttccttctgccttttgtcaattattagatctagtttggca

SEQ ID NO: 35202 - DNA, 2606 bp, Zea Mays
ttttatctcttttatgtgtttccccgtttcgttgttttcggttctcctttgcctttgtttcccttttctgttctttgggggttgagctctgaggttttcatacggggtttcatctctagcctaccccaacgtgcttgggacaaaaaaggctttgttgttgttgttgttgttgttgttgttgtataaatagaatgtatattccgtctccaaagtccaaagcagttgttcctcgccgtctcggggtctcggcctctcctcggtctctcctcccagatcgggccatccaggtgctaccgctcttcgccccctccacttcaccgccgccgcgtagatccgtctccgcctcctggaagcgctaccagtggaccaacgccgagccggcggagttagcggcgttagggttgcggttgggaattgattgcgggggacgcagcggtggcgcctggcatggcgggggcgcccggggtcgggccgggtgcggggggtgggggcggcgccgctgcggggctcaagacttacttcaagacgcccgaggggaggtacaagctgcagtacgagaaggcgcactccgcggtgctgcactacagccacggcggcaagaccgtctcgcagttgacagtggcatacctcaaggagaagcctgctagccagggctctcagccatcaacaccaagcgccagcagtgggatgcggtctgcagcagcaaggctgctgggcactgggaatgggagcaaggcacttagctttggtggcggtaatggtgcaagccgagctgttgctggaagcagccgtgtaggaggcggccttggtacacctacaggccttggtggatcacaggggggcacaaattatgatggcaagggtacatatattgtattcaatgctgctgatacactattcatcagtgatctcaattcccaggagaaggatccactaaagtccatccatttcagcaactcaaacccactgtgccatgcattcgacccagaggccaaagagggacacgacctgatcattgggatgggatcaggggatgtctattcaatgtcgctgaggcaacagttacaagatcctggaagaaaacccgtggcagctctacattacaataagggtgataaagatgtctcacccaatggaagacatgatcaaggtagcataggtacatgtctgaacaaggatgggaacacagactgtacgtttccagctgtcaaggatcagtctcagtttatggttgcacatgcaaagtcgagtaagagcaacccagtcgctaggtggcatatatgtcaaggttcgatcaatgcaatttccttttcaccagatggcgcatacttggcgactgttgggagagatggttatttgagagtattcgatttttcaaaggaacaactaatatttggtggaagaagttattatggtgcactgttgtgttgcacttggagctcagatggaaaatatctattaacaggtggtgaagatgatcttgtgcaggtatggggcatggatgatagaaagatagttgcttggggtgaaggacataattcatgggtcagtggagttgcttttgattcatattggtccccaccaagttctgatggaaatggagaaaatgtatatcgctttggttctgttgggcagatcagggataagaattacttcttttcagtactgatggggttattttctcatgatgttttgaaagtaatttatgtttttgacacccaactacttctgtgggacctggcactggatgagattgttgtcccactacggcatccttcaagtgcctcacctacgtttagcagcgggagcccttccacacactgggacaatgcatgccctccaacaggtgttcttcaaccttctcctagaatgcgagatgtcccaaaactatcgcccctagttgcccaccgagtacatgccgatcccctatctggtatggtgttcaccagtgaatctatcctcaccatctgccgcgagggcctcatcaaaatctgggttcgaccagagcagagcgaaaacaatcagcaatcgaattcttcagaatttgctttaggccctgcttcgaaggatagggcgatcacatcttccaataaagcaagtagctccagctttaagaagctgccgcctgttcttgtcacatgatgaatcaacgggatggttcttgtggatatttctgcttcacgtggcattagtggtggatatgaatcttactccatggttgatggggatgaaactctcatatggagtctgcagactgcaagtaatgagggtgagcatttgatggttgatgttcccaggaagcagggccagcgttgccagtttttttggcacgaaagagtaaatgggagctcttgtacagacacatacttaatgataaaattgtaaaaactcactgtccgtttcataatattcaatagccaccgaaagatgattggacgaccatgttatcgattttagctggtgggttgatagtatccttaaactttggtacttcggagacttgtaattatggaccataatatctgaggaatgcttcagtcttacctggtgtaagttgtgttactatttccttctgccttttgtcaattattagatctagtttggca

SEQ ID NO: 35203 - DNA, 2562 bp, Zea Mays
ttttatctcttttatgtgtttccccgtttcgttgttttcggttctcctttgcctttgtttcccttttctgttctttgggggttgagctctgaggttttcatacggggtttcatctctagcctaccccaacgtgcttgggacaaaaaaggctttgttgttgttgttgttgttgttgttgttgtataaatagaatgtatattccgtctccaaagtccaaagcagttgttcctcgccgtctcggggtctcggcctctcctcggtctctcctcccagatcgggccatccaggtgctaccgctcttcgccccctccacttcaccgccgccgcgtagatccgtctccgcctcctggaagcgctaccagtggaccaacgccgagccggcggagttagcggcgttagggttgcggttgggaattgattgcgggggacgcagcggtggcgcctggcatggcgggggcgcccggggtcgggccgggtgcggggggtgggggcggcgccgctgcggggctcaagacttacttcaagacgcccgaggggaggtacaagctgcagtacgagaaggcgcactccgcggtgctgcactacagccacggcggcaagaccgtctcgcagttgacagtggcatacctcaaggagaagcctgctagccagggctctcagccatcaacaccaagcgccagcagtgggatgcggtctgcagcagcaaggctgctgggcactgggaatgggagcaaggcacttagctttggtggcggtaatggtgcaagccgagctgttgctggaagcagccgtgtaggaggcggccttggtacacctacaggccttggtggatcacaggggggcacaaattatgatggcaagggtacatatattgtattcaatgctgctgatacactattcatcagtgatctcaattcccaggagaaggatccactaaagtccatccatttcagcaactcaaacccactgtgccatgcattcgacccagaggccaaagagggacacgacctgatcattgggatgggatcaggggatgtctattcaatgtcgctgaggcaacagttacaagatcctggaagaaaacccgtggcagctctacattacaataagggtgataaagatgtctcacccaatggaagtcgttgcacttctgtcgcatggggtgccagagcgtgaaggcattttcgtttgttagccatttctgatggaaatttgtacgtgtatgataaaaacaaggatgggaacacagactgtacgtttccagctgtcaaggatcagtctcagtttatggttgcacatgcaaagtcgagtaagagcaacccagtcgctaggtggcatatatgtcaaggttcgatcaatgcaatttccttttcaccagatggcgcatacttggcgactgttgggagagatggttatttgagagtattcgatttttcaaaggaacaactaatatttggtggaagaagttattatggtgcactgttgtgttgcacttggaggtggtgaagatgatcttgtgcaggtatggggcatggatgatagaaagatagttgcttggggtgaaggacataattcatgggtcagtggagttgcttttgattcatattggtccccaccaagttctgatggaaatggagaaaatgtatatcgctttggttctgttgggcaggacacccaactacttctgtgggacctggcactggatgagattgttgtcccactacggcatccttcaagtgcctcacctacgtttagcagcgggagcccttccacacactgggacaatgcatgccctccaacaggtgttcttcaaccttctcctagaatgcgagatgtcccaaaactatcgcccctagttgcccaccgagtacatgccgatcccctatctggtatggtgttcaccagtgaatctatcctcaccatctgccgcgagggcctcatcaaaatctgggttcgaccagagcagagcgaaaacaatcagcaatcgaattcttcagaatttgctttaggccctgcttcgaaggatagggcgatcacatcttccaataaagcaagtagctccagctttaagaagctgccgcctgttcttgtcacatgatgaatcaacgggatggttcttgtggatatttctgcttcacgtggcattagtggtggatatgaatcttactccatggttgatggggatgaaactctcatatggagtctgcagactgcaagtaatgagggtgagcatttgatggttgatgttcccaggaagcagggccagcgttgccagtttttttggcacgaaagagtaaatgggagctcttgtacagacacatacttaatgataaaattgtaaaaactcactgtccgtttcataatattcaatagccaccgaaagatgattggacgaccatgttatcgattttagctggtgggttgatagtatccttaaactttggtacttcggagacttgtaattatggaccataatatctgaggaatgcttcagtcttacctggtgtaagttgtgttactatttccttctgccttttgtcaattattagatctagtttggca

SEQ ID NO: 35204 - DNA, 2606 bp, Zea Mays
ttttatctcttttatgtgtttccccgtttcgttgttttcggttctcctttgcctttgtttcccttttctgttctttgggggttgagctctgaggttttcatacggggtttcatctctagcctaccccaacgtgcttgggacaaaaaaggctttgttgttgttgttgttgttgttgttgttgtataaatagaatgtatattccgtctccaaagtccaaagcagttgttcctcgccgtctcggggtctcggcctctcctcggtctctcctcccagatcgggccatccaggtgctaccgctcttcgccccctccacttcaccgccgccgcgtagatccgtctccgcctcctggaagcgctaccagtggaccaacgccgagccggcggagttagcggcgttagggttgcggttgggaattgattgcgggggacgcagcggtggcgcctggcatggcgggggcgcccggggtcgggccgggtgcggggggtgggggcggcgccgctgcggggctcaagacttacttcaagacgcccgaggggaggtacaagctgcagtacgagaaggcgcactccgcggtgctgcactacagccacggcggcaagaccgtctcgcaggtacggatgggaactgggaagtgcgcttctgccagggggatctacgcggattgctgcggtggatggatgcttttgttgacagtggcatacctcaaggagaagcctgctagccagggctctcagccatcaacaccaagcgccagcagtgggatgcggtctgcagcagcaaggctgctgggcactgggaatgggagcaaggcacttagctttggtggcggtaatggtgcaagccgagctgttgctggaagcagccgtgtaggaggcggccttggtacacctacaggccttggtggatcacaggggggcacaaattatgatggcaagggtacatatattgtattcaatgctgctgatacactattcatcagtgatctcaattcccaggagaaggatccactaaagtccatccatttcagcaactcaaacccactgtgccatgcattcgacccagaggccaaagagggacacgacctgatcattgggatgggatcaggggatgtctattcaatgtcgctgaggcaacagttacaagatcctggaagaaaacccgtggcagctctacattacaataagggtgataaagatgtctcacccaatggaagtcgttgcacttctgtcgcatggggtgccagagcgtgaaggcattttcgtttgttagccatttctgatggaaatttgtacgtgtatgataaaaacaaggatgggaacacagactgtacgtttccagctgtcaaggatcagtctcagtttatggttgcacatgcaaagtcgagtaagagcaacccagtcgctaggtggcatatatgtcaaggttcgatcaatgcaatttccttttcaccagatggcgcatacttggcgactgttgggagagatggttatttgagagtattcgatttttcaaaggaacaactaatatttggtggaagaagttattatggtgcactgttgtgttgcacttggagctcagatggaaaatatctattaacaggtggtgaagatgatcttgtgcaggtcagtggagttgcttttgattcatattggtccccaccaagttctgatggaaatggagaaaatgtatatcgctttggttctgttgggcaggacacccaactacttctgtgggacctggcactggatgagattgttgtcccactacggcatccttcaagtgcctcacctacgtttagcagcgggagcccttccacacactgggacaatgcatgccctccaacaggtgttcttcaaccttctcctagaatgcgagatgtcccaaaactatcgcccctagttgcccaccgagtacatgccgatcccctatctggtatggtgttcaccagtgaatctatcctcaccatctgccgcgagggcctcatcaaaatctgggttcgaccagagcagagcgaaaacaatcagcaatcgaattcttcagaatttgctttaggccctgcttcgaaggatagggcgatcacatcttccaataaagcaagtagctccagctttaagaagctgccgcctgttcttgtcacatgatgaatcaacgggatggttcttgtggatatttctgcttcacgtggcattagtggtggatatgaatcttactccatggttgatggggatgaaactctcatatggagtctgcagactgcaagtaatgagggtgagcatttgatggttgatgttcccaggaagcagggccagcgttgccagtttttttggcacgaaagagtaaatgggagctcttgtacagacacatacttaatgataaaattgtaaaaactcactgtccgtttcataatattcaatagccaccgaaagatgattggacgaccatgttatcgattttagctggtgggttgatagtatccttaaactttggtacttcggagacttgtaattatggaccataatatctgaggaatgcttcagtcttacctggtgtaagttgtgttactatttccttctgccttttgtcaattattagatctagtttggca

SEQ ID NO: 35205 - DNA, 2513 bp, Zea Mays
ttttatctcttttatgtgtttccccgtttcgttgttttcggttctcctttgcctttgtttcccttttctgttctttgggggttgagctctgaggttttcatacggggtttcatctctagcctaccccaacgtgcttgggacaaaaaaggctttgttgttgttgttgttgttgttgttgttgtataaatagaatgtatattccgtctccaaagtccaaagcagttgttcctcgccgtctcggggtctcggcctctcctcggtctctcctcccagatcgggccatccaggtgctaccgctcttcgccccctccacttcaccgccgccgcgtagatccgtctccgcctcctggaagcgctaccagtggaccaacgccgagccggcggagttagcggcgttagggttgcggttgggaattgattgcgggggacgcagcggtggcgcctggcatggcgggggcgcccggggtcgggccgggtgcggggggtgggggcggcgccgctgcggggctcaagacttacttcaagacgcccgaggggaggtacaagctgcagtacgagaaggcgcactccgcggtgctgcactacagccacggcggcaagaccgtctcgcaggtacggatgggaactgggaagtgcgcttctgccagggggatctacgcggattgctgcggtggatggatgcttttgttgacagtggcatacctcaaggagaagcctgctagccagggctctcagccatcaacaccaagcgccagcagtgggatgcggtctgcagcagcaaggctgctgggcactgggaatgggagcaaggcacttagctttggtggcggtaatggtgcaagccgagctgttgctggaagcagccgtgtaggaggcggccttggtacacctacaggccttggtggatcacaggggggcacaaattatgatggcaagggtacatatattgtattcaatgctgctgatacactattcatcagtgatctcaattcccaggagaaggatccactaaagtccatccatttcagcaactcaaacccactgtgccatgcattcgacccagaggccaaagagggacacgacctgatcattgggatgggatcaggggatgtctattcaatgtcgctgaggcaacagttacaagatcctggaagaaaacccgtggcagctctacattacaataagggtgataaagatgtctcacccaatggaagacatgatcaaggtagcataggtacatgtctgaacaaggatgggaacacagactgtacgtttccagctgtcaaggatcagtctcagtttatggttgcacatgcaaagtcgagtaagagcaacccagtcgctaggtggcatatatgtcaaggttcgatcaatgcaatttccttttcaccagatggcgcatacttggcgactgttgggagagatggttatttgagagtattcgatttttcaaaggaacaactaatatttggtggaagaagttattatggtgcactgttgtgttgcacttggagctcagatggaaaatatctattaacaggtggtgaagatgatcttgtgcaggtatggggcatggatgatagaaagatagttgcttggggtgaaggacataattcatgggacacccaactacttctgtgggacctggcactggatgagattgttgtcccactacggcatccttcaagtgcctcacctacgtttagcagcgggagcccttccacacactgggacaatgcatgccctccaacaggtgttcttcaaccttctcctagaatgcgagatgtcccaaaactatcgcccctagttgcccaccgagtacatgccgatcccctatctggtatggtgttcaccagtgaatctatcctcaccatctgccgcgagggcctcatcaaaatctgggttcgaccagagcagagcgaaaacaatcagcaatcgaattcttcagaatttgctttaggccctgcttcgaaggatagggcgatcacatcttccaataaagcaagtagctccagctttaagaagctgccgcctgttcttgtcacatgatgaatcaacgggatggttcttgtggatatttctgcttcacgtggcattagtggtggatatgaatcttactccatggttgatggggatgaaactctcatatggagtctgcagactgcaagtaatgagggtgagcatttgatggttgatgttcccaggaagcagggccagcgttgccagtttttttggcacgaaagagtaaatgggagctcttgtacagacacatacttaatgataaaattgtaaaaactcactgtccgtttcataatattcaatagccaccgaaagatgattggacgaccatgttatcgattttagctggtgggttgatagtatccttaaactttggtacttcggagacttgtaattatggaccataatatctgaggaatgcttcagtcttacctggtgtaagttgtgttactatttccttctgccttttgtcaattattagatctagtttggca

SEQ ID NO: 35206 - DNA, 2523 bp, Zea Mays
ttttatctcttttatgtgtttccccgtttcgttgttttcggttctcctttgcctttgtttcccttttctgttctttgggggttgagctctgaggttttcatacggggtttcatctctagcctaccccaacgtgcttgggacaaaaaaggctttgttgttgttgttgttgttgttgttgttgtataaatagaatgtatattccgtctccaaagtccaaagcagttgttcctcgccgtctcggggtctcggcctctcctcggtctctcctcccagatcgggccatccaggtgctaccgctcttcgccccctccacttcaccgccgccgcgtagatccgtctccgcctcctggaagcgctaccagtggaccaacgccgagccggcggagttagcggcgttagggttgcggttgggaattgattgcgggggacgcagcggtggcgcctggcatggcgggggcgcccggggtcgggccgggtgcggggggtgggggcggcgccgctgcggggctcaagacttacttcaagacgcccgaggggaggtacaagctgcagtacgagaaggcgcactccgcggtgctgcactacagccacggcggcaagaccgtctcgcagttgacagtggcatacctcaaggagaagcctgctagccagggctctcagccatcaacaccaagcgccagcagtgggatgcggtctgcagcagcaaggctgctgggcactgggaatgggagcaaggcacttagctttggtggcggtaatggtgcaagccgagctgttgctggaagcagccgtgtaggaggcggccttggtacacctacaggccttggtggatcacaggggggcacaaattatgatggcaagggtacatatattgtattcaatgctgctgatacactattcatcagtgatctcaattcccaggagaaggatccactaaagtccatccatttcagcaactcaaacccactgtgccatgcattcgacccagaggccaaagagggacacgacctgatcattgggatgggatcaggggatgtctattcaatgtcgctgaggcaacagttacaagatcctggaagaaaacccgtggcagctctacattacaataagggtgataaagatgtctcacccaatggaagacatgatcaaggtagcataggtacatgtctgaacaaggatgggaacacagactgtacgtttccagctgtcaaggatcagtctcagtttatggttgcacatgcaaagtcgagtaagagcaacccagtcgctaggtggcatatatgtcaaggttcgatcaatgcaatttccttttcaccagatggcgcatacttggcgactgttgggagagatggttatttgagagtattcgatttttcaaaggaacaactaatatttggtggaagaagttattatggtgcactgttgtgttgcacttggagatggaaaatatctattaacaggtggtgaagatgatcttgtgcaggtatggggcatggatgatagaaagatagttgcttggggtgaaggacataattcatgggtcagtggagttgcttttgattcatattggtccccaccaagttctgatggaaatggagaaaatgtatatcgctttggttctgttgggcaggacacccaactacttctgtgggacctggcactggatgagattgttgtcccactacggcatccttcaagtgcctcacctacgtttagcagcgggagcccttccacacactgggacaatgcatgccctccaacaggtgttcttcaaccttctcctagaatgcgagatgtcccaaaactatcgcccctagttgcccaccgagtacatgccgatcccctatctggtatggtgttcaccagtgaatctatcctcaccatctgccgcgagggcctcatcaaaatctgggttcgaccagagcagagcgaaaacaatcagcaatcgaattcttcagaatttgctttaggccctgcttcgaaggatagggcgatcacatcttccaataaagcaagtagctccagctttaagaagctgccgcctgttcttgtcacatgatgaatcaacgggatggttcttgtggatatttctgcttcacgtggcattagtggtggatatgaatcttactccatggttgatggggatgaaactctcatatggagtctgcagactgcaagtaatgagggtgagcatttgatggttgatgttcccaggaagcagggccagcgttgccagtttttttggcacgaaagagtaaatgggagctcttgtacagacacatacttaatgataaaattgtaaaaactcactgtccgtttcataatattcaatagccaccgaaagatgattggacgaccatgttatcgattttagctggtgggttgatagtatccttaaactttggtacttcggagacttgtaattatggaccataatatctgaggaatgcttcagtcttacctggtgtaagttgtgttactatttccttctgccttttgtcaattattagatctagtttggca

SEQ ID NO: 35207 - DNA, 2741 bp, Zea Mays
ttttatctcttttatgtgtttccccgtttcgttgttttcggttctcctttgcctttgtttcccttttctgttctttgggggttgagctctgaggttttcatacggggtttcatctctagcctaccccaacgtgcttgggacaaaaaaggctttgttgttgttgttgttgttgttgttgttgtataaatagaatgtatattccgtctccaaagtccaaagcagttgttcctcgccgtctcggggtctcggcctctcctcggtctctcctcccagatcgggccatccaggtgctaccgctcttcgccccctccacttcaccgccgccgcgtagatccgtctccgcctcctggaagcgctaccagtggaccaacgccgagccggcggagttagcggcgttagggttgcggttgggaattgattgcgggggacgcagcggtggcgcctggcatggcgggggcgcccggggtcgggccgggtgcggggggtgggggcggcgccgctgcggggctcaagacttacttcaagacgcccgaggggaggtacaagctgcagtacgagaaggcgcactccgcggtgctgcactacagccacggcggcaagaccgtctcgcaggtacggatgggaactgggaagtgcgcttctgccagggggatctacgcggattgctgcggtggatggatgcttttgttgacagtggcatacctcaaggagaagcctgctagccagggctctcagccatcaacaccaagcgccagcagtgggatgcggtctgcagcagcaaggctgctgggcactgggaatgggagcaaggcacttagctttggtggcggtaatggtgcaagccgagctgttgctggaagcagccgtgtaggaggcggccttggtacacctacaggccttggtggatcacaggggggcacaaattatgatggcaagggtacatatattgtattcaatgctgctgatacactattcatcagtgatctcaattcccaggagaaggatccactaaagtccatccatttcagcaactcaaacccactgtgccatgcattcgacccagaggccaaagagggacacgacctgatcattgggatgggatcaggggatgtctattcaatgtcgctgaggcaacagttacaagatcctggaagaaaacccgtggcagctctacattacaataagggtgataaagatgtctcacccaatggaagtcgttgcacttctgtcgcatggggtgccagagcgtgaaggcattttcgtttgttagccatttctgatggaaatttgtacgtgtatgataaaaacaaggatgggaacacagactgtacgtttccagctgtcaaggatcagtctcagtttatggttgcacatgcaaagtcgagtaagagcaacccagtcgctaggtggcatatatgtcaaggttcgatcaatgcaatttccttttcaccagatggcgcatacttggcgactgttgggagagatggttatttgagagtattcgatttttcaaaggaacaactaatatttggtggaagaagttattatggtgcactgttgtgttgcacttggagctcagatggaaaatatctattaacaggtggtgaagatgatcttgtgcaggtatggggcatggatgatagaaagatagttgcttggggtgaaggacataattcatgggtcagtggagttgcttttgattcatattggtccccaccaagttctgatggaaatggagaaaatgtatatcgctttggttctgttgggcagatcagggataagaattacttcttttcagtactgatggggttattttctcatgatgttttgaaagtaatttatgtttttgacacccaactacttctgtgggacctggcactggatgagattgttgtcccactacggcatccttcaagtgcctcacctacgtttagcagcgggagcccttccacacactgggacaatgcatgccctccaacaggtgttcttcaaccttctcctagaatgcgagatgtcccaaaactatcgcccctagttgcccaccgagtacatgccgatcccctatctggtatggtgttcaccagtgaatctatcctcaccatctgccgcgagggcctcatcaaaatctgggttcgaccagagcagagcgaaaacaatcagcaatcgaattcttcagaatttgctttaggccctgcttcgaaggatagggcgatcacatcttccaataaagcaagtagctccagctttaagaagctgccgcctgttcttgtcacatgatgaatcaacgggatggttcttgtggatatttctgcttcacgtggcattagtggtggatatgaatcttactccatggttgatggggatgaaactctcatatggagtctgcagactgcaagtaatgagggtgagcatttgatggttgatgttcccaggaagcagggccagcgttgccagtttttttggcacgaaagagtaaatgggagctcttgtacagacacatacttaatgataaaattgtaaaaactcactgtccgtttcataatattcaatagccaccgaaagatgattggacgaccatgttatcgattttagctggtgggttgatagtatccttaaactttggtacttcggagacttgtaattatggaccataatatctgaggaatgcttcagtcttacctggtgtaagttgtgttactatttccttctgccttttgtcaattattagatctagtttggca

SEQ ID NO: 35208 - DNA, 2531 bp, Zea Mays
ttttatctcttttatgtgtttccccgtttcgttgttttcggttctcctttgcctttgtttcccttttctgttctttgggggttgagctctgaggttttcatacggggtttcatctctagcctaccccaacgtgcttgggacaaaaaaggctttgttgttgttgttgttgttgttgttgttgtataaatagaatgtatattccgtctccaaagtccaaagcagttgttcctcgccgtctcggggtctcggcctctcctcggtctctcctcccagatcgggccatccaggtgctaccgctcttcgccccctccacttcaccgccgccgcgtagatccgtctccgcctcctggaagcgctaccagtggaccaacgccgagccggcggagttagcggcgttagggttgcggttgggaattgattgcgggggacgcagcggtggcgcctggcatggcgggggcgcccggggtcgggccgggtgcggggggtgggggcggcgccgctgcggggctcaagacttacttcaagacgcccgaggggaggtacaagctgcagtacgagaaggcgcactccgcggtgctgcactacagccacggcggcaagaccgtctcgcagttgacagtggcatacctcaaggagaagcctgctagccagggctctcagccatcaacaccaagcgccagcagtgggatgcggtctgcagcagcaaggctgctgggcactgggaatgggagcaaggcacttagctttggtggcggtaatggtgcaagccgagctgttgctggaagcagccgtgtaggaggcggccttggtacacctacaggccttggtggatcacaggggggcacaaattatgatggcaagggtacatatattgtattcaatgctgctgatacactattcatcagtgatctcaattcccaggagaaggatccactaaagtccatccatttcagcaactcaaacccactgtgccatgcattcgacccagaggccaaagagggacacgacctgatcattgggatgggatcaggggatgtctattcaatgtcgctgaggcaacagttacaagatcctggaagaaaacccgtggcagctctacattacaataagggtgataaagatgtctcacccaatggaagtcgttgcacttctgtcgcatggggtgccagagcgtgaaggcattttcgtttgttagccatttctgatggaaatttgtacgtgtatgataaaaacaaggatgggaacacagactgtacgtttccagctgtcaaggatcagtctcagtttatggttgcacatgcaaagtcgagtaagagcaacccagtcgctaggtggcatatatgtcaaggttcgatcaatgcaatttccttttcaccagatggcgcatacttggcgactgttgggagagatggttatttgagagtattcgatttttcaaaggaacaactaatatttggtggaagaagttattatggtgcactgttgtgttgcacttggagctcagatggaaaatatctattaacaggtggtgaagatgatcttgtgcaggtcagtggagttgcttttgattcatattggtccccaccaagttctgatggaaatggagaaaatgtatatcgctttggttctgttgggcaggacacccaactacttctgtgggacctggcactggatgagattgttgtcccactacggcatccttcaagtgcctcacctacgtttagcagcgggagcccttccacacactgggacaatgcatgccctccaacaggtgttcttcaaccttctcctagaatgcgagatgtcccaaaactatcgcccctagttgcccaccgagtacatgccgatcccctatctggtatggtgttcaccagtgaatctatcctcaccatctgccgcgagggcctcatcaaaatctgggttcgaccagagcagagcgaaaacaatcagcaatcgaattcttcagaatttgctttaggccctgcttcgaaggatagggcgatcacatcttccaataaagcaagtagctccagctttaagaagctgccgcctgttcttgtcacatgatgaatcaacgggatggttcttgtggatatttctgcttcacgtggcattagtggtggatatgaatcttactccatggttgatggggatgaaactctcatatggagtctgcagactgcaagtaatgagggtgagcatttgatggttgatgttcccaggaagcagggccagcgttgccagtttttttggcacgaaagagtaaatgggagctcttgtacagacacatacttaatgataaaattgtaaaaactcactgtccgtttcataatattcaatagccaccgaaagatgattggacgaccatgttatcgattttagctggtgggttgatagtatccttaaactttggtacttcggagacttgtaattatggaccataatatctgaggaatgcttcagtcttacctggtgtaagttgtgttactatttccttctgccttttgtcaattattagatctagtttggca

SEQ ID NO: 35209 - DNA, 2546 bp, Zea Mays
ttttatctcttttatgtgtttccccgtttcgttgttttcggttctcctttgcctttgtttcccttttctgttctttgggggttgagctctgaggttttcatacggggtttcatctctagcctaccccaacgtgcttgggacaaaaaaggctttgttgttgttgttgttgttgttgttgttgtataaatagaatgtatattccgtctccaaagtccaaagcagttgttcctcgccgtctcggggtctcggcctctcctcggtctctcctcccagatcgggccatccaggtgctaccgctcttcgccccctccacttcaccgccgccgcgtagatccgtctccgcctcctggaagcgctaccagtggaccaacgccgagccggcggagttagcggcgttagggttgcggttgggaattgattgcgggggacgcagcggtggcgcctggcatggcgggggcgcccggggtcgggccgggtgcggggggtgggggcggcgccgctgcggggctcaagacttacttcaagacgcccgaggggaggtacaagctgcagtacgagaaggcgcactccgcggtgctgcactacagccacggcggcaagaccgtctcgcaggtacggatgggaactgggaagtgcgcttctgccagggggatctacgcggattgctgcggtggatggatgcttttgttgacagtggcatacctcaaggagaagcctgctagccagggctctcagccatcaacaccaagcgccagcagtgggatgcggtctgcagcagcaaggctgctgggcactgggaatgggagcaaggcacttagctttggtggcggtaatggtgcaagccgagctgttgctggaagcagccgtgtaggaggcggccttggtacacctacaggccttggtggatcacaggggggcacaaattatgatggcaagggtacatatattgtattcaatgctgctgatacactattcatcagtgatctcaattcccaggagaaggatccactaaagtccatccatttcagcaactcaaacccactgtgccatgcattcgacccagaggccaaagagggacacgacctgatcattgggatgggatcaggggatgtctattcaatgtcgctgaggcaacagttacaagatcctggaagaaaacccgtggcagctctacattacaataagggtgataaagatgtctcacccaatggaagacatgatcaaggtagcataggtacatgtctgaacaaggatgggaacacagactgtacgtttccagctgtcaaggatcagtctcagtttatggttgcacatgcaaagtcgagtaagagcaacccagtcgctaggtggcatatatgtcaaggttcgatcaatgcaatttccttttcaccagatggcgcatacttggcgactgttgggagagatggttatttgagagtattcgatttttcaaaggaacaactaatatttggtggaagaagttattatggtgcactgttgtgttgcacttggagctcagatggaaaatatctattaacaggtggtgaagatgatcttgtgcaggtcagtggagttgcttttgattcatattggtccccaccaagttctgatggaaatggagaaaatgtatatcgctttggttctgttgggcaggacacccaactacttctgtgggacctggcactggatgagattgttgtcccactacggcatccttcaagtgcctcacctacgtttagcagcgggagcccttccacacactgggacaatgcatgccctccaacaggtgttcttcaaccttctcctagaatgcgagatgtcccaaaactatcgcccctagttgcccaccgagtacatgccgatcccctatctggtatggtgttcaccagtgaatctatcctcaccatctgccgcgagggcctcatcaaaatctgggttcgaccagagcagagcgaaaacaatcagcaatcgaattcttcagaatttgctttaggccctgcttcgaaggatagggcgatcacatcttccaataaagcaagtagctccagctttaagaagctgccgcctgttcttgtcacatgatgaatcaacgggatggttcttgtggatatttctgcttcacgtggcattagtggtggatatgaatcttactccatggttgatggggatgaaactctcatatggagtctgcagactgcaagtaatgagggtgagcatttgatggttgatgttcccaggaagcagggccagcgttgccagtttttttggcacgaaagagtaaatgggagctcttgtacagacacatacttaatgataaaattgtaaaaactcactgtccgtttcataatattcaatagccaccgaaagatgattggacgaccatgttatcgattttagctggtgggttgatagtatccttaaactttggtacttcggagacttgtaattatggaccataatatctgaggaatgcttcagtcttacctggtgtaagttgtgttactatttccttctgccttttgtcaattattagatctagtttggca

SEQ ID NO: 35210 - DNA, 2658 bp, Zea Mays
ttttatctcttttatgtgtttccccgtttcgttgttttcggttctcctttgcctttgtttcccttttctgttctttgggggttgagctctgaggttttcatacggggtttcatctctagcctaccccaacgtgcttgggacaaaaaaggctttgttgttgttgttgttgttgttgttgttgtataaatagaatgtatattccgtctccaaagtccaaagcagttgttcctcgccgtctcggggtctcggcctctcctcggtctctcctcccagatcgggccatccaggtgctaccgctcttcgccccctccacttcaccgccgccgcgtagatccgtctccgcctcctggaagcgctaccagtggaccaacgccgagccggcggagttagcggcgttagggttgcggttgggaattgattgcgggggacgcagcggtggcgcctggcatggcgggggcgcccggggtcgggccgggtgcggggggtgggggcggcgccgctgcggggctcaagacttacttcaagacgcccgaggggaggtacaagctgcagtacgagaaggcgcactccgcggtgctgcactacagccacggcggcaagaccgtctcgcaggtacggatgggaactgggaagtgcgcttctgccagggggatctacgcggattgctgcggtggatggatgcttttgttgacagtggcatacctcaaggagaagcctgctagccagggctctcagccatcaacaccaagcgccagcagtgggatgcggtctgcagcagcaaggctgctgggcactgggaatgggagcaaggcacttagctttggtggcggtaatggtgcaagccgagctgttgctggaagcagccgtgtaggaggcggccttggtacacctacaggccttggtggatcacaggggggcacaaattatgatggcaagggtacatatattgtattcaatgctgctgatacactattcatcagtgatctcaattcccaggagaaggatccactaaagtccatccatttcagcaactcaaacccactgtgccatgcattcgacccagaggccaaagagggacacgacctgatcattgggatgggatcaggggatgtctattcaatgtcgctgaggcaacagttacaagatcctggaagaaaacccgtggcagctctacattacaataagggtgataaagatgtctcacccaatggaagtcgttgcacttctgtcgcatggggtgccagagcgtgaaggcattttcgtttgttagccatttctgatggaaatttgtacgtgtatgataaaaacaaggatgggaacacagactgtacgtttccagctgtcaaggatcagtctcagtttatggttgcacatgcaaagtcgaagcaacccagtcgctaggtggcatatatgtcaaggttcgatcaatgcaatttccttttcaccagatggcgcatacttggcgactgttgggagagatggttatttgagagtattcgatttttcaaaggaacaactaatatttggtggaagaagttattatggtgcactgttgtgttgcacttggagctcagatggaaaatatctattaacaggtggtgaagatgatcttgtgcaggtatggggcatggatgatagaaagatagttgcttggggtgaaggacataattcatgggtcagtggagttgcttttgattcatattggtccccaccaagttctgatggaaatggagaaaatgtatatcgctttggttctgttgggcaggacacccaactacttctgtgggacctggcactggatgagattgttgtcccactacggcatccttcaagtgcctcacctacgtttagcagcgggagcccttccacacactgggacaatgcatgccctccaacaggtgttcttcaaccttctcctagaatgcgagatgtcccaaaactatcgcccctagttgcccaccgagtacatgccgatcccctatctggtatggtgttcaccagtgaatctatcctcaccatctgccgcgagggcctcatcaaaatctgggttcgaccagagcagagcgaaaacaatcagcaatcgaattcttcagaatttgctttaggccctgcttcgaaggatagggcgatcacatcttccaataaagcaagtagctccagctttaagaagctgccgcctgttcttgtcacatgatgaatcaacgggatggttcttgtggatatttctgcttcacgtggcattagtggtggatatgaatcttactccatggttgatggggatgaaactctcatatggagtctgcagactgcaagtaatgagggtgagcatttgatggttgatgttcccaggaagcagggccagcgttgccagtttttttggcacgaaagagtaaatgggagctcttgtacagacacatacttaatgataaaattgtaaaaactcactgtccgtttcataatattcaatagccaccgaaagatgattggacgaccatgttatcgattttagctggtgggttgatagtatccttaaactttggtacttcggagacttgtaattatggaccataatatctgaggaatgcttcagtcttacctggtgtaagttgtgttactatttccttctgccttttgtcaattattagatctagtttggca

SEQ ID NO: 35211 - DNA, 2609 bp, Zea Mays
ttttatctcttttatgtgtttccccgtttcgttgttttcggttctcctttgcctttgtttcccttttctgttctttgggggttgagctctgaggttttcatacggggtttcatctctagcctaccccaacgtgcttgggacaaaaaaggctttgttgttgttgttgttgttgttgttgttgtataaatagaatgtatattccgtctccaaagtccaaagcagttgttcctcgccgtctcggggtctcggcctctcctcggtctctcctcccagatcgggccatccaggtgctaccgctcttcgccccctccacttcaccgccgccgcgtagatccgtctccgcctcctggaagcgctaccagtggaccaacgccgagccggcggagttagcggcgttagggttgcggttgggaattgattgcgggggacgcagcggtggcgcctggcatggcgggggcgcccggggtcgggccgggtgcggggggtgggggcggcgccgctgcggggctcaagacttacttcaagacgcccgaggggaggtacaagctgcagtacgagaaggcgcactccgcggtgctgcactacagccacggcggcaagaccgtctcgcagttgacagtggcatacctcaaggagaagcctgctagccagggctctcagccatcaacaccaagcgccagcagtgggatgcggtctgcagcagcaaggctgctgggcactgggaatgggagcaaggcacttagctttggtggcggtaatggtgcaagccgagctgttgctggaagcagccgtgtaggaggcggccttggtacacctacaggccttggtggatcacaggggggcacaaattatgatggcaagggtacatatattgtattcaatgctgctgatacactattcatcagtgatctcaattcccaggagaaggatccactaaagtccatccatttcagcaactcaaacccactgtgccatgcattcgacccagaggccaaagagggacacgacctgatcattgggatgggatcaggggatgtctattcaatgtcgctgaggcaacagttacaagatcctggaagaaaacccgtggcagctctacattacaataagggtgataaagatgtctcacccaatggaagtcgttgcacttctgtcgcatggggtgccagagcgtgaaggcattttcgtttgttagccatttctgatggaaatttgtacgtgtatgataaaaacaaggatgggaacacagactgtacgtttccagctgtcaaggatcagtctcagtttatggttgcacatgcaaagtcgagtaagagcaacccagtcgctaggtggcatatatgtcaaggttcgatcaatgcaatttccttttcaccagatggcgcatacttggcgactgttgggagagatggttatttgagagtattcgatttttcaaaggaacaactaatatttggtggaagaagttattatggtgcactgttgtgttgcacttggagctcagatggaaaatatctattaacaggtggtgaagatgatcttgtgcaggtcagtggagttgcttttgattcatattggtccccaccaagttctgatggaaatggagaaaatgtatatcgctttggttctgttgggcagatcagggataagaattacttcttttcagtactgatggggttattttctcatgatgttttgaaagtaatttatgtttttgacacccaactacttctgtgggacctggcactggatgagattgttgtcccactacggcatccttcaagtgcctcacctacgtttagcagcgggagcccttccacacactgggacaatgcatgccctccaacaggtgttcttcaaccttctcctagaatgcgagatgtcccaaaactatcgcccctagttgcccaccgagtacatgccgatcccctatctggtatggtgttcaccagtgaatctatcctcaccatctgccgcgagggcctcatcaaaatctgggttcgaccagagcagagcgaaaacaatcagcaatcgaattcttcagaatttgctttaggccctgcttcgaaggatagggcgatcacatcttccaataaagcaagtagctccagctttaagaagctgccgcctgttcttgtcacatgatgaatcaacgggatggttcttgtggatatttctgcttcacgtggcattagtggtggatatgaatcttactccatggttgatggggatgaaactctcatatggagtctgcagactgcaagtaatgagggtgagcatttgatggttgatgttcccaggaagcagggccagcgttgccagtttttttggcacgaaagagtaaatgggagctcttgtacagacacatacttaatgataaaattgtaaaaactcactgtccgtttcataatattcaatagccaccgaaagatgattggacgaccatgttatcgattttagctggtgggttgatagtatccttaaactttggtacttcggagacttgtaattatggaccataatatctgaggaatgcttcagtcttacctggtgtaagttgtgttactatttccttctgccttttgtcaattattagatctagtttggca

SEQ ID NO: 35212 - DNA, 2588 bp, Zea Mays
ttttatctcttttatgtgtttccccgtttcgttgttttcggttctcctttgcctttgtttcccttttctgttctttgggggttgagctctgaggttttcatacggggtttcatctctagcctaccccaacgtgcttgggacaaaaaaggctttgttgttgttgttgttgttgttgttgttgtataaatagaatgtatattccgtctccaaagtccaaagcagttgttcctcgccgtctcggggtctcggcctctcctcggtctctcctcccagatcgggccatccaggtgctaccgctcttcgccccctccacttcaccgccgccgcgtagatccgtctccgcctcctggaagcgctaccagtggaccaacgccgagccggcggagttagcggcgttagggttgcggttgggaattgattgcgggggacgcagcggtggcgcctggcatggcgggggcgcccggggtcgggccgggtgcggggggtgggggcggcgccgctgcggggctcaagacttacttcaagacgcccgaggggaggtacaagctgcagtacgagaaggcgcactccgcggtgctgcactacagccacggcggcaagaccgtctcgcagttgacagtggcatacctcaaggagaagcctgctagccagggctctcagccatcaacaccaagcgccagcagtgggatgcggtctgcagcagcaaggctgctgggcactgggaatgggagcaaggcacttagctttggtggcggtaatggtgcaagccgagctgttgctggaagcagccgtgtaggaggcggccttggtacacctacaggccttggtggatcacaggggggcacaaattatgatggcaagggtacatatattgtattcaatgctgctgatacactattcatcagtgatctcaattcccaggagaaggatccactaaagtccatccatttcagcaactcaaacccactgtgccatgcattcgacccagaggccaaagagggacacgacctgatcattgggatgggatcaggggatgtctattcaatgtcgctgaggcaacagttacaagatcctggaagaaaacccgtggcagctctacattacaataagggtgataaagatgtctcacccaatggaagtcgttgcacttctgtcgcatggggtgccagagcgtgaaggcattttcgtttgttagccatttctgatggaaatttgtacgtgtatgataaaaacaaggatgggaacacagactgtacgtttccagctgtcaaggatcagtctcagtttatggttgcacatgcaaagtcgagtaagagcaacccagtcgctaggtggcatatatgtcaaggttcgatcaatgcaatttccttttcaccagatggcgcatacttggcgactgttgggagagatggttatttgagagtattcgatttttcaaaggaacaactaatatttggtggaagaagttattatggtgcactgttgtgttgcacttggagctcagatggaaaatatctattaacaggtggtgaagatgatcttgtgcaggtatggggcatggatgatagaaagatagttgcttggggtgaaggacataattcatgggtcagtggagttgcttttgattcatattggtccccaccaagttctgatggaaatggagaaaatgtatatcgctttggttctgttgggcaggacacccaactacttctgtgggacctggcactggatgagattgttgtcccactacggcatccttcaagtgcctcacctacgtttagcagcgggagcccttccacacactgggacaatgcatgccctccaacaggtgttcttcaaccttctcctagaatgcgagatgtcccaaaactatcgcccctagttgcccaccgagtacatgccgatcccctatctggtatggtgttcaccagtgaatctatcctcaccatctgccgcgagggcctcatcaaaatctgggttcgaccagagcagagcgaaaacaatcagcaatcgaattcttcagaatttgctttaggccctgcttcgaaggatagggcgatcacatcttccaataaagcaagtagctccagctttaagaagctgccgcctgttcttgtcacatgatgaatcaacgggatggttcttgtggatatttctgcttcacgtggcattagtggtggatatgaatcttactccatggttgatggggatgaaactctcatatggagtctgcagactgcaagtaatgagggtgagcatttgatggttgatgttcccaggaagcagggccagcgttgccagtttttttggcacgaaagagtaaatgggagctcttgtacagacacatacttaatgataaaattgtaaaaactcactgtccgtttcataatattcaatagccaccgaaagatgattggacgaccatgttatcgattttagctggtgggttgatagtatccttaaactttggtacttcggagacttgtaattatggaccataatatctgaggaatgcttcagtcttacctggtgtaagttgtgttactatttccttctgccttttgtcaattattagatctagtttggca

SEQ ID NO: 35213 - DNA, 2663 bp, Zea Mays
ttttatctcttttatgtgtttccccgtttcgttgttttcggttctcctttgcctttgtttcccttttctgttctttgggggttgagctctgaggttttcatacggggtttcatctctagcctaccccaacgtgcttgggacaaaaaaggctttgttgttgttgttgttgttgttgttgttgtataaatagaatgtatattccgtctccaaagtccaaagcagttgttcctcgccgtctcggggtctcggcctctcctcggtctctcctcccagatcgggccatccaggtgctaccgctcttcgccccctccacttcaccgccgccgcgtagatccgtctccgcctcctggaagcgctaccagtggaccaacgccgagccggcggagttagcggcgttagggttgcggttgggaattgattgcgggggacgcagcggtggcgcctggcatggcgggggcgcccggggtcgggccgggtgcggggggtgggggcggcgccgctgcggggctcaagacttacttcaagacgcccgaggggaggtacaagctgcagtacgagaaggcgcactccgcggtgctgcactacagccacggcggcaagaccgtctcgcaggtacggatgggaactgggaagtgcgcttctgccagggggatctacgcggattgctgcggtggatggatgcttttgttgacagtggcatacctcaaggagaagcctgctagccagggctctcagccatcaacaccaagcgccagcagtgggatgcggtctgcagcagcaaggctgctgggcactgggaatgggagcaaggcacttagctttggtggcggtaatggtgcaagccgagctgttgctggaagcagccgtgtaggaggcggccttggtacacctacaggccttggtggatcacaggggggcacaaattatgatggcaagggtacatatattgtattcaatgctgctgatacactattcatcagtgatctcaattcccaggagaaggatccactaaagtccatccatttcagcaactcaaacccactgtgccatgcattcgacccagaggccaaagagggacacgacctgatcattgggatgggatcaggggatgtctattcaatgtcgctgaggcaacagttacaagatcctggaagaaaacccgtggcagctctacattacaataagggtgataaagatgtctcacccaatggaagtcgttgcacttctgtcgcatggggtgccagagcgtgaaggcattttcgtttgttagccatttctgatggaaatttgtacgtgtatgataaaaacaaggatgggaacacagactgtacgtttccagctgtcaaggatcagtctcagtttatggttgcacatgcaaagtcgagtaagagcaacccagtcgctaggtggcatatatgtcaaggttcgatcaatgcaatttccttttcaccagatggcgcatacttggcgactgttgggagagatggttatttgagagtattcgatttttcaaaggaacaactaatatttggtggaagaagttattatggtgcactgttgtgttgcacttggagctcagatggaaaatatctattaacaggtggtgaagatgatcttgtgcaggtatggggcatggatgatagaaagatagttgcttggggtgaaggacataattcatgggtcagtggagttgcttttgattcatattggtccccaccaagttctgatggaaatggagaaaatgtatatcgctttggttctgttgggcaggacacccaactacttctgtgggacctggcactggatgagattgttgtcccactacggcatccttcaagtgcctcacctacgtttagcagcgggagcccttccacacactgggacaatgcatgccctccaacaggtgttcttcaaccttctcctagaatgcgagatgtcccaaaactatcgcccctagttgcccaccgagtacatgccgatcccctatctggtatggtgttcaccagtgaatctatcctcaccatctgccgcgagggcctcatcaaaatctgggttcgaccagagcagagcgaaaacaatcagcaatcgaattcttcagaatttgctttaggccctgcttcgaaggatagggcgatcacatcttccaataaagcaagtagctccagctttaagaagctgccgcctgttcttgtcacatgatgaatcaacgggatggttcttgtggatatttctgcttcacgtggcattagtggtggatatgaatcttactccatggttgatggggatgaaactctcatatggagtctgcagactgcaagtaatgagggtgagcatttgatggttgatgttcccaggaagcagggccagcgttgccagtttttttggcacgaaagagtaaatgggagctcttgtacagacacatacttaatgataaaattgtaaaaactcactgtccgtttcataatattcaatagccaccgaaagatgattggacgaccatgttatcgattttagctggtgggttgatagtatccttaaactttggtacttcggagacttgtaattatggaccataatatctgaggaatgcttcagtcttacctggtgtaagttgtgttactatttccttctgccttttgtcaattattagatctagtttggca

SEQ ID NO: 35214 - DNA, 2528 bp, Zea Mays
ttttatctcttttatgtgtttccccgtttcgttgttttcggttctcctttgcctttgtttcccttttctgttctttgggggttgagctctgaggttttcatacggggtttcatctctagcctaccccaacgtgcttgggacaaaaaaggctttgttgttgttgttgttgttgttgttgttgtataaatagaatgtatattccgtctccaaagtccaaagcagttgttcctcgccgtctcggggtctcggcctctcctcggtctctcctcccagatcgggccatccaggtgctaccgctcttcgccccctccacttcaccgccgccgcgtagatccgtctccgcctcctggaagcgctaccagtggaccaacgccgagccggcggagttagcggcgttagggttgcggttgggaattgattgcgggggacgcagcggtggcgcctggcatggcgggggcgcccggggtcgggccgggtgcggggggtgggggcggcgccgctgcggggctcaagacttacttcaagacgcccgaggggaggtacaagctgcagtacgagaaggcgcactccgcggtgctgcactacagccacggcggcaagaccgtctcgcagttgacagtggcatacctcaaggagaagcctgctagccagggctctcagccatcaacaccaagcgccagcagtgggatgcggtctgcagcagcaaggctgctgggcactgggaatgggagcaaggcacttagctttggtggcggtaatggtgcaagccgagctgttgctggaagcagccgtgtaggaggcggccttggtacacctacaggccttggtggatcacaggggggcacaaattatgatggcaagggtacatatattgtattcaatgctgctgatacactattcatcagtgatctcaattcccaggagaaggatccactaaagtccatccatttcagcaactcaaacccactgtgccatgcattcgacccagaggccaaagagggacacgacctgatcattgggatgggatcaggggatgtctattcaatgtcgctgaggcaacagttacaagatcctggaagaaaacccgtggcagctctacattacaataagggtgataaagatgtctcacccaatggaagacatgatcaaggtagcataggtacatgtctgaacaaggatgggaacacagactgtacgtttccagctgtcaaggatcagtctcagtttatggttgcacatgcaaagtcgagtaagagcaacccagtcgctaggtggcatatatgtcaaggttcgatcaatgcaatttccttttcaccagatggcgcatacttggcgactgttgggagagatggttatttgagagtattcgatttttcaaaggaacaactaatatttggtggaagaagttattatggtgcactgttgtgttgcacttggagctcagatggaaaatatctattaacaggtggtgaagatgatcttgtgcaggtatggggcatggatgatagaaagatagttgcttggggtgaaggacataattcatgggtcagtggagttgcttttgattcatattggtccccaccaagttctgatggaaatggagaaaatgtatatcgctttggttctgttgggcaggacacccaactacttctgtgggacctggcactggatgagattgttgtcccactacggcatccttcaagtgcctcacctacgtttagcagcgggagcccttccacacactgggacaatgcatgccctccaacaggtgttcttcaaccttctcctagaatgcgagatgtcccaaaactatcgcccctagttgcccaccgagtacatgccgatcccctatctggtatggtgttcaccagtgaatctatcctcaccatctgccgcgagggcctcatcaaaatctgggttcgaccagagcagagcgaaaacaatcagcaatcgaattcttcagaatttgctttaggccctgcttcgaaggatagggcgatcacatcttccaataaagcaagtagctccagctttaagaagctgccgcctgttcttgtcacatgatgaatcaacgggatggttcttgtggatatttctgcttcacgtggcattagtggtggatatgaatcttactccatggttgatggggatgaaactctcatatggagtctgcagactgcaagtaatgagggtgagcatttgatggttgatgttcccaggaagcagggccagcgttgccagtttttttggcacgaaagagtaaatgggagctcttgtacagacacatacttaatgataaaattgtaaaaactcactgtccgtttcataatattcaatagccaccgaaagatgattggacgaccatgttatcgattttagctggtgggttgatagtatccttaaactttggtacttcggagacttgtaattatggaccataatatctgaggaatgcttcagtcttacctggtgtaagttgtgttactatttccttctgccttttgtcaattattagatctagtttggca

SEQ ID NO: 35215 - DNA, 2549 bp, Zea Mays
ttttatctcttttatgtgtttccccgtttcgttgttttcggttctcctttgcctttgtttcccttttctgttctttgggggttgagctctgaggttttcatacggggtttcatctctagcctaccccaacgtgcttgggacaaaaaaggctttgttgttgttgttgttgttgttgttgttgtataaatagaatgtatattccgtctccaaagtccaaagcagttgttcctcgccgtctcggggtctcggcctctcctcggtctctcctcccagatcgggccatccaggtgctaccgctcttcgccccctccacttcaccgccgccgcgtagatccgtctccgcctcctggaagcgctaccagtggaccaacgccgagccggcggagttagcggcgttagggttgcggttgggaattgattgcgggggacgcagcggtggcgcctggcatggcgggggcgcccggggtcgggccgggtgcggggggtgggggcggcgccgctgcggggctcaagacttacttcaagacgcccgaggggaggtacaagctgcagtacgagaaggcgcactccgcggtgctgcactacagccacggcggcaagaccgtctcgcagttgacagtggcatacctcaaggagaagcctgctagccagggctctcagccatcaacaccaagcgccagcagtgggatgcggtctgcagcagcaaggctgctgggcactgggaatgggagcaaggcacttagctttggtggcggtaatggtgcaagccgagctgttgctggaagcagccgtgtaggaggcggccttggtacacctacaggccttggtggatcacaggggggcacaaattatgatggcaagggtacatatattgtattcaatgctgctgatacactattcatcagtgatctcaattcccaggagaaggatccactaaagtccatccatttcagcaactcaaacccactgtgccatgcattcgacccagaggccaaagagggacacgacctgatcattgggatgggatcaggggatgtctattcaatgtcgctgaggcaacagttacaagatcctggaagaaaacccgtggcagctctacattacaataagggtgataaagatgtctcacccaatggaagacatgatcaaggtagcataggtacatgtctgaacaaggatgggaacacagactgtacgtttccagctgtcaaggatcagtctcagtttatggttgcacatgcaaagtcgagtaagagcaacccagtcgctaggtggcatatatgtcaaggttcgatcaatgcaatttccttttcaccagatggcgcatacttggcgactgttgggagagatggttatttgagagtattcgatttttcaaaggaacaactaatatttggtggaagaagttattatggtgcactgttgtgttgcacttggagctcagatggaaaatatctattaacaggtggtgaagatgatcttgtgcaggtcagtggagttgcttttgattcatattggtccccaccaagttctgatggaaatggagaaaatgtatatcgctttggttctgttgggcagatcagggataagaattacttcttttcagtactgatggggttattttctcatgatgttttgaaagtaatttatgtttttgacacccaactacttctgtgggacctggcactggatgagattgttgtcccactacggcatccttcaagtgcctcacctacgtttagcagcgggagcccttccacacactgggacaatgcatgccctccaacaggtgttcttcaaccttctcctagaatgcgagatgtcccaaaactatcgcccctagttgcccaccgagtacatgccgatcccctatctggtatggtgttcaccagtgaatctatcctcaccatctgccgcgagggcctcatcaaaatctgggttcgaccagagcagagcgaaaacaatcagcaatcgaattcttcagaatttgctttaggccctgcttcgaaggatagggcgatcacatcttccaataaagcaagtagctccagctttaagaagctgccgcctgttcttgtcacatgatgaatcaacgggatggttcttgtggatatttctgcttcacgtggcattagtggtggatatgaatcttactccatggttgatggggatgaaactctcatatggagtctgcagactgcaagtaatgagggtgagcatttgatggttgatgttcccaggaagcagggccagcgttgccagtttttttggcacgaaagagtaaatgggagctcttgtacagacacatacttaatgataaaattgtaaaaactcactgtccgtttcataatattcaatagccaccgaaagatgattggacgaccatgttatcgattttagctggtgggttgatagtatccttaaactttggtacttcggagacttgtaattatggaccataatatctgaggaatgcttcagtcttacctggtgtaagttgtgttactatttccttctgccttttgtcaattattagatctagtttggca

SEQ ID NO: 35216 - DNA, 2604 bp, Zea Mays
ttttatctcttttatgtgtttccccgtttcgttgttttcggttctcctttgcctttgtttcccttttctgttctttgggggttgagctctgaggttttcatacggggtttcatctctagcctaccccaacgtgcttgggacaaaaaaggctttgttgttgttgttgttgttgttgttgttgtataaatagaatgtatattccgtctccaaagtccaaagcagttgttcctcgccgtctcggggtctcggcctctcctcggtctctcctcccagatcgggccatccaggtgctaccgctcttcgccccctccacttcaccgccgccgcgtagatccgtctccgcctcctggaagcgctaccagtggaccaacgccgagccggcggagttagcggcgttagggttgcggttgggaattgattgcgggggacgcagcggtggcgcctggcatggcgggggcgcccggggtcgggccgggtgcggggggtgggggcggcgccgctgcggggctcaagacttacttcaagacgcccgaggggaggtacaagctgcagtacgagaaggcgcactccgcggtgctgcactacagccacggcggcaagaccgtctcgcagttgacagtggcatacctcaaggagaagcctgctagccagggctctcagccatcaacaccaagcgccagcagtgggatgcggtctgcagcagcaaggctgctgggcactgggaatgggagcaaggcacttagctttggtggcggtaatggtgcaagccgagctgttgctggaagcagccgtgtaggaggcggccttggtacacctacaggccttggtggatcacaggggggcacaaattatgatggcaagggtacatatattgtattcaatgctgctgatacactattcatcagtgatctcaattcccaggagaaggatccactaaagtccatccatttcagcaactcaaacccactgtgccatgcattcgacccagaggccaaagagggacacgacctgatcattgggatgggatcaggggatgtctattcaatgtcgctgaggcaacagttacaagatcctggaagaaaacccgtggcagctctacattacaataagggtgataaagatgtctcacccaatggaagtcgttgcacttctgtcgcatggggtgccagagcgtgaaggcattttcgtttgttagccatttctgatggaaatttgtacgtgtatgataaaaacaaggatgggaacacagactgtacgtttccagctgtcaaggatcagtctcagtttatggttgcacatgcaaagtcgaagcaacccagtcgctaggtggcatatatgtcaaggttcgatcaatgcaatttccttttcaccagatggcgcatacttggcgactgttgggagagatggttatttgagagtattcgatttttcaaaggaacaactaatatttggtggaagaagttattatggtgcactgttgtgttgcacttggagctcagatggaaaatatctattaacaggtggtgaagatgatcttgtgcaggtcagtggagttgcttttgattcatattggtccccaccaagttctgatggaaatggagaaaatgtatatcgctttggttctgttgggcagatcagggataagaattacttcttttcagtactgatggggttattttctcatgatgttttgaaagtaatttatgtttttgacacccaactacttctgtgggacctggcactggatgagattgttgtcccactacggcatccttcaagtgcctcacctacgtttagcagcgggagcccttccacacactgggacaatgcatgccctccaacaggtgttcttcaaccttctcctagaatgcgagatgtcccaaaactatcgcccctagttgcccaccgagtacatgccgatcccctatctggtatggtgttcaccagtgaatctatcctcaccatctgccgcgagggcctcatcaaaatctgggttcgaccagagcagagcgaaaacaatcagcaatcgaattcttcagaatttgctttaggccctgcttcgaaggatagggcgatcacatcttccaataaagcaagtagctccagctttaagaagctgccgcctgttcttgtcacatgatgaatcaacgggatggttcttgtggatatttctgcttcacgtggcattagtggtggatatgaatcttactccatggttgatggggatgaaactctcatatggagtctgcagactgcaagtaatgagggtgagcatttgatggttgatgttcccaggaagcagggccagcgttgccagtttttttggcacgaaagagtaaatgggagctcttgtacagacacatacttaatgataaaattgtaaaaactcactgtccgtttcataatattcaatagccaccgaaagatgattggacgaccatgttatcgattttagctggtgggttgatagtatccttaaactttggtacttcggagacttgtaattatggaccataatatctgaggaatgcttcagtcttacctggtgtaagttgtgttactatttccttctgccttttgtcaattattagatctagtttggca

SEQ ID NO: 35217 - DNA, 2523 bp, Zea Mays
ttttatctcttttatgtgtttccccgtttcgttgttttcggttctcctttgcctttgtttcccttttctgttctttgggggttgagctctgaggttttcatacggggtttcatctctagcctaccccaacgtgcttgggacaaaaaaggctttgttgttgttgttgttgttgttgttgttgtataaatagaatgtatattccgtctccaaagtccaaagcagttgttcctcgccgtctcggggtctcggcctctcctcggtctctcctcccagatcgggccatccaggtgctaccgctcttcgccccctccacttcaccgccgccgcgtagatccgtctccgcctcctggaagcgctaccagtggaccaacgccgagccggcggagttagcggcgttagggttgcggttgggaattgattgcgggggacgcagcggtggcgcctggcatggcgggggcgcccggggtcgggccgggtgcggggggtgggggcggcgccgctgcggggctcaagacttacttcaagacgcccgaggggaggtacaagctgcagtacgagaaggcgcactccgcggtgctgcactacagccacggcggcaagaccgtctcgcagttgacagtggcatacctcaaggagaagcctgctagccagggctctcagccatcaacaccaagcgccagcagtgggatgcggtctgcagcagcaaggctgctgggcactgggaatgggagcaaggcacttagctttggtggcggtaatggtgcaagccgagctgttgctggaagcagccgtgtaggaggcggccttggtacacctacaggccttggtggatcacaggggggcacaaattatgatggcaagggtacatatattgtattcaatgctgctgatacactattcatcagtgatctcaattcccaggagaaggatccactaaagtccatccatttcagcaactcaaacccactgtgccatgcattcgacccagaggccaaagagggacacgacctgatcattgggatgggatcaggggatgtctattcaatgtcgctgaggcaacagttacaagatcctggaagaaaacccgtggcagctctacattacaataagggtgataaagatgtctcacccaatggaagacatgatcaaggtagcataggtacatgtctgaacaaggatgggaacacagactgtacgtttccagctgtcaaggatcagtctcagtttatggttgcacatgcaaagtcgagtaagagcaacccagtcgctaggtggcatatatgtcaaggttcgatcaatgcaatttccttttcaccagatggcgcatacttggcgactgttgggagagatggttatttgagagtattcgatttttcaaaggaacaactaatatttggtggaagaagttattatggtgcactgttgtgttgcacttggagctcagatggaaaatatctattaacaggtggtgaagatgatcttgtgcaggtatggggcatggatgatagaaagatagttgcttggggtgaaggacataattcatggtggagttgcttttgattcatattggtccccaccaagttctgatggaaatggagaaaatgtatatcgctttggttctgttgggcaggacacccaactacttctgtgggacctggcactggatgagattgttgtcccactacggcatccttcaagtgcctcacctacgtttagcagcgggagcccttccacacactgggacaatgcatgccctccaacaggtgttcttcaaccttctcctagaatgcgagatgtcccaaaactatcgcccctagttgcccaccgagtacatgccgatcccctatctggtatggtgttcaccagtgaatctatcctcaccatctgccgcgagggcctcatcaaaatctgggttcgaccagagcagagcgaaaacaatcagcaatcgaattcttcagaatttgctttaggccctgcttcgaaggatagggcgatcacatcttccaataaagcaagtagctccagctttaagaagctgccgcctgttcttgtcacatgatgaatcaacgggatggttcttgtggatatttctgcttcacgtggcattagtggtggatatgaatcttactccatggttgatggggatgaaactctcatatggagtctgcagactgcaagtaatgagggtgagcatttgatggttgatgttcccaggaagcagggccagcgttgccagtttttttggcacgaaagagtaaatgggagctcttgtacagacacatacttaatgataaaattgtaaaaactcactgtccgtttcataatattcaatagccaccgaaagatgattggacgaccatgttatcgattttagctggtgggttgatagtatccttaaactttggtacttcggagacttgtaattatggaccataatatctgaggaatgcttcagtcttacctggtgtaagttgtgttactatttccttctgccttttgtcaattattagatctagtttggca

SEQ ID NO: 35218 - DNA, 2027 bp, Zea Mays
  misc_feature (1)..(2): n is a, c, g, or t
nntccaaaaagctattgaggagaagaaagaatgttatagacgtttgtaccatgacaagagtatggacaacatagagaagtacaaggtagtagaagaccacaaagcgcgcggtaagtgtggcaacagtaggacatacaaggatctttagcaacatttgagtacgaagaaaagagagaaatacatagataggatgactagggtctgtgagaggaagacaaggaactttaaccaagataagtgcatttaaggatgaaatgaggcacctattggtgaagaggatgaaattagacatcgtgagatttttttgacaaattgtttaataaggagaatgagaacacaacattttagttagatgactttttgatgcgtcagatccaagaatttgaggttagagtcattgaaaaggataaaagagggtaagacgatgggcttggaagatggggataaggctgaggcgccggttttagctctggaagatggtgctgctttctgtgttggtgatgggccgctgacctcccctagaccttcttcgcctcagcgcagaagtatggctgagccgctggagaaggctgggttgagctcgccccgttttgccactcaagctccaagcatgacaacctcgaagaacgttttggaagatttatccccccgctgccatgatcatgatccagttgctcccgatgctgttttctgtgttggtgatgggctgctgacctcccctagaccttcttcgcctcagcgcaggagtatggctgggccgctagagaaggctgggttgagctcatcccgttctgccactcaagctacaagcaagatgacctcgaagaacgttttggaaggtttatccccccgctgccatgtccgagaaccagttgctccccctcccatgttggtttactacagtaaaagattgggtcaaaggcttccggacactcagttagttgatgtcgcggaagttgcagcagctctgcctgctccatctgcaccactgctgcaagtcgctactggggactcggcattgtcagtttctgctcaatctacggagttggctggtttgtgcgttgcagcagaggcgcctgatgcaactgcgtcttttatggctacttcagttcaggatgatgggacagctgcaaatgagtcacaatttctgatgcctcaaaagataagagaagatttttttcaaaaagattactcggcaagcttcagccctggtttcggctccaagctgtgctcttccaacaaaaactatctctgctccaagaagaagtcgtcgagtagcaggtgtgggggtggaatttaacatgcaagatttgggaagtagggccaccaagaaagtcatgaggtccctgcatgtcatctcagaaaatgagggaatcaaccaggaagctttgcaggagtatgtcagtctgtttatgcagcctctgtctccctgccatgtggaggctttgtcagccctgttcggatggagcaccccggatggggtctgttagttaagccttctccccttgtggatgcgttgatgatgtacgtttaatggatccatcaaaaattatctgttggaatgtgagagggcttaactcgtcctctcggcaaagtgcggtgagagaacttgtttcttcctttcgggctgaggtagtttgtatccaggaaaccaaaatggaagatatttctagattctctgttatctcttggctaggtgcagattttgctgattttgtgttccttccttctgttggagccagtgggggtattttggtggcatggaaaagctatttaggttccaccggggcttccaaaattgataatcacagtgtttctgttcaatttcgcaaagaaaatggcacctgccggtggttaacttgtgtgtgttagagtattaggcctgttaaggctaggcccatgtggcccatgtaaacactatatagctaccatgttgggttagccctaacataaagaatattcactccaatatggtatcagcccagtttccctccctacagccgccgctgccctaccctagggtttca

SEQ ID NO: 35219 - DNA, 157 bp, Zea Mays
ttcttgccttcgcaggcctgggaatacagtaaagattaacatgtgcagagataacagaggccaagttgctgagaacagatatatgtctatgtctacaagatgcatgttggtgctcgtcaaacttacctctaccaccaagtctagagtagtcgatgca

SEQ ID NO: 35220 - DNA, 983 bp, Zea Mays
cttatggagagacccccagtagggagaagcagttgatatgattgttcaacatatccgtacaaaacttcgtcagcatgacttgtgcaaaatctatccaaatgttcatgttgttcaatcaacttttcagatccgaggaatgcatactcttatccgtgatagggacatcaccacacctgagattgccttggaagagcaggatagaaacccaccttttgatatcggttcatatggggagcaaatacttgacacactttcatcaagaactaacaatacaggaactgcatctttttagtgagattgttagcggcagaccaaagtttgagattgccagaacgttctctgcccttctccagctggtgaacagcagaagtgttgatctggataaaggaaaagccacgaatgagttggtgtgttacacagcagagaatccatttcatgtaaggcttattggtcccaaccggaggccagaaatggaggcacgctttgctcggaagagagtcaagtccccactgcaaaatgcaggcaaagtccgtgagtcctccctggcacaacatgagtgtcccaacaagcctttgtgtaaaaatggcaagattacagtcacgacagcaaccaagctgacgcaagatgggaaacgaaggcgaaggtcatcggctcacctaatgcagccgatcaatctggaatccagcggatgaacgccagtgcacactgattcttctaattattgtaacttcagtggcggcttcatgggcaggatgatcctgtaagttatgacataggcgtagctagcgggtgtatatgtacagttcaactgtaatgctgacatggcaagatttattcgacggaattgcccttttatagcatttgctattgttagattcatttctaatccaataaactaacacgatgccaagtctgttgtaaactggtgcctagctgtatcgatgccttccgcaatttgagatttatatattacgcaaaaaaaa

SEQ ID NO: 35221 - DNA, 1071 bp, Zea Mays
gcttgctttgcagggagcggggtcatagtctgaagaactgtcctgacaaaagcgagggaaatttgaagaaattttgctagaactgtggtgaatctggacactgtctttccaagtgccccaagcccattgagaatgggttacaaattttgcaacctgctttatctgcaatcagcaaggacatttgagcaagaactgtcctgaaaacaaacatggcatctatccaaagctgatcactcttaaaaaactaacgggtcctggtgtgagtggcagaactattggataggatcgccctgagggcactcaacatcaccactgttgtacaaaagtaggccaattgacatatacactttgttcatttatgttggtcgattctacccagtttaaagagagactaaaatgtgggcgttgttgcttgtgtccatccatgccgcaagctgtaatattttcttctaataagcttttatacattacctctcttgttgactggttgaccatttgtgcagaggcaaccctttccagtagggtcacgcccgtctggtaagagggtcgttgttaagttgcctgattaatcccttgtctttcactgtgtctgcatgttgcagtagatgccagcagatcatgaagcgcccaaatggtgctgagctacagtactatcagaagctgaatagattgctgctggaattagagcaaaggagtggaggagtttctgaagagagttatgtaacctctgatctcctgtattcttttggctctcccatcatctggcctctcctttactgttcaggtctcttgtctcgtctatataaactctattacgtcatctgctgtcggcttgcttcttggccactgtttagatgtagccaagcactatgttctagcttctgcacgcaaagttctgggagagcagacctgcaaaataaccgtcgtcatgtcagtgacatggccgctcaacttcttcctcttactgcattgtatctgaactgcatcgacctaccaactacatcactgcacccaacctggtgctgtcaacagtgaggaaaacgactccaccatgggcttcgccaccgtcgg

SEQ ID NO: 35222 - DNA, 788 bp, Zea Mays
gcttgctttgcagggagcggggtcatagtctgaagaactgtcctgacaaaagcgagggaaatttgaagaaattttgctagaactgtggtgaatctggacactgtctttccaagtgccccaagcccattgagaatgggttacaaattttgcaacctgctttatctgcaatcagcaaggacatttgagcaagaactgtcctgaaaacaaacatggcatctatccaaagaggcaaccctttccagtagggtcacgcccgtctggtaagagggtcgttgttaagttgcctgattaatcccttgtctttcactgtgtctgcatgttgcagtagatgccagcagatcatgaagcgcccaaatgagctacagtactatcagaagctgaatagattgctgctggaattagagcaaaggagtggaggagtttctgaagagagttatgtaacctctgatctcctgtattcttttggctctcccatcatctggcctctcctttactgttcaggtctcttgtctcgtctatataaactctattacgtcatctgctgtcggcttgcttcttggccactgtttagatgtagccaagcactatgttctagcttctgcacgcaaagttctgggagagcagacctgcaaaataaccgtcgtcatgtcagtgacatggccgctcaacttcttcctcttactgcattgtatctgaactgcatcgacctaccaactacatcactgcacccaacctggtgctgtcaacagtgaggaaaacgactccaccatgggcttcgccaccgtcgg

SEQ ID NO: 35223 - DNA, 813 bp, Zea Mays
acatatttgctagatatttgcttgctttgcagggagcggggtcatagtctgaagaactgtcctgacaaaagcgagggaaatttgaagaaattttgctagaactgtggtgaatctggacactgtctttccaagtgccccaagcccattgagaatgggttacaaattttgcaacctgctttatctgcaatcagcaaggacatttgagcaagaactgtcctgaaaacaaacatggcatctatccaaagaggcaaccctttccagtagggtcacgcccgtctggtaagagggtcgttgttaagttgcctgattaatcccttgtctttcactgtgtctgcatgttgcagtagatgccagcagatcatgaagcgcccaaatggtgctgagctacagtactatcagaagctgaatagattgctgctggaattagagcaaaggagtggaggagtttctgaagagagttatgtaacctctgatctcctgtattcttttggctctcccatcatctggcctctcctttactgttcaggtctcttgtctcgtctatataaactctattacgtcatctgctgtcggcttgcttcttggccactgtttagatgtagccaagcactatgttctagcttctgcacgcaaagttctgggagagcagacctgcaaaataaccgtcgtcatgtcagtgacatggccgctcaacttcttcctcttactgcattgtatctgaactgcatcgacctaccaactacatcactgcacccaacctggtgctgtcaacagtgaggaaaacgactccaccatgggcttcgccaccgtcgg

SEQ ID NO: 35224 - DNA, 2636 bp, Zea Mays
cttccaaggcgtgggcaaagggattggtgattcaatcaatgaagaagcgtacggtcaccaaagaggacattgccacttgcctgaagacatttgatgttgccgtatttgatatatctggccacattaatttggcgtttcgtatgacaaggtctgcttttttagagagatggtggacttgaagagctttttatgaccaaagtcgacttttgtgcaaagtttgacacatgtttgaggataaacttgaaagggaactctaaggttactggattaagctattgtgtggatgacgagtcttggagaattcttgagaaagatgttcagtctttgctgcaacaaggacttacagatagaacaaagatgatccgagccctatggagaagcacaccttctgaatggaaaatagtggaaggtttctcagaatttggcagcagtccgcttctggttggtatgatggttagctcattggaaaagagttttcgccttgttgatattggtccaaaccctgagaaccgtgttgaggctgttaaatttaggaaattttggggagagaaagctgagcttagaagattcaaggatggaaatattgccgaaagcacagtttgggaatgccaatcctgggagaagcatacaattattaaaaggattgctgattatgtgcttatgaaacatttgtcgctgcagaaggatgatttgattcatgttgttgatcagctggacttttgcctcttagttgatggccaagatccggtctcgtcttctggagctttgcttgaagcttttgatactattgctaagcagttacgtctcttagatgatattcctcttaaaatatctaccgtgcaacccctagactcagcttttaggcacacttctgtgtttcctcctgaacctcatccactggcatacggaaggaattctcagaggctaccgaaattcgcaacaacttgcataagatctttagaagttatgattcagctagagggatctggtaactggcctttggatcccgtggccatggagaagacaaagactgcatttcttttaaaaattggtgaaagcttggaggatcgaggaatgtttgtttcagccagtgaaaatgaggtgaatgtccttacatctggatattcattcttactcaaaatatttcatgaaagaggtttagtgatgcaaaagccagttggagatgacaagacacaaagtgttctatcagaagataagatgctttttcagcggagccagcactctagtatgatcaatggtttgcatggtcgttaccaggtgtatggaccagtagttaggctagcaaaaagatggatttctgcacatctattttcttcatttatctcagaggaggcagttgagctggtagttgcacatatatttttgaagccattcccattccatgccccatcttctcgggttgctgggtttctcaggtttttgcggttgttatccagttttgactggatcttttcacccatggttattgacataaataatgacttcaacctgatggatgagaaggagatcaatgataactttatgctgagcagaaaatcttatgagcgaaacccccatgatatagagcctgcaatgtttcttgctacgtcatatgataaaacatctgaagcatggacaaaacagtcaccaagcaagtcggttctcaaacgggtagctgcttatgctaaaagcagtgcggagcttttaacaaatcttatgcttcatggtccatcaggggaatatacatgggagtgcctgtttcgaacacctatgagcaactatgatgctgttattctcctccatcaagagaagctttgttgcccccaccacgtactttttcctgctgagaaccctgacggtaagctggtggtctggggcaaaccaagtaaagatttctgcccctatatgccactgaacaaaggggcagtgaaaggtttgcatgatgcaagagagaaactcttggtaaactttgacccgactacatacttcttgcgagacttgaagtgcgcattctccaagaccttcaagctgtggtatggttcagttggaggagacgctgtgggtcttacatgggagaacccaaagaagcgtggcagagaggaggctgatgaggctgctcccgagccgacatctatccttaaggaggttggagatgttggtaaaggtttagtgaggggtgtgtaccttgtcaaggcaccaaagtttcagtaaactgacagggcgtgtgcaactgaagatctgaccaacaaaccgatgcacaagaaggaagacttccaagtgttggtagtcttccttccatccagggcagtgtttggaggctagcaatgggggatggggagcacacgcggtagtcatggtcatggagttgtaaacgagtcaagatgtgctgtgtttagaccactattactagtacacagctgccaaaagagaaatgaaggttgtagaacctcttattgaaattttgactgtgtagtatatatgagatgtgattctgcaaacatttgctgcgatgaaaatgccaatcaaggtttgacgtgcaagtttgcgtgtctacttggtttcagatggaacaagaatgagcagcaggtactgtgtattcgcctgactgcgtcctttgttccatcatctgcaacttc

SEQ ID NO: 35225 - DNA, 2668 bp, Zea Mays
cttccaaggcgtgggcaaagggattggtgattcaatcaatgaagaagcgtacggtcaccaaagaggacattgccacttgcctgaagacatttgatgttgccgtatttgatatatctggccacattaatttggcgtttcgtatgacaaggtctgcttttttagagcttcaagatgaggcagtttgcgcacttagttgccttgataaatgcagagatggtggacttgaagagctttttatgaccaaagtcgacttttgtgcaaagtttgacacatgtttgaggataaacttgaaagggaactctaaggttactggattaagctattgtgtggatgacgagtcttggagaattcttgagaaagatgttcagtctttgctgcaacaaggacttacagatagaacaaagatgatccgagccctatggagaagcacaccttctgaatggaaaatagtggaaggtttctcagaatttggcagcagtccgcttctggttggtatgatggttagctcattggaaaagagttttcgccttgttgatattggtccaaaccctgagaaccgtgttgaggctgttaaatttaggaaattttggggagagaaagctgagcttagaagattcaaggatggaaatattgccgaaagcacagtttgggaatgccaatcctgggagaagcatacaattattaaaaggattgctgattatgtgcttatgaaacatttgtcgctgcagaaggatgatttgattcatgttgttgatcagctggacttttgcctcttagttgatggccaagatccggtctcgtcttctggagctttgcttgaagcttttgatactattgctaagcagttacgtctcttagatgatattcctcttaaaatatctaccgtgcaacccctagactcagcttttaggcacacttctgtgtttcctcctgaacctcatccactggcatacggaaggaattctcagaggctaccgaaattcgcaacaacttgcataagatctttagaagttatgattcagctagagggatctggtaactggcctttggatcccgtggccatggagaagacaaagactgcatttcttttaaaaattggtgaaagcttggaggatcgaggaatgtttgtttcagccagtgaaaatgaggtgaatgtccttacatctggatattcattcttactcaaaatatttcatgaaagaggtttagtgatgcaaaagccagttggagatgacaagacacaaagtgttctatcagaagataagatgctttttcagcggagccagcactctagtatgatcaatggtttgcatggtcgttaccaggtgtatggaccagtagttaggctagcaaaaagatggatttctgcacatctattttcttcatttatctcagaggaggcagttgagctggtagttgcacatatatttttgaagccattcccattccatgccccatcttctcgggttgctgggtttctcaggtttttgcggttgttatccagttttgactggatcttttcacccatggttattgacataaataatgacttcaacctgatggatgagaaggagatcaatgataactttatgctgagcagaaaatcttatgagcgaaacccccatgatatagagcctgcaatgtttcttgctacgtcatatgataaaacatctgaagcatggacaaaacagtcaccaagcaagtcggttctcaaacgggtagctgcttatgctaaaagcagtgcggagcttttaacaaatcttatgcttcatggtccatcaggggaatatacatgggagtgcctgtttcgaacacctatgagcaactatgatgctgttattctcctccatcaagagaagctttgttgcccccaccacgtactttttcctgctgagaaccctgacggtaagctggtggtctggggcaaaccaagtaaagatttctgcccctatatgccactgaacaaaggggcagtgaaaggtttgcatgatgcaagagagaaactcttggtaaactttgacccgactacatacttcttgcgagacttgaagaccttcaagctgtggtatggttcagttggaggagacgctgtgggtcttacatgggagaacccaaagaagcgtggcagagaggaggctgatgaggctgctcccgagccgacatctatccttaaggaggttggagatgttggtaaaggtttagtgaggggtgtgtaccttgtcaaggcaccaaagtttcagtaaactgacagggcgtgtgcaactgaagatctgaccaacaaaccgatgcacaagaaggaagacttccaagtgttggtagtcttccttccatccagggcagtgtttggaggctagcaatgggggatggggagcacacgcggtagtcatggtcatggagttgtaaacgagtcaagatgtgctgtgtttagaccactattactagtacacagctgccaaaagagaaatgaaggttgtagaacctcttattgaaattttgactgtgtagtatatatgagatgtgattctgcaaacatttgctgcgatgaaaatgccaatcaaggtttgacgtgcaagtttgcgtgtctacttggtttcagatggaacaagaatgagcagcaggtactgtgtattcgcctgactgcgtcctttgttccatcatctgcaacttc

SEQ ID NO: 35226 - DNA, 2684 bp, Zea Mays
acttccaaggcgtgggcaaagggattggtgattcaatcaatgaagaagcgtacggtcaccaaagaggacattgccacttgcctgaagacatttgatgttgccgtatttgatatatctggccacattaatttggcgtttcgtatgacaaggtctgcttttttagagcttcaagatgaggcagtttgcgcacttagttgccttgataaatgcagagatggtggacttgaagagctttttatgaccaaagtcgacttttgtgcaaagtttgacacatgtttgaggataaacttgaaagggaactctaaggttactggattaagctattgtgtggatgacgagtcttggagaattcttgagaaagatgttcagtctttgctgcaacaaggacttacagatagaacaaagatgatccgagccctatggagaagcacaccttctgaatggaaaatagtggaaggtttctcagaatttggcagcagtccgcttctggttggtatgatggttagctcattggaaaagagttttcgccttgttgatattggtccaaaccctgagaaccgtgttgaggctgttaaatttaggaaattttggggagagaaagctgagcttagaagattcaaggatggaaatattgccgaaagcacagtttgggaatgccaatcctgggagaagcatacaattattaaaaggattgctgattatgtgcttatgaaacatttgtcgctgcagaaggatgatttgattcatgttgttgatcagctggacttttgcctcttagttgatggccaagatccggtctcgtcttctggagctttgcttgaagcttttgatactattgctaagcagttacgtctcttagatgatattcctcttaaaatatctaccgtgcaacccctagactcagcttttaggcacacttctgtgtttcctcctgaacctcatccactggcatacggaaggaattctcagaggctaccgaaattcgcaacaacttgcataagatctttagaagttatgattcagctagagggatctggtaactggcctttggatcccgtggccatggagaagacaaagactgcatttcttttaaaaattggtgaaagcttggaggatcgaggaatgtttgtttcagccagtgaaaatgaggtgaatgtccttacatctggatattcattcttactcaaaatatttcatgaaagaggtttagtgatgcaaaagccagttggagatgacaagacacaaagtgttctatcagaagataagatgctttttcagcggagccagcactctagtatgatcaatggtttgcatggtcgttaccaggtgtatggaccagtagttaggctagcaaaaagatggatttctgcacatctattttcttcatttatctcagaggaggcagttgagctggtagttgcacatatatttttgaagccattcccattccatgccccatcttctcgggttgctgggtttctcaggtttttgcggttgttatccagttttgactggatcttttcacccatggttattgacataaataatgacttcaacctgatggatgagaaggagatcaatgataactttatgctgagcagaaaatcttatgagcgaaacccccatgatatagagcctgcaatgtttcttgctacgtcatatgataaaacatctgaagcatggacaaaacagtcaccaagcaagtcggttctcaaacgggtagctgcttatgctaaaagcagtgcggagcttttaacaaatcttatgcttcatggtccatcaggggaatatacatgggagtgcctgtttcgaacacctatgagcaactatgatgctgttattctcctccatcaagagaagctttgttgcccccaccacgtactttttcctgctgagaaccctgacggtaagctggtggtctggggcaaaccaagtaaagatttctgcccctatatgccactgaacaaaggggcagtgaaaggtttgcatgatgcaagagagaaactcttggtaaactttgacccgactacatacttcttgcgagacttgaagtgcgcattctccaagaccttcaagctgtggtatggttcagttggaggagacgctgtgggtcttacatgggagaacccaaagaagcgtggcagagaggaggctgatgaggctgctcccgagccgacatctatccttaaggaggttggagatgttggtaaaggtttagtgaggggtgtgtaccttgtcaaggcaccaaagtttcagtaaactgacagggcgtgtgcaactgaagatctgaccaacaaaccgatgcacaagaaggaagacttccaagtgttggtagtcttccttccatccagggcagtgtttggaggctagcaatgggggatggggagcacacgcggtagtcatggtcatggagttgtaaacgagtcaagatgtgctgtgtttagaccactattactagtacacagctgccaaaagagaaatgaaggttgtagaacctcttattgaaattttgactgtgtagtatatatgagatgtgattctgcaaacatttgctgcgatgaaaatgccaatcaaggtttgacgtgcaagtttgcgtgtctacttggtttcagatggaacaagaatgagcagcaggtactgtgtattcgcctgactgcgtcctttgttccatcatctgcaacttc

SEQ ID NO: 35227 - DNA, 2674 bp, Zea Mays
acttccaaggcgtgggcaaagggattggtgattcaatcaatgaagaagcgtacggtcaccaaagaggacattgccacttgcctgaagacatttgatgttgccgtatttgatatatctggccacattaatttggcgtttcgtatgacaaggtctgcttttttagagcttcaagatgaggcagtttgcgcacttagttgccttgataaatgcagagatggtggacttgaagagctttttatgaccaaagtcgacttttgtgcaaagtttgacacatgtttgaggataaacttgaaagggaactctaaggttactggattaagctattgtgtggatgacgagtcttggagaattcttgagaaagatgttcagtctttgctgcaacaaggacttacagatagaacaaagatgatccgagccctatggagaagcacaccttctgaatggaaaatagtggaaaatttggcagcagtccgcttctggttggtatgatggttagctcattggaaaagagttttcgccttgttgatattggtccaaaccctgagaaccgtgttgaggctgttaaatttaggaaattttggggagagaaagctgagcttagaagattcaaggatggaaatattgccgaaagcacagtttgggaatgccaatcctgggagaagcatacaattattaaaaggattgctgattatgtgcttatgaaacatttgtcgctgcagaaggatgatttgattcatgttgttgatcagctggacttttgcctcttagttgatggccaagatccggtctcgtcttctggagctttgcttgaagcttttgatactattgctaagcagttacgtctcttagatgatattcctcttaaaatatctaccgtgcaacccctagactcagcttttaggcacacttctgtgtttcctcctgaacctcatccactggcatacggaaggaattctcagaggctaccgaaattcgcaacaacttgcataagatctttagaagttatgattcagctagagggatctggtaactggcctttggatcccgtggccatggagaagacaaagactgcatttcttttaaaaattggtgaaagcttggaggatcgaggaatgtttgtttcagccagtgaaaatgaggtgaatgtccttacatctggatattcattcttactcaaaatatttcatgaaagaggtttagtgatgcaaaagccagttggagatgacaagacacaaagtgttctatcagaagataagatgctttttcagcggagccagcactctagtatgatcaatggtttgcatggtcgttaccaggtgtatggaccagtagttaggctagcaaaaagatggatttctgcacatctattttcttcatttatctcagaggaggcagttgagctggtagttgcacatatatttttgaagccattcccattccatgccccatcttctcgggttgctgggtttctcaggtttttgcggttgttatccagttttgactggatcttttcacccatggttattgacataaataatgacttcaacctgatggatgagaaggagatcaatgataactttatgctgagcagaaaatcttatgagcgaaacccccatgatatagagcctgcaatgtttcttgctacgtcatatgataaaacatctgaagcatggacaaaacagtcaccaagcaagtcggttctcaaacgggtagctgcttatgctaaaagcagtgcggagcttttaacaaatcttatgcttcatggtccatcaggggaatatacatgggagtgcctgtttcgaacacctatgagcaactatgatgctgttattctcctccatcaagagaagctttgttgcccccaccacgtactttttcctgctgagaaccctgacggtaagctggtggtctggggcaaaccaagtaaagatttctgcccctatatgccactgaacaaaggggcagtgaaaggtttgcatgatgcaagagagaaactcttggtaaactttgacccgactacatacttcttgcgagacttgaagtgcgcattctccaagaccttcaagctgtggtatggttcagttggaggagacgctgtgggtcttacatgggagaacccaaagaagcgtggcagagaggaggctgatgaggctgctcccgagccgacatctatccttaaggaggttggagatgttggtaaaggtttagtgaggggtgtgtaccttgtcaaggcaccaaagtttcagtaaactgacagggcgtgtgcaactgaagatctgaccaacaaaccgatgcacaagaaggaagacttccaagtgttggtagtcttccttccatccagggcagtgtttggaggctagcaatgggggatggggagcacacgcggtagtcatggtcatggagttgtaaacgagtcaagatgtgctgtgtttagaccactattactagtacacagctgccaaaagagaaatgaaggttgtagaacctcttattgaaattttgactgtgtagtatatatgagatgtgattctgcaaacatttgctgcgatgaaaatgccaatcaaggtttgacgtgcaagtttgcgtgtctacttggtttcagatggaacaagaatgagcagcaggtactgtgtattcgcctgactgcgtcctttgttccatcatctgcaacttc

SEQ ID NO: 35228 - DNA, 3585 bp, Zea Mays
ccgaagccaaccatggccgccaccgtcgcctccgagcactccatcgatcgcaagctctccgcgctcgtggagcaagctcggccgagcgcggcggccatgctcgccgccgccgaggccgttgacgccgtcgcggagctcatcaagagggtgccacagcagcaagcgacgccggaggccgcgcggggttttttgagggacctgggactggaaaccgagaagctttccttcaccttccgtccgccggaggtggtgcgtctcgccgggagccacgcggccggcgcggtcgcgaggcccgaagtcgctgccgacctcctcgtacgcttgccaaaggaatgcttccacgagaaggatttcctaaatcaccggtaccatgcaaagaggtgtctttacctctgtgtcgtcgagaaaaacttgaggtgctctaaattaatccgcaaagtttcatggtctaccctccaagatgaggctcgaaagcccgtgcttcatgtatatccagcgaccgaaattgtagaccttcctggattccatgtaagaataatcccaactgcggattctttgttcaacgtttcaaagttgaatgtatcaacaagaaataatgtccgtgcatatacaaaagatggtgtaaacctacccacaccaaagtataattgtagcatattggaggatatgtttttggaggaaaatgcaaactttattagtagcacctttgctaactggaaagctttgcaagaggccttggtgttggtaaaggtttgggcacgtcaaagaacttcaatatacacacatgattgtctcaatggatacttaatttctgccatccttgtgtttcttactgtggactctggaggaagcatgattactagatcaatgaccacaagacaaattttccgtgtattgatgaattttttgggcgtgggcaaagggattggtgattcaatcaatgaagaagcgtacggtcaccaaagaggacattgccacttgcctgaagacatttgatgttgccgtatttgatatatctggccacattaatttggcgtttcgtatgacaaggtctgcttttttagagcttcaagatgaggcagtttgcgcacttagttgccttgataaatgcagagatggtggacttgaagagctttttatgaccaaagtcgacttttgtgcaaagtttgacacatgtttgaggataaacttgaaagggaactctaaggttactggattaagctattgtgtggatgacgagtcttggagaattcttgagaaagatgttcagtctttgctgcaacaaggacttacagatagaacaaagatgatccgagccctatggagaagcacaccttctgaatggaaaatagtggaaggtttctcagaatttggcagcagtccgcttctggttggtatgatggttagctcattggaaaagagttttcgccttgttgatattggtccaaaccctgagaaccgtgttgaggctgttaaatttaggaaattttggggagagaaagctgagcttagaagattcaaggatggaaatattgccgaaagcacagtttgggaatgccaatcctgggagaagcatacaattattaaaaggattgctgattatgtgcttatgaaacatttgtcgctgcagaaggatgatttgattcatgttgttgatcagctggacttttgcctcttagttgatggccaagatccggtctcgtcttctggagctttgcttgaagcttttgatactattgctaagcagttacgtctcttagatgatattcctcttaaaatatctaccgtgcaacccctagactcagcttttaggcacacttctgtgtttcctcctgaacctcatccactggcatacggaaggaattctcagaggctaccgaaattcgcaacaacttgcataagatctttagaagttatgattcagctagagggatctggtaactggcctttggatcccgtggccatggagaagacaaagactgcatttcttttaaaaattggtgaaagcttggaggatcgaggaatgtttgtttcagccagtgaaaatgaggtgaatgtccttacatctggatattcattcttactcaaaatatttcatgaaagaggtttagtgatgcaaaagccagttggagatgacaagacacaaagtgttctatcagaagataagatgctttttcagcggagccagcactctagtatgatcaatggtttgcatggtcgttaccaggtgtatggaccagtagttaggctagcaaaaagatggatttctgcacatctattttcttcatttatctcagaggaggcagttgagctggtagttgcacatatatttttgaagccattcccattccatgccccatcttctcgggttgctgggtttctcaggtttttgcggttgttatccagttttgactggatcttttcacccatggttattgacataaataatgacttcaacctgatggatgagaaggagatcaatgataactttatgctgagcagaaaatcttatgagcgaaacccccatgatatagagcctgcaatgtttcttgctacgtcatatgataaaacatctgaagcatggacaaaacagtcaccaagcaagtcggttctcaaacgggtagctgcttatgctaaaagcagtgcggagcttttaacaaatcttatgcttcatggtccatcaggggaatatacatgggagtgcctgtttcgaacacctatgagcaactatgatgctgttattctcctccatcaagagaagctttgttgcccccaccacgtactttttcctgctgagaaccctgacggtaagctggtggtctggggcaaaccaagtaaagatttctgcccctatatgccactgaacaaaggggcagtgaaaggtttgcatgatgcaagagagaaactcttggtaaactttgacccgactacatacttcttgcgagacttgaagtgcgcattctccaagaccttcaagctgtggtatggttcagttggaggagacgctgtgggtcttacatgggagaacccaaagaagcgtggcagagaggaggctgatgaggctgctcccgagccgacatctatccttaaggaggttggagatgttggtaaaggtttagtgaggggtgtgtaccttgtcaaggcaccaaagtttcagtaaactgacagggcgtgtgcaactgaagatctgaccaacaaaccgatgcacaagaaggaagacttccaagtgttggtagtcttccttccatccagggcagtgtttggaggctagcaatgggggatggggagcacacgcggtagtcatggtcatggagttgtaaacgagtcaagatgtgctgtgtttagaccactattactagtacacagctgccaaaagagaaatgaaggttgtagaacctcttattgaaattttgactgtgtagtatatatgagatgtgattctgcaaacatttgctgcgatgaaaatgccaatcaaggtttgacgtgcaagtttgcgtgtctacttggtttcagatggaacaagaatgagcagcaggtactgtgtattcgcctgactgcgtcctttgttccatcatctgcaacttc

SEQ ID NO: 35229 - DNA, 3560 bp, Zea Mays
ctttcctcccgccggcgatcaccgaagccaaccatggccgccaccgtcgcctccgagcactccatcgatcgcaagctctccgcgctcgtggagcaagctcggccgagcgcggcggccatgctcgccgccgccgaggccgttgacgccgtcgcggagctcatcaagagggtgccacagcagcaagcgacgccggaggccgcgcggggttttttgagggacctgggactggaaaccgagaagctttccttcaccttccgtccgccggaggtggtgcgtctcgccgggagccacgcggccggcgcggtcgcgaggcccgaagtcgctgccgacctcctcgtacgcttgccaaaggaatgcttccacgagaaggatttcctaaatcaccggtaccatgcaaagaggtgtctttacctctgtgtcgtcgagaaaaacttgaggtgctctaaattaatccgcaaagtttcatggtctaccctccaagatgaggctcgaaagcccgtgcttcatgtatatccagcgaccgaaattgtagaccttcctggattccatgtaagaataatcccaactgcggattctttgttcaacgtttcaaagttgaatgtatcaacaagaaataatgtccgtgcatatacaaaagatggtgtaaacctacccacaccaaagtataattgtagcatattggaggatatgtttttggaggaaaatgcaaactttattagtagcacctttgctaactggaaagctttgcaagaggccttggtgttggtaaaggtttgggcacgtcaaagaacttcaatatacacacatgattgtctcaatggatacttaatttctgccatccttgtgtttcttactgtggactctggaggaagcatgattactagatcaatgaccacaagacaaattttccgtgtattgatgaattttttggcaacttccaaggcgtgggcaaagggattggtgattcaatcaatgaagaagcgtacggtcaccaaagaggacattgccacttgcctgaagacatttgatgttgccgtatttgatatatctggccacattaatttggcgtttcgtatgacaaggtctgcttttttagagagatggtggacttgaagagctttttatgaccaaagtcgacttttgtgcaaagtttgacacatgtttgaggataaacttgaaagggaactctaaggttactggattaagctattgtgtggatgacgagtcttggagaattcttgagaaagatgttcagtctttgctgcaacaaggacttacagatagaacaaagatgatccgagccctatggagaagcacaccttctgaatggaaaatagtggaaaatttggcagcagtccgcttctggttggtatgatggttagctcattggaaaagagttttcgccttgttgatattggtccaaaccctgagaaccgtgttgaggctgttaaatttaggaaattttggggagagaaagctgagcttagaagattcaaggatggaaatattgccgaaagcacagtttgggaatgccaatcctgggagaagcatacaattattaaaaggattgctgattatgtgcttatgaaacatttgtcgctgcagaaggatgatttgattcatgttgttgatcagctggacttttgcctcttagttgatggccaagatccggtctcgtcttctggagctttgcttgaagcttttgatactattgctaagcagttacgtctcttagatgatattcctcttaaaatatctaccgtgcaacccctagactcagcttttaggcacacttctgtgtttcctcctgaacctcatccactggcatacggaaggaattctcagaggctaccgaaattcgcaacaacttgcataagatctttagaagttatgattcagctagagggatctggtaactggcctttggatcccgtggccatggagaagacaaagactgcatttcttttaaaaattggtgaaagcttggaggatcgaggaatgtttgtttcagccagtgaaaatgaggtgaatgtccttacatctggatattcattcttactcaaaatatttcatgaaagaggtttagtgatgcaaaagccagttggagatgacaagacacaaagtgttctatcagaagataagatgctttttcagcggagccagcactctagtatgatcaatggtttgcatggtcgttaccaggtgtatggaccagtagttaggctagcaaaaagatggatttctgcacatctattttcttcatttatctcagaggaggcagttgagctggtagttgcacatatatttttgaagccattcccattccatgccccatcttctcgggttgctgggtttctcaggtttttgcggttgttatccagttttgactggatcttttcacccatggttattgacataaataatgacttcaacctgatggatgagaaggagatcaatgataactttatgctgagcagaaaatcttatgagcgaaacccccatgatatagagcctgcaatgtttcttgctacgtcatatgataaaacatctgaagcatggacaaaacagtcaccaagcaagtcggttctcaaacgggtagctgcttatgctaaaagcagtgcggagcttttaacaaatcttatgcttcatggtccatcaggggaatatacatgggagtgcctgtttcgaacacctatgagcaactatgatgctgttattctcctccatcaagagaagctttgttgcccccaccacgtactttttcctgctgagaaccctgacggtaagctggtggtctggggcaaaccaagtaaagatttctgcccctatatgccactgaacaaaggggcagtgaaaggtttgcatgatgcaagagagaaactcttggtaaactttgacccgactacatacttcttgcgagacttgaagtgcgcattctccaagaccttcaagctgtggtatggttcagttggaggagacgctgtgggtcttacatgggagaacccaaagaagcgtggcagagaggaggctgatgaggctgctcccgagccgacatctatccttaaggaggttggagatgttggtaaaggtttagtgaggggtgtgtaccttgtcaaggcaccaaagtttcagtaaactgacagggcgtgtgcaactgaagatctgaccaacaaaccgatgcacaagaaggaagacttccaagtgttggtagtcttccttccatccagggcagtgtttggaggctagcaatgggggatggggagcacacgcggtagtcatggtcatggagttgtaaacgagtcaagatgtgctgtgtttagaccactattactagtacacagctgccaaaagagaaatgaaggttgtagaacctcttattgaaattttgactgtgtagtatatatgagatgtgattctgcaaacatttgctgcgatgaaaatgccaatcaaggtttgacgtgcaagtttgcgtgtctacttggtttcagatggaacaagaatgagcagcaggtactgtgtattcgcctgactgcgtcctttgttccatcatctgcaacttc

SEQ ID NO: 35230 - DNA, 3569 bp, Zea Mays
cgcgaccgcactggcctttcctcccgccggcgatcaccgaagccaaccatggccgccaccgtcgcctccgagcactccatcgatcgcaagctctccgcgctcgtggagcaagctcggccgagcgcggcggccatgctcgccgccgccgaggccgttgacgccgtcgcggagctcatcaagagggtgccacagcagcaagcgacgccggaggccgcgcggggttttttgagggacctgggactggaaaccgagaagctttccttcaccttccgtccgccggaggtggtgcgtctcgccgggagccacgcggccggcgcggtcgcgaggcccgaagtcgctgccgacctcctcgtacgcttgccaaaggaatgcttccacgagaaggatttcctaaatcaccggtaccatgcaaagaggtgtctttacctctgtgtcgtcgagaaaaacttgaggtgctctaaattaatccgcaaagtttcatggtctaccctccaagatgaggctcgaaagcccgtgcttcatgtatatccagcgaccgaaattgtagaccttcctggattccatgtaagaataatcccaactgcggattctttgttcaacgtttcaaagttgaatgtatcaacaagaaataatgtccgtgcatatacaaaagatggtgtaaacctacccacaccaaagtataattgtagcatattggaggatatgtttttggaggaaaatgcaaactttattagtagcacctttgctaactggaaagctttgcaagaggccttggtgttggtaaaggtttgggcacgtcaaagaacttcaatatacacacatgattgtctcaatggatacttaatttctgccatccttgtgtttcttactgtggactctggaggaagcatgattactagatcaatgaccacaagacaaattttccgtgtattgatgaattttttggcaacttccaaggcgtgggcaaagggattggtgattcaatcaatgaagaagcgtacggtcaccaaagaggacattgccacttgcctgaagacatttgatgttgccgtatttgatatatctggccacattaatttggcgtttcgtatgacaagagatggtggacttgaagagctttttatgaccaaagtcgacttttgtgcaaagtttgacacatgtttgaggataaacttgaaagggaactctaaggttactggattaagctattgtgtggatgacgagtcttggagaattcttgagaaagatgttcagtctttgctgcaacaaggacttacagatagaacaaagatgatccgagccctatggagaagcacaccttctgaatggaaaatagtggaaggtttctcagaatttggcagcagtccgcttctggttggtatgatggttagctcattggaaaagagttttcgccttgttgatattggtccaaaccctgagaaccgtgttgaggctgttaaatttaggaaattttggggagagaaagctgagcttagaagattcaaggatggaaatattgccgaaagcacagtttgggaatgccaatcctgggagaagcatacaattattaaaaggattgctgattatgtgcttatgaaacatttgtcgctgcagaaggatgatttgattcatgttgttgatcagctggacttttgcctcttagttgatggccaagatccggtctcgtcttctggagctttgcttgaagcttttgatactattgctaagcagttacgtctcttagatgatattcctcttaaaatatctaccgtgcaacccctagactcagcttttaggcacacttctgtgtttcctcctgaacctcatccactggcatacggaaggaattctcagaggctaccgaaattcgcaacaacttgcataagatctttagaagttatgattcagctagagggatctggtaactggcctttggatcccgtggccatggagaagacaaagactgcatttcttttaaaaattggtgaaagcttggaggatcgaggaatgtttgtttcagccagtgaaaatgaggtgaatgtccttacatctggatattcattcttactcaaaatatttcatgaaagaggtttagtgatgcaaaagccagttggagatgacaagacacaaagtgttctatcagaagataagatgctttttcagcggagccagcactctagtatgatcaatggtttgcatggtcgttaccaggtgtatggaccagtagttaggctagcaaaaagatggatttctgcacatctattttcttcatttatctcagaggaggcagttgagctggtagttgcacatatatttttgaagccattcccattccatgccccatcttctcgggttgctgggtttctcaggtttttgcggttgttatccagttttgactggatcttttcacccatggttattgacataaataatgacttcaacctgatggatgagaaggagatcaatgataactttatgctgagcagaaaatcttatgagcgaaacccccatgatatagagcctgcaatgtttcttgctacgtcatatgataaaacatctgaagcatggacaaaacagtcaccaagcaagtcggttctcaaacgggtagctgcttatgctaaaagcagtgcggagcttttaacaaatcttatgcttcatggtccatcaggggaatatacatgggagtgcctgtttcgaacacctatgagcaactatgatgctgttattctcctccatcaagagaagctttgttgcccccaccacgtactttttcctgctgagaaccctgacggtaagctggtggtctggggcaaaccaagtaaagatttctgcccctatatgccactgaacaaaggggcagtgaaaggtttgcatgatgcaagagagaaactcttggtaaactttgacccgactacatacttcttgcgagacttgaagtgcgcattctccaagaccttcaagctgtggtatggttcagttggaggagacgctgtgggtcttacatgggagaacccaaagaagcgtggcagagaggaggctgatgaggctgctcccgagccgacatctatccttaaggaggttggagatgttggtaaaggtttagtgaggggtgtgtaccttgtcaaggcaccaaagtttcagtaaactgacagggcgtgtgcaactgaagatctgaccaacaaaccgatgcacaagaaggaagacttccaagtgttggtagtcttccttccatccagggcagtgtttggaggctagcaatgggggatggggagcacacgcggtagtcatggtcatggagttgtaaacgagtcaagatgtgctgtgtttagaccactattactagtacacagctgccaaaagagaaatgaaggttgtagaacctcttattgaaattttgactgtgtagtatatatgagatgtgattctgcaaacatttgctgcgatgaaaatgccaatcaaggtttgacgtgcaagtttgcgtgtctacttggtttcagatggaacaagaatgagcagcaggtactgtgtattcgcctgactgcgtcctttgttccatcatctgcaacttc

SEQ ID NO: 35231 - DNA, 3695 bp, Zea Mays
ctaaaccctaaacccgcgaccgcactggcctttcctcccgccggcgatcaccgaagccaaccatggccgccaccgtcgcctccgagcactccatcgatcgcaagctctccgcgctcgtggagcaagctcggccgagcgcggcggccatgctcgccgccgccgaggccgttgacgccgtcgcggagctcatcaagagggtgccacagcagcaagcgacgccggaggccgcgcggggttttttgagggacctgggactggaaaccgagaagctttccttcaccttccgtccgccggaggtggtgcgtctcgccgggagccacgcggccggcgcggtcgcgaggcccgaagtcgctgccgacctcctcgtacgcttgccaaaggaatgcttccacgagaaggatttcctaaatcaccggtaccatgcaaagaggtgtctttacctctgtgtcgtcgagaaaaacttgaggtgctctaaattaatccgcaaagtttcatggtctaccctccaagatgaggctcgaaagcccgtgcttcatgtatatccagcgaccgaaattgtagaccttcctggattccatgtaagaataatcccaactgcggattctttgttcaacgtttcaaagttgaatgtatcaacaagaaataatgtccgtgcatatacaaaagatggtgtaaacctacccacaccaaagtataattgtagcatattggaggatatgtttttggaggaaaatgcaaactttattagtagcacctttgctaactggaaagctttgcaagaggccttggtgttggtaaaggtttgggcacgtcaaagaacttcaatatacacacatgattgtctcaatggatacttaatttctgccatccttgtgtttcttactgtggactctggaggaagcatgattactagatcaatgaccacaagacaaattttccgtgtattgatgaattttttggggatatttgaccatgtttactcagttgaagcatatctgaattcctgtagcaacttccaaggcgtgggcaaagggattggtgattcaatcaatgaagaagcgtacggtcaccaaagaggacattgccacttgcctgaagacatttgatgttgccgtatttgatatatctggccacattaatttggcgtttcgtatgacaaggtctgcttttttagagcttcaagatgaggcagtttgcgcacttagttgccttgataaatgcagagatggtggacttgaagagctttttatgaccaaagtcgacttttgtgcaaagtttgacacatgtttgaggataaacttgaaagggaactctaaggttactggattaagctattgtgtggatgacgagtcttggagaattcttgagaaagatgttcagtctttgctgcaacaaggacttacagatagaacaaagatgatccgagccctatggagaagcacaccttctgaatggaaaatagtggaaggtttctcagaatttggcagcagtccgcttctggttggtatgatggttagctcattggaaaagagttttcgccttgttgatattggtccaaaccctgagaaccgtgttgaggctgttaaatttaggaaattttggggagagaaagctgagcttagaagattcaaggatggaaatattgccgaaagcacagtttgggaatgccaatcctgggagaagcatacaattattaaaaggattgctgattatgtgcttatgaaacatttgtcgctgcagaaggatgatttgattcatgttgttgatcagctggacttttgcctcttagttgatggccaagatccggtctcgtcttctggagctttgcttgaagcttttgatactattgctaagcagttacgtctcttagatgatattcctcttaaaatatctaccgtgcaacccctagactcagcttttaggcacacttctgtgtttcctcctgaacctcatccactggcatacggaaggaattctcagaggctaccgaaattcgcaacaacttgcataagatctttagaagttatgattcagctagagggatctggtaactggcctttggatcccgtggccatggagaagacaaagactgcatttcttttaaaaattggtgaaagcttggaggatcgaggaatgtttgtttcagccagtgaaaatgaggtgaatgtccttacatctggatattcattcttactcaaaatatttcatgaaagaggtttagtgatgcaaaagccagttggagatgacaagacacaaagtgttctatcagaagataagatgctttttcagcggagccagcactctagtatgatcaatggtttgcatggtcgttaccaggtgtatggaccagtagttaggctagcaaaaagatggatttctgcacatctattttcttcatttatctcagaggaggcagttgagctggtagttgcacatatatttttgaagccattcccattccatgccccatcttctcgggttgctgggtttctcaggtttttgcggttgttatccagttttgactggatcttttcacccatggttattgacataaataatgacttcaacctgatggatgagaaggagatcaatgataactttatgctgagcagaaaatcttatgagcgaaacccccatgatatagagcctgcaatgtttcttgctacgtcatatgataaaacatctgaagcatggacaaaacagtcaccaagcaagtcggttctcaaacgggtagctgcttatgctaaaagcagtgcggagcttttaacaaatcttatgcttcatggtccatcaggggaatatacatgggagtgcctgtttcgaacacctatgagcaactatgatgctgttattctcctccatcaagagaagctttgttgcccccaccacgtactttttcctgctgagaaccctgacggtaagctggtggtctggggcaaaccaagtaaagatttctgcccctatatgccactgaacaaaggggcagtgaaaggtttgcatgatgcaagagagaaactcttggtaaactttgacccgactacatacttcttgcgagacttgaagtgcgcattctccaagaccttcaagctgtggtatggttcagttggaggagacgctgtgggtcttacatgggagaacccaaagaagcgtggcagagaggaggctgatgaggctgctcccgagccgacatctatccttaaggaggttggagatgttggtaaaggtttagtgaggggtgtgtaccttgtcaaggcaccaaagtttcagtaaactgacagggcgtgtgcaactgaagatctgaccaacaaaccgatgcacaagaaggaagacttccaagtgttggtagtcttccttccatccagggcagtgtttggaggctagcaatgggggatggggagcacacgcggtagtcatggtcatggagttgtaaacgagtcaagatgtgctgtgtttagaccactattactagtacacagctgccaaaagagaaatgaaggttgtagaacctcttattgaaattttgactgtgtagtatatatgagatgtgattctgcaaacatttgctgcgatgaaaatgccaatcaaggtttgacgtgcaagtttgcgtgtctacttggtttcagatggaacaagaatgagcagcaggtactgtgtattcgcctgactgcgtcctttgttccatcatctgcaacttc

SEQ ID NO: 35232 - DNA, 4011 bp, Zea Mays
atttctcattccaaaacaggcgtggctatggctaaaccctaaacccgcgaccgcactggcctttcctcccgccggcgatcaccgaagccaaccatggccgccaccgtcgcctccgagcactccatcgatcgcaagctctccgcgctcgtggagcaagctcggccgagcgcggcggccatgctcgccgccgccgaggccgttgacgccgtcgcggagctcatcaagagggtgccacagcagcaagcgacgccggaggccgcgcggggttttttgagggacctgggactggaaaccgagaagctttccttcaccttccgtccgccggaggtggtgcgtctcgccgggagccacgcggccggcgcggtcgcgaggcccgaagtcgctgccgacctcctcgtacgcttgccaaaggaatgcttccacgagaaggatttcctaaatcaccggtaccatgcaaagaggtgtctttacctctgtgtcgtcgagaaaaacttgaggtgctctaaattaatccgcaaagtttcatggtctaccctccaagatgaggctcgaaagcccgtgcttcatgtatatccagcgaccgaaattgtagaccttcctggattccatgtaagaataatcccaactgcggattctttgttcaacgtttcaaagttgaatgtatcaacaagaaataatgtccgtgcatatacaaaagatggtgtaaacctacccacaccaaagtataattgtagcatattggaggatatgtttttggaggaaaatgcaaactttattagtagcacctttgctaactggaaagctttgcaagaggccttggtgttggtaaaggtttgggcacgtcaaagaacttcaatatacacacatgattgtctcaatggatacttaatttctgccatccttgtgtttcttactgtggactctggaggaagcatgattactagatcaatgaccacaagacaaattttccgtgtattgatgaattttttggcaacttccaaggcgtgggcaaagggattggtgattcaatcaatgaagaagcgtacggtcaccaaagaggacattgccacttgcctgaagacatttgatgttgccgtatttgatatatctggccacattaatttggcgtttcgtatgacaaggtctgcttttttagagcttcaagatgaggcagtttgcgcacttagttgccttgataaatgcagagatggtggacttgaagagctttttatgaccaaagtcgacttttgtgcaaagtttgacacatgtttgaggataaacttgaaagggaactctaaggttactggattaagctattgtgtggatgacgagtcttggagaattcttgagaaagatgttcagtctttgctgcaacaaggacttacagatagaacaaagatgatccgagccctatggagaagcacaccttctgaatggaaaatagtggaaaatttggcagcagtccgcttctggttggtatgatggttagctcattggaaaagagttttcgccttgttgatattggtccaaaccctgagaaccgtgttgaggctgttaaatttaggaaattttggggagagaaagctgagcttagaagattcaaggatggaaatattgccgaaagcacagtttgggaatgccaatcctgggagaagcatacaattattaaaaggattgctgattatgtgcttatgaaacatttgtcgctgcagaaggatgatttgattcatgttgttgatcagctggacttttgcctcttagttgatggccaagatccggtctcgtcttctggagctttgcttgaagcttttgatactattgctaagcagttacgtctcttagatgatattcctcttaaaatatctaccgtgcaacccctagactcagcttttaggcacacttctgtgtttcctcctgaacctcatccactggcatacggaaggaattctcagaggctaccgaaattcgcaacaacttgcataagatctttagaagttatgattcaggtatgacctttctttagttgtgctttatcacaatagaataatattaatttcttattatgcttctatgggagttagtatatcacaccccttcattccatattctattcttgaactttgggtgttacagattttccctgcaataggggtgggtagcacacacattagttgttaattcttcctttacctccctactggcaagaaaatagtagaattgtatataatttcatatatggtgctgatttgctcagaaacttgcatgacataatgtatatctgatagaactgggcttcattttgggatttgctttcttcacaaatttctacccttcactattttaataatagctagagggatctggtaactggcctttggatcccgtggccatggagaagacaaagactgcatttcttttaaaaattggtgaaagcttggaggatcgaggaatgtttgtttcagccagtgaaaatgaggtgaatgtccttacatctggatattcattcttactcaaaatatttcatgaaagaggtttagtgatgcaaaagccagttggagatgacaagacacaaagtgttctatcagaagataagatgctttttcagcggagccagcactctagtatgatcaatggtttgcatggtcgttaccaggtgtatggaccagtagttaggctagcaaaaagatggatttctgcacatctattttcttcatttatctcagaggaggcagttgagctggtagttgcacatatatttttgaagccattcccattccatgccccatcttctcgggttgctgggtttctcaggtttttgcggttgttatccagttttgactggatcttttcacccatggttattgacataaataatgacttcaacctgatggatgagaaggagatcaatgataactttatgctgagcagaaaatcttatgagcgaaacccccatgatatagagcctgcaatgtttcttgctacgtcatatgataaaacatctgaagcatggacaaaacagtcaccaagcaagtcggttctcaaacgggtagctgcttatgctaaaagcagtgcggagcttttaacaaatcttatgcttcatggtccatcaggggaatatacatgggagtgcctgtttcgaacacctatgagcaactatgatgctgttattctcctccatcaagagaagctttgttgcccccaccacgtactttttcctgctgagaaccctgacggtaagctggtggtctggggcaaaccaagtaaagatttctgcccctatatgccactgaacaaaggggcagtgaaaggtttgcatgatgcaagagagaaactcttggtaaactttgacccgactacatacttcttgcgagacttgaagtgcgcattctccaagaccttcaagctgtggtatggttcagttggaggagacgctgtgggtcttacatgggagaacccaaagaagcgtggcagagaggaggctgatgaggctgctcccgagccgacatctatccttaaggaggttggagatgttggtaaaggtttagtgaggggtgtgtaccttgtcaaggcaccaaagtttcagtaaactgacagggcgtgtgcaactgaagatctgaccaacaaaccgatgcacaagaaggaagacttccaagtgttggtagtcttccttccatccagggcagtgtttggaggctagcaatgggggatggggagcacacgcggtagtcatggtcatggagttgtaaacgagtcaagatgtgctgtgtttagaccactattactagtacacagctgccaaaagagaaatgaaggttgtagaacctcttattgaaattttgactgtgtagtatatatgagatgtgattctgcaaacatttgctgcgatgaaaatgccaatcaaggtttgacgtgcaagtttgcgtgtctacttggtttcagatggaacaagaatgagcagcaggtactgtgtattcgcctgactgcgtcctttgttccatcatctgcaacttc

SEQ ID NO: 35233 - DNA, 3700 bp, Zea Mays
ttccttttggaccctatagtggtatttctcattccaaaacaggcgtggctatggctaaaccctaaacccgcgaccgcactggcctttcctcccgccggcgatcaccgaagccaaccatggccgccaccgtcgcctccgagcactccatcgatcgcaagctctccgcgctcgtggagcaagctcggccgagcgcggcggccatgctcgccgccgccgaggccgttgacgccgtcgcggagctcatcaagagggtgccacagcagcaagcgacgccggaggccgcgcggggttttttgagggacctgggactggaaaccgagaagctttccttcaccttccgtccgccggaggtggtgcgtctcgccgggagccacgcggccggcgcggtcgcgaggcccgaagtcgctgccgacctcctcgtacgcttgccaaaggaatgcttccacgagaaggatttcctaaatcaccggtaccatgcaaagaggtgtctttacctctgtgtcgtcgagaaaaacttgaggtgctctaaattaatccgcaaagtttcatggtctaccctccaagatgaggctcgaaagcccgtgcttcatgtatatccagcgaccgaaattgtagaccttcctggattccatgtaagaataatcccaactgcggattctttgttcaacgtttcaaagttgaatgtatcaacaagaaataatgtccgtgcatatacaaaagatggtgtaaacctacccacaccaaagtataattgtagcatattggaggatatgtttttggaggaaaatgcaaactttattagtagcacctttgctaactggaaagctttgcaagaggccttggtgttggtaaaggtttgggcacgtcaaagaacttcaatatacacacatgattgtctcaatggatacttaatttctgccatccttgtgtttcttactgtggactctggaggaagcatgattactagatcaatgaccacaagacaaattttccgtgtattgatgaattttttggcaacttccaaggcgtgggcaaagggattggtgattcaatcaatgaagaagcgtacggtcaccaaagaggacattgccacttgcctgaagacatttgatgttgccgtatttgatatatctggccacattaatttggcgtttcgtatgacaaggtctgcttttttagagcttcaagatgaggcagtttgcgcacttagttgccttgataaatgcagagatggtggacttgaagagctttttatgaccaaagtcgacttttgtgcaaagtttgacacatgtttgaggataaacttgaaagggaactctaaggttactggattaagctattgtgtggatgacgagtcttggagaattcttgagaaagatgttcagtctttgctgcaacaaggacttacagatagaacaaagatgatccgagccctatggagaagcacaccttctgaatggaaaatagtggaaggtttctcagaatttggcagcagtccgcttctggttggtatgatggttagctcattggaaaagagttttcgccttgttgatattggtccaaaccctgagaaccgtgttgaggctgttaaatttaggaaattttggggagagaaagctgagcttagaagattcaaggatggaaatattgccgaaagcacagtttgggaatgccaatcctgggagaagcatacaattattaaaaggattgctgattatgtgcttatgaaacatttgtcgctgcagaaggatgatttgattcatgttgttgatcagctggacttttgcctcttagttgatggccaagatccggtctcgtcttctggagctttgcttgaagcttttgatactattgctaagcagttacgtctcttagatgatattcctcttaaaatatctaccgtgcaacccctagactcagcttttaggcacacttctgtgtttcctcctgaacctcatccactggcatacggaaggaattctcagaggctaccgaaattcgcaacaacttgcataagatctttagaagttatgattcagctagagggatctggtaactggcctttggatcccgtggccatggagaagacaaagactgcatttcttttaaaaattggtgaaagcttggaggatcgaggaatgtttgtttcagccagtgaaaatgaggtgaatgtccttacatctggatattcattcttactcaaaatatttcatgaaagaggtttagtgatgcaaaagccagttggagatgacaagacacaaagtgttctatcagaagataagatgctttttcagcggagccagcactctagtatgatcaatggtttgcatggtcgttaccaggtgtatggaccagtagttaggctagcaaaaagatggatttctgcacatctattttcttcatttatctcagaggaggcagttgagctggtagttgcacatatatttttgaagccattcccattccatgccccatcttctcgggttgctgggtttctcaggtttttgcggttgttatccagttttgactggatcttttcacccatggttattgacataaataatgacttcaacctgatggatgagaaggagatcaatgataactttatgctgagcagaaaatcttatgagcgaaacccccatgatatagagcctgcaatgtttcttgctacgtcatatgataaaacatctgaagcatggacaaaacagtcaccaagcaagtcggttctcaaacgggtagctgcttatgctaaaagcagtgcggagcttttaacaaatcttatgcttcatggtccatcaggggaatatacatgggagtgcctgtttcgaacacctatgagcaactatgatgctgttattctcctccatcaagagaagctttgttgcccccaccacgtactttttcctgctgagaaccctgacggtaagctggtggtctggggcaaaccaagtaaagatttctgcccctatatgccactgaacaaaggggcagtgaaaggtttgcatgatgcaagagagaaactcttggtaaactttgacccgactacatacttcttgcgagacttgaagtgcgcattctccaagaccttcaagctgtggtatggttcagttggaggagacgctgtgggtcttacatgggagaacccaaagaagcgtggcagagaggaggctgatgaggctgctcccgagccgacatctatccttaaggaggttggagatgttggtaaaggtttagtgaggggtgtgtaccttgtcaaggcaccaaagtttcagtaaactgacagggcgtgtgcaactgaagatctgaccaacaaaccgatgcacaagaaggaagacttccaagtgttggtagtcttccttccatccagggcagtgtttggaggctagcaatgggggatggggagcacacgcggtagtcatggtcatggagttgtaaacgagtcaagatgtgctgtgtttagaccactattactagtacacagctgccaaaagagaaatgaaggttgtagaacctcttattgaaattttgactgtgtagtatatatgagatgtgattctgcaaacatttgctgcgatgaaaatgccaatcaaggtttgacgtgcaagtttgcgtgtctacttggtttcagatggaacaagaatgagcagcaggtactgtgtattcgcctgactgcgtcctttgttccatcatctgcaacttc

SEQ ID NO: 35234 - DNA, 3531 bp, Zea Mays
ttccttttggaccctatagtggtatttctcattccaaaacaggcgtggctatggctaaaccctaaacccgcgaccgcactggcctttcctcccgccggcgatcaccgaagccaaccatggccgcgcggggttttttgagggacctgggactggaaaccgagaagctttccttcaccttccgtccgccggaggtggtgcgtctcgccgggagccacgcggccggcgcggtcgcgaggcccgaagtcgctgccgacctcctcgtacgcttgccaaaggaatgcttccacgagaaggatttcctaaatcaccggtaccatgcaaagaggtgtctttacctctgtgtcgtcgagaaaaacttgaggtgctctaaattaatccgcaaagtttcatggtctaccctccaagatgaggctcgaaagcccgtgcttcatgtatatccagcgaccgaaattgtagaccttcctggattccatgtaagaataatcccaactgcggattctttgttcaacgtttcaaagttgaatgtatcaacaagaaataatgtccgtgcatatacaaaagatggtgtaaacctacccacaccaaagtataattgtagcatattggaggatatgtttttggaggaaaatgcaaactttattagtagcacctttgctaactggaaagctttgcaagaggccttggtgttggtaaaggtttgggcacgtcaaagaacttcaatatacacacatgattgtctcaatggatacttaatttctgccatccttgtgtttcttactgtggactctggaggaagcatgattactagatcaatgaccacaagacaaattttccgtgtattgatgaattttttggcaacttccaaggcgtgggcaaagggattggtgattcaatcaatgaagaagcgtacggtcaccaaagaggacattgccacttgcctgaagacatttgatgttgccgtatttgatatatctggccacattaatttggcgtttcgtatgacaaggtctgcttttttagagcttcaagatgaggcagtttgcgcacttagttgccttgataaatgcagagatggtggacttgaagagctttttatgaccaaagtcgacttttgtgcaaagtttgacacatgtttgaggataaacttgaaagggaactctaaggttactggattaagctattgtgtggatgacgagtcttggagaattcttgagaaagatgttcagtctttgctgcaacaaggacttacagatagaacaaagatgatccgagccctatggagaagcacaccttctgaatggaaaatagtggaaaatttggcagcagtccgcttctggttggtatgatggttagctcattggaaaagagttttcgccttgttgatattggtccaaaccctgagaaccgtgttgaggctgttaaatttaggaaattttggggagagaaagctgagcttagaagattcaaggatggaaatattgccgaaagcacagtttgggaatgccaatcctgggagaagcatacaattattaaaaggattgctgattatgtgcttatgaaacatttgtcgctgcagaaggatgatttgattcatgttgttgatcagctggacttttgcctcttagttgatggccaagatccggtctcgtcttctggagctttgcttgaagcttttgatactattgctaagcagttacgtctcttagatgatattcctcttaaaatatctaccgtgcaacccctagactcagcttttaggcacacttctgtgtttcctcctgaacctcatccactggcatacggaaggaattctcagaggctaccgaaattcgcaacaacttgcataagatctttagaagttatgattcagctagagggatctggtaactggcctttggatcccgtggccatggagaagacaaagactgcatttcttttaaaaattggtgaaagcttggaggatcgaggaatgtttgtttcagccagtgaaaatgaggtgaatgtccttacatctggatattcattcttactcaaaatatttcatgaaagaggtttagtgatgcaaaagccagttggagatgacaagacacaaagtgttctatcagaagataagatgctttttcagcggagccagcactctagtatgatcaatggtttgcatggtcgttaccaggtgtatggaccagtagttaggctagcaaaaagatggatttctgcacatctattttcttcatttatctcagaggaggcagttgagctggtagttgcacatatatttttgaagccattcccattccatgccccatcttctcgggttgctgggtttctcaggtttttgcggttgttatccagttttgactggatcttttcacccatggttattgacataaataatgacttcaacctgatggatgagaaggagatcaatgataactttatgctgagcagaaaatcttatgagcgaaacccccatgatatagagcctgcaatgtttcttgctacgtcatatgataaaacatctgaagcatggacaaaacagtcaccaagcaagtcggttctcaaacgggtagctgcttatgctaaaagcagtgcggagcttttaacaaatcttatgcttcatggtccatcaggggaatatacatgggagtgcctgtttcgaacacctatgagcaactatgatgctgttattctcctccatcaagagaagctttgttgcccccaccacgtactttttcctgctgagaaccctgacggtaagctggtggtctggggcaaaccaagtaaagatttctgcccctatatgccactgaacaaaggggcagtgaaaggtttgcatgatgcaagagagaaactcttggtaaactttgacccgactacatacttcttgcgagacttgaagtgcgcattctccaagaccttcaagctgtggtatggttcagttggaggagacgctgtgggtcttacatgggagaacccaaagaagcgtggcagagaggaggctgatgaggctgctcccgagccgacatctatccttaaggaggttggagatgttggtaaaggtttagtgaggggtgtgtaccttgtcaaggcaccaaagtttcagtaaactgacagggcgtgtgcaactgaagatctgaccaacaaaccgatgcacaagaaggaagacttccaagtgttggtagtcttccttccatccagggcagtgtttggaggctagcaatgggggatggggagcacacgcggtagtcatggtcatggagttgtaaacgagtcaagatgtgctgtgtttagaccactattactagtacacagctgccaaaagagaaatgaaggttgtagaacctcttattgaaattttgactgtgtagtatatatgagatgtgattctgcaaacatttgctgcgatgaaaatgccaatcaaggtttgacgtgcaagtttgcgtgtctacttggtttcagatggaacaagaatgagcagcaggtactgtgtattcgcctgactgcgtcctttgttccatcatctgcaacttc

SEQ ID NO: 35235 - DNA, 576 bp, Zea Mays
cgggtccacctgtcaatcgaacgagcgtcgcccactgttcatcttcccgaacttcttcgttcgccaagcgcgcccccacgcccgcactattccaccttcttcccccatctctcccttgtttctccctcgccggttccattgggggaccttgcgagaccggcgcagtgaccggtggccatggcgcgacggccggcggtgcagcccggccagccgcccctgctccacccccggcgcggccagcctgcgcgagcgcgcgcgagctcggcgctcccagccaacgcggccagcggcccgtggcgcgcagccaacggctctcagccagcgtggcacggcggccagacccagccagccctagccgcagcagccccgtgcgcggcgcggctccctgcccaacgcagcggcgtcgcggtcggcccttgtcgacccgtccggagctcgcgtcgcgtcgatcgccgaagctccatgtgtcgtcgtccgtgctcccactggtgttcatcgttggagggatcgaagatcaagggttggcgaccaagtgatctggttcttcgagttctacgaggctgaagatcctgagca

SEQ ID NO: 35236 - DNA, 620 bp, Zea Mays
cccagccacgcgcgccgccgggtccacctgtcaatcgaacgagcgtcgcccactgttcatcttcccgaacttcttcgttcgccaagcgcgcccccacgcccgcactattccaccttcttcccccatctctcccttgtttctccctcgccggttccattgggggaccttgcgagaccggcgcagtgaccggtggccatggcgcgacggccggcggtgcagcccggccagccgcccctgctccacccccggcgcggccagcctgcgcgagcgcgcgcgagctcggcgctcccagccaacgcggccagcggcccgtggcgcgcagccaacggctctcagccagcgtggcacggcggccagacccagccagccctagccgcagcagccccgtgcgcggcgcggctccctgcccaacgcagcggcgtcgcggtcggcccttgtcgacccgtccggagctcgcgtcgcgtcgatcgccgaagctccatgtgtcgtcgtccgtgctcccactggtgttcatcgttggagatcgcgattcgtttccgagcttcgagggatcgaagatcaagggttggcgaccaagtgatctggttcttcgagttctacgaggctgaagatcctgagca

SEQ ID NO: 35237 - DNA, 2543 bp, Zea Mays
caggttgcctttggtgcaatctatgctcaggtaaagaagaaggcgtcgaggcggatctccaggagttccaggactttgacgagttcgagaactaggctagcgacctctcccagtcagctgcctgtggtgggttgtttacgttggctacgtttcgattctgtgtactttgatttatattatgtaaatggctctagtctgtaatattattacttactctttattgtaattcgaagcattgtgctatgatgagtcatttatgtaatcgtcgtgtacgtgaattactgatcctggcacgtacatggttcgcattcggtctaccttcaaaaccaggtgtgacataagtggtatcaaagccaggttgactgtaggaccgctgacctggagtagcattggccgttttaaggacttattgactattacttcacctcatccttgattctgcttcaaaatattagtcacctcgactaattctatgtttgctcctatatgcctccttgcgaaaagtattttattctaatatggtttatacttctctcaatctattagatctgatctcactcttatgcttgcgacatccttgtagatgccccctagccataacctttagtcttttgagactctttccccttctattattaaattgctaccatttgacctctattccattttgttattgacatgctcatatccttacatttttaatacccttatcccttgatctaaattacttacccttgtacctctgttgcctatttaaacagttcagtttatgtatccatgaccttcttgtcttctgagatcctttcttattttgttgttaagtcgttatctttcggaaatttctatgcccttggtcttagtatgctcgtatccttggaatcttgcatactcttatattcttatgtatgcttattttcataccccaatgtctgtttaagacatttcagttaacgtgcccttgaccactcttgtttcttaatgatccatgagcggtcattttattttgcatatccttggtaatctcgttgtctccttgtaactccacttggtaattaattttctttacttcaaccattttgttggaaccttacctatcttacccttgcttgttttctccactttgtcagtcttgccttaactctatccatggttatgcttttcatcattaccacctttacccttatcacctatatatcttaccttgatgtttatcttatatcagcctttaaaatatcctattttccatctcaatctgagcattgtactgtacctattttcccttggtcgtatcctcttctttgtcacctgcaagtttttttaactctatcatttgttgtgttttgtttgtcatcttctttacccttctcatcactctatcctaccttgtgattacattatgtctattatctaaaatctctaatctcccatcttagttcgagagtggtgttttacttgttccgcccttgttcgtaacctcatctttgccatgtgcaagtcttgtcgtgaccccattctgggttgtacttgtgccgctggctcttcaatgccttcatcttttctctcatacccttgtctgttatcgcctttgacccttgcaatattgatgtcttctacctaaatgcttaccttgaacttatcctttaaaagcctcccctttctttcaacccagtttgtgagttgtgagctacctatctctcccttgatttcgtttcactccttgtcaccttacaggttttgtcctaactccatcctttgatgtgtttttatttgctatcaccattcctttgtcatctatcgatcttaccttgacatttatctccattcctgctctttaaaaatcccctctcttcttcctcaatttgagagcggtgatttacccacctggcccttgagcgtatcctctccttttccatttgaaggtccgatcttaactccatcctttatggtacttatatcctttgtcgtatgaactaattatctcctctcatacacccttgaccattattatctttaaaaccctcgtgatatctatgcccttgccttcctgcttacattgaacctatccttgggagcctcctcttttccatccctgtttggagatgatgcctaatctagttcatcattgactgctccccattctttgacaccttgcaagttctgtctaaaatacatcctttgttgtgtggttgtccgttatcaccttaacccttgtcatccatcgatctttaccttgatgcttatcatgtactcatattctaaagcttcctcgcccattttagttcaagagtgttgtcttacccctccctgctcttgttcgttccctattcctctatcacgttgcaaatcttgtcttaactcgatcttttggtgtgcttttgtctgttacctcctttacctttgtcatcactagatctttccatgatgcttatcctatgcctatcatttgaaatatcgtctttctcacctcgattagagaatgatgttttacctaccctgtccttggttgcattttctcccttgtcgattacaattcttgctttaac

SEQ ID NO: 35238 - DNA, 730 bp, Zea Mays
cgccgtcgcattccccagccacgcgcgccgccgggtccacctgtcaatcgaacgagcgtcgcccactgttcatcttcccgaacttcttcgttcgccaagcgcgcccccacgcccgcactattccaccttcttcccccatctctcccttgtttctccctcgccggttccattgggggaccttgcgagaccggcgcagtgaccggtggccatggcgcgacggccggcggtgcagcccggccagccgcccctgctccacccccggcgcggccagcctgcgcgagcgcgcgcgagctcggcgctcccagccaacgcggccagcggcccgtggcgcgcagccaacggctctcagccagcgtggcacggcggccagacccagccagccctagccgcagcagccccgtgcgcggcgcggctccctgcccaacgcagcggcgtcgcggtcggcccttgtcgacccgtccggagctcgcgtcgcgtcgatcgccgaagctccatgtgtcgtcgtccgtgctcccactggtgttcatcgttggagatcgcgatttgtttccgagcttcgagggatcgaagatcaagggttggcgaccaagtgatctggttcttcgagttctacgaggctgaagatcctgagcatctgtttggtgaaggcaagtgttctctgacccattatgtcccatttactttataatacattgtcccgcatactatgaataacctaaggatttactag

SEQ ID NO: 35239 - DNA, 442 bp, Zea Mays
cggcgatgcctactccatctacggcggcgccatcgccgttcttaccagagttggcgacgcgcagaaccctacccacggcggcacaggcactcgcggcggcggtggaaaggcgtcgagaaattggtggcgcgttgttggattacatcgccaggagatgccacggatagcttcagtagccgctcgcggtcaccccaggcgctttactacggccctgccaccaccgtggtatggatctatccggcggcggcggaaacctctctctccctctcgttgtactccccttcctcttgctacatcgaggttcctttgtggcggcgcaggagggttgagaaggaggcgaggtctgatagggttttatactccggttgggttcggtcagcggccgttttacggagctcgagcaggtccgcccatgccacactccatccgggaggtagttgac

SEQ ID NO: 35240 - DNA, 3619 bp, Zea Mays
aaaatcgcaaccgccggcgaggatcggcgccgccatgtcccagatcctccgccaccgcctgtcggctcactaccacggagtctgcggccactgctgccgccgcctcagctccgccgtctacggcggcggcgggagtcgccgcgccgtcgccgcgccgccgcaggacggcgagggcagccgagcggtgagggtgtctgtgtggtgggacttcgagaactgccacatccccaacggcgtcaacgtccaccgcgttgccccgcgcgtttccgccgccctccgcgccgccggcatccgcgggccgctctccatcaccgccttcggggacgtgctgcagctcgcgcgctcctcccaggaggcgctcgccgccacgggcgtctccatctcccacgtcccaagcagtgggaagaatagttctgaccgctcttttatggctgatcttgtctactggattgctcagaatccgccaccagttcattttttccttatatctggcgatagagattttgcaaacatcttgcatcggttgagaatgagcaactacaatgtactgcttgcttgtcctagtagtgctaccagtgtactgtgcagtgcagcaacaatcatgtggccttgggaaggcttagttagaggagaggatttgtcaccaaaacgttttaacaacccgccggatggtttacatggatcttggtatggtcactaccgaggagcccttgacgacccccccctggagaaggaatcagaggaacccatcaaggtagcatctgttccgaagcagttttcagtaccatctaataccaagcactgcccagttcccaaacatgtaaaaaatgcaattctggaggtactacgttcatatcctgaaggggtgaacatctcactcctccgaaatcagcttgtaaagaacaaaattgatctgggtacaaatttctttggccacaagaaattctcttcctttcttgaatcaatgccacatgttgttaaattattaggttctcgattaggtgaaaacgaactatatgcaattgctgccaacaaaaaatttctgcagcctggtgatggggctcttgatgaccccttcctggagaagggagcagaggaacccatcaaggtatcatctgattcccagcattgttcagtaccatctgataccaagtctagttcaatccctaaatatgtaacagatgcaattctggaggcgctatgttcatatcctgaagggatcaacctttcactactccaggaagagcttgcgaagaaaaaaatttgtcttggtccagatttttttggccacaaggatttctcttgccttatacaatcaataccagatattgttgaattagtatgtcctcaaactggtggacaactatatgcaattgctgtcaacagaagatcactgcagcctggtgacggaagtactaagacccttagctcagctcaaggtaatgccagggagaataacccaactggaacagctcacagtaataagaagaatacactaagttctcttcgaagcatttacaagagcagaagcttcacagagacactaagtgaacatccacctacattttctgtcttaccttccccgtcaaatgggctatctgaggaccaaactgagtgcccagtggtggatgtgaatgggtcgacagagtcaccagcaaagcacagggaagttggtgaaatgactacccctggaactccctcttcctcaggggtggaaaatgctgctaatgaatatggcttctttaaaaggatctggacaatgtggaatggtcccaagaatgttaagtctgaggtttctcaaaattgtgaaagcacttctgctgaagtgattgatgatttgatacatgaaacctcttccaaaaatgatcgctcagatggtactgagggcatgttagcagtaagtgataatttatcgatttcattaggtgatgatcattctgaaaaaataaagagagatccatcaattcctgaaaacccagaaccatgcagaaaacctgctgctgtttccatgattaaatctggaaaaaaggatgatatttctgaaatgaataggggcatgtttaactgggcttcaaggtggtggccatttgggaaatcagatgcagatagtagtacaaccaacataaatgccactgatgaaccgaggactgactctattgaagaatttgaatcttcaaacgctccaactaatggaagtgcacaacaggtggttcatgaaatatttacaaagcctgacttgtggtctgttttggagcaacagttatcagaacctcttgggtctgaggttgttttgaaagcaaagacaaggcaggaattggcacacagattgcagaagttaaattgctggcctttgaaaggcctccttgataaagacctgcatcacctggtacatctgttaatttctgaaaagaaatggattgaagaaacttcttccagaattttccctttccgtcttaccctccctcgcaagagaagatgtgtcccatcaagttccagcaaatccaacggcctcagttacattttttcaagtgggaagccacaaaagggcagatacgttgacaataacagtaggaaaagcaggtccctcactagagaggagatactatcagattgtcacaagctggtgaaggagcttctttctgagcatgaatatggattcaacatcggaattttcaaacgccgtttttcccaggagtatggatacgagctcgaacaccggaagctcgggtatctggaccttgaaacgctgctgcatattatgcctgatgtaagggtgaaattcccaagggtcatgcgctcagaacacgggaacgggcaggctggcagcaagggagacggaaaccgaagcagcggcgatgacttgatctgggaggagcttggtcctgtatctgccacaactgaaaccgccgccgccgccgctgatgcaggggccgacaaggaaacatgctatcgtcctcccactccttcagacgacgagttctcggacagcgacagcataaaagaccggcagcctagaaggaacgccgagcagcagagctcgcttctccagatcattggagcttggaacagcagcaagggtggcgacgtctctagcaacaagcctcaggacatcgacgggttggtggactgttcgagaagcagcccgggcagtgctggcaccagcgcagcttcaggaaaggtgcagacgtcgtctccgaagctaccgcacaagcagtactccttcgtgtcggactccggagaggagagcgatccggataagctggtggagagcgtcttggacagcctgcagaaagcacggggcggctcgaagctgcacaactgagcgtctgctgccatcgaattattgtttttgcaacctaacgagtcgtgcttatggtggtggccatggctgactgtcaaggacagcggcgcctgcaagcatcagccggagagactggtgaataaagctcgtcttttacttggactaggccgtagtacaatcggaacagtccttggtaattggaataatcatgtttatatacaagtgacaggggtcatttttaaagggtgtgttctttggagagaagccatccagcctcttggattggtcacagtgtttgtaacgtattttgtaacactc

SEQ ID NO: 35241 - DNA, 3689 bp, Zea Mays
ctcgtgcgtggcaaaagtggaatgccgaaagggtttctccaaaaccctctccaacaaaatcgcaaccgccggcgaggatcggcgccgccatgtcccagatcctccgccaccgcctgtcggctcactaccacggagtctgcggccactgctgccgccgcctcagctccgccgtctacggcggcggcgggagtcgccgcgccgtcgccgcgccgccgcaggacggcgagggcagccgagcggtgagggtgtctgtgtggtgggacttcgagaactgccacatccccaacggcgtcaacgtccaccgcgttgccccgcgcgtttccgccgccctccgcgccgccggcatccgcgggccgctctccatcaccgccttcggggacgtgctgcagctcgcgcgctcctcccaggaggcgctcgccgccacgggcgtctccatctcccacgtcccaagcagtgggaagaatagttctgaccgctcttttatggctgatcttgtctactggattgctcagaatccgccaccagttcattttttccttatatctggcgatagagattttgcaaacatcttgcatcggttgagaatgagcaactacaatgtactgcttgcttgtcctagtagtgctaccagtgtactgtgcagtgcagcaacaatcatgtggccttgggaaggcttagttagaggagaggatttgtcaccaaaacgttttaacaacccgccggatggtttacatggatcttggtatggtcactaccgaggagcccttgacgacccccccctggagaaggaatcagaggaacccatcaaggtagcatctgttccgaagcagttttcagtaccatctaataccaagcactgcccagttcccaaacatgtaaaaaatgcaattctggaggtactacgttcatatcctgaaggggtgaacatctcactcctccgaaatcagcttgtaaagaacaaaattgatctgggtacaaatttctttggccacaagaaattctcttcctttcttgaatcaatgccacatgttgttaaattattaggttctcgattaggtgaaaacgaactatatgcaattgctgccaacaaaaaatttctgcagcctggtgatggggctcttgatgaccccttcctggagaagggagcagaggaacccatcaaggtatcatctgattcccagcattgttcagtaccatctgataccaagtctagttcaatccctaaatatgtaacagatgcaattctggaggcgctatgttcatatcctgaagggatcaacctttcactactccaggaagagcttgcgaagaaaaaaatttgtcttggtccagatttttttggccacaaggatttctcttgccttatacaatcaataccagatattgttgaattagtatgtcctcaaactggtggacaactatatgcaattgctgtcaacagaagatcactgcagcctggtgacggaagtactaagacccttagctcagctcaaggtaatgccagggagaataacccaactggaacagctcacagtaataagaagaatacactaagttctcttcgaagcatttacaagagcagaagcttcacagagacactaagtgaacatccacctacattttctgtcttaccttccccgtcaaatgggctatctgaggaccaaactgagtgcccagtggtggatgtgaatgggtcgacagagtcaccagcaaagcacagggaagttggtgaaatgactacccctggaactccctcttcctcaggggtggaaaatgctgctaatgaatatggcttctttaaaaggatctggacaatgtggaatggtcccaagaatgttaagtctgaggtttctcaaaattgtgaaagcacttctgctgaagtgattgatgatttgcaggtttctcagaattgtgaaagcacttttgctaaagtgattgatgatttgcgaactcctttggaagagtataatggtgatcaccgtataaagcttttgaggaggatacatgaaacctcttccaaaaatgatcgctcagatggtactgagggcatgttagcagtaagtgataatttatcgatttcattaggtgatgatcattctgaaaaaataaagagagatccatcaattcctgaaaacccagaaccatgcagaaaacctgctgctgtttccatgattaaatctggaaaaaaggatgatatttctgaaatgaataggggcatgtttaactgggcttcaaggtggtggccatttgggaaatcagatgcagatagtagtacaaccaacataaatgccactgatgaaccgaggactgactctattgaagaatttgaatcttcaaacgctccaactaatggaagtgcacaacaggtggttcatgaaatatttacaaagcctgacttgtggtctgttttggagcaacagttatcagaacctcttgggtctgaggttgttttgaaagcaaagacaaggcaggaattggcacacagattgcagaagttaaattgctggcctttgaaaggcctccttgataaagacctgcatcacctggtacatctgttaatttctgaaaagaaatggattgaagaaacttcttccagaattttccctttccgtcttaccctccctcgcaagagaagatgtgtcccatcaagttccagcaaatccaacggcctcagttacattttttcaagtgggaagccacaaaagggcagatacgttgacaataacagtaggaaaagcaggtccctcactagagaggagatactatcagattgtcacaagctggtgaaggagcttctttctgagcatgaatatggattcaacatcggaattttcaaacgccgtttttcccaggagtatggatacgagctcgaacaccggaagctcgggtatctggaccttgaaacgctgctgcatattatgcctgatgtaagggtgaaattcccaagggtcatgcgctcagaacacgggaacgggcaggctggcagcaagggagacggaaaccgaagcagcggcgatgacttgatctgggaggagcttggtcctgtatctgccacaactgaaaccgccgccgccgccgctgatgcaggggccgacaaggaaacatgctatcgtcctcccactccttcagacgacgagttctcggacagcgacagcataaaagaccggcagcctagaaggaacgccgagcagcagagctcgcttctccagatcattggagcttggaacagcagcaagggtggcgacgtctctagcaacaagcctcaggacatcgacgggttggtggactgttcgagaagcagcccgggcagtgctggcaccagcgcagcttcaggaaaggtgcagacgtcgtctccgaagctaccgcacaagcagtactccttcgtgtcggactccggagaggagagcgatccggataagctggtggagagcgtcttggacagcctgcagaaagcacggggcggctcgaagctgcacaactgagcgtctgctgccatcgaattattgtttttgcaacctaacgagtcgtgcttatggtggtggccatggctgactgtcaaggacagcggcgcctgcaagcatcagccggagagactggtgaataaagctcgtcttttacttggactaggccgtagtacaatcggaacagtccttggtaattgatgattaggacagtaatcaacggcggcc

SEQ ID NO: 35242 - DNA, 3685 bp, Zea Mays
ctcgtgcgtggcaaaagtggaatgccgaaagggtttctccaaaaccctctccaacaaaatcgcaaccgccggcgaggatcggcgccgccatgtcccagatcctccgccaccgcctgtcggctcactaccacggagtctgcggccactgctgccgccgcctcagctccgccgtctacggcggcggcgggagtcgccgcgccgtcgccgcgccgccgcaggacggcgagggcagccgagcggtgagggtgtctgtgtggtgggacttcgagaactgccacatccccaacggcgtcaacgtccaccgcgttgccccgcgcgtttccgccgccctccgcgccgccggcatccgcgggccgctctccatcaccgccttcggggacgtgctgcagctcgcgcgctcctcccaggaggcgctcgccgccacgggcgtctccatctcccacgtcccaagcagtgggaagaatagttctgaccgctcttttatggctgatcttgtctactggattgctcagaatccgccaccagttcattttttccttatatctggcgatagagattttgcaaacatcttgcatcggttgagaatgagcaactacaatgtactgcttgcttgtcctagtagtgctaccagtgtactgtgcagtgcagcaacaatcatgtggccttgggaaggcttagttagaggagaggatttgtcaccaaaacgttttaacaacccgccggatggtttacatggatcttggtatggtcactaccgaggagcccttgacgacccccccctggagaaggaatcagaggaacccatcaaggtagcatctgttccgaagcagttttcagtaccatctaataccaagcactgcccagttcccaaacatgtaaaaaatgcaattctggaggtactacgttcatatcctgaaggggtgaacatctcactcctccgaaatcagcttgtaaagaacaaaattgatctgggtacaaatttctttggccacaagaaattctcttcctttcttgaatcaatgccacatgttgttaaattattaggttctcgattaggtgaaaacgaactatatgcaattgctgccaacaaaaaatttctgcagcctggtgatggggctcttgatgaccccttcctggagaagggagcagaggaacccatcaaggtatcatctgattcccagcattgttcagtaccatctgataccaagtctagttcaatccctaaatatgtaacagatgcaattctggaggcgctatgttcatatcctgaagggatcaacctttcactactccaggaagagcttgcgaagaaaaaaatttgtcttggtccagatttttttggccacaaggatttctcttgccttatacaatcaataccagatattgttgaattagtatgtcctcaaactggtggacaactatatgcaattgctgtcaacagaagatcactgcagcctggtgacggaagtactaagacccttagctcagctcaaggtaatgccagggagaataacccaactggaacagctcacagtaataagaagaatacactaagttctcttcgaagcatttacaagagcagaagcttcacagagacactaagtgaacatccacctacattttctgtcttaccttccccgtcaaatgggctatctgaggaccaaactgagtgcccagtggtggatgtgaatgggtcgacagagtcaccagcaaagcacagggaagttggtgaaatgactacccctggaactccctcttcctcaggggtggaaaatgctgctaatgaatatggcttctttaaaaggatctggacaatgtggaatggtcccaagaatgttaagtctgaggtttctcaaaattgtgaaagcacttctgctgaagtgattgatgatttgcaggtttctcagaattgtgaaagcacttttgctaaagtgattgatgatttgcgaactcctttggaagagtataatggtgatcaccgtataaagcttttgaggaggatacatgaaacctcttccaaaaatgatcgctcagatggtactgagggcatgttagcagtaagtgataatttatcgatttcattaggtgatgatcattctgaaaaaataaagagagatccatcaattcctgaaaacccagaaccatgcagaaaacctgctgctgtttccatgattaaatctggaaaaaaggatgatatttctgaaatgaataggggcatgtttaactgggcttcaaggtggtggccatttgggaaatcagatgcagatagtagtacaaccaacataaatgccactgatgaaccgaggactgactctattgaagaatttgaatcttcaaacgctccaactaatggaagtgcacaacaggtggttcatgaaatatttacaaagcctgacttgtggtctgttttggagcaacagttatcagaacctcttgggtctgaggttgttttgaaagcaaagacaaggaattggcacacagattgcagaagttaaattgctggcctttgaaaggcctccttgataaagacctgcatcacctggtacatctgttaatttctgaaaagaaatggattgaagaaacttcttccagaattttccctttccgtcttaccctccctcgcaagagaagatgtgtcccatcaagttccagcaaatccaacggcctcagttacattttttcaagtgggaagccacaaaagggcagatacgttgacaataacagtaggaaaagcaggtccctcactagagaggagatactatcagattgtcacaagctggtgaaggagcttctttctgagcatgaatatggattcaacatcggaattttcaaacgccgtttttcccaggagtatggatacgagctcgaacaccggaagctcgggtatctggaccttgaaacgctgctgcatattatgcctgatgtaagggtgaaattcccaagggtcatgcgctcagaacacgggaacgggcaggctggcagcaagggagacggaaaccgaagcagcggcgatgacttgatctgggaggagcttggtcctgtatctgccacaactgaaaccgccgccgccgccgctgatgcaggggccgacaaggaaacatgctatcgtcctcccactccttcagacgacgagttctcggacagcgacagcataaaagaccggcagcctagaaggaacgccgagcagcagagctcgcttctccagatcattggagcttggaacagcagcaagggtggcgacgtctctagcaacaagcctcaggacatcgacgggttggtggactgttcgagaagcagcccgggcagtgctggcaccagcgcagcttcaggaaaggtgcagacgtcgtctccgaagctaccgcacaagcagtactccttcgtgtcggactccggagaggagagcgatccggataagctggtggagagcgtcttggacagcctgcagaaagcacggggcggctcgaagctgcacaactgagcgtctgctgccatcgaattattgtttttgcaacctaacgagtcgtgcttatggtggtggccatggctgactgtcaaggacagcggcgcctgcaagcatcagccggagagactggtgaataaagctcgtcttttacttggactaggccgtagtacaatcggaacagtccttggtaattgatgattaggacagtaatcaacggcggcc

SEQ ID NO: 35243 - DNA, 3821 bp, Zea Mays
ggcgaggatcggcgccgccatgtcccagatcctccgccaccgcctgtcggctcactaccacggagtctgcggccactgctgccgccgcctcagctccgccgtctacggcggcggcgggagtcgccgcgccgtcgccgcgccgccgcaggacggcgagggcagccgagcggtgagggtgtctgtgtggtgggacttcgagaactgccacatccccaacggcgtcaacgtccaccgcgttgccccgcgcgtttccgccgccctccgcgccgccggcatccgcgggccgctctccatcaccgccttcggggacgtgctgcagctcgcgcgctcctcccaggaggcgctcgccgccacgggcgtctccatctcccacgtcccaagcagtgggaagaatagttctgaccgctcttttatggctgatcttgtctactggattgctcagaatccgccaccagttcattttttccttatatctggcgatagagattttgcaaacatcttgcatcggttgagaatgagcaactacaatgtactgcttgcttgtcctagtagtgctaccagtgtactgtgcagtgcagcaacaatcatgtggccttgggaaggcttagttagaggagaggatttgtcaccaaaacgttttaacaacccgccggatggtttacatggatcttggtatggtcactaccgaggagcccttgacgacccccccctggagaaggaatcagaggaacccatcaaggttctcgattaggtgaaaacgaactatatgcaattgctgccaacaaaaaatttctgcagcctggtgatggggctcttgatgaccccttcctggagaagggagcagaggaacccatcaaggtatcatctgattcccagcattgttcagtaccatctgataccaagtctagttcaatccctaaatatgtaacagatgcaattctggaggcgctatgttcatatcctgaagggatcaacctttcactactccaggaagagcttgcgaagaaaaaaatttgtcttggtccagatttttttggccacaaggatttctcttgccttatacaatcaataccagatattgttgaattagtatgtcctcaaactggtggacaactatatgcaattgctgtcaacagaagatcactgcagcctggtgacggaagtactaagacccttagctcagctcaaggtaatgccagggagaataacccaactggaacagctcacagtaataagaagaatacactaagttctcttcgaagcatttacaagagcagaagcttcacagagacactaagtgaacatccacctacattttctgtcttaccttccccgtcaaatgggctatctgaggaccaaactgagtgcccagtggtggatgtgaatgggtcgacagagtcaccagcaaagcacagggaagttggtgaaatgactacccctggaactccctcttcctcaggggtggaaaatgctgctaatgaatatggcttctttaaaaggatctggacaatgtggaatggtcccaagaatgttaagtctgaggtttctcaaaattgtgaaagcacttctgctgaagtgattgatgatttgcaggtttctcagaattgtgaaagcacttttgctaaagtgattgatgatttgcgaactcctttggaagagtataatggtgatcaccgtataaagcttttgaggaggatacatgaaacctcttccaaaaatgatcgctcagatggtactgagggcatgttagcagtaagtgataatttatcgatttcattaggtgatgatcattctgaaaaaataaagagagatccatcaattcctgaaaacccagaaccatgcagaaaacctgctgctgtttccatgattaaatctggaaaaaaggatgatatttctgaaatgaataggggcatgtttaactgggcttcaaggtggtggccatttgggaaatcagatgcagatagtagtacaaccaacataaatgccactgatgaaccgaggactgactctattgaagaatttgaatcttcaaacgctccaactaatggaagtgcacaacaggtggttcatgaaatatttacaaagcctgacttgtggtctgttttggagcaacagttatcagaacctcttgggtctgaggttgttttgaaagcaaagacaaggcaggaattggcacacagattgcagaagttaaattgctggcctttgaaaggcctccttgataaagacctgcatcacctggtacatctgttaatttctgaaaagaaatggattgaagaaacttcttccagaattttccctttccgtcttaccctccctcgcaagagaagatgtgtcccatcaagttccagcaaatccaacggcctcagttacattttttcaagtgggaagccacaaaagggcagatacgttgacaataacagtaggaaaagcaggtccctcactagagaggagatactatcagattgtcacaagctggtgaaggagcttctttctgagcatgaatatggattcaacatcggaattttcaaacgccgtttttcccaggagtatggatacgagctcgaacaccggaagctcgggtatctggaccttgaaacgctgctgcatattatgcctgatgtaagggtgaaattcccaagggtcatgcgctcagaacacgggaacgggcaggctggcagcaagggagacggaaaccgaagcagcggcgatgacttgatctgggaggagcttggtcctgtatctgccacaactgaaaccgccgccgccgccgctgatgcaggggccgacaaggaaacatgctatcgtcctcccactccttcagacgacgagttctcggacagcgacagcataaaagaccggcagcctagaaggaacgccgagcagcagagctcgcttctccagatcattggagcttggaacagcagcaagggtggcgacgtctctagcaacaagcctcaggacatcgacgggttggtggactgttcgagaagcagcccgggcagtgctggcaccagcgcagcttcaggaaaggtgcagacgtcgtctccgaagctaccgcacaagcagtactccttcgtgtcggactccggagaggagagcgatccggataagctggtggagagcgtcttggacagcctgcagaaagcacggggcggctcgaagctgcacaactgagcgtctgctgccatcgaattattgtttttgcaacctaacgagtcgtgcttatggtggtggccatggctgactgtcaaggacagcggcgcctgcaagcatcagccggagagactggtgaataaagctcgtcttttacttggactaggccgtagtacaatcggaacagtccttggtaattggtatgttaacattggctagagaccgcctcccatttctgtttcttgtttctttcttttcatgcaggatggttgtccgcccaatctacacgctcattttcttaacaaattggttaacacggcggggcttagacggtcgttcgtcaccagtgttggtattccaagcccaatcttttttttgcttgtagtatagtaaacataaaatgacatggcacatgctggtgtctagagtattgctgtttctggagtcccaagcattcatgtgatggcacattggaatgccagttgtactgcaatagtgccaatgaatcctatctaacactagacctggtcacgttggtcaactgttgatggttgtgcttttctgtctgttgagtgccatctagtctagatataacaaacaaggcatcctgacattgcagcagcacattcacaggaccaggtggatatatttttttaatttgttaa

SEQ ID NO: 35244 - DNA, 3584 bp, Zea Mays
ggcgaggatcggcgccgccatgtcccagatcctccgccaccgcctgtcggctcactaccacggagtctgcggccactgctgccgccgcctcagctccgccgtctacggcggcggcgggagtcgccgcgccgtcgccgcgccgccgcaggacggcgagggcagccgagcggtgagggtgtctgtgtggtgggacttcgagaactgccacatccccaacggcgtcaacgtccaccgcgttgccccgcgcgtttccgccgccctccgcgccgccggcatccgcgggccgctctccatcaccgccttcggggacgtgctgcagctcgcgcgctcctcccaggaggcgctcgccgccacgggcgtctccatctcccacgtcccaagcagtgggaagaatagttctgaccgctcttttatggctgatcttgtctactggattgctcagaatccgccaccagttcattttttccttatatctggcgatagagattttgcaaacatcttgcatcggttgagaatgagcaactacaatgtactgcttgcttgtcctagtagtgctaccagtgtactgtgcagtgcagcaacaatcatgtggccttgggaaggcttagttagaggagaggatttgtcaccaaaacgttttaacaacccgccggatggtttacatggatcttggtatggtcactaccgaggagcccttgacgacccccccctggagaaggaatcagaggaacccatcaagcctggtgatggggctcttgatgaccccttcctggagaagggagcagaggaacccatcaagatgcaattctggaggcgctatgttcatatcctgaagggatcaacctttcactactccaggaagagcttgcgaagaaaaaaatttgtcttggtccagatttttttggccacaaggatttctcttgccttatacaatcaataccagatattgttgaattagtatgtcctcaaactggtggacaactatatgcaattgctgtcaacagaagatcactgcagcctggtgacggaagtactaagacccttagctcagctcaaggtaatgccagggagaataacccaactggaacagctcacagtaataagaagaatacactaagttctcttcgaagcatttacaagagcagaagcttcacagagacactaagtgaacatccacctacattttctgtcttaccttccccgtcaaatgggctatctgaggaccaaactgagtgcccagtggtggatgtgaatgggtcgacagagtcaccagcaaagcacagggaagttggtgaaatgactacccctggaactccctcttcctcaggggtggaaaatgctgctaatgaatatggcttctttaaaaggatctggacaatgtggaatggtcccaagaatgttaagtctgaggtttctcaaaattgtgaaagcacttctgctgaagtgattgatgatttgatacatgaaacctcttccaaaaatgatcgctcagatggtactgagggcatgttagcagtaagtgataatttatcgatttcattaggtgatgatcattctgaaaaaataaagagagatccatcaattcctgaaaacccagaaccatgcagaaaacctgctgctgtttccatgattaaatctggaaaaaaggatgatatttctgaaatgaataggggcatgtttaactgggcttcaaggtggtggccatttgggaaatcagatgcagatagtagtacaaccaacataaatgccactgatgaaccgaggactgactctattgaagaatttgaatcttcaaacgctccaactaatggaagtgcacaacaggtggttcatgaaatatttacaaagcctgacttgtggtctgttttggagcaacagttatcagaacctcttgggtctgaggttgttttgaaagcaaagacaaggcaggaattggcacacagattgcagaagttaaattgctggcctttgaaaggcctccttgataaagacctgcatcacctggtacatctgttaatttctgaaaagaaatggattgaagaaacttcttccagaattttccctttccgtcttaccctccctcgcaagagaagatgtgtcccatcaagttccagcaaatccaacggcctcagttacattttttcaagtgggaagccacaaaagggcagatacgttgacaataacagtaggaaaagcaggtccctcactagagaggagatactatcagattgtcacaagctggtgaaggagcttctttctgagcatgaatatggattcaacatcggaattttcaaacgccgtttttcccaggagtatggatacgagctcgaacaccggaagctcgggtatctggaccttgaaacgctgctgcatattatgcctgatgtaagggtgaaattcccaagggtcatgcgctcagaacacgggaacgggcaggctggcagcaagggagacggaaaccgaagcagcggcgatgacttgatctgggaggagcttggtcctgtatctgccacaactgaaaccgccgccgccgccgctgatgcaggggccgacaaggaaacatgctatcgtcctcccactccttcagacgacgagttctcggacagcgacagcataaaagaccggcagcctagaaggaacgccgagcagcagagctcgcttctccagatcattggagcttggaacagcagcaagggtggcgacgtctctagcaacaagcctcaggacatcgacgggttggtggactgttcgagaagcagcccgggcagtgctggcaccagcgcagcttcaggaaaggtgcagacgtcgtctccgaagctaccgcacaagcagtactccttcgtgtcggactccggagaggagagcgatccggataagctggtggagagcgtcttggacagcctgcagaaagcacggggcggctcgaagctgcacaactgagcgtctgctgccatcgaattattgtttttgcaacctaacgagtcgtgcttatggtggtggccatggctgactgtcaaggacagcggcgcctgcaagcatcagccggagagactggtgaataaagctcgtcttttacttggactaggccgtagtacaatcggaacagtccttggtaattggtatgttaacattggctagagaccgcctcccatttctgtttcttgtttctttcttttcatgcaggatggttgtccgcccaatctacacgctcattttcttaacaaattggttaacacggcggggcttagacggtcgttcgtcaccagtgttggtattccaagcccaatcttttttttgcttgtagtatagtaaacataaaatgacatggcacatgctggtgtctagagtattgctgtttctggagtcccaagcattcatgtgatggcacattggaatgccagttgtactgcaatagtgccaatgaatcctatctaacactagacctggtcacgttggtcaactgttgatggttgtgcttttctgtctgttgagtgccatctagtctagatataacaaacaaggcatcctgacattgcagcagcacattcacaggaccaggtggatatatttttttaatttgttaa

SEQ ID NO: 35245 - DNA, 3874 bp, Zea Mays
tcgcaaccgccggcgaggatcggcgccgccatgtcccagatcctccgccaccgcctgtcggctcactaccacggagtctgcggccactgctgccgccgcctcagctccgccgtctacggcggcggcgggagtcgccgcgccgtcgccgcgccgccgcaggacggcgagggcagccgagcggtgagggtgtctgtgtggtgggacttcgagaactgccacatccccaacggcgtcaacgtccaccgcgttgccccgcgcgtttccgccgccctccgcgccgccggcatccgcgggccgctctccatcaccgccttcggggacgtgctgcagctcgcgcgctcctcccaggaggcgctcgccgccacgggcgtctccatctcccacgtcccaagcagtgggaagaatagttctgaccgctcttttatggctgatcttgtctactggattgctcagaatccgccaccagttcattttttccttatatctggcgatagagattttgcaaacatcttgcatcggttgagaatgagcaactacaatgtactgcttgcttgtcctagtagtgctaccagtgtactgtgcagtgcagcaacaatcatgtggccttgggaaggcttagttagaggagaggatttgtcaccaaaacgttttaacaacccgccggatggtttacatggatcttggtatggtcactaccgaggagcccttgacgacccccccctggagaaggaatcagaggaacccatcaaggtagcatctgttccgaagcagttttcagtaccatctaataccaagcactgcccagttcccaaacatgtaaaaaatgcaattctggaggtactacgttcatatcctgaaggggtgaacatctcactcctccgaaatcagcttgtaaagaacaaaattgatctgggtgaaaacgaactatatgcaattgctgccaacaaaaaatttctgcagcctggtgatggggctcttgatgaccccttcctggagaagggagcagaggaacccatcaaggtatcatctgattcccagcattgttcagtaccatctgataccaagtctagttcaatccctaaatatgtaacagatgcaattctggaggcgctatgttcatatcctgaagggatcaacctttcactactccaggaagagcttgcgaagaaaaaaatttgtcttggtccagatttttttggccacaaggatttctcttgccttatacaatcaataccagatattgttgaattagtatgtcctcaaactggtggacaactatatgcaattgctgtcaacagaagatcactgcagcctggtgacggaagtactaagacccttagctcagctcaaggtaatgccagggagaataacccaactggaacagctcacagtaataagaagaatacactaagttctcttcgaagcatttacaagagcagaagcttcacagagacactaagtgaacatccacctacattttctgtcttaccttccccgtcaaatgggctatctgaggaccaaactgagtgcccagtggtggatgtgaatgggtcgacagagtcaccagcaaagcacagggaagttggtgaaatgactacccctggaactccctcttcctcaggggtggaaaatgctgctaatgaatatggcttctttaaaaggatctggacaatgtggaatggtcccaagaatgttaagtctgaggtttctcaaaattgtgaaagcacttctgctgaagtgattgatgatttgatacatgaaacctcttccaaaaatgatcgctcagatggtactgagggcatgttagcagtaagtgataatttatcgatttcattaggtgatgatcattctgaaaaaataaagagagatccatcaattcctgaaaacccagaaccatgcagaaaacctgctgctgtttccatgattaaatctggaaaaaaggatgatatttctgaaatgaataggggcatgtttaactgggcttcaaggtggtggccatttgggaaatcagatgcagatagtagtacaaccaacataaatgccactgatgaaccgaggactgactctattgaagaatttgaatcttcaaacgctccaactaatggaagtgcacaacaggtggttcatgaaatatttacaaagcctgacttgtggtctgttttggagcaacagttatcagaacctcttgggtctgaggttgttttgaaagcaaagacaaggaattggcacacagattgcagaagttaaattgctggcctttgaaaggcctccttgataaagacctgcatcacctggtacatctgttaatttctgaaaagaaatggattgaagaaacttcttccagaattttccctttccgtcttaccctccctcgcaagagaagatgtgtcccatcaagttccagcaaatccaacggcctcagttacattttttcaagtgggaagccacaaaagggcagatacgttgacaataacagtaggaaaagcaggtccctcactagagaggagatactatcagattgtcacaagctggtgaaggagcttctttctgagcatgaatatggattcaacatcggaattttcaaacgccgtttttcccaggagtatggatacgagctcgaacaccggaagctcgggtatctggaccttgaaacgctgctgcatattatgcctgatgtaagggtgaaattcccaagggtcatgcgctcagaacacgggaacgggcaggctggcagcaagggagacggaaaccgaagcagcggcgatgacttgatctgggaggagcttggtcctgtatctgccacaactgaaaccgccgccgccgccgctgatgcaggggccgacaaggaaacatgctatcgtcctcccactccttcagacgacgagttctcggacagcgacagcataaaagaccggcagcctagaaggaacgccgagcagcagagctcgcttctccagatcattggagcttggaacagcagcaagggtggcgacgtctctagcaacaagcctcaggacatcgacgggttggtggactgttcgagaagcagcccgggcagtgctggcaccagcgcagcttcaggaaaggtgcagacgtcgtctccgaagctaccgcacaagcagtactccttcgtgtcggactccggagaggagagcgatccggataagctggtggagagcgtcttggacagcctgcagaaagcacggggcggctcgaagctgcacaactgagcgtctgctgccatcgaattattgtttttgcaacctaacgagtcgtgcttatggtggtggccatggctgactgtcaaggacagcggcgcctgcaagcatcagccggagagactggtgaataaagctcgtcttttacttggactaggccgtagtacaatcggaacagtccttggtaattggtatgttaacattggctagagaccgcctcccatttctgtttcttgtttctttcttttcatgcaggatggttgtccgcccaatctacacgctcattttcttaacaaattggttaacacggcggggcttagacggtcgttcgtcaccagtgttggtattccaagcccaatcttttttttgcttgtagtatagtaaacataaaatgacatggcacatgctggtgtctagagtattgctgtttctggagtcccaagcattcatgtgatggcacattggaatgccagttgtactgcaatagtgccaatgaatcctatctaacactagacctggtcacgttggtcaactgttgatggttgtgcttttctgtctgttgagtgccatctagtctagatataacaaacaaggcatcctgacattgcagcagcacattcacaggaccaggtggatatatttttttaatttgttaa

SEQ ID NO: 35246 - DNA, 2051 bp, Zea Mays
cttcgtcttctgtcactgtcccacactcctatcattctcgccttcgacttcccaggagcgcccagcgccgcggagcttctagaacacgcgactggggcgagctagacgaagctaaggaggcgcgaggggtgacgatgcggggcaggtgacggtgcggcgtggtggaggcgggacagaggccgggggatggtggcggcggagggtgggcccgtcgaggagggcgtcggggagagctcgtccccgccgcgcgtagacgcagccccagcgccctctggctccgttgggagcgggggcagaggaggcgccagcgacatctgcgccgaggtgctcgagcgcctcgtcgccgacggccacgcggaggcgtccgaccccgagttccgcgacaggctcgccgcacatttcgggcggctcccgcacagctatcagctggatatcaatgttgacaaagcaaccgatgtcttggtccaccagaatgtcttagcggaagcaaaggaccctgataggcgccctgcattctatgttcgtttcttgaggattgaagatattgatcctgcaaacgactccgatgcatctgaagaaggggatggtgatggtgatgatctctctgtaaggcaggacacaccatatactcacattcatgaggtagtattctccacaatcgacaagccaaagctccttagtcagctatctgcattgctatctgacattggattgaacatcagagaagcacatgttttctctactcatgatggctattctcttgatgttttcgttgttgatggctggcccattaaggatactgatggtttgcacaaagcactggaagcatccattttaagaaatgagggttcatggtctggttcatctcattcgtcagcagctgaaagaacactgcccttccaagttaaaggtatcacgggacttacctcggtgaggatgtagctgttaaagttctaagagctgagcatttgaataagaatgtttggaacgaatttactcaagaagtatatatactaagagaagttcaacatacaaatgttgtgcgattcattggtgcttgcacaaaaccaccacaattttgcataattacagaatacatgtctggaggaagcttatatgactttgtgcacaagcagcataacgttctaaacctcacgactctattgaagtttgcagttgatgtatgccgagggatgtgctacttgcatgaaaggggtatcatccatagagacttaaagactgccaaccttctaatggacaacgatcatgctgtgaaagtggctgattttggcgtagctcggttccaggatcaaggaggtatcatgacagctgaaactggaacatacagatggatggcgcctgaggttataaaccaccaaccctatgatagcaaagcagatgtgttcagctttgccattgttctctgggagctgataacgtccaagatcccatatgataccatgacccctctccaagcggctgtaggtgtgagacaggggttgcgcccaggacttccgaagaagacgcacccaaagctgttggacttgatgcagagatgttgggaagcagatccatccgaccggcctgctttctcggacattttagccgaactggaggatcttttggcacaagctcagggaacatcgggaaagacggtccaagatccatcaaactcgaacgcgaaagattaacccccatacctgacattttttctcaatccagtgatttgccacatctaggattcgagttgccaattatgaggaaatttgttttgcttgtgtacattcgaacaatcttcttggggccaattttttatgggcacctcattattcttatacaaaagaaattgggctcgacgcttgggataccacacagattcaggggaaaaaaacaaagacggttcagcaaaacgtatcaaaatgaggctccctgccacaggttcagcaaacaaattccagaagccaaggcatgggtttattaaagctatttgacttcctgaaaggagccgcgccttcaaagttgcgttccgttatcatttcagtttgtcgaag

SEQ ID NO: 35247 - DNA, 1433 bp, Zea Mays
accgcgctccttgcaccctccccaccacccgaggccggtcccgccgtccgtctgcctcgggatacgtgtcccggctgaaccgcctccgtgaaccgagaccacgcggaggctaccggcgaggcgccctccccggctcccagcttcctccctctttctactcctcaagtcctgactcctggagtcctcacacgtatgagacgccccccacctgcacgaagccaccatcccgacattcgccgctctttctccacgcgccggtcgccgcagacgcaagcccgcccgccgcagctgacgccgcgatctgcgagggtgcaagctagctctggccccgctgccggtgccgactgagatggacccgcgcttcacgctgccggccgccattggcggcggcgccggtcgggtgcaccaccggcgggcccactcggagtcgttcctatgcttctccgacgcggacctgctcctcgacccggacggagacctctccttctccgacctcgacttcccctccctctccgacgactccccggccgcctccgacccaaccccgcccccgccgctgccgcagccggccccggccccccgcccggccggcggggcccacacgcggagcctctccctcgacgccgccttcttcgagggcctcgcgtttcagggacccagcgggagcgccgggggtgggcccgggcacaagaggagcggctccatggatggggccacctcaccgtttgagggcgagtcggcgctctccagcggcctgccggactacgccaagaaggccatgcccgcagagaggatcgccgagctcgcgctcatcgaccccaagcgcgcaaagaggattctggcgaacaggcagtctgcagcgaggtcaaaggagaggaaggtcaagtacaccagtgaactggagaagaaggtccagactctgcagacggaggccactacgctgtcagcacagctcaccctgctccagagggatacaactggtctaactgctgaaaatagggagctcaagcttcggctgcagtccatggaagagcaggctaaactgcgcgacgctttgaacgaaaccctgcgggaagaagtgcagcgacttaagatagctgcaggacaagtcgggaacatgaacgggaaccccttcaatggtggactccagcagcagattccatcctacttcgtgcagcagcagcagatgtcgtactttggtggccaccaggctcaggctcagcatcacagtcaaaaccatcatcaccggagtccatcaaacgggagacagtcgcccagtgatcagtccctaaacgactccatggatttcgtttgaggacaatataccggggcaggttggtggctggtctctccgtcatttcacaaatcagaaacagcatactggttttgaggaacagcgggctcctttttctatcagtaacgtgctttgtggc

SEQ ID NO: 35248 - DNA, 1881 bp, Zea Mays
accgcgctccttgcaccctccccaccacccgaggccggtcccgccgtccgtctgcctcgggatacgtgtcccggctgaaccgcctccgtgaaccgagaccacgcggaggctaccggcgaggcgccctccccggctcccagcttcctccctctttctactcctcaagtcctgactcctggagtcctcacacgtatgagacgccccccacctgcacgaagccaccatcccgacattcgccgctctttctccacgcgccggtcgccgcagacgcaagcccgcccgccgcagctgacgccgcgatctgcgagggtgcaagctagctctggccccgctgccggtgccgactgagatggacccgcgcttcacgctgccggccgccattggcggcggcgccggtcgggtgcaccaccggcgggcccactcggagtcgttcctatgcttctccgacgcggacctgctcctcgacccggacggagacctctccttctccgacctcgacttcccctccctctccgacgactccccggccgcctccgacccaaccccgcccccgccgctgccgcagccggccccggccccccgcccggccggcggggcccacacgcggagcctctccctcgacgccgccttcttcgagggcctcgcgtttcagggacccagcgggagcgccgggggtgggcccgggcacaagaggagcggctccatggatggggccacctcaccgtttgagggcgagtcggcgctctccagcggcctgccggactacgccaagaaggccatgcccgcagagaggatcgccgagctcgcgctcatcgaccccaagcgcgcaaagaggattctggcgaacaggcagtctgcagcgaggtcaaaggagaggaaggtcaagtacaccagtgaactggagaagaaggtccagactctgcagacggaggccactacgctgtcagcacagctcaccctgctccagagggatacaactggtctaactgctgaaaatagggagctcaagcttcggctgcagtccatggaagagcaggctaaactgcgcgacggtatgatctgctctttcctctgaaacattttggttcacctggctgccatcatcgattgctcttaaagcacaaaatttcactgccaagctttgaacgaaaccctgcgggaagaagtgcagcgacttaagatagctgcaggacaagtcgggaacatgaacgggaaccccttcaatggtggactccagcagcagattccatcctacttcgtgcagcagcagcagatgtcgtactttggtggccaccaggctcaggctcagcatcacagtcaaaaccatcatcaccggagtccatcaaacgggagacagtcgcccagtgatcagtccctaaacgactccatggatttcgtttgaggacaatataccggggcaagtattacatcgtataccaactgcagttcagcaccgtaaagatagctagtgtacaatgcatgcatatgcctcattggtagtgtagtttagttctttgtatcgttaatctggaagtggctccagtatgtcaaaatggtgttttattttcttctttcctgggttgtggagtaatgtgttagacagaactagccacctttagcaatttatgtaaatcttgttagcctttcttttctccatggtggaaggttcttgttatctgtcattgttttgtgcccctttcactgtctcgggtttctaagttactattagacctgagcatggccgctcgatccggtctaacggatggccggatgggtatgagcactgttataatttatgactcgtaataattcacatagcaatgattttttacctaaaacctgttccaacctgaaaaatatctaacctaaagtaaaaaaaaa

SEQ ID NO: 35249 - DNA, 2134 bp, Zea Mays
aacacaagctcatcatcgtctatatattctgaaatacatatcaatggctgtgctggagcggcgttcccgcctcccggcggtggcgcagcttgccgtggcgttctggctggcggccaccagcgcctgcctgtgccgtagcgtcatccctgacccggacctggaaccgggccgcccgtgtgtcggtcgtctgttctgtcgttggccaccgctgccgctaccgtcgccgccgccacctccagtcgtcacacctcctccagctccggagacgacgactccgccaccgcgacaccaccatacccctccgttttgtccttcccctctgtgtcgtcatcgcctgccgccccacctgccgaggccgatctacccaccaccgacaccgttgtccccggagtccccgccgctgcctccaccgccgccggtcgtcacccctcctcctccgacgccgcgacatccataccctacccctcgtccatgtatttatccgttctgtcctcttcggccgccggtctgcttatgtagtatatctatgtttgaataaaaagtaataatgtagtatttgtactgtagtatcacgcgatccgagaaaccaaaattattccattttataacaacatgtgataaaaaaaccgtgatgcatgattttaaggagacaatcaagctactctccgatgtccctagctccctctataagaaaggagatcaatatagtggagattggcctctctgcaaggaaggggcactaccgaaatcgggcgctttgccaagtgcctgcccgataaacactcggcaaagagagctcagcgaacagtacatcaatacggtggagactaaggaatataatgaaaaagagcgggaaaatctcatcctgatctgtaccgtattcctgtttataccgatcatttttgtattttttttggaaaaaaatataaaaacgagacaggaaacaaaacaaggttgaacgggagcgacaacggttcaaggttttctcccatatttacagtatctcatatttgaccaggataatctcgtttctatctcgttttaagttagacgggagatatttgtattacaaatctgtgataaactgatatgttatattatcacacgtgaacttaataattgttacatgttattattgttggaaatttagaatagattgtttattgatcaatgttggatgttggtttccactttatcgtaatcctattaagtattgactacacaagtacaacatgctctacttgtttttgcttagctggctccataagtctaaccaatgccatgcagcctaaaagtgcatctagcccctttgtcggttttggtgatttggatatacaatggtagaaaggtataacggatcaacaccaaacaatgatggtgatattccataagtaaggtcgtttggatatatggagatggatattcaatgaagatcaaaagataaaagatcgtcaatcagataatcatacatcaaaggagacaatgcacaatggatataatatggtctttatattggtttgcttatatgaacaaagatatggaaaatcactatgcattgatatgatcaagctaggaatatgaagatggagattgaagtaaatgagaagaagtgccaatctaaaatcctaggatataaggaactgtgaattggtttgaccatattgatgttggttcatatatgcttctatgagaatcaaactagagcttgattgatcttagcatttttatctagatgacattcaggtaaggttcacaatattgaagaaatgattctctcaatggatgctcaatatgatgtgactcaagaatgtcttgatagggtgaagatagcaaggaaagggcttcgagggactaggcgaaggtgaaggccaagcggcggattgtggactgaggtgccatggctaaggtgaagaagagagtacttgcactaagtcgatgaactaactagccttgaagagttatattgtgttgatgcatcagtaaggtgacttgaagccatgatttgaactcatatatggtgaaatgattcaagtcataggattgatttgtgttttcttcaaaaggtgagacaaatatgtttgtgatccttgtgaagcaacgccatggacaaatcacacatgacacaccaatgact

SEQ ID NO: 35250 - DNA, 975 bp, Zea Mays
tctctttcctcctctcccgtgccgaccacgttttgggtcgtcgatcctgggtcacggaacgcctttgaccccgaaccttgtgactatgggattgaccttggaagtgtcacagagtctagttctctacatgaatattctgcttatggcacagttcagccaccatcacaatttggtggtggaagaaatttctgaaaggtgtagtgtcattgacatgtgaatatctgaagctcatatcagttctactgattgttgtatgtgaatgacttgttcatttaggcagtagacacccaacctagcaacagaagaaacaggttgctctcttccattttgtgaatgtactgattgtaaatctgttgtccacttaactgtatggaatatggaagcatcatgttgtaggaaactaaataagaatttgtttttgaagtctgtaccatttatatgctagctaaacaaaccagtgagcactataatagacttcaccacgtgacactgattgccaaattcaaccataaagttctttaccttggaaggttattcactgaagcatggtcttaagggactcccaacatttttggtacagtcagctcttgttcagtaaattatgtaactgtttatgggtggcatacttatttaagagtttgagttgagaagcaaaactgggtcatgaaaaaaaatgttctgtacatacttcagttttaggagcatataaatccattggaatagctgttgaagcaattggctaaacttccgggcctcctttggatcaaaggatgatttcctgaatcctgtgtttttcttgtgtttttgaactaattcttatgaaattcttgcgtttcaaagtttcaaaggaggtcttaagtttgaatcactgatagagttgaaggcttgagtcatatatccactatccaggaaccaagcctggtgcatgaaggccatgcaaatatgagggtaagcgtttcgacttttcgtgtccct

SEQ ID NO: 35251 - DNA, 3600 bp, Zea Mays
ttcgcggagaacagcgcgtcagcgcctacggcttctgcttgtctctcccgttccactccaaaccctaggggcgaatctccggctaatcggcggcgggcgcagccacgctgtctgtgcagggcttgtgcggccttaggacgcaggggcgttgcttggggctcccggtgggtggctacgaagggctgtggcggcccgcggccaggggcaagtcggcagcggcaagcaaccggggtgctgggcgtgggtgggctgctgggacgcctgcggcagcggtaaaaagtcgagcctcgaccgtcctgaggcaggagcagagcagctgagctggtttggtactctgttgattctccattggagacactagtgatggaaggtactaccatttctattgagattgatggggaggccatctgtcttgacagtgtcggagataatgaacaagaagctgcggagaatggagaaatgcaccaaacaatttacactgatgaaaatggggaacaagtagcctttgacaaccaagaacaggggagggaggaagatctggcaggaaatggagaagaggatagggaccataattctatcattccaagccgtgaggagttgactgaagaattaagaaataaagtcgcatatagtgaggaagaagcttacaggttgtactgtgactatgggcaccgcatgggctttagtgttcgaaaaggaaagcagtactactttactggaaccaaaaccatccgtactaaagattattactgctcaaaagaaggcttgaaggatgatgaacagcttactgaagcaaactttaataagccggagaccagaactaattgcaaagcgatggtccgttttagggttgattctgaaggtcaatggcgagttattcaaataattcctgaacacaatcatgagctagttcgaccggaagaaatacacttactgagatcagtgaggactctttctgttccgaaatctggggtgctgaatgcaatggtgaatgctgaaattcaagcaatgcatgataatttgcatataaatgaagatggtacagaatgccacagccaacttagcatccgtagttacacactgcttgaaccaaaggaatgtgaggcccttgttggatatttcaagcgcagaacaaatgaacaatgtatgttctattgggatgtagaagtagatcaagaaggccgaatgactaattttttctggagggatgggaaaagccgcgttgactatgacagtttcagagatgttgtgatatttgatacatcatatctcaccaacaagtataatatgatatgtgctccatttattggtttgaacaaccaccgacaaaatgtcatgttcggctgtgcatttttgttagatgaatccttaacatcctatgaatggttatttaagtcattcttggagtcagtgggtggtcgtccccctgaaacaatctttactgatcagaatgaatttatctccaaggcaatcgaagttgttcttcctgggacacgccattgtctttgtcaacagctcattgaaaaaaaacttatgtcccatttaggcagtatcaatgattctggaacacttcatagcttgttttcaaagtgcatgagagaatgtgagtcagaagcagaattagatgaaacatgggcgatgatgcatcatgagtataacatgcaggaacacccgtggctcactgatctgtaccagcaaaggcataaatggtgctcggctcttcataaggatgcatttgatggtgggattgaatcaatggataggaatgagagtttgaacaatgttttgagcaacattgacgatgaatcagcttcgctttccacttttgtccttgagttggataaacttgcagggagttggcgtaaaactgagtctttagaggacattcagtgcaaccaagctgctccggagtgtacagttaagcataacagaattttgcaacatgccgctgaagtttacacacataaggtctataagtctattgaaacagattttctagatggatgtagtgctacttcatatcaggcagctcagtgtaatgaaacattgcataagtttgagttccttctggaaaatagtccaaatgtttcggtagttttccttaacacctctaccatggagttgagctgtacttgcaaaaaatttgagaccatgcgtatactttgttcacatgctctaaatgcacttgttctcaagaatgtagataggattcctgaaaggtatattttaaaccgttggacaaaatatgccagaaaaggaacatatccatttccagttgatgaatttgcagaacaagatcgcacagaagttgcatttgtgtaccgtaatagggctatgtggtttgtttatgatctgctgactaagagcaaaagtcatcataatacaagaaaactaattctggatgcacttgaaaatggagaaaaatcactggaaagtatgtgtgacctcaaaagattgcatatgaataccttggggaaagagaaagatggaagcagggttgaaaagagaaagaaaaaatcaactaagcaagagaaacattcaagaaatgttaaacaagcggttttgccccagacagctgacccggtttttgttgatccaccaaatcaagatcaatattttgctgcagaagatattgcatcaaaccaatctgttggtagacctttcttctaccagggatatcccatgactgttgtttcaacaagccagattcaggggcatactaatatgcattctgagcctcagtgtgcatctcaggaatattctgcttatggcacagttcagccaccatcacaatttggtggtggaagaaatttctgaaaggtgtagtgtcattgacatgtgaatatctgaagctcatatcagttctactgattgttgtatgtgaatgacttgttcatttaggcagtagacacccaacctagcaacagaagaaacaggttgctctcttccattttgtgaatgtactgattgtaaatctgttgtccacttaactgtatggaatatggaagcatcatgttgtaggaaactaaataagaatttgtttttgaagtctgtaccatttatatgctagctaaacaaaccagtgagcactataatagacttcaccacgtgacactgattgccaaattcaaccataaagttctttaccttggaaggttattcactgaagcatggtcttaagggactcccaacatttttggtacagtcagctcttgttcagtaaattatgtaactgtttatgggtggcatacttatttaagagtttgagttgagaagcaaaactgggtcatgaaaaaaaatgttctgtacatacttcagttttaggagcatataaatccattggaatagctgttgaagcaattggctaaacttccgggcctcctttggatcaaaggatgatttcctgaatcctgtgtttttcttgtgtttttgaactaattcttatgaaattcttgcgtttcaaagtttcaaaggaggtcttaagtttgaatcactgatagagttgaaggcttgagtcatatatccactatccaggaaccaagcctggtgcatgaaggccatgcaaatatgagggtaagcgtttcgacttttcgtgtccct

SEQ ID NO: 35252 - DNA, 3706 bp, Zea Mays
gtccggcctccagacatcaggcagctctcccgagcatgacgctgtctctgttcacaactcttccgagcacgccgccgtcagtcctttgtcatcatcatcagctcagatctagcagcttcgccttctcagtgatggaaggtactaccatttctattgagattgatggggaggccatctgtcttgacagtgtcggagataatgaacaagaagctgcggagaatggagaaatgcaccaaacaatttacactgatgaaaatggggaacaagtagcctttgacaaccaagaacaggggagggaggaagatctggcaggaaatggagaagaggatagggaccataattctatcattccaagccgtgaggagttgactgaagaattaagaaataaagtcgcatatagtgaggaagaagcttacaggttgtactgtgactatgggcaccgcatgggctttagtgttcgaaaaggaaagcagtactactttactggaaccaaaaccatccgtactaaagattattactgctcaaaagaaggcttgaaggatgatgaacagcttactgaagcaaactttaataagccggagaccagaactaattgcaaagcgatggtccgttttagggttgattctgaaggtcaatggcgagttattcaaataattcctgaacacaatcatgagctagttcgaccggaagaaatacacttactgagatcagtgaggactctttctgttccgaaatctggggtgctgaatgcaatggtgaatgctgaaattcaagcaatgcatgataatttgcatataaatgaagatggtacagaatgccacagccaacttagcatccgtagttacacactgcttgaaccaaaggaatgtgaggcccttgttggatatttcaagcgcagaacaaatgaacaatgtatgttctattgggatgtagaagtagatcaagaaggccgaatgactaattttttctggagggatgggaaaagccgcgttgactatgacagtttcagagatgttgtgatatttgatacatcatatctcaccaacaagtataatatgatatgtgctccatttattggtttgaacaaccaccgacaaaatgtcatgttcggctgtgcatttttgttagatgaatccttaacatcctatgaatggttatttaagtcattcttggagtcagtgggtggtcgtccccctgaaacaatctttactgatcagaatgaatttatctccaaggcaatcgaagttgttcttcctgggacacgccattgtctttgtcaacagctcattgaaaaaaaacttatgtcccatttaggcagtatcaatgattctggaacacttcatagcttgttttcaaagtgcatgagagaatgtgagtcagaagcagaattagatgaaacatgggcgatgatgcatcatgagtataacatgcaggaacacccgtggctcactgatctgtaccagcaaaggcataaatggtgctcggctcttcataaggatgcatttgatggtgggattgaatcaatggataggaatgagagtttgaacaatgttttgagcaacattgacgatgaatcagcttcgctttccacttttgtccttgagttggataaacttgcagggagttggcgtaaaactgagtctttagaggacattcagtgcaaccaagctgctccggagtgtacagttaagcataacagaattttgcaacatgccgctgaagtttacacacataaggtctataagtctattgaaacagattttctagatggatgtagtgctacttcatatcaggcagctcagtgtaatgaaacattgcataagtttgagttccttctggaaaatagtccaaatgtttcggtagttttccttaacacctctaccatggagttgagctgtacttgcaaaaaatttgagaccatgcgtatactttgttcacatgctctaaatgcacttgttctcaagaatgtagataggattcctgaaaggtatattttaaaccgttggacaaaatatgccagaaaaggaacatatccatttccagttgatgaatttgcagaacaagatcgcacagaagttgcatttgtgtaccgtaatagggctatgtggtttgtttatgatctgctgactaagagcaaaagtcatcataatacaagaaaactaattctggatgcacttgaaaatggagaaaaatcactggaaagtatgtgtgacctcaaaagattgcatatgaataccttggggaaagagaaagatggaagcagggttgaaaagagaaagaaaaaatcaactaagcaagagaaacattcaagtatctcctttcacttgcattcgtcttgctttagcaatgattaagtttgattgaatagaatcattgtttttataggaaatgttaaacaagcggttttgccccagacagctgacccggtttttgttgatccaccaaatcaagatcaatattttgctgcagaagatattgcatcaaaccaatctgttggtagacctttcttctaccagggatatcccatgactgttgtttcaacaagccagattcaggggcatactaatatgcattctgagcctcagtgtgcatctcagggctatgcacagcttgcagggacgtcagatgcgagtgcgggctgcggcgacggtgacagcggccgtcgctgcgatggaggtggttgtgcccgtggttgtgcggggacggcggatgcgcccgcctgtctctttcctcctctcccgtgccggtgagccagaccacgttttgggtcgtcgatcctgggtcacggaacgcctttgaccccgaaccttgtgactatgggattgaccttggaagtgtcacagagtctagttctctacatgaatattctgcttatggcacagttcagccaccatcacaatttggtggtggaagaaatttctgaaaggtgtagtgtcattgacatgtgaatatctgaagctcatatcagttctactgattgttgtatgtgaatgacttgttcatttaggcagtagacacccaacctagcaacagaagaaacaggttgctctcttccattttgtgaatgtactgattgtaaatctgttgtccacttaactgtatggaatatggaagcatcatgttgtaggaaactaaataagaatttgtttttgaagtctgtaccatttatatgctagctaaacaaaccagtgagcactataatagacttcaccacgtgacactgattgccaaattcaaccataaagttctttaccttggaaggttattcactgaagcatggtcttaagggactcccaacatttttggtacagtcagctcttgttcagtaaattatgtaactgtttatgggtggcatacttatttaagagtttgagttgagaagcaaaactgggtcatgaaaaaaaatgttctgtacatacttcagttttaggagcatataaatccattggaatagctgttgaagcaattggctaaacttccgggcctcctttggatcaaaggatgatttcctgaatcctgtgtttttcttgtgtttttgaactaattcttatgaaattcttgcgtttcaaagtttcaaaggaggtcttaagtttgaatcactgatagagttgaaggcttgagtcatatatccactatccaggaaccaagcctggtgcatgaaggccatgcaaatatgagggtaagcgtttcgacttttcgtgtccct

SEQ ID NO: 35253 - DNA, 3592 bp, Zea Mays
gtccggcctccagacatcaggcagctctcccgagcatgacgctgtctctgttcacaactcttccgagcacgccgccgtcagtcctttgtcatcatcatcagctcagatctagcagcttcgccttctcagtgatggaaggtactaccatttctattgagattgatggggaggccatctgtcttgacagtgtcggagataatgaacaagaagctgcggagaatggagaaatgcaccaaacaatttacactgatgaaaatggggaacaagtagcctttgacaaccaagaacaggggagggaggaagatctggcaggaaatggagaagaggatagggaccataattctatcattccaagccgtgaggagttgactgaagaattaagaaataaagtcgcatatagtgaggaagaagcttacaggttgtactgtgactatgggcaccgcatgggctttagtgttcgaaaaggaaagcagtactactttactggaaccaaaaccatccgtactaaagattattactgctcaaaagaaggcttgaaggatgatgaacagcttactgaagcaaactttaataagccggagaccagaactaattgcaaagcgatggtccgttttagggttgattctgaaggtcaatggcgagttattcaaataattcctgaacacaatcatgagctagttcgaccggaagaaatacacttactgagatcagtgaggactctttctgttccgaaatctggggtgctgaatgcaatggtgaatgctgaaattcaagcaatgcatgataatttgcatataaatgaagatggtacagaatgccacagccaacttagcatccgtagttacacactgcttgaaccaaaggaatgtgaggcccttgttggatatttcaagcgcagaacaaatgaacaatgtatgttctattgggatgtagaagtagatcaagaaggccgaatgactaattttttctggagggatgggaaaagccgcgttgactatgacagtttcagagatgttgtgatatttgatacatcatatctcaccaacaagtataatatgatatgtgctccatttattggtttgaacaaccaccgacaaaatgtcatgttcggctgtgcatttttgttagatgaatccttaacatcctatgaatggttatttaagtcattcttggagtcagtgggtggtcgtccccctgaaacaatctttactgatcagaatgaatttatctccaaggcaatcgaagttgttcttcctgggacacgccattgtctttgtcaacagctcattgaaaaaaaacttatgtcccatttaggcagtatcaatgattctggaacacttcatagcttgttttcaaagtgcatgagagaatgtgagtcagaagcagaattagatgaaacatgggcgatgatgcatcatgagtataacatgcaggaacacccgtggctcactgatctgtaccagcaaaggcataaatggtgctcggctcttcataaggatgcatttgatggtgggattgaatcaatggataggaatgagagtttgaacaatgttttgagcaacattgacgatgaatcagcttcgctttccacttttgtccttgagttggataaacttgcagggagttggcgtaaaactgagtctttagaggacattcagtgcaaccaagctgctccggagtgtacagttaagcataacagaattttgcaacatgccgctgaagtttacacacataaggtctataagtctattgaaacagattttctagatggatgtagtgctacttcatatcaggcagctcagtgtaatgaaacattgcataagtttgagttccttctggaaaatagtccaaatgtttcggtagttttccttaacacctctaccatggagttgagctgtacttgcaaaaaatttgagaccatgcgtatactttgttcacatgctctaaatgcacttgttctcaagaatgtagataggattcctgaaaggtatattttaaaccgttggacaaaatatgccagaaaaggaacatatccatttccagttgatgaatttgcagaacaagatcgcacagaagttgcatttgtgtaccgtaatagggctatgtggtttgtttatgatctgctgactaagagcaaaagtcatcataatacaagaaaactaattctggatgcacttgaaaatggagaaaaatcactggaaagtatgtgtgacctcaaaagattgcatatgaataccttggggaaagagaaagatggaagcagggttgaaaagagaaagaaaaaatcaactaagcaagagaaacattcaagtatctcctttcacttgcattcgtcttgctttagcaatgattaagtttgattgaatagaatcattgtttttataggaaatgttaaacaagcggttttgccccagacagctgacccggtttttgttgatccaccaaatcaagatcaatattttgctgcagaagatattgcatcaaaccaatctgttggtagacctttcttctaccagggatatcccatgactgttgtttcaacaagccagattcaggggcatactaatatgcattctgagcctcagtgtgcatctcagggctatgcacagcttgcagggacgtcagatgcgagtgcgggctgcggcgacggtgacagcggccgtcgctgcgatggaggtggttgtgcccgtggttgtgcggggacggcggatgcgcccgcctgtctctttcctcctctcccgtgccggaatattctgcttatggcacagttcagccaccatcacaatttggtggtggaagaaatttctgaaaggtgtagtgtcattgacatgtgaatatctgaagctcatatcagttctactgattgttgtatgtgaatgacttgttcatttaggcagtagacacccaacctagcaacagaagaaacaggttgctctcttccattttgtgaatgtactgattgtaaatctgttgtccacttaactgtatggaatatggaagcatcatgttgtaggaaactaaataagaatttgtttttgaagtctgtaccatttatatgctagctaaacaaaccagtgagcactataatagacttcaccacgtgacactgattgccaaattcaaccataaagttctttaccttggaaggttattcactgaagcatggtcttaagggactcccaacatttttggtacagtcagctcttgttcagtaaattatgtaactgtttatgggtggcatacttatttaagagtttgagttgagaagcaaaactgggtcatgaaaaaaaatgttctgtacatacttcagttttaggagcatataaatccattggaatagctgttgaagcaattggctaaacttccgggcctcctttggatcaaaggatgatttcctgaatcctgtgtttttcttgtgtttttgaactaattcttatgaaattcttgcgtttcaaagtttcaaaggaggtcttaagtttgaatcactgatagagttgaaggcttgagtcatatatccactatccaggaaccaagcctggtgcatgaaggccatgcaaatatgagggtaagcgtttcgacttttcgtgtccct

SEQ ID NO: 35254 - DNA, 4823 bp, Zea Mays
cgcggggatattggtccggcctccagacatcaggcagctctcccgagcatgacgctgtctctgttcacaactcttccgagcacgccgccgtcagtcctttgtcatcatcatcagctcagatctagcagcttcgccttctcagtgtcggagataatgaacaagaagctgcggagaatggagaaatgcaccaaacaatttacactgatgaaaatggggaacaagtagcctttgacaaccaagaacaggggagggaggaagatctggcaggaaatggagaagaggatagggaccataattctatcattccaagccgtgaggagttgactgaagaattaagaaataaagtcgcatatagtgaggaagaagcttacaggttgtactgtgactatgggcaccgcatgggctttagtgttcgaaaaggaaagcagtactactttactggaaccaaaaccatccgtactaaagattattactgctcaaaagaaggcttgaaggatgatgaacagcttactgaagcaaactttaataagccggagaccagaactaattgcaaagcgatggtccgttttagggttgattctgaaggtcaatggcgagttattcaaataattcctgaacacaatcatgagctagttcgaccggaagaaatacacttactgagatcagtgaggactctttctgttccgaaatctggggtgctgaatgcaatggtgaatgctgaaattcaagcaatgcatgataatttgcatataaatgaagatggtacagaatgccacagccaacttagcatccgtagttacacactgcttgaaccaaaggaatgtgaggcccttgttggatatttcaagcgcagaacaaatgaacaatgtatgttctattgggatgtagaagtagatcaagaaggccgaatgactaattttttctggagggatgggaaaagccgcgttgactatgacagtttcagagatgttgtgatatttgatacatcatatctcaccaacaagtataatatgatatgtgctccatttattggtttgaacaaccaccgacaaaatgtcatgttcggctgtgcatttttgttagatgaatccttaacatcctatgaatggttatttaagtcattcttggagtcagtgggtggtcgtccccctgaaacaatctttactgatcagaatgaatttatctccaaggcaatcgaagttgttcttcctgggacacgccattgtctttgtcaacagctcattgaaaaaaaacttatgtcccatttaggcagtatcaatgattctggaacacttcatagcttgttttcaaagtgcatgagagaatgtgagtcagaagcagaattagatgaaacatgggcgatgatgcatcatgagtataacatgcaggaacacccgtggctcactgatctgtaccagcaaaggcataaatggtgctcggctcttcataaggatgcatttgatggtgggattgaatcaatggataggaatgagagtttgaacaatgttttgagcaacattgacgatgaatcagcttcgctttccacttttgtccttgagttggataaacttgcagggagttggcgtaaaactgagtctttagaggacattcagtgcaaccaagctgctccggagtgtacagttaagcataacagaattttgcaacatgccgctgaagtttacacacataaggtctataagtctattgaaacagattttctagatggatgtagtgctacttcatatcaggcagctcagtgtaatgaaacattgcataagtttgagttccttctggaaaatagtccaaatgtttcggtagttttccttaacacctctaccatggagttgagctgtacttgcaaaaaatttgagaccatgcgtatactttgttcacatgctctaaatgcacttgttctcaagaatgtagataggattcctgaaaggtatattttaaaccgttggacaaaatatgccagaaaaggaacatatccatttccagttgatgaatttgcagaacaagatcgcacagaagttgcatttgtgtaccgtaatagggctatgtggtttgtttatgatctgctgactaagagcaaaagtcatcataatacaagaaaactaattctggatgcacttgaaaatggagaaaaatcactggaaagtatgtgtgacctcaaaagattgcatatgaataccttggggaaagagaaagatggaagcagggttgaaaagagaaagaaaaaatcaactaagcaagagaaacattcaagtatctcctttcacttgcattcgtcttgctttagcaatgattaagtttgattgaatagaatcattgtttttataggaaatgttaaacaagcggttttgccccagacagctgacccggtttttgttgatccaccaaatcaagatcaatattttgctgcagaagatattgcatcaaaccaatctgttggtagacctttcttctaccagggatatcccatgactgttgtttcaacaagccagattcaggggcatactaatatgcattctgagcctcagtgtgcatctcaggtgcttaattgagcttttttattctatatcttgtcatagttgatggtggtatgtattgaggagtaaatacaattggaaactagaaatcgttcctagtaaactaaattaatatgagcattcttaacgttaagcaaatgaacacatgtaataagctaacctggcatcattgcttactcttttcttttattcttaaatttccaagacatgcacaaaacttgcttcgaagttctaactatttatcaagacagacttcgcagcaaaagaacaaggctggatttttgtaggttagcttggtttaggccatacaagaagggatcgagtacgaaatgatgatattcgttgataggctagggttaacaccaattgaataaaaacttttttaacactggttgagatggtttggacatgtccaacagagacctccaatgacgctaatgcgtagtgaaattctaaggcgcgatagcaatgagaagagaggtagggaaagaccgaagttgacatggaaagagacaataaaaggagacttgaagggaagaaatataaccaaagatttagccttgaatagaagtgtatgaaaaatagctatccatgtgtcggaaccttgtgattttttgttgggtttcaactctagcgggactaaaaggttttttgttgttgttgttgcttggtctagtttctagatattccaagtccttttaatcagattgtgtatattcttgtcccctcacttcttcaattgggggattgaccatagtcacaacgttcacgggtaatcggggttgatgttcgacaaatgaaagagtacggtatgatgggggggggggggtatacctcttcggaacgtgaatcttgaattgggtacttgaattcaagtactatgggttgatgaacccggatcggttcaacatattaagggccgtgaaccttgtgtttttgggaaaaagagagagggaaaatctatcgtgaatccatattccagaaaaaacaaatgactcttaatctctttcctgatataaatagagggagaaaagttatctcttcgtctcctgtcctgtgactaatcatacccctgtctccttgactccccatccatggctcgagctcgatgctaacgtggcgacggctgtgcacggcctgcggcaatgtcgaggcctgcggcaagggctatgcacagcttgcagggacgtcagatgcgagtgcgggctgcggcgacggtgacagcggccgtcgctgcgatggaggtggttgtgcccgtggttgtgcggggacggcggatgcgcccgcctgtctctttcctcctctcccgtgccggtgagccagaccacgttttgggtcgtcgatcctgggtcacggaacgcctttgaccccgaaccttgtgactatgggattgaccttggaagtgtcacagagtctagttctctacatgaatattctgcttatggcacagttcagccaccatcacaatttggtggtggaagaaatttctgaaaggtgtagtgtcattgacatgtgaatatctgaagctcatatcagttctactgattgttgtatgtgaatgacttgttcatttaggcagtagacacccaacctagcaacagaagaaacaggttgctctcttccattttgtgaatgtactgattgtaaatctgttgtccacttaactgtatggaatatggaagcatcatgttgtaggaaactaaataagaatttgtttttgaagtctgtaccatttatatgctagctaaacaaaccagtgagcactataatagacttcaccacgtgacactgattgccaaattcaaccataaagttctttaccttggaaggttattcactgaagcatggtcttaagggactcccaacatttttggtacagtcagctcttgttcagtaaattatgtaactgtttatgggtggcatacttatttaagagtttgagttgagaagcaaaactgggtcatgaaaaaaaatgttctgtacatacttcagttttaggagcatataaatccattggaatagctgttgaagcaattggctaaacttccgggcctcctttggatcaaaggatgatttcctgaatcctgtgtttttcttgtgtttttgaactaattcttatgaaattcttgcgtttcaaagtttcaaaggaggtcttaagtttgaatcactgatagagttgaaggcttgagtcatatatccactatccaggaaccaagcctggtgcatgaaggccatgcaaatatgagggtaagcgtttcgacttttcgtgtccct

SEQ ID NO: 35255 - DNA, 1137 bp, Zea Mays
ctccttgagccatgtttccgcggggatattggtccggcctccagacatcaggcagctctcccgagcatgacgctgtctctgttcacaactcttccgagcacgccgccgtcagtcctttgtcatcatcatcagctcagatctagcagcttcgccttctcaggaaatgttaaacaagcggttttgccccagacagctgacccggtttttgttgatccaccaaatcaagatcaatattttgctgcagaagatattgcatcaaaccaatctgttggtagacctttcttctaccagggatatcccatgactgttgtttcaacaagccagattcaggggcatactaatatgcattctgagcctcagtgtgcatctcaggaatattctgcttatggcacagttcagccaccatcacaatttggtggtggaagaaatttctgaaaggcagtagacacccaacctagcaacagaagaaacaggttgctctcttccattttgtgaatgtactgattgtaaatctgttgtccacttaactgtatggaatatggaagcatcatgttgtaggaaactaaataagaatttgtttttgaagtctgtaccatttatatgctagctaaacaaaccagtgagcactataatagacttcaccacgtgacactgattgccaaattcaaccataaagttctttaccttggaaggttattcactgaagcatggtcttaagggactcccaacatttttggtacagtcagctcttgttcagtaaattatgtaactgtttatgggtggcatacttatttaagagtttgagttgagaagcaaaactgggtcatgaaaaaaaatgttctgtacatacttcagttttaggagcatataaatccattggaatagctgttgaagcaattggctaaacttccgggcctcctttggatcaaaggatgatttcctgaatcctgtgtttttcttgtgtttttgaactaattcttatgaaattcttgcgtttcaaagtttcaaaggaggtcttaagtttgaatcactgatagagttgaaggcttgagtcatatatccactatccaggaaccaagcctggtgcatgaaggccatgcaaatatgagggtaagcgtttcgacttttcgtgtccct

SEQ ID NO: 35256 - DNA, 3452 bp, Zea Mays
cattttttgcatgtttggaagatagcttcgctgggataccggcccacccttgactccttgagccatgtttccgcggggatattggtccggcctccagacatcaggcagctctcccgagcatgacgctgtctctgttcacaactcttccgagcacgccgccgtcagtcctttgtcatcatcatcagctcagatctagcagcttcgccttctcagtgatggaaggtactaccatttctattgagattgatggggaggccatctgtcttgacagtgtcggagataatgaacaagaagctgcggagaatggagaaatgcaccaaacaatttacactgatgaaaatggggaacaagtagcctttgacaaccaagaacaggggagggaggaagatctggcaggaaatggagaagaggatagggaccataattctatcattccaagccgtgaggagttgactgaagaattaagaaataaagtcgcatatagtgaggaagaagcttacaggttgtactgtgactatgggcaccgcatgggctttagtgttcgaaaaggaaagcagtactactttactggaaccaaaaccatccgtactaaagattattactgctcaaaagaaggcttgaaggatgatgaacagcttactgaagcaaactttaataagccggagaccagaactaattgcaaagcgatggtccgttttagggttgattctgaaggtcaatggcgagttattcaaataattcctgaacacaatcatgagctagttcgaccggaagaaatacacttactgagatcagtgaggactctttctgttccgaaatctggggtgctgaatgcaatggtgaatgctgaaattcaagcaatgcatgataatttgcatataaatgaagatggtacagaatgccacagccaacttagcatccgtagttacacactgcttgaaccaaaggaatgtgaggcccttgttggatatttcaagcgcagaacaaatgaacaatgtatgttctattgggatgtagaagtagatcaagaaggccgaatgactaattttttctggagggatgggaaaagccgcgttgactatgacagtttcagagatgttgtgatatttgatacatcatatctcaccaacaagtataatatgatatgtgctccatttattggtttgaacaaccaccgacaaaatgtcatgttcggctgtgcatttttgttagatgaatccttaacatcctatgaatggttatttaagtcattcttggagtcagtgggtggtcgtccccctgaaacaatctttactgatcagaatgaatttatctccaaggcaatcgaagttgttcttcctgggacacgccattgtctttgtcaacagctcattgaaaaaaaacttatgtcccatttaggcagtatcaatgattctggaacacttcatagcttgttttcaaagtgcatgagagaatgtgagtcagaagcagaattagatgaaacatgggcgatgatgcatcatgagtataacatgcaggaacacccgtggctcactgatctgtaccagcaaaggcataaatggtgctcggctcttcataaggatgcatttgatggtgggattgaatcaatggataggaatgagagtttgaacaatgttttgagcaacattgacgatgaatcagcttcgctttccacttttgtccttgagttggataaacttgcagggagttggcgtaaaactgagtctttagaggacattcagtgcaaccaagctgctccggagtgtacagttaagcataacagaattttgcaacatgccgctgaagtttacacacataaggtctataagtctattgaaacagattttctagatggatgtagtgctacttcatatcaggcagctcagtgtaatgaaacattgcataagtttgagttccttctggaaaatagtccaaatgtttcggtagttttccttaacacctctaccatggagttgagctgtacttgcaaaaaatttgagaccatgcgtatactttgttcacatgctctaaatgcacttgttctcaagaatgtagataggattcctgaaaggtatattttaaaccgttggacaaaatatgccagaaaaggaacatatccatttccagttgatgaatttgcagaacaagatcgcacagaagttgcatttgtgtaccgtaatagggctatgtggtttgtttatgatctgctgactaagagcaaaagtcatcataatacaagaaaactaattctggatgcacttgaaaatggagaaaaatcactggaaagtatgtgtgacctcaaaagattgcatatgaataccttggggaaagagaaagatggaagcagggttgaaaagagaaagaaaaaatcaactaagcaagagaaacattcaagaaatgttaaacaagcggttttgccccagacagctgacccggtttttgttgatccaccaaatcaagatcaatattttgctgcagaagatattgcatcaaaccaatctgttggtagacctttcttctaccagggatatcccatgactgttgtttcaacaagccagattcaggggcatactaatatgcattctgagcctcagtgtgcatctcaggaatattctgcttatggcacagttcagccaccatcacaatttggtggtggaagaaatttctgaaaggtgtagtgtcattgacatgtgaatatctgaagctcatatcagttctactgattgttgtatgtgaatgacttgttcatttaggcagtagacacccaacctagcaacagaagaaacaggttgctctcttccattttgtgaatgtactgattgtaaatctgttgtccacttaactgtatggaatatggaagcatcatgttgtaggaaactaaataagaatttgtttttgaagtctgtaccatttatatgctagctaaacaaaccagtgagcactataatagacttcaccacgtgacactgattgccaaattcaaccataaagttctttaccttggaaggttattcactgaagcatggtcttaagggactcccaacatttttggtacagtcagctcttgttcagtaaattatgtaactgtttatgggtggcatacttatttaagagtttgagttgagaagcaaaactgggtcatgaaaaaaaatgttctgtacatacttcagttttaggagcatataaatccattggaatagctgttgaagcaattggctaaacttccgggcctcctttggatcaaaggatgatttcctgaatcctgtgtttttcttgtgtttttgaactaattcttatgaaattcttgcgtttcaaagtttcaaaggaggtcttaagtttgaatcactgatagagttgaaggcttgagtcatatatccactatccaggaaccaagcctggtgcatgaaggccatgcaaatatgagggtaagcgtttcgacttttcgtgtccct

SEQ ID NO: 35257 - DNA, 1925 bp, Zea Mays
cacagatacaccaccgtccagcctcttgccacggagggtacacgctactctcgcaactgctccacgcccattccgtgttatcttattctggccttagtctgcccgaggcaaggcttacccatgatgaggcatgtgaccagttaaagggtcctcggtcatcaagcctacatcgacacggtccttaatcgactcagacggagacactacgccgagactcctttctcgtgcaagtcacccgcccggtctcagcttaatcatttcaacccaaagtttggtacctggcagaggtacatcttttccgatgttgaacccatcacggccgtgatggatccaccatcaagttttattttcgaaaacatcccacccacttttgccacatcatcttttgtaaaaacaaaacattttgtttttctaaagcaaggctaagcatcaaaaatcttttgtaaaacgggtgatcaaggaaggtaatcaaattcaaggaaggtaatgcaggaattgttttatcaatcaactcctatcacctaatgcatcaagcaagtgagaaagattttaaaaacatcaaggagggtggcaaatgcaccggggcttgcctgagtaacactaggttagtgttgttagatgacgtccacttgacgatcagcctttgtcctggcacttgatcagatcatcccatcttcaggttcgtccatcagcaccatcctgcggattagcccgtgcttggggttgacttggcttgtcttccgcatcacgcgattatttatcgtacctcatgagatacacgatgcacatgtatgagcgcgagtataaggaatatacaagatagataatctacactaaaagggatgaaacacttaaaagcaagcattaagcatcatggatatcacagcagggcatcgactacatctattaaccaaatcggcataataacactcgaacatctatttttatttctagcttttttttagtaactctttaaattgtgtatcttaattacttgatttactgatctatctaaatcgatcatcacaatatacacatgctaaattaataatatttattgtgaccaacaattttatttaatctatttatagatctagttgacgggaatacgaatcaacttaccctgactaatttgacgagatagtcagaagcatgactacgggttccgattgacgtcacccaggggccttcttttcttcggtaatcaattgctgaagatcttttcctcgactgaataattttgatgaatcgaacttgagtcgcgcaggatgttcgagctttttgtcgcgcacttggtgaacatcacgctgcttgctccgtctttacccgatttttggggtttcttggtgacttgcggacgacgagatcgtgtttagagcgagctggcgaggtggggtttgagcagaggatgacaggttcgacgactcgacggtaaacgcgagcacgcacgaaacccgacgacgaggacctaggatgtgcgacacacgacacgcaatcagtctgtcgtgcgacctcgcgatgacgacgaacagagagcttcgcgcgcggccaacagatagcttagcgatgacgacgaacagagagcttcgcgcgcggccaacagatagcttgcgcgcagggacttcccggcgcacggcgcgtaaggagtaggatgcacgccggcgagttgagcgacggcagggagctcaacgcgcggcatcggagagctcggccgccataggagcagggaacaagcgctggagctgggcgcagcgtacgtgtgcagagggctcgacgacggccggcagagggagctggggtacagggagacgagcggccgaactggagcagtgcaggctccatggccgagggccagggccgctgggcgagatccgagccggggagaagcgctgcgagagctttccggcgaggtcgcggccaggtat

SEQ ID NO: 35258 - DNA, 1372 bp, Zea Mays
atttcctggactttgttctcatccaaccaccgctctcccctggatattttcctccgcgttcaacaggtcgtgccttctccctcttacttccccagcacaacgcctgggcgttttgctctcagcgctcgacctccctctgtctttctcctctagttcgatgtggaactcgcccagcactccctgctcgacgtatttgccgtcgcttccctggccggagtggcagcagcactcaggatcttctcccacgcgcgctccttccttgctcctctctcatggccgccatgaaatttgcccatgttgtacctcctctcgccggagctcgccgaacgttgctccttggacgggcttcccagcaagctccatcgcgttgtcgccttggtccgagctcgcccatcccctgctcttccatggccacgccctcagctcgcgcagcttgcttgtggcccggtcactctccctcagcctcagccttgatctatcacggtccggctcgccgtcaacccgctcggactctgccctggccaagcctttctgctcgtgccgttgtgccgttgtcgtcattcgtctccatgtggtggatacaacaacgtcgtcgtttactccatggggttcatcgtcgactttgtcatccgaagagtgatcctagagttggataaaaatatgagaaaagtccgtgcagcaattgccagaagctcgaccggatatccaaactgaaaaccgtcgttgtcctcgcggttatcaaatcgattcgatcgtggtacgttaattaatcacgcgatgcggaagacaagccaagtcaaccccaagcgcgggctactccgcatggtgaagctgaaggacgaacgcaaggatggatgacctgacaagtgccaaaacaaagaatggtcgtcaagtgctcatcgtctaacaacactaacctagtgtttattccaggcaagcctcggtgcatgcaacccctttccttgtgtttttaaaatacttttcgcacactttaagtctagtgaaatgtgcattaggttcataggagttgcttggaaccctttgatgcattgctttccttgatatccatacctttatagatacttctgtgaagtatcaaaattatgatttacaaaaatgcttagccttgcttagatcttgtggatagaggttgtcctcaatttaacccgggagaggatggctttctacctgcaagaatattttcatttggagcaatagtgggatcttactgcaaagttccctgtgatgctctttcatcctaaggaacagacacaatcctaaggatgaaaatacttaaattgagacttgggttaggaacaggtgatgttctacccaggttgattaaggattggatgcgtatgttggcctgctg

SEQ ID NO: 35259 - DNA, 1268 bp, Zea Mays
tatgtttcttgccaactttaaatctttggatataaatacctggcaaaagttcatctactacaaaatattcaccacatcaaatattcgggacaaaaacagatgaatttatccgaatccgaaatatttactatttccgttataaaaaaatggaaaatggaaaatggaaaatatcccagagatcctatcctatcacgccgtcccctgtccagattcttttttttttctcatctgcagtcatcgttctcatccgcgcacaggggggaaaaatcaaaaaaaaaacaacagaaaagaaaatatctagctccttgggaaagctggtgtgcatacgtctcttgctaattatcatttcctggactttgttctcatccaaccaccgctctcccctggatattttcctccgcgttcaacaggtcgtgccttctccctcttacttccccagcacaacgcctgggcgttttgctctcagcgctcgacctccctctgtctttctcctctagttcgatgtggaactcgcccagcactccctgctcgacgtatttgccgtcgcttccctggccggagtggcagcagcactcaagatcttctcccacgcgcgctccttccttgctcctctctcatggccgccatgaaatttgcccatgctgtacctcctctcgccggagctcgccgaacgttgctccttggacgggcttcccagcaagctccatcgcgttgtcgccttggtccgagctcgcccatcccctgctcttccatggccacgccctcagctcgcgcagcttgcttgtggcccggtcactctccctcagcctcagccttgaactatcacggtccggctcgccgtcaacccgctcggactctgccctggccaagcctttttgctcgtgccgttgtgccgttgtcgtcattcgtctccatatggtggatacaacaacgtcgttgtttactccatggggttcatcgtcgactttgtcatccgaagagtgatcctagagttggataaaaatatgagaaaagtccgtgcagcaattgccagaagctcgaccggatatccaaactgagaaccgtcgttgtcctcgcggttatcaaatcgattcgatcgtggtacgttaattaatcgcgcgatgcggaagacaagccaagtcaaccccaagcgcgggctactccgcatggtgaagctgaaggacgaacgcaaggatggatgacctgacaagtgccaaaacaaagaatggtcgtcaagtgctcatcgtctaacaacactaacctagtgt

SEQ ID NO: 35260 - DNA, 2005 bp, Zea Mays
attgttttgggtccggaaaataaaatccaattttctcagtctcgagcgcccgcgtccctcgccccgtcgcgacttcgcgagtcgccccgtcccaggctcccagcgaccccgccctccggcagtccggcgcgggggctcctctccgatccggtgagccgaacgaggaccccaactccccgaagaaagcggccacagccagagccagggtggctcggctctcctctcacagactgcgccgcagcgcctagcgctcggctggcagccgccccggccggtcggccccgcccctgctgcctacatccgcctgcagccagaagatctgcctccagcgaccgccctgcctgcccttgtggcttctgtggttctgcacaccagcacacgcacttgtccccaaacaacggcggcggcgatgagtatctcagaagagcttcccggcgaaggatctgacggtgaggaggaggtcttcatcaacgaggaggacatcatccacgagataaccatcgacgaagaagatctccccgaccgcgacgacgaagatgacgacgtcgtcaacgggatggttgattccgaagacatcgatgattctacatacgcatttcaaggccaccaagatgaagtcttcattgtcgcctgcagtcctacagattcatcacttgtggcttctggaggcaaagatgataggggattcctgtggaggattggatcagaagagggtgccctggagctgactggacataaggatactgtcggcacagtggctttcagttcagatggaaatttgttggcttgtggaagttttgatgggcaaataaatgtgtggaatacagctacacgaactctcaagggaacccttgagggttccgggtcaggttttgagtggcttaaatggcattctcggggacatttgataatcgcaggatcagaggattgtaatgtatggatgtggaatgccgaccataatgccattctgaatacctttgctggacatagtaacacagtgacatgtggtgattttactccagatggtaaacttatatgcactggatcggatgatgcgtctttgaggatatgggacccaagaagtgcacaaagcagacatgttgttcgaggccatggctaccattctgatggattgacatgcttatcgatgacttcggattcacaaacggttgttagcggctccaaggacagttctgtgcacattgtgaatttaaactcgggccaggtcgttggctcattagcaggccacaccaattctattgagtgccttggtatctcgtcaagctatggctgggtagctacagggagcatggatcaaaagctgatcatctgggacctcacgcaccaatccagccgatgcatttgcgaacatgatgttcgtcaaggtacgttgcgtcaggatgcattgacggcaaggtgcgcatctgggacagcctctctggagcctgcgccagggagttcagtgggcatgcagatgtagtacagtcgctggccatcactgctgacggcaacaccatggtctccgcctcatcagatggctccgcccgtgtgtttgacatctccatgttcaagtgaaggaaaccgggacggagtacatgtttatgctatggcttgattgtgatgcacgattgatcatggcatgccatggtaatatgcgattgtactactctgctcatggaaaaatcgtgcatttgtattgcatatgactccacttgtagtatctattacagcagaacaaaggatgtatttatatatattccgtttttcccctttggagagaaggaatcaattgtgatagcagtgatagaattcggacgggaattctgtctcaaaattatattaatatgagctagtttgggaaccccattttcctaagggcctgtttatttgattggaattgggttgaattgaaatttaattcttggctgatttgtttggcaagttatagaattggaaattaactttccatctatttcttgggctggaattagaagccaaaaaaaca

SEQ ID NO: 35261 - DNA, 2027 bp, Zea Mays
attgttttgggtccggaaaataaaatccaattttctcagtctcgagcgcccgcgtccctcgccccgtcgcgacttcgcgagtcgccccgtcccaggctcccagcgaccccgccctccggcagtccggcgcgggggctcctctccgatccggtgagccgaacgaggaccccaactccccgaagaaagcggccacagccagagccagggtggctcggctctcctctcacagactgcgccgcagcgcctagcgctcggctggcagccgccccggccggtcggccccgcccctgctgcctacatccgcctgcagccagaagatctgcctccagcgaccgccctgcctgcccttgtggcttctgtggttctgcacaccagcacacgcacttgtccccaaacaacggcggcggcgatgagtatctcagaagagcttcccggcgaaggatctgacggtgaggaggaggtcttcatcaacgaggaggacatcatccacgagataaccatcgacgaagaagatctccccgaccgcgacgacgaagatgacgacgtcgtcaacgggatggttgattccgaagacatcgatgattctacatacgcatttcaaggccaccaagtcttcattgtcgcctgcagtcctacagattcatcacttgtggcttctggaggcaaagatgataggggattcctgtggaggattggatcagaagagggtgccctggagctgactggacataaggatactgtcggcacagtggctttcagttcagatggaaatttgttggcttgtggaagttttgatgggcaaataaatgtgtggaatacagctacacgaactctcaagggaacccttgagggttccgggtcaggttttgagtggcttaaatggcattctcggggacatttgataatcgcaggatcagaggattgtaatgtatggatgtggaatgccgaccataatgccattctgaatacctttgctggacatagtaacacagtgacatgtggtgattttactccagatggtaaacttatatgcactggatcggatgatgcgtctttgaggatatgggacccaagaagtgcacaaagcagacatgttgttcgaggccatggctaccattctgatggattgacatgcttatcgatgacttcggattcacaaacggttgttagcggctccaaggacagttctgtgcacattgtgaatttaaactcgggccaggtcgttggctcattagcaggccacaccaattctattgagtgccttggtatctcgtcaagctatggctgggtagctacagggagcatggatcaaaagctgatcatctgggacctcacgcaccaatccagccgatgcatttgcgaacatgatgagggcgtgacatcgctgacatggctaggttcgtcaaggtacgttgcgtcaggatgcattgacggcaaggtgcgcatctgggacagcctctctggagcctgcgccagggagttcagtgggcatgcagatgtagtacagtcgctggccatcactgctgacggcaacaccatggtctccgcctcatcagatggctccgcccgtgtgtttgacatctccatgttcaagtgaaggaaaccgggacggagtacatgtttatgctatggcttgattgtgatgcacgattgatcatggcatgccatggtaatatgcgattgtactactctgctcatggaaaaatcgtgcatttgtattgcatatgactccacttgtagtatctattacagcagaacaaaggatgtatttatatatattccgtttttcccctttggagagaaggaatcaattgtgatagcagtgatagaattcggacgggaattctgtctcaaaattatattaatatgagctagtttgggaaccccattttcctaagggcctgtttatttgattggaattgggttgaattgaaatttaattcttggctgatttgtttggcaagttatagaattggaaattaactttccatctatttcttgggctggaattagaagccaaaaaaaca

SEQ ID NO: 35262 - DNA, 390 bp, Zea Mays
atggatgagaagagcaacgcgagcatcaggaactgcaagttgggcgtcgaggtcagactggtgagatgcgacgtcgtcgtcgggaatgtcgtcgagggggtcagccgcggcacgagcctgagcgacgcgtgccagggcgtcgcagatgtgcgcatcggcagcatcgtgctccctggtagcatcagcggcctcgcgctcaacgtcacgagcgcgcgtaagagtggttgcgcatgcgaactgcgctgcttggaggcgttgggcttcctccgcgccggtgacggtggcaacagagttggtctgagtgccggcgggggcaccaggcgccgagggttagggcgggcggtgggtggtcgtcgtccatggagcagtgcgcaggtgcagcagctgtag
